United States Patent Application Publication US 2023/0026259 A1 - sequence listing, part 48

SEQ ID NO: 139546 - DNA, 6336 bp, Homo sapiens
  Payload ID: 7370
  Gene Symbol: HR
  Gene Name: hair growth associated
  Uniprot ID: O43593
  ENST ID: ENST00000381418
  CDS Start-End: 1482-5051
tctcccgggagccactcccatgggcgcctctccagcccctggcctggaagcaccaggaaccctggggatggggcagaccctcacagcccggggtctggagccggtgtcggagctcatctgggcccatgacctctccagacatttggcaaaatcaaggcccttagaccagggacagacccaagcccaggccctcccagaggtcctaggacgcaaccctttgtgcccttgggctctggaagaggtttgggaagggtttggggtggaagatggcaaagagcagcttggccaggtgaggatgaggcagggcagacacaggccagtggggcgtgccatgtgccacagatggagaggaccaggagccagtggcccggcaggcacagcccggttggcgtgggccagagcgcccatcactgacccgtgagaactcgactgcccctgccagctctggcactgccccctcccagccgccccgccctagcaccctggggggcaccccgcccaaccgtggcctggtccggcccctcccgccctttgctccagttcccgggcttggcacctatagtgggggtgccgcccgcctgccaggctccggggccgggcccacgggagggtggggcggctgggaagctggcacgctgccccgggggagcctctctcggcaggcgcccgggtgccgcgggggggagggggaacaaagggctcattctccccgtgcgcagccggtggcatcgccggggcgttggcggaagcccccggggcccgggagggggcaggcccaggcgcggccgccgaatcacgggctcctgtttcccgcagggtgctggaggaggaaaccggcggagcagcttccccactctcagttgcgcttctggcgatggcgatcagaggtcctgctgcgctctccgccgcgctctacctccattagccgcgctgcgcggtgctgcgccctcgccggtgcctctctcctgggtcccaggatcggcccccaccatccaggcacgacccccttccccggcccctcggcctttcccccaactcggccatctccgacccggggcgcgtgttccccccggcccggcgccttctctccctccgggggcacccgctccctagccccggcccggccctccccgcggcgcagcacggagtctcggcgtcccatggcgcaacctacggcctcggcccagaagctggtgcggccgatccgcgccgtgtgccgcatcctgcagatcccggagtccgacccctccaacctgcggccctagagcgcccccgccgccccgggggaaggagagcgcgagcgcgctgagcagacagagcgggagaacgcgtcctcgcccgccggccgggaggccccggagctggcccatggggagcaggcgcccggtgccggccacgacgaccgccaccgcccgcgccgcgaccggccggtgaagcccagggacccccctctgggagagccccatgagggcaggagagtgatggagagtacgcccagcttcctgaagggcaccccaacctgggagaagacggccccagagaacggcatcgtgagacaggagcccggcagcccgcctcgagatggactgcaccatgggccgctgtgcctgggagagcctgctcccttttggaggggcgtcctgagcaccccagactcctggcttccccctggcttcccccagggccccaaggacatgctcccacttgtggagggcgagggcccccagaatggggagaggaaggtcaactggctgggcagcaaagagggactgcgctggaaggaggccatgcttacccatccgctggcattctgcgggccagcgtgcccacctcgctgtggccccctgatgcctgagcatagtggtggccatctcaagagtgaccctgtggccttccggccctggcactgccctttccttctggagaccaagatcctggagcgagctcccttctgggtgcccacctgcttgccaccctacctagtgtctggcctgcccccagagcatccatgtgactggcccctgaccccgcacccctgggtatactccgggggccagcccaaagtgccctctgccttcagcttaggcagcaagggcttttactacaaggatccgagcattcccaggttggcaaaggagcccttggcagctgcggaacctgggttgtttggcttaaactctggtgggcacctgcagagagccggggaggccgaacgcccttcactgcaccagagggatggagagatgggagctggccggcagcagaatccttgcccgctcttcctggggcagccagacactgtgccctggacctcctggcccgcttgtcccccaggccttgttcatactcttggcaacgtctgggctgggccaggcgatgggaaccttgggtaccagctggggccaccagcaacaccaaggtgcccctctcctgagccgcctgtcacccagcggggctgctgttcatcctacccacccactaaaggtgggggtcttggcccttgtgggaagtgccaggagggcctggaggggggtgccagtggagccagcgaacccagcgaggaagtgaacaaggcctctggccccagggcctgtccccccagccaccacaccaagctgaagaagacatggctcacacggcactcggagcagtttgaatgtccacgcggctgccctgaggtcgaggagaggccggttgctcggctccgggccctcaaaagggcaggcagccccgaggtccagggagcaatgggcagtccagcccccaagcggccaccggacccttttccaggcactgcagaacagggggctgggggttggcaggaggtgcgggacacatcgatagggaacaaggatgtggactcgggacagcatgatgagcagaaaggaccccaagatggccaggccagtctccaggacccgggacttcaggacataccatgcctggctctccctgcaaaactggctcaatgccaaagttgtgcccaggcagctggagagggaggagggcacgcctgccactctcagcaagtgcggagatcgcctctgggaggggagctgcagcaggaggaagacacagccaccaactccagctctgaggaaggcccagggtccggccctgacagccggctcagcacaggcctcgccaagcacctgctcagtggtttgggggaccgactgtgccgcctgctgcggagggagcgggaggccctggcttgggcccagcgggaaggccaagggccagccgtgacagaggacagcccaggcattccacgctgctgcagccgttgccaccatggactcttcaacacccactggcgatgtccccgctgcagccaccggctgtgtgtggcctgtggtcgtgtggcaggcactgggcgggccagggagaaagcaggctttcaggagcagtccgcggaggagtgcacgcaggaggccgggcacgctgcctgttccctgatgctgacccagtttgtctccagccaggctttggcagagctgagcactgcaatgcaccaggtctgggtcaagtttgatatccgggggcactgcccctgccaagctgatgcccgggtatgggcccccggggatgcaggccagcagaaggaatcaacacagaaaacgcccccaactccacaaccttcctgcaatggcgacacccacaggaccaagagcatcaaagaggagacccccgattccgctgagaccccagcagaggaccgtgctggccgagggcccctgccttgtccttctctctgcgaactgctggcttctaccgcggtcaaactctgcttgggccatgagcgaatacacatggccttcgcccccgtcactccggccctgcccagtgatgaccgcatcaccaacatcctggacagcattatcgcacaggtggtggaacggaagatccaggagaaagccctggggccggggcttcgagctggcccgggtctgcgcaagggcctgggcctgcccctctctccagtgcggccccggctgcctcccccaggggctttgctgtggctgcaggagccccagccttgccctcggcgtggcttccacctcttccaggagcactggaggcagggccagcctgtgttggtgtcagggatccaaaggacattgcagggcaacctgtgggggacagaagctcttggggcacttggaggccaggtgcaggcgctgagccccctcggacctccccagcccagcagcctgggcagcacaacattctgggagggcttctcctggcctgagcttcgcccaaagtcagacgagggctctgtcctcctgctgcaccgagctttgggggatgaggacaccagcagggtggagaacctagctgccagtctgccacttccggagtactgcgccctccatggaaaactcaacctggcttcctacctcccaccgggccttgccctgcgtccactggagccccagctctgggcagcctatggtgtgagcccgcaccggggacacctggggaccaagaacctctgtgtggaggtggccgacctggtcagcatcctggtgcatgccgacacaccactgcctgcctggcaccgggcacagaaagacttcctttcaggcctggacggggaggggctctggtctccgggcagccaggtcagcactgtgtggcacgtgttccgggcacaggacgcccagcgcatccgccgctttctccagatggtgtgcccggccggggcaggcgccctggagcctggcgccccaggcagctgctacctggatgcagggctgcggcggcgcctgcgggaggagtggggcgtgagctgctggaccctgctccaggcccccggagaggccgtgctggtgcctgcaggggctccccaccaggtgcagggcctggtgagcacagtcagcgtcactcagcacttcctctcccctgagacctctgccctctctgctcagctctgccaccagggacccagccttccccctgactgccacctgctttatgcccagatggactgggctgtgttccaagcagtgaaggtggccgtggggacattacaggaggccaaatagagggatgctaggtgtctgggatcggggtggggacaggtagaccaggtgctcagcccaggcacaacttcagcaggggatggcgctaggggacttggggatttctggtcaaccccacaagcaccactctgggcacaagcagggcactctgttcccctcccccttaagccaacaaccacagtgccaccaagctcacacctgtccttctcaggctggcatctcccccaccctgtgccccttttcatggtaccaggcccgcactgggggcaattgacttcctccaatccccactcctccgagacccaggagacaaacagcccttccttggggaaacttgggaatcattctggcttaaacaacacctcctcctgctgctcactcccgctgagcccactctactgccccagctccgtttctaccaccgcatcctcactgggctcactgcaggcatgctgaacaaggggcctccaaccttctgccctcctgccaaaagatctggggagtgtgaggagagggtggcatcaggagctgctcaggcttggcggagggagcggcatgggcgatgtcactcagccccttcccggtccgcccgcttccctccttcatgatttccattaaagtctgttgttttgtgactgctgccagtgtggttggccctgcccctgcaggccacatggtccagggagggagggggacatggaaatctgccttagagacaaatggagtagggcagcccggagctggggcccaagggacaggacaccactgcctgctcttcgtctggggcctggggccttgcctcccactgaggagactttgggtggggtggggggctgtcccccaaagatgctcctgagtgcaagagcaggcaaggcagagtcctggggcacagccacgaggtgacctccctgtgcagagactcccgagccctactccacccagcaagctccagtccgccccatctctcccgtctaccctgacctggagatccagaagtatggcccagaagagcccttgccccgcctgtctgcccttggtggcagtggccatggccgacgccaggcccagccaccctgggactgagcctgactgcttcagacagccgacccctccttgtccccgctccacgcccgcagcctcctggtggcgctccgccctctcccgcttcctttgtgtatctcagccctacaaagaaaaacactcccactcttgtcatacctaattgttcctgctgtggtttggggaattttttttattaaataaagttttttattataagggtaatata

SEQ ID NO: 139547 - DNA, 772 bp, Homo sapiens
  Payload ID: 7370
  Gene Symbol: HR
  Gene Name: hair growth associated
  ENST ID: ENST00000517699
  CDS Start-End: 1-163
cacgcaggaggccgggcacgctgcctgttccctgatgctgacccagtttgtctccagccaggaaggaatcaacacagaaaacgcccccaactccacaaccttcctgcaatggcgacacccacaggaccaagagcatcaaagaggagacccccgattccgctgagaccccagcagaggaccgtgctggccgagggcccctgccttgtccttctctctgcgaactgctggcttctaccgcggtcaaactctgcttgggccatgagcgaatacacatggccttcgcccccgtcactccggccctgcccagtgatgaccgcatcaccaacatcctggacagcattatcgcacaggtggtggaacggaagatccaggagaaagccctggggccggggcttcgagctggcccgggtctgcgcaagggcctgggcctgcccctctctccagtgcggccccggctgcctcccccaggggctttgctgtggctgcaggagccccagccttgccctcggcgtggcttccacctcttccaggagcactggaggcagggccagcctgtgttggtgtcagggatccaaaggacattgcagggcaacctgtgggggacagaagctcttggggcacttggaggccaggtgcaggcgctgagccccctcggacctccccagcccagcagcctgggcagcacaacattctgggagggcttctcctggcctgagcttcgcccaaagtcagacgagggctctgtcctcctgctgcaccgagctttggggga

SEQ ID NO: 139548 - DNA, 2212 bp, Homo sapiens
  Payload ID: 7371
  Gene Symbol: HDHD2
  Gene Name: haloacid dehalogenase-like hydrolase domain containing 2
  Uniprot ID: Q9H0R4
  ENST ID: ENST00000300605
  CDS Start-End: 154-933
ttccggcgcggccagggcccaacttccggcgtccgtcgggcagcagcggggctgtctatcccggctgaggacccgcggccagtgcgggtggctggctttgccattagcgggggcctttcctgaggacggcgtacggagtgtggggaatgaaggatggcagcatgccgtgcattaaaagctgttttggtagatctcagtggcacacttcacattgaagatgcagctgtgccaggcgcacaggaagctcttaaaaggttacgtggtgcttctgtaatcattaggtttgtgaccaatacaaccaaagagagcaagcaagacctgttagaaaggttgagaaaattggaatttgatatctctgaagatgaaatattcacatctctgactgcagccagaagtttactagagcggaaacaagtcagacccatgctgctagttgatgatcgggcactacctgatttcaaaggaatacaaacaagtgatcctaatgctgtggtcatgggattggcaccagaacattttcattatcaaattctgaatcaagcattccggttactcctggatggagcacctctgatagcaatccacaaagccaggtattacaagaggaaagatggcttagccctggggcctggaccatttgtgactgctttagagtatgccacagataccaaagccacagtcgtggggaaaccagagaagacgttctttttggaagcattgcggggcactggctgtgaacctgaggaggctgtcatgataggagatgattgcagggatgatgttggtggggctcaagatgtcggcatgctgggcatcttagtaaagactgggaaatatcgagcatcagatgaagaaaaaattaatccacctccttacttaacttgtgagagtttccctcatgctgtggaccacattctgcagcacctattgtgaagcagtgtgtgcatctgaagcaacttgaaatgcagcttcttattgtctggaatgaatcccttaccaactcagtgccagcatcggtagacaccagtcagtgctgatcgctttttaaccctcttttgttgtgcattaattagaaagaaaggtattgaattgcggctagccagtaagccttgctaatctcttttattttgtaactgaagatgagacccaaagaaagggaaagctgagattttgtgccattccttttaaaatattcatcaggttaggtggggctgtgggggaaaagctactacagggaagagtgttctctgctgtctcttcactggaaaacagggaggggggatttcagactgtgaagaaagttgaatggtggtttttaaattataaagtaatgtattaaaaggtgcattaggctgtagttctaatattgagttcaactgtgaaatccatcagatgtgccaaatggagaagacagaaagcaacaaagtgaattgttctttagcccaagtggtacagtgaatttgctttaacagatgttgaaaactaaattttctactgtattcccagcacgggtgacttctttttctcttcattagccagagatgactaatttaaatttagaaccagattttaatttaaattaatatttccattaataacctattcattgcagatacctattatactgtgtaacagttgttttggaaattttatgtaaaattaaaactatcagtattttacagatgttttaattagacattgttattaacaggaacagtgcagaaactagaatcaagccttataatatcttatagaccatgcatttttgaagttagtgtccactagggtcctattaactgtacatttgcaagatttcattatttttgcctctgacactatgggaaaaattttttagaagctattgggacagattcaagcttttatgcacttggttactacagctgtaaaatgaaatctcgtcttgtagcatggattattcttctcatgttaaacccaccaaaataaaggggactaaataggtaatgattttcctagtgcatttgcatactgtgataatcctgggccttgcaatagttctacagggctcttgggcattgaattattaggatgtaattgtacatcattgtagtgttcaccttattgaagctcactctgatgttaatgagcttcgggttttgatgcttgtttagagatcagcagtcttggatgggagggaacaaagctaaataaatgttagtttggtgagcactgt

SEQ ID NO: 139549 - DNA, 559 bp, Homo sapiens
  Payload ID: 7371
  Gene Symbol: HDHD2
  Gene Name: haloacid dehalogenase-like hydrolase domain containing 2
  ENST ID: ENST00000592591
  CDS Start-End: 194-559
cttccggcgtccgtcgggcagcagcggggctgtctatcccggctgaggacccgcggccagtgcgggtggctggctttgccattagcgggggcctttcctgaggacggcgtacggagtgtggacacctcgtctgctactggaacacatccattgtatcttcagcctccatttccaaatgtgcagggaatgaaggatggcagcatgccgtgcattaaaagctgttttggtagatctcagtggcacacttcacattgaagatgcagctgtgccaggcgcacaggaagctcttaaaaggtttgtgaccaatacaaccaaagagagcaagcaagacctgttagaaaggttgagaaaattggaatttgatatctctgaagatgaaatattcacatctctgactgcagccagaagtttactagagcggaaacaagtcagacccatgctgctagttgatgatcgggcactacctgatttcaaaggaatacaaacaagtgatcctaatgctgtggtcatgggattggcaccagaacattttcattatcaaattctgaatcaagcattc

SEQ ID NO: 139550 - DNA, 576 bp, Homo sapiens
  Payload ID: 7371
  Gene Symbol: HDHD2
  Gene Name: haloacid dehalogenase-like hydrolase domain containing 2
  ENST ID: ENST00000591268
  CDS Start-End: 145-309
agtggccccgcgcgtgcgcatagctgggcgcgaggcgcgctgtgggtctctgcggggcggatcgtgaagctagtgtgtcagtcattcctcgaagcgtgctcttgggctgtattttggagctagcgtccctcctgggaatgaaggatggcagcatgccgtgcattaaaagctgttttggtagatctcagtggcacacttcacattgaagatgcagctgtgccaggcgcacaggaagctcttaaaaggcaagctatcctccaggttcagctgacaaatatgtttgttacgtggtgcttctgtaatcattaggtttgtgaccaatacaaccaaagagagcaagcaagacctgttagaaaggttgagaaaattggaatttgatatctctgaagatgaaatattcacatctctgactgcagccagaagtttactagagcggaaacaagtcagacccatgctgctagttgatgatcgggcactacctgatttcaaaggaatacaaacaagtgatcctaatgctgtggtcatgggattggcaccagaacattttcattatcaaattctgaatcaagcattccg

SEQ ID NO: 139551 - DNA, 2224 bp, Homo sapiens
  Payload ID: 7371
  Gene Symbol: HDHD2
  Gene Name: haloacid dehalogenase-like hydrolase domain containing 2
  ENST ID: ENST00000588183
  CDS Start-End: 134-298
aacttccggcgtccgtcgggcagcagcggggctgtctatcccggctgaggacccgcggccagtgcgggtggctggctttgccattagcgggggcctttcctgaggacggcgtacggagtgtggggaatgaaggatggcagcatgccgtgcattaaaagctgttttggtagatctcagtggcacacttcacattgaagatgcagctgtgccaggcgcacaggaagctcttaaaaggcaagctatcctccaggttcagctgacaaatatgtttgttacgtggtgcttctgtaatcattaggtttgtgaccaatacaaccaaagagagcaagcaagacctgttagaaaggttgagaaaattggaatttgatatctctgaagatgaaatattcacatctctgactgcagccagaagtttactagagcggaaacaagtcagacccatgctgctagttgatgatcgggcactacctgatttcaaaggaatacaaacaagtgatcctaatgctgtggtcatgggattggcaccagaacattttcattatcaaattctgaatcaagcattccggttactcctggatggagcacctctgatagcaatccacaaagccaggtattacaagaggaaagatggcttagccctggggcctggaccatttgtgactgctttagagtatgccacagataccaaagccacagtcgtggggaaaccagagaagacgttctttttggaagcattgcggggcactggctgtgaacctgaggaggctgtcatgataggagatgattgcagggatgatgttggtggggctcaagatgtcggcatgctgggcatcttagtaaagactgggaaatatcgagcatcagatgaagaaaaaattaatccacctccttacttaacttgtgagagtttccctcatgctgtggaccacattctgcagcacctattgtgaagcagtgtgtgcatctgaagcaacttgaaatgcagcttcttattgtctggaatgaatcccttaccaactcagtgccagcatcggtagacaccagtcagtgctgatcgctttttaaccctcttttgttgtgcattaattagaaagaaaggtattgaattgcggctagccagtaagccttgctaatctcttttattttgtaactgaagatgagacccaaagaaagggaaagctgagattttgtgccattccttttaaaatattcatcaggttaggtggggctgtgggggaaaagctactacagggaagagtgttctctgctgtctcttcactggaaaacagggaggggggatttcagactgtgaagaaagttgaatggtggtttttaaattataaagtaatgtattaaaaggtgcattaggctgtagttctaatattgagttcaactgtgaaatccatcagatgtgccaaatggagaagacagaaagcaacaaagtgaattgttctttagcccaagtggtacagtgaatttgctttaacagatgttgaaaactaaattttctactgtattcccagcacgggtgacttctttttctcttcattagccagagatgactaatttaaatttagaaccagattttaatttaaattaatatttccattaataacctattcattgcagatacctattatactgtgtaacagttgttttggaaattttatgtaaaattaaaactatcagtattttacagatgttttaattagacattgttattaacaggaacagtgcagaaactagaatcaagccttataatatcttatagaccatgcatttttgaagttagtgtccactagggtcctattaactgtacatttgcaagatttcattatttttgcctctgacactatgggaaaaattttttagaagctattgggacagattcaagcttttatgcacttggttactacagctgtaaaatgaaatctcgtcttgtagcatggattattcttctcatgttaaacccaccaaaataaaggggactaaataggtaatgattttcctagtgcatttgcatactgtgataatcctgggccttgcaatagttctacagggctcttgggcattgaattattaggatgtaattgtacatcattgtagtgttcaccttattgaagctcactctgatgttaatgagcttcgggttttgatgcttgtttagagatcagcagtcttggatgggagggaacaaagctaaataaatgttagtttggtgagc

SEQ ID NO: 139552 - DNA, 569 bp, Homo sapiens
  Payload ID: 7371
  Gene Symbol: HDHD2
  Gene Name: haloacid dehalogenase-like hydrolase domain containing 2
  ENST ID: ENST00000591480
  CDS Start-End: 132-569
cttccggcgtccgtcgggcagcagcggggctgtctatcccggctgaggacccgcggccagtgcgggtggctggctttgccattagcgggggcctttcctgaggacggcgtacggagtgtggggaatgaaggatggcagcatgccgtgcattaaaagctgttttggtagatctcagtggcacacttcacattgaagatgcagctgtgccaggcgcacaggaagctcttaaaaggtttgtgaccaatacaaccaaagagagcaagcaagacctgttagaaaggttgagaaaattggaatttgatatctctgaagatgaaatattcacatctctgactgcagccagaagtttactagagcggaaacaagtcagacccatgctgctagttgatgatcgggcactacctgatttcaaaggaatacaaacaagtgatcctaatgctgtggtcatgggattggcaccagaacattttcattatcaaattctgaatcaagcattccggttactcctggatggagcacctctgatagcaatccacaaagccaggtattacaagaggaaagatggctta

SEQ ID NO: 139553 - DNA, 566 bp, Homo sapiens
  Payload ID: 7371
  Gene Symbol: HDHD2
  Gene Name: haloacid dehalogenase-like hydrolase domain containing 2
  ENST ID: ENST00000587388
  CDS Start-End: 172-566
agcggggctgtctatcccggctgaggacccgcggccagtgcgggtggctggctttgccattagcgggggcctttcctgaggacggcgtacggagtgtggacacctcgtctgctactggaacacatccattgtatcttcagcctccatttccaaatgtgcagggaatgaaggatggcagcatgccgtgcattaaaagctgttttggtagatctcagtggcacacttcacattgaagatgcagctgtgccaggcgcacaggaagctcttaaaaggttacgtggtgcttctgtaatcattaggtttgtgaccaatacaaccaaagagagcaagcaagacctgttagaaaggttgagaaaattggaatttgatatctctgaagatgaaatattcacatctctgactgcagccagaagtttactagagcggaaacaagtcagacccatgctgctagttgatgatcgggcactacctgatttcaaaggaatacaaacaagtgatcctaatgctgtggtcatgggattggcaccagaacattttcattatcaaattctgaatcaagcattccg

SEQ ID NO: 139554 - DNA, 568 bp, Homo sapiens
  Payload ID: 7371
  Gene Symbol: HDHD2
  Gene Name: haloacid dehalogenase-like hydrolase domain containing 2
  ENST ID: ENST00000586546
  CDS Start-End: 189-353
ggcgtccgtcgggcagcagcggggctgtctatcccggctgaggacccgcggccagtgcgggtggctggctttgccattagcgggggcctttcctgaggacggcgtacggagtgtggacacctcgtctgctactggaacacatccattgtatcttcagcctccatttccaaatgtgcagggaatgaaggatggcagcatgccgtgcattaaaagctgttttggtagatctcagtggcacacttcacattgaagatgcagctgtgccaggcgcacaggaagctcttaaaaggcaagctatcctccaggttcagctgacaaatatgtttgttacgtggtgcttctgtaatcattaggtttgtgaccaatacaaccaaagagagcaagcaagacctgttagaaaggttgagaaaattggaatttgatatctctgaagatgaaatattcacatctctgactgcagccagaagtttactagagcggaaacaagtcagacccatgctgctagttgatgatcgggcactacctgatttcaaaggttactcctggatggagcacctctgatagcaat

SEQ ID NO: 139555 - DNA, 546 bp, Homo sapiens
  Payload ID: 7371
  Gene Symbol: HDHD2
  Gene Name: haloacid dehalogenase-like hydrolase domain containing 2
  ENST ID: ENST00000588940
  CDS Start-End: 151-546
ctttgcagtggccccgcgcgtgcgcatagctgggcgcgaggcgcgctgtgggtctctgcggggcggatcgtgaagctagtgtgtcagtcattcctcgaagcgtgctcttgggctgtattttggagctagcgtccctcctgggaatgaaggatggcagcatgccgtgcattaaaagctgttttggtagatctcagtggcacacttcacattgaagatgcagctgtgccaggcgcacaggaagctcttaaaaggttacgtggtgcttctgtaatcattaggtttgtgaccaatacaaccaaagagagcaagcaagacctgttagaaaggttgagaaaattggaatttgatatctctgaagatgaaatattcacatctctgactgcagccagaagtttactagagcggaaacaagtcagacccatgctgctagttgatgatcgggcactacctgatttcaaaggaatacaaacaagtgatcctaatgctgtggtcatgggattggcaccagaacattttcattatcaaattctgaatcaagcattccgg

SEQ ID NO: 139556 - DNA, 569 bp, Homo sapiens
  Payload ID: 7371
  Gene Symbol: HDHD2
  Gene Name: haloacid dehalogenase-like hydrolase domain containing 2
  ENST ID: ENST00000590481
  CDS Start-End: 173-569
agcagcggggctgtctatcccggctgaggacccgcggccagtgcgggtggctggctttgccattagcgggggcctttcctgaggacggcgtacggagtgtggccctccacatacataacccaacctttctctgagcgggacacaattcacaattctttatagggaatgaaggatggcagcatgccgtgcattaaaagctgttttggtagatctcagtggcacacttcacattgaagatgcagctgtgccaggcgcacaggaagctcttaaaaggttacgtggtgcttctgtaatcattaggtttgtgaccaatacaaccaaagagagcaagcaagacctgttagaaaggttgagaaaattggaatttgatatctctgaagatgaaatattcacatctctgactgcagccagaagtttactagagcggaaacaagtcagacccatgctgctagttgatgatcgggcactacctgatttcaaaggaatacaaacaagtgatcctaatgctgtggtcatgggattggcaccagaacattttcattatcaaattctgaatcaagcattccggt

SEQ ID NO: 139557 - DNA, 809 bp, Homo sapiens
  Payload ID: 7371
  Gene Symbol: HDHD2
  Gene Name: haloacid dehalogenase-like hydrolase domain containing 2
  ENST ID: ENST00000590815
  CDS Start-End: 197-809
cggctgaggacccgcggccagtgcgggtggctggctttgccattagcgggggcctttcctgaggacggcgtacggagtgtggaacagaattctggagtaaagaagcaggttcccttttcgctagacacctcgtctgctactggaacacatccattgtatcttcagcctccatttccaaatgtgcagggaatgaaggatggcagcatgccgtgcattaaaagctgttttggtagatctcagtggcacacttcacattgaagatgcagctgtgccaggcgcacaggaagctcttaaaaggttacgtggtgcttctgtaatcattaggtttgtgaccaatacaaccaaagagagcaagcaagacctgttagaaaggttgagaaaattggaatttgatatctctgaagatgaaatattcacatctctgactgcagccagaagtttactagagcggaaacaagtcagacccatgctgctagttgatgatcgggcactacctgatttcaaaggaatacaaacaagtgatcctaatgctgtggtcatgggattggcaccagaacattttcattatcaaattctgaatcaagcattccggttactcctggatggagcacctctgatagcaatccacaaagccaggtattacaagaggaaagatggcttagccctggggcctggaccatttgtgactgctttagagtatgccacagataccaaagccacagtcgtggggaaaccagagaagacgttctttttggaagcattgcggggcactggctgtgaacctgaggaggctgtcatgataggagatg

SEQ ID NO: 139558 - DNA, 1834 bp, Homo sapiens
  Payload ID: 7372
  Gene Symbol: HDHD3
  Gene Name: haloacid dehalogenase-like hydrolase domain containing 3
  Uniprot ID: Q9BSH5
  ENST ID: ENST00000238379
  CDS Start-End: 899-1654
ctgaggcaggagaatcgcttgaacctgggaggcggaggttgcagtgagccgagatcgcgccattgcacttcagcctgggcaacaagaacgaaactccgcctcaaaaaaaaaaaaaaaaaaaaaaaaaagccgtgggtcaggagccagagccctctgctctagtcttagctgtgccaatgtgactccctgtgtgatttgggggtaaattactgcccctcactgggtctctgtctacccacctgcaaaatgagaggatctttggatgagtctccttaattcatttcctggacaaacttcctccaaggctcccccagatttaccagtgacgcccttccctaagtatcaacttagccgtactttgaactctggcccctcaggtttcaaggggacggccttgtctgggatcagctctgtctggggaaagaagctgcaccagcctctggatagcaggctgagtcacttgtttcttgtgccttgagtcagttctctcatcagctctcctcctaggccagtgttattacctccagtaaagatggaaaagttggggttcagagagggctagagacagacagcctgctgtgtcctgtcttttctcctgtgctgtacaggttcaccaatttttaaaatccaaatatatctcatggtacagtggaagaactggccagagagtctggaagtttgggttctggtcctggctgtgccactgactcactgtgaccttgggatcttgtgctgtgaagacatttcccaagtgcttcatgttagccagcaaatctgacccacaaggcctggaaagaggtgattgttaggttgcgcagaggtggtcttatccagctcagcttcccctgggacccaccgtgggacctgaggcagaactggggtggacttggcctcctccatggcacaccggctgcagatacgactgctgacgtgggatgtgaaggacacgctgctcaggctccgccaccccttaggggaggcctatgccaccaaggcccgggcccatgggctggaggtggagccctcagccctggaacaaggcttcaggcaggcatacagggctcagagccacagcttccccaactacggcctgagccacggcctaacctcccgccagtggtggctggatgtggtcctgcagaccttccacctggcgggtgtccaggatgctcaggctgtagcccccatcgctgaacagctttataaagacttcagccacccctgcacctggcaggtgttggatggggctgaggacaccctgagggagtgccgcacacggggtctgagactggcagtgatctccaactttgaccgacggctagagggcatcctggggggccttggcctgcgtgaacacttcgactttgtgctgacctccgaggctgctggctggcccaagccggacccccgcattttccaggaggccttgcggcttgctcatatggaaccagtagtggcagcccatgttggggataattacctctgcgattaccaggggcctcgggctgtgggcatgcacagcttcctggtggttggcccacaggcactggaccccgtggtcagggattctgtacctaaagaacacatcctcccctctctggcccatctcctgcctgcccttgactgcctagagggctcaactccagggctttgaggccagtgagggaagtggctgggccctaggccatggagaaaaccttaaacaaaccctggagacagggagccccttctttctccacagctctggacctttccccctctccctgcggcctttgtcacctactgtgataataaagcagtgagtgctgagctctcacccttcccccactaacca

SEQ ID NO: 139559 - DNA, 1497 bp, Homo sapiens
  Payload ID: 7372
  Gene Symbol: HDHD3
  Gene Name: haloacid dehalogenase-like hydrolase domain containing 3
  Uniprot ID: Q9BSH5
  ENST ID: ENST00000374180
  CDS Start-End: 562-1317
ccggcgcttgcgcacctccgcccgagctcgcgggccttgcggctgcgttttcaatctgcttccttgtgagtcaggtgggtcctgggcccaggaaccggcccggagccgtggacgccctacagctgagaaggggacccaaggggtcggccgcggccaaggcccctaggaccgccgccccagctcacgctgccgacggcagctatagacattctgcgtcaggtccgggctcctggacttcgcctttcccgagccctggaggtggggagaaaaggttcaccaatttttaaaatccaaatatatctcatggtacagtggaagaactggccagagagtctggaagtttgggttctggtcctggctgtgccactgactcactgtgaccttgggatcttgtgctgtgaagacatttcccaagtgcttcatgttagccagcaaatctgacccacaaggcctggaaagaggtgattgttaggttgcgcagaggtggtcttatccagctcagcttcccctgggacccaccgtgggacctgaggcagaactggggtggacttggcctcctccatggcacaccggctgcagatacgactgctgacgtgggatgtgaaggacacgctgctcaggctccgccaccccttaggggaggcctatgccaccaaggcccgggcccatgggctggaggtggagccctcagccctggaacaaggcttcaggcaggcatacagggctcagagccacagcttccccaactacggcctgagccacggcctaacctcccgccagtggtggctggatgtggtcctgcagaccttccacctggcgggtgtccaggatgctcaggctgtagcccccatcgctgaacagctttataaagacttcagccacccctgcacctggcaggtgttggatggggctgaggacaccctgagggagtgccgcacacggggtctgagactggcagtgatctccaactttgaccgacggctagagggcatcctggggggccttggcctgcgtgaacacttcgactttgtgctgacctccgaggctgctggctggcccaagccggacccccgcattttccaggaggccttgcggcttgctcatatggaaccagtagtggcagcccatgttggggataattacctctgcgattaccaggggcctcgggctgtgggcatgcacagcttcctggtggttggcccacaggcactggaccccgtggtcagggattctgtacctaaagaacacatcctcccctctctggcccatctcctgcctgcccttgactgcctagagggctcaactccagggctttgaggccagtgagggaagtggctgggccctaggccatggagaaaaccttaaacaaaccctggagacagggagccccttctttctccacagctctggacctttccccctctccctgcggcctttgtcacctactgtgataataaagcagtgagtgctgagctctcacccttcccccactaacca

SEQ ID NO: 139560 - DNA, 960 bp, Homo sapiens
  Payload ID: 7373
  Gene Symbol: HP
  Gene Name: haptoglobin
  ENST ID: ENST00000228226
  CDS Start-End: 115-960
agatgccccacagcactgctcttccagaggcaagaccaaccaagatgagtgccctgggagctgtcattgccctcctgctctggggacagctttttgcagtggactcaggcaatgatgtcacggatatcgcagatgacggctgcccgaagccccccgagattgcacatggctatgtggagcactcggttcgctaccagtgtaagaactaacccagtgcagcggatcctgggtggacacctggatgccaaaggcagctttccctggcaggctaagatggtttcccaccataatctcaccacaggtgccacgctgatcaatgaacaatggctgctgaccacggctaaaaatctcttcctgaaccattcagaaaatgcaacagcgaaagacattgcccctactttaacactctatgtggggaaaaagcagcttgtagagattgagaaggttgttctacaccctaactactcccaggtagatattgggctcatcaaactcaaacagaaggtgtctgttaatgagagagtgatgcccatctgcctaccttcaaaggattatgcagaagtagggcgtgtgggttatgtttctggctgggggcgaaatgccaattttaaatttactgaccatctgaagtatgtcatgctgcctgtggctgaccaagaccaatgcataaggcattatgaaggcagcacagtccccgaaaagaagacaccgaagagccctgtaggggtgcagcccatactgaatgaacacaccttctgtgctggcatgtctaagtaccaagaagacacctgctatggcgatgcgggcagtgcctttgccgttcacgacctggaggaggacacctggtatgcgactgggatcttaagctttgataagagctgtgctgtggctgagtatggtgtgtatgtgaaggtgacttccatccaggactgggttcagaagaccatagctgagaactaa

SEQ ID NO: 139561 - DNA, 1443 bp, Homo sapiens
  Payload ID: 7373
  Gene Symbol: HP
  Gene Name: haptoglobin
  Uniprot ID: P00738
  ENST ID: ENST00000355906
  CDS Start-End: 59-1279
ataaaaagaccagcagatgccccacagcactgctcttccagaggcaagaccaaccaagatgagtgccctgggagctgtcattgccctcctgctctggggacagctttttgcagtggactcaggcaatgatgtcacggatatcgcagatgacggctgcccgaagccccccgagattgcacatggctatgtggagcactcggttcgctaccagtgtaagaactactacaaactgcgcacagaaggagatggagtatacaccttaaatgataagaagcagtggataaataaggctgttggagataaacttcctgaatgtgaagcagatgacggctgcccgaagccccccgagattgcacatggctatgtggagcactcggttcgctaccagtgtaagaactactacaaactgcgcacagaaggagatggagtgtacaccttaaacaatgagaagcagtggataaataaggctgttggagataaacttcctgaatgtgaagcagtatgtgggaagcccaagaatccggcaaacccagtgcagcggatcctgggtggacacctggatgccaaaggcagctttccctggcaggctaagatggtttcccaccataatctcaccacaggtgccacgctgatcaatgaacaatggctgctgaccacggctaaaaatctcttcctgaaccattcagaaaatgcaacagcgaaagacattgcccctactttaacactctatgtggggaaaaagcagcttgtagagattgagaaggttgttctacaccctaactactcccaggtagatattgggctcatcaaactcaaacagaaggtgtctgttaatgagagagtgatgcccatctgcctaccttcaaaggattatgcagaagtagggcgtgtgggttatgtttctggctgggggcgaaatgccaattttaaatttactgaccatctgaagtatgtcatgctgcctgtggctgaccaagaccaatgcataaggcattatgaaggcagcacagtccccgaaaagaagacaccgaagagccctgtaggggtgcagcccatactgaatgaacacaccttctgtgctggcatgtctaagtaccaagaagacacctgctatggcgatgcgggcagtgcctttgccgttcacgacctggaggaggacacctggtatgcgactgggatcttaagctttgataagagctgtgctgtggctgagtatggtgtgtatgtgaaggtgacttccatccaggactgggttcagaagaccatagctgagaactaatgcaaggctggccggaagcccttgcctgaaagcaagatttcagcctggaagagggcaaagtggacgggagtggacaggagtggatgcgataagatgtggtttgaagctgatgggtgccagccctgcattgctgagtcaatcaataaagagctttcttttgaccc

SEQ ID NO: 139562 - DNA, 1482 bp, Homo sapiens
  Payload ID: 7373
  Gene Symbol: HP
  Gene Name: haptoglobin
  ENST ID: ENST00000357763
  CDS Start-End: 28-1356
gctcttccagaggcaagaccaaccaagatgagtgccctgggagctgtcattgccctcctgctctggggacagctttttgcagtggactcaggcaatgatgtcacggatatcgcagatgacggctgcccgaagccccccgagattgcacatggctatgtggagcactcggttcgctaccagtgtaagaactactacaaactgcgcacagaaggagatggagtatacaccttaaatgataagaagcagtggataaataaggctgttggagataaacttcctgaatgtgaagcagatgacggctgcccgaagccccccgagattgcacatggctatgtggagcactcggttcgctaccagtgtaagaactactacaaactgcgcacagaaggagatggggaggcgatgccatgcagcctacctcatgtaaatctcagagtcacatttacatctccagcagatgtgggaaaagaaggaatgctgatgatgatgtcaccctcacctagagtgtacaccttaaacaatgagaagcagtggataaataaggctgttggagataaacttcctgaatgtgaagcagtatgtgggaagcccaagaatccggcaaacccagtgcagcggatcctgggtggacacctggatgccaaaggcagctttccctggcaggctaagatggtttcccaccataatctcaccacaggtgccacgctgatcaatgaacaatggctgctgaccacggctaaaaatctcttcctgaaccattcagaaaatgcaacagcgaaagacattgcccctactttaacactctatgtggggaaaaagcagcttgtagagattgagaaggttgttctacaccctaactactcccaggtagatattgggctcatcaaactcaaacagaaggtgtctgttaatgagagagtgatgcccatctgcctaccttcaaaggattatgcagaagtagggcgtgtgggttatgtttctggctgggggcgaaatgccaattttaaatttactgaccatctgaagtatgtcatgctgcctgtggctgaccaagaccaatgcataaggcattatgaaggcagcacagtccccgaaaagaagacaccgaagagccctgtaggggtgcagcccatactgaatgaacacaccttctgtgctggcatgtctaagtaccaagaagacacctgctatggcgatgcgggcagtgcctttgccgttcacgacctggaggaggacacctggtatgcgactgggatcttaagctttgataagagctgtgctgtggctgagtatggtgtgtatgtgaaggtgacttccatccaggactgggttcagaagaccatagctgagaactaatgcaaggctggccggaagcccttgcctgaaagcaagatttcagcctggaagagggcaaagtggacgggagtggacaggagtggatgcgataagatgtggtttgaagctgatgggtgccagccctgc

SEQ ID NO: 139563 - DNA, 1252 bp, Homo sapiens
  Payload ID: 7373
  Gene Symbol: HP
  Gene Name: haptoglobin
  Uniprot ID: P00738
  ENST ID: ENST00000398131
  CDS Start-End: 45-1088
agatgccccacagcactgctcttccagaggcaagaccaaccaagatgagtgccctgggagctgtcattgccctcctgctctggggacagctttttgcagtggactcaggcaatgatgtcacggatatcgcagatgacggctgcccgaagccccccgagattgcacatggctatgtggagcactcggttcgctaccagtgtaagaactactacaaactgcgcacagaaggagatggagtgtacaccttaaacaatgagaagcagtggataaataaggctgttggagataaacttcctgaatgtgaagcagtatgtgggaagcccaagaatccggcaaacccagtgcagcggatcctgggtggacacctggatgccaaaggcagctttccctggcaggctaagatggtttcccaccataatctcaccacaggtgccacgctgatcaatgaacaatggctgctgaccacggctaaaaatctcttcctgaaccattcagaaaatgcaacagcgaaagacattgcccctactttaacactctatgtggggaaaaagcagcttgtagagattgagaaggttgttctacaccctaactactcccaggtagatattgggctcatcaaactcaaacagaaggtgtctgttaatgagagagtgatgcccatctgcctaccttcaaaggattatgcagaagtagggcgtgtgggttatgtttctggctgggggcgaaatgccaattttaaatttactgaccatctgaagtatgtcatgctgcctgtggctgaccaagaccaatgcataaggcattatgaaggcagcacagtccccgaaaagaagacaccgaagagccctgtaggggtgcagcccatactgaatgaacacaccttctgtgctggcatgtctaagtaccaagaagacacctgctatggcgatgcgggcagtgcctttgccgttcacgacctggaggaggacacctggtatgcgactgggatcttaagctttgataagagctgtgctgtggctgagtatggtgtgtatgtgaaggtgacttccatccaggactgggttcagaagaccatagctgagaactaatgcaaggctggccggaagcccttgcctgaaagcaagatttcagcctggaagagggcaaagtggacgggagtggacaggagtggatgcgataagatgtggtttgaagctgatgggtgccagccctgcattgctgagtcaatcaataaagagctttcttttgaccc

SEQ ID NO: 139564 - DNA, 685 bp, Homo sapiens
  Payload ID: 7373
  Gene Symbol: HP
  Gene Name: haptoglobin
  ENST ID: ENST00000562526
  CDS Start-End: 28-306
gctcttccagaggcaagaccaaccaagatgagtgccctgggagctgtcattgccctcctgctctggggacagctttttgcagtggactcaggcaatgatgtcacggatatcgcagatgacggctgcccgaagccccccgagattgcacatggctatgtggagcactcggttcgctaccagtgtaagaactactacaaactgcgcacagaaggagatggagtgtacaccttaaacaatgagaagcagtggataaataaggctgttggagataaacttcctgaatgtgaagcagcccatactgaatgaacacaccttctgtgctggcatgtctaagtaccaagaagacacctgctatggcgatgcgggcagtgcctttgccgttcacgacctggaggaggacacctggtatgcgactgggatcttaagctttgataagagctgtgctgtggctgagtatggtgtgtatgtgaaggtgacttccatccaggactgggttcagaagaccatagctgagaactaatgcaaggctggccggaagcccttgcctgaaagcaagatttcagcctggaagagggcaaagtggacgggagtggacaggagtggatgcgataagatgtggtttgaagctgatgggtgccagccctgcattgctgagtcaatcaataaagagctttcttttgaccca

SEQ ID NO: 139565 - DNA, 1187 bp, Homo sapiens
  Payload ID: 7373
  Gene Symbol: HP
  Gene Name: haptoglobin
  ENST ID: ENST00000565574
  CDS Start-End: 25-1068
cttccagaggcaagaccaaccaagatgagtgccctgggagctgtcattgccctcctgctctggggacagctttttgcagtggactcaggcaatgatgtcacggatatcgcagatgacggctgcccgaagccccccgagattgcacatggctatgtggagcactcggttcgctaccagtgtaagaactactacaaactgcgcacagaaggagatggagtatacaccttaaatgataagaagcagtggataaataaggctgttggagataaacttcctgaatgtgaagcagtatgtgggaagcccaagaatccggcaaacccagtgcagcggatcctgggtggacacctggatgccaaaggcagctttccctggcaggctaagatggtttcccaccataatctcaccacaggtgccacgctgatcaatgaacaatggctgctgaccacggctaaaaatctcttcctgaaccattcagaaaatgcaacagcgaaagacattgcccctactttaacactctatgtggggaaaaagcagcttgtagagattgagaaggttgttctacaccctaactactcccaggtagatattgggctcatcaaactcaaacagaaggtgtctgttaatgagagagtgatgcccatctgcctaccttcaaaggattatgcagaagtagggcgtgtgggttatgtttctggctgggggcgaaatgccaattttaaatttactgaccatctgaagtatgtcatgctgcctgtggctgaccaagaccaatgcataaggcattatgaaggcagcacagtccccgaaaagaagacaccgaagagccctgtaggggtgcagcccatactgaatgaacacaccttctgtgctggcatgtctaagtaccaagaagacacctgctatggcgatgcgggcagtgcctttgccgttcacgacctggaggaggacacctggtatgcgactgggatcttaagctttgataagagctgtgctgtggctgagtatggtgtgtatgtgaaggtgacttccatccaggactgggttcagaagaccatagctgagaactaatgcaaggctggccggaagcccttgcctgaaagcaagatttcagcctggaagagggcaaagtggacgggagtggacaggagtggatgcgataagatgtggtttgaagctgatgggtgcca

SEQ ID NO: 139566 - DNA, 695 bp, Homo sapiens
  Payload ID: 7373
  Gene Symbol: HP
  Gene Name: haptoglobin
  ENST ID: ENST00000564499
  CDS Start-End: 28-695
gctcttccagaggcaagaccaaccaagatgagtgccctgggagctgtcattgccctcctgctctggggacagctttttgcagtggactcaggcaatgatgtcacggatatcgcagatgacggctgcccgaagccccccgagattgcacatggctatgtggagcactcggttcgctaccagtgtaagaactactacaaactgcgcacagaaggagatggagtgtacaccttaaacaatgagaagcagtggataaataaggctgttggagataaacttcctgaatgtgaagcaggtgccacgctgatcaatgaacaatggctgctgaccacggctaaaaatctcttcctgaaccattcagaaaatgcaacagcgaaagacattgcccctactttaacactctatgtggggaaaaagcagcttgtagagattgagaaggttgttctacaccctaactactcccaggtagatattgggctcatcaaactcaaacagaaggtgtctgttaatgagagagtgatgcccatctgcctaccttcaaaggattatgcagaagtagggcgtgtgggttatgtttctggctgggggcgaaatgccaattttaaatttactgaccatctgaagtatgtcatgctgcctgtggctgaccaagaccaatgcataaggcattatgaaggcagcacagtccccgaaaagaa

SEQ ID NO: 139567 - DNA, 1270 bp, Homo sapiens
  Payload ID: 7373
  Gene Symbol: HP
  Gene Name: haptoglobin
  Uniprot ID: P00738
  ENST ID: ENST00000570083
  CDS Start-End: 62-1105
agcataaaaagaccagcagatgccccacagcactgctcttccagaggcaagaccaaccaagatgagtgccctgggagctgtcattgccctcctgctctggggacagctttttgcagtggactcaggcaatgatgtcacggatatcgcagatgacggctgcccgaagccccccgagattgcacatggctatgtggagcactcggttcgctaccagtgtaagaactactacaaactgcgcacagaaggagatggagtgtacaccttaaacaatgagaagcagtggataaataaggctgttggagataaacttcctgaatgtgaagcagtatgtgggaagcccaagaatccggcaaacccagtgcagcggatcctgggtggacacctggatgccaaaggcagctttccctggcaggctaagatggtttcccaccataatctcaccacaggtgccacgctgatcaatgaacaatggctgctgaccacggctaaaaatctcttcctgaaccattcagaaaatgcaacagcgaaagacattgcccctactttaacactctatgtggggaaaaagcagcttgtagagattgagaaggttgttctacaccctaactactcccaggtagatattgggctcatcaaactcaaacagaaggtgtctgttaatgagagagtgatgcccatctgcctaccttcaaaggattatgcagaagtagggcgtgtgggttatgtttctggctgggggcgaaatgccaattttaaatttactgaccatctgaagtatgtcatgctgcctgtggctgaccaagaccaatgcataaggcattatgaaggcagcacagtccccgaaaagaagacaccgaagagccctgtaggggtgcagcccatactgaatgaacacaccttctgtgctggcatgtctaagtaccaagaagacacctgctatggcgatgcgggcagtgcctttgccgttcacgacctggaggaggacacctggtatgcgactgggatcttaagctttgataagagctgtgctgtggctgagtatggtgtgtatgtgaaggtgacttccatccaggactgggttcagaagaccatagctgagaactaatgcaaggctggccggaagcccttgcctgaaagcaagatttcagcctggaagagggcaaagtggacgggagtggacaggagtggatgcgataagatgtggtttgaagctgatgggtgccagccctgcattgctgagtcaatcaataaagagctttcttttgaccca

SEQ ID NO: 139568 - DNA, 1067 bp, Homo sapiens
  Payload ID: 7373
  Gene Symbol: HP
  Gene Name: haptoglobin
  ENST ID: ENST00000576168
  CDS Start-End: 1-448
tgccctgggagctgtcattgccctcctgctctggggacagctttttgcagtggactcaggcaatgatgtcacggatatcgcagatgacggctgcccgaagccccccgagattgcacatggctatgtggagcactcggttcgctaccagtgtaagaactactacaaactgcgcacagaaggagatggagtatacaccttaaatgataagaagcagtggataaataaggctgttggagataaacttcctgaatgtgaagcagatgacggctgcccgaagccccccgagattgcacatggctatgtggagcactcggttcgctaccagtgtaagaactactacaaactgcgcacagaaggagatggagtgtacaccttaaacaatgagaagcagtggataaataaggctgttggagataaacttcctgaatgtgaagcaggtgggtgctgagcacttaagagagcaggcaggcgtccagcggggaacgtcctagaggcacagccttccagtgcggcttcctctgagcacacaagagccaggaggagggatgtgggagaaccgcagctggccagggagagacttaagcagttaggtgatgactccctaagggtcaccaagggtcttgttcattagggcctgaagggcactggctgaatccattgtctacatcgcccacagattaggagagcctgtgcatacagagagcctgctagagagccctgggtctaaggagaagcaagctccagggagaacaagtcaaggaatgacataaaatcttaatccatggaagcctagcaggaggctggacatgggctggaactcctgcttctcgttattaggaggagctgttgctctctcctttcattctcagaacaagaggcaaaggcccagcctcttctgctcttactggtgtggaaatgccaacctgcctcgtattaactgcaccatctacaaaatctgagctccagccagtgctgctctagattcatctttctttagagagaatgaattattgtagcccctagccctttcaatgaatttcagggaattgtggaaattcctttattgg

SEQ ID NO: 139569 - DNA, 280 bp, Homo sapiens
  Payload ID: 7373
  Gene Symbol: HP
  Gene Name: haptoglobin
  ENST ID: ENST00000568417
  CDS Start-End: 16-280
gcaagaccaaccaagatgagtgccctgggagctgtcattgccctcctgctctggggacagctttttgcagtggactcaggcaatgatgtcacggatatcgcagatgacggctgcccgaagccccccgagattgcacatggctatgtggagcactcggttcgctaccagtgtaagaactactacaaactgcgcacagaaggagatggagtgtacaccttaaacaatgagaagcagtggataaataaggctgttggagataaacttcctgaatgtgaagcag

SEQ ID NO: 139570 - DNA, 1232 bp, Homo sapiens
  Payload ID: 7373
  Gene Symbol: HP
  Gene Name: haptoglobin
  ENST ID: ENST00000567612
  CDS Start-End: 1-1096
tgccctgggagctgtcattgccctcctgctctggggacagctttttgcagtggactcaggcaatgatgtcacggatatcgcagatgacggctgcccgaagccccccgagattgcacatggctatgtggagcactcggttcgctaccagtgtaagaactactacaaactgcgcacagaaggagatggagtatacaccttaaatgataagaagcagtggataaataaggctgttggagataaacttcctgaatgtgaagcagatgacggctgcccgaagccccccgagattgcacatggctatgtggagcactcggttcgctaccagtgtaagaactactacaaactgcgcacagaaggagatggagtgtacaccttaaacaatgagaagcagtggataaataaggctgttggagataaacttcctgaatgtgaagcaggtgccacgctgatcaatgaacaatggctgctgaccacggctaaaaatctcttcctgaaccattcagaaaatgcaacagcgaaagacattgcccctactttaacactctatgtggggaaaaagcagcttgtagagattgagaaggttgttctacaccctaactactcccaggtagatattgggctcatcaaactcaaacagaaggtgtctgttaatgagagagtgatgcccatctgcctaccttcaaaggattatgcagaagtagggcgtgtgggttatgtttctggctgggggcgaaatgccaattttaaatttactgaccatctgaagtatgtcatgctgcctgtggctgaccaagaccaatgcataaggcattatgaaggcagcacagtccccgaaaagaagacaccgaagagccctgtaggggtgcagcccatactgaatgaacacaccttctgtgctggcatgtctaagtaccaagaagacacctgctatggcgatgcgggcagtgcctttgccgttcacgacctggaggaggacacctggtatgcgactgggatcttaagctttgataagagctgtgctgtggctgagtatggtgtgtatgtgaaggtgacttccatccaggactgggttcagaagaccatagctgagaactaatgcaaggctggccggaagcccttgcctgaaagcaagatttcagcctggaagagggcaaagtggacgggagtggacaggagtggatgcgataagatgtggtttgaagctgatgggtgccagccctgcattgctgagt

SEQ ID NO: 139571 - DNA, 568 bp, Homo sapiens
  Payload ID: 7373
  Gene Symbol: HP
  Gene Name: haptoglobin
  ENST ID: ENST00000569639
  CDS Start-End: 31-306
actgctcttccagaggcaagaccaaccaagatgagtgccctgggagctgtcattgccctcctgctctggggacagctttttgcagtggactcaggcaatgatgtcacggatatcgcagatgacggctgcccgaagccccccgagattgcacatggctatgtggagcactcggttcgctaccagtgtaagaactactacaaactgcgcacagaaggagatggagtgtacaccttaaacaatgagaagcagtggataaataaggctgttggagataaacttcctgaatgtgaagcaggtgggtgctgagcacttaagagagcaggcaggcgtccagcggggaacgtcctagaggcacagccttccagtgcggcttcctctgagcacacaagagccaggaggagggatgtgggagaaccgcagctggccagggagagacttaagcagttaggtgatgactccctaagggtcaccaagggtcttgttcattagggcctgaagggcactggctgaatccattgtctacatcgcccacagattaggagagcctgtgcatacagagagcctgcta

SEQ ID NO: 139572 - DNA, 1251 bp, Homo sapiens
  Payload ID: 7373
  Gene Symbol: HP
  Gene Name: haptoglobin
  ENST ID: ENST00000567185
  CDS Start-End: 1-1213
tgccctgggagctgtcattgccctcctgctctggggacagctttttgcagtggactcaggcaatgatgtcacggatatcgcagatgacggctgcccgaagccccccgagattgcacatggctatgtggagcactcggttcgctaccagtgtaagaactactacaaactgcgcacagaaggagatggagtatacaccttaaatgataagaagcagtggataaataaggctgttggagataaacttcctgaatgtgaagcagatgacggctgcccgaagccccccgagattgcacatggctatgtggagcactcggttcgctaccagtgtaagaactactacaaactgcgcacagaaggagatgtgtacaccttaaacaatgagaagcagtggataaataaggctgttggagataaacttcctgaatgtgaagcagtatgtgggaagcccaagaatccggcaaacccagtgcagcggatcctgggtggacacctggatgccaaaggcagctttccctggcaggctaagatggtttcccaccataatctcaccacaggtgccacgctgatcaatgaacaatggctgctgaccacggctaaaaatctcttcctgaaccattcagaaaatgcaacagcgaaagacattgcccctactttaacactctatgtggggaaaaagcagcttgtagagattgagaaggttgttctacaccctaactactcccaggtagatattgggctcatcaaactcaaacagaaggtgtctgttaatgagagagtgatgcccatctgcctaccttcaaaggattatgcagaagtagggcgtgtgggttatgtttctggctgggggcgaaatgccaattttaaatttactgaccatctgaagtatgtcatgctgcctgtggctgaccaagaccaatgcataaggcattatgaaggcagcacagtccccgaaaagaagacaccgaagagccctgtaggggtgcagcccatactgaatgaacacaccttctgtgctggcatgtctaagtaccaagaagacacctgctatggcgatgcgggcagtgcctttgccgttcacgacctggaggaggacacctggtatgcgactgggatcttaagctttgataagagctgtgctgtggctgagtatggtgtgtatgtgaaggtgacttccatccaggactgggttcagaagaccatagctgagaactaatgcaaggctggccggaagcccttgcctgaaagcaagat

SEQ ID NO: 139573 - DNA, 1107 bp, Homo sapiens
  Payload ID: 7373
  Gene Symbol: HP
  Gene Name: haptoglobin
  ENST ID: ENST00000613898
  CDS Start-End: 98-943
gctcttccagaggcaagaccaaccaagatgagtgccctgggagctgtcattgccctcctgctctggggacagctttttgcagtggactcaggcaatgatgtcacggatatcgcagatgacggctgcccgaagccccccgagattgcacatggctatgtggagcactcggttcgctaccagtgtaagaactaacccagtgcagcggatcctgggtggacacctggatgccaaaggcagctttccctggcaggctaagatggtttcccaccataatctcaccacaggtgccacgctgatcaatgaacaatggctgctgaccacggctaaaaatctcttcctgaaccattcagaaaatgcaacagcgaaagacattgcccctactttaacactctatgtggggaaaaagcagcttgtagagattgagaaggttgttctacaccctaactactcccaggtagatattgggctcatcaaactcaaacagaaggtgtctgttaatgagagagtgatgcccatctgcctaccttcaaaggattatgcagaagtagggcgtgtgggttatgtttctggctgggggcgaaatgccaattttaaatttactgaccatctgaagtatgtcatgctgcctgtggctgaccaagaccaatgcataaggcattatgaaggcagcacagtccccgaaaagaagacaccgaagagccctgtaggggtgcagcccatactgaatgaacacaccttctgtgctggcatgtctaagtaccaagaagacacctgctatggcgatgcgggcagtgcctttgccgttcacgacctggaggaggacacctggtatgcgactgggatcttaagctttgataagagctgtgctgtggctgagtatggtgtgtatgtgaaggtgacttccatccaggactgggttcagaagaccatagctgagaactaatgcaaggctggccggaagcccttgcctgaaagcaagatttcagcctggaagagggcaaagtggacgggagtggacaggagtggatgcgataagatgtggtttgaagctgatgggtgccagccctgcattgctgagtcaatcaataaagagctttcttttgaccc

SEQ ID NO: 139574 - DNA, 1110 bp, Homo sapiens
  Payload ID: 7374
  Gene Symbol: HPR
  Gene Name: haptoglobin-related protein
  ENST ID: ENST00000356967
  CDS Start-End: 101-946
gctcttccagaggcaagaccaaccaagatgagtgacctgggagctgtcatttccctcctgctctggggacgacagctttttgcactgtactcaggcaatgatgtcacggatatttcagatgaccgcttcccgaagccccctgagattgcaaatggctatgtggagcacttgtttcgctaccagtgtaagaactaacccagtgcagcggatcctgggtggacacctggatgccaaaggcagctttccctggcaggctaagatggtttcccaccataatctcaccacaggggccacgctgatcaatgaacaatggctgctgaccacggctaaaaatctcttcctgaaccattcagaaaatgcaacagcgaaagacattgcccctactttaacactctatgtggggaaaaagcagcttgtagagattgagaaggtggttctacaccctaactaccaccaggtagatattgggctcatcaaactcaaacagaaggtgcttgttaatgagagagtgatgcccatctgcctaccttcaaagaattatgcagaagtagggcgtgtgggttacgtgtctggctggggacaaagtgacaactttaaacttactgaccatctgaagtatgtcatgctgcctgtggctgaccaatacgattgcataacgcattatgaaggcagcacatgccccaaatggaaggcaccgaagagccctgtaggggtgcagcccatactgaacgaacacaccttctgtgtcggcatgtctaagtaccaggaagacacctgctatggcgatgcgggcagtgcctttgccgttcacgacctggaggaggacacctggtacgcggctgggatcctaagctttgataagagctgtgctgtggctgagtatggtgtgtatgtgaaggtgacttccatccagcactgggttcagaagaccatagctgagaactaatgcaaggctggccggaagcccttgcctgaaagcaagatttcagcctggaagagggcaaagtggacgggagtggacaggagtggatgcgataagatgtggtttgaagctgatgggtgccagccctgcattgctgagtcaatcaataaagagctttcttttgaccc

SEQ ID NO: 139575 - DNA, 1244 bp, Homo sapiens
  Payload ID: 7374
  Gene Symbol: HPR
  Gene Name: haptoglobin-related protein
  Uniprot ID: P00739
  ENST ID: ENST00000540303
  CDS Start-End: 33-1079
gcactgctcttccagaggcaagaccaaccaagatgagtgacctgggagctgtcatttccctcctgctctggggacgacagctttttgcactgtactcaggcaatgatgtcacggatatttcagatgaccgcttcccgaagccccctgagattgcaaatggctatgtggagcacttgtttcgctaccagtgtaagaactactacagactgcgcacagaaggagatggagtatacaccttaaatgataagaagcagtggataaataaggctgttggagataaacttcctgaatgtgaagcagtatgtgggaagcccaagaatccggcaaacccagtgcagcggatcctgggtggacacctggatgccaaaggcagctttccctggcaggctaagatggtttcccaccataatctcaccacaggggccacgctgatcaatgaacaatggctgctgaccacggctaaaaatctcttcctgaaccattcagaaaatgcaacagcgaaagacattgcccctactttaacactctatgtggggaaaaagcagcttgtagagattgagaaggtggttctacaccctaactaccaccaggtagatattgggctcatcaaactcaaacagaaggtgcttgttaatgagagagtgatgcccatctgcctaccttcaaagaattatgcagaagtagggcgtgtgggttacgtgtctggctggggacaaagtgacaactttaaacttactgaccatctgaagtatgtcatgctgcctgtggctgaccaatacgattgcataacgcattatgaaggcagcacatgccccaaatggaaggcaccgaagagccctgtaggggtgcagcccatactgaacgaacacaccttctgtgtcggcatgtctaagtaccaggaagacacctgctatggcgatgcgggcagtgcctttgccgttcacgacctggaggaggacacctggtacgcggctgggatcctaagctttgataagagctgtgctgtggctgagtatggtgtgtatgtgaaggtgacttccatccagcactgggttcagaagaccatagctgagaactaatgcaaggctggccggaagcccttgcctgaaagcaagatttcagcctggaagagggcaaagtggacgggagtggacaggagtggatgcgataagatgtggtttgaagctgatgggtgccagccctgcattgctgagtcaatcaataaagagctttcttttgaccca

SEQ ID NO: 139576 - DNA, 634 bp, Homo sapiens
  Payload ID: 7374
  Gene Symbol: HPR
  Gene Name: haptoglobin-related protein
  ENST ID: ENST00000561690
  CDS Start-End: 28-381
gctcttccagaggcaagaccaaccaagatgagtgacctgggagctgtcatttccctcctgctctggggacgacagctttttgcactgtactcaggcaatgatgtcacggatatttcagatgaccgcttcccgaagccccctgagattgcaaatggctatgtggagcacttgtttcgctaccagtgtaagaactactacagactgcgcacagaaggagatggagtatacaccttaaatgataagaagcagtggataaataaggctgttggagataaacttcctgaatgtgaagcagtatgtgggaagcccaagaatccggcaaacccagtgcagcggatcctgggaggacacctggtacgcggctgggatcctaagctttgataagagctgtgctgtggctgagtatggtgtgtatgtgaaggtgacttccatccagcactgggttcagaagaccatagctgagaactaatgcaaggctggccggaagcccttgcctgaaagcaagatttcagcctggaagagggcaaagtggacgggagtggacaggagtggatgcgataagatgtggtttgaagctgatgggtgccagccctgcattgctgagtcaatcaataaagagctttcttttgaccca

SEQ ID NO: 139577 - DNA, 5789 bp, Homo sapiens
  Payload ID: 7375
  Gene Symbol: HRK
  Gene Name: harakiri, BCL2 interacting protein
  Uniprot ID: O00198
  ENST ID: ENST00000257572
  CDS Start-End: 135-410
gcacaacacaaggagaaacttggtgtccaggggaggcccccggcggctggagcgcggcggcagcgggcgcagaggccggagggagaggaggcgaggggcggcccgagcgcggggcgggagcgaggccagcggtcatgtgcccgtgccccctgcaccgcggccgcggccccccggccgtgtgcgcctgcagcgcgggtcgcctggggctgcgctcgtccgccgcgcagctcaccgccgcccggctcaaggcgctaggcgacgagctgcaccagcgcaccatgtggcggcgccgcgcgcggagccggagggcgccggcgcccggcgcgctccccacctactggccttggctgtgcgcggccgcgcaggtggcggcgctggcggcctggctgctcggcaggcggaacttgtaggaacgcggggcttcttggtggggccggagccgagacccagccggagcgagcaacaggttggtgaaaaccctgtgtccttggagaaagctggttcccgttttccagagggggagcccagagcttgaaaggccgcggttggcacttcgagaaggaagtggagagtaaagacagcgcctggagcgatcgtagaaacacagaatgggactggggaagccctttggaaatccagctgcagaaacagacaccccaatgctatttacatacagctctatatatataaaaaaagaaaatatgaatattacgtatcagtgcatgccttgttgaggacgtggttgccttccttttctgcaccttgcgatgtgaactttgatattctgtaatgtctggggcgccagaagagagatgcctgctgtgtacttagaaactatttgcaaagactggtgggaattagccccagcatcggccaactgcctggggatagatgctggtggaataagaggtaacagtgcaaaaggcatgatagaaaaaaaaagtgaggacttgggaccgattgtgtaggggcagtctgggatgcctccatttcttgactcgtcctagcctctccctctgtacttacctaggtcgatcgctagatcccactgtcacgtcaagagaaatgggatttttgtgtctctggtgcttcacttaaaattttgctggtgctaagtgcgttcctgctggtgctgctgtggtattctgttgacagacttggaaggccaggggacaagagagatttctattttgctgtttcagattcttttttttttttttttaagggacaagttgcaaaagtgccacttgagagtctcttctcttcttctacctggggacgaatatccagaggtggtttggagcaaaccttggggtctaggagggaggatggcattgagaggcttgctggttatgaggcagaaagctgacctcatgcatgacttggttgctatctcccccacccccacaaaagtgtcctcggagttcagcccacagcctcctccactccccaaggggatttcagggtttaggttttatggattaaagagccaagaaatggctacattctgttcaaagatgatttataaccgggggatgttgtgggagggagtgggccatttaaatgaaatgcaccagcatctcactgattgacagaggtctgatttttttccccccaaggataagctactattttcagaagtttctagaagggctaaaaaaagatgtgtgctggacggagacttggctgcaaagactcttcagggagcagtgattattttttgctttcattttcgaaaaatccaacataagcaggtattcttcctctgtgcaggataccacacactgccattttcaaagccgaggtggcgaggtgtcaggctgcagattcggacggtcattctccaaggctggatttgcaggtcaccacccggtacctatagacagagggtccagcaggctggttagcagacaccgctccagttctaagacgccagcagtgggatccatgtttaaggtggatgcggctgaaatgggaattatccccccacaggctttgctgtacagttctaagaagccagcagtgggatccacatttgttaaggtggatgcggctgaaatgggaattatccctccataggctttgctgtaaatgaccaggtcctttagaatgtacaacctctcagtgctgctgcaagctgggagctggatttctttctgtcttccttttaaaatccgttccttgtgttttcctaaatagccctttaaagagaaatgcaaccccagggctgctgaatgccagggaagactcccccaccccgcagctttgaactcagcaaaccaaaaaaaaaaaaagaagaataatgcttattttgggagaacgtgtttctcctcattactcgtgccctccccctagctgatgtttgcaggggaccctcgcttagctggggactgcagagagcagtgggtaatattcccacaaagctacgaacttagagaaggcaaattcattagaataatatgaaatacagtcactgcttctatttaatcactttcttagccacagactagggtctttccagctccccccattttctggggaggggcgtccattactacacagctgtatccaatcacagttctctgcttctttaaggctgtaccttcaagatcgtagtgggggcatgctgaccacctgtagacacaggagaagatgaaaggtgagaggatccctttttcagccccgacttgcctactggcttttgatgtttcccctggaggatacaaactccaaacgctggggttggcattttgggtgattttgatttcaatgaagccactttgctgagagaactggggcacccacgacctcctgatagagcttctcagccaagtcccttgtagatattctcctgttttattagagaccacgtatttatcgaatcctgacctttccttgcacatcattcattggagtgcacttctcgactgccccgatttttgacacggggttgtttttaatgcttgtttttatatgagatttgacttcttgatggacatttgtattaggaaattgaagcatgatatatatgtatatattgtctccaccatctctcctgttgtattacttggattgcatgagatagtggggtggttcttgttttttaaaaaatatttccacagtgtgcaaagtgctggcaacatccctccctctcctccaccgctcccccacttttctctggctgccaaggagtcattgattttgattagcttcactgcagagcgtctgtgaagagagagagagagaaagggagggaggctttgaaataaattttaaaaaagacctcatatcgggtttcagcagacagcagtgtgtgtgtgtgtgtgtgtgtgtgtgtgtgtgtgtgtgtgtgtgtgtgaccgtacaagcagagggaggcctctgagatcatcgtttaggtagcttgctgcataatgagatgaagagacttttgcctcttcatttctgatggtgctgcttgctctcagagagtggggagccaggaaccgctgggactggagcccccgggacttcaacactccgaatgagatccagtcctttctggaagcttctcacccccacctgatctcccacaaacaaatacaatctcttcaaatttgggggtccgtttcctattctctttgttattggtgtagcttgagtaggaagtttctctggggagcccattggccccaatggctgctgtccatggtcctaggccgtgcgcatgtcctagaccccagttcctgttttgtttttttttgggttttttttggccctgcgcatctcttagagcccagttcctgtttttttgttcgttttttttttttttttttagccgccttcatttggatactggggacttcttttccacttcttcttcttcttctattttattttgagacagagtctcactctgtcacccaggctggagtgcagtggtgcgagctcagctcactgcaacctccacctcccaggttcaagcgattctcctgcctcagcctcctgagtagctgggattacaggcacccaccaccacgctcggctaatttttgtatttttagtggagatggggttttaccatgttggccagagtggttttgaactcctggcctcaagtgatccacctgccttggcctcccaaagtgctgggattacaggcatgagccaccgagctcagcctccacttcttattttgattcttttctgttttgatggtgagaggaaagggtgatttacccaatactgtcacagaaaaatgaaactgtgactggttttcacaatgtatgtagctgatctcatgttctcctattattatgtttctgacagtgataaaatatcactctccctccctggggcattagaggagtcctcacccacccacctcctacacaagtatcttttagggacagtggctcaccattgtggactttttgagtgtccacctgatattacaagttgcattgaccagaacacagattttgctcttctgtgtcaatacccatttcttttctgaaggtcagaagttggttaagggtttgggggaccagctagacactcttcttagtcccatggagctgactggaagttccatgaggggaggaaattgatgtcaaagtgtcattttaaagcttaagctgaaagtttattttttaaattctcattcattcatttagcatatattgattgagcatctacaatgtgccagttgtagaattccatctcagaagagacttgacttgtggatggtggaggggcagtcctgctcggaagcagatgatgtgaaatgttcctttccagtctggttcacgatgtttaacagatttgtcaggtcaccactgtgaccccaagctttgctggcagattgttatatagtatttactgagagccctgctatctggtaaaggcagttaaaaagcctgcaatctcgactcatttccagcatgaacagactggtccttgctgctttacacaataatcaaagctaccttttatggcgtgctcgccactcccaagcactgggcgaagtgctttacccgtcttcccctccgcgatgcctcatgcccactttagcagatagtactgttagcattcccattttacagtggaggaagctgaggctcagagaggttaagcaacttagctgaaggccacaccaccagcgaagtgcctgagccaagatttggactcgagtccatgggacccccacgctcgtgagctgactgctctgctccactgggtcccttcatgaggtcgtcccacagcactgctagttccagggcgagtgccagcacatggccccactgggagccggggcctgacttaggtctactggaaaaagtgtcacctttggggacactcaaggacaggctggttggtttcgttgtggattttatatactcatgccctaaccctgtgttcctggtttctataaggccccggggaaggtgcaaggaatttgcaaatagggcctgtatgacttatttcctaggacacgggaagcttttcttacctcctttctaccctcttctccaacctgaactcccaagtttcttctcctgaaggtctttgcactataagcgccaaggagcccgtgtgcgtggcaggggcggctgggagggtatctggagaaccttagtgaggcctctggcctagccagagaggcaataagcttggggacgttccgttctgggttctgacgttgttggttctgacgtcgttgtgctcttttgtaagaggaatttcataccttggagacgctttgtacatatttgtaatgactttattaaaaaactgattgtgcacttcta

SEQ ID NO: 139578 - DNA, 587 bp, Homo sapiens
  Payload ID: 7375
  Gene Symbol: HRK
  Gene Name: harakiri, BCL2 interacting protein
  ENST ID: ENST00000550505
  CDS Start-End: 1-57
gcggccgcgcaggtggcggcgctggcggcctggctgctcggcaggcggaacttgtaggaacgcggggcttcttggtggggccggagccgagacccagccggagcgagcaacagcctacatctgacctcagaataccagccgctccggcctttcttgtgcttttgatttaatttggggaaactcattttttcccagctctgagccccaggggaggctcctctgaggctggggaggcctggaggaggatgggtatgatttaaccagtcaatactcaaagatacaggagagagggaacaaaagacgctttatggtggttgagatcttcccatgtcaacacgcaaaggttttcctcatcctttttaatggctgcatgatgttctgttgcttggatgaaccaggatttccttatatggtcacttccttgggaacatttgcattgtttcctgttttctggttggtgaaaaccctgtgtccttggagaaagctggttcccgttttccagagggggagcccagagcttgaaaggccgcggttggcacttcgagaaggaagtggagagtaaagacagcgcctggagcgatcgtaga

SEQ ID NO: 139579 - DNA, 1967 bp, Homo sapiens
  Payload ID: 7376
  Gene Symbol: HARBI1
  Gene Name: harbinger transposase derived 1
  Uniprot ID: Q96MB7
  ENST ID: ENST00000326737
  CDS Start-End: 249-1298
gttgcgcgccgtggcggcctctgtgcagtcgccggttccggaggagggcccaacccggctgggtgggtgggaagtgtggctggtaacctggcagccgcggagagagagaagattataaatggcagagccatttaactgtggttagctgttggattctgatactttcttaaaaatacgttcttgcaccaacatcttcattgggaacagttcagaaaaagcaaagaggagagccaacattcacatttaccatggctataccaataacagtgcttgactgtgacctcttgctatatggccgtggtcaccggacattggaccgttttaagctggatgatgtgactgatgaatacttgatgtccatgtatgggtttccacggcagttcatttattacttggtggagctcttgggggcgaatctttctaggcctactcagcgatccagggctattagcccagagacacaggtccttgcagcattgggtttttatacctcaggttccttccagactcggatgggagatgccattggaatcagtcaggcgtctatgagtcgttgtgttgccaatgtcactgaagcacttgtggaaagggcctcacagttcattcgctttccagctgatgaagcctccattcaggctctgaaggatgaattctatgggttggcagggatgccaggggtgatgggggtggttgactgtatccatgtggccatcaaggcaccaaatgctgaagacctctcctatgtgaaccgaaaaggcctgcattctttaaactgcctgatggtgtgtgacattagagggacactaatgaccgtggagacaaactggcccggcagcctacaggactgtgctgtgctgcagcagtcttccctcagtagtcagtttgaagcgggtatgcacaaagatagctggcttctgggtgacagttccttctttcttcgaacctggctcatgaccccacttcacattcctgaaactccagcagaatatcgctataacatggcccattctgcaactcacagtgtgattgagaagactttccgaaccctctgctcccgattccgctgcctggatggatccaagggggcactgcagtactcaccagagaaatccagccatatcatcttggcctgttgtgtcctccacaacatctccctggagcatgggatggatgtttggtcctctccaatgacaggacccatggaacagcccccggaagaggagtatgagcacatggagtccctggacttagaggctgaccgtattcgtcaggagctaatgctcactcattttagctaatgtagaaggtggagaggagggatacttcccaggagttgtgacagactttcctcctcatcaccttttacacagttccatcatctagcatgactgagtatacagatacttgtcataaactgacatttaatatgtgtgttttggtaaggttggggctatgccagaatatcttgattcatttgcatatgcattaattaaactgaaaccaagacagcggctccctactatccagtgaactctaggttgagtaccactaatttgaaagctcagtggttgcaaacatttatgactgtgcctacaaagtcatagtaaaggtcaggagttcaagacaagaccagcctggccaacatggtgaaaccccgtctctactaaaaatacaaaaattagcggccgggtgcggtggctcacgcctgtaatcccagcactttgggaggccgaggcgggcggatcacctgagttcaggagttaagaccagcctgggcaacatggcaagaccctgtctctactaaaaatacaaaaaaattagctgggcgtggtgacaggtgcctgtaatcccagctactcggtaggctgaggcaggagaatcacttgaaccagggaggcggaggttgtggtgagccgagatcgtgccattgcactccagcctaggcaagaagagcgaaactccgtctc

SEQ ID NO: 139580 - DNA, 717 bp, Homo sapiens
  Payload ID: 7376
  Gene Symbol: HARBI1
  Gene Name: harbinger transposase derived 1
  ENST ID: ENST00000529192
  CDS Start-End: 492-717
ttttttttttttttttttgccccttcttttcttgttagactggtttgaacaccccagcatctgtcctgtatttgtcaggtgaaaccagaagtctttggataatgaaacccgtgaccaattcttacccaaggtggttatgacatatgtcagctgcttcttggcctatatagttagaagccgacctcttttaccttgtgaataattatgtcatcacctccattattcttttggtgttctcaattgaaatgccaagcattaaatgagccacaaagattgaattcccattatccttgaatcagagcaagcctgtcgtgcagccatgagttagtggagaaaaatccggagttagagaagattataaatggcagagccatttaactgtggttagctgttggattctgatactttcttaaaaatacgttcttgcaccaacatcttcattgggaacagttcagaaaaagcaaagaggagagccaacattcacatttaccatggctataccaataacagtgcttgactgtgacctcttgctatatggccgtggtcaccggacattggaccgttttaagctggatgatgtgactgatgaatacttgatgtccatgtatgggtttccacggcagttcatttattacttggtggagctcttgggggcgaatctttctaggcctactcagcgatccagggctattagcccagagacacaggtccttgcag

SEQ ID NO: 139581 - DNA, 620 bp, Homo sapiens
  Payload ID: 7376
  Gene Symbol: HARBI1
  Gene Name: harbinger transposase derived 1
  ENST ID: ENST00000532281
  CDS Start-End: 493-620
cccccgcaaaagttagtacctgcgaagctgcggcacaaagagtggttccgggctctcattacggaggccgggacctgggaccgaccagccgcgcctcctggctgagggttccgcgctccggagctgcagtgaccgtacacgtcgccgatagacacctaaggcttcagaagggtcctggctcgcaggccccagacgttttgctcctaagactccgcgagttgtcgcacccacgtcgactggcgctcttcagtgcttccctcactggttaagcggtcactcccgccttaagcccagcagccggtcgcttcccggcgccgccatcgttagtgtttgttttcatccgcttcgagagaagattataaatggcagagccatttaactgtggttagctgttggattctgatactttcttaaaaatacgttcttgcaccaacatcttcattgggaacagttcagaaaaagcaaagaggagagccaacattcacatttaccatggctataccaataacagtgcttgactgtgacctcttgctatatggccgtggtcaccggacattggaccgttttaagctggatgatgtgactgatgaatacttgatgtccatgtatgggtttccacg

SEQ ID NO: 139582 - DNA, 894 bp, Homo sapiens
  Payload ID: 7377
  Gene Symbol: HRAS
  Gene Name: Harvey rat sarcoma viral oncogene homolog
  Uniprot ID: P01112
  ENST ID: ENST00000311189
  CDS Start-End: 173-742
cccgagccgcacccgccgcggacggagcccatgcgcggggcgaaccgcgcgcccccgcccccgccccgccccggcctcggccccggccctggccccgggggcagtcgcgcctgtgaacggtggggcaggagaccctgtaggaggaccccgggccgcaggcccctgaggagcgatgacggaatataagctggtggtggtgggcgccggcggtgtgggcaagagtgcgctgaccatccagctgatccagaaccattttgtggacgaatacgaccccactatagaggattcctaccggaagcaggtggtcattgatggggagacgtgcctgttggacatcctggataccgccggccaggaggagtacagcgccatgcgggaccagtacatgcgcaccggggagggcttcctgtgtgtgtttgccatcaacaacaccaagtcttttgaggacatccaccagtacagggagcagatcaaacgggtgaaggactcggatgacgtgcccatggtgctggtggggaacaagtgtgacctggctgcacgcactgtggaatctcggcaggctcaggacctcgcccgaagctacggcatcccctacatcgagacctcggccaagacccggcagggagtggaggatgccttctacacgttggtgcgtgagatccggcagcacaagctgcggaagctgaaccctcctgatgagagtggccccggctgcatgagctgcaagtgtgtgctctcctgacgcagcacaagctcaggacatggaggtgccggatgcaggaaggaggtgcagacggaaggaggaggaaggaaggacggaagcaaggaaggaaggaagggctgctggagcccagtcaccccgggaccgtgggccgaggtgactgcagaccctcc

SEQ ID NO: 139583 - DNA, 1099 bp, Homo sapiens
  Payload ID: 7377
  Gene Symbol: HRAS
  Gene Name: Harvey rat sarcoma viral oncogene homolog
  Uniprot ID: P01112
  ENST ID: ENST00000397594
  CDS Start-End: 54-566
gtggggcaggagaccctgtaggaggaccccgggccgcaggcccctgaggagcgatgacggaatataagctggtggtggtgggcgccggcggtgtgggcaagagtgcgctgaccatccagctgatccagaaccattttgtggacgaatacgaccccactatagaggattcctaccggaagcaggtggtcattgatggggagacgtgcctgttggacatcctggataccgccggccaggaggagtacagcgccatgcgggaccagtacatgcgcaccggggagggcttcctgtgtgtgtttgccatcaacaacaccaagtcttttgaggacatccaccagtacagggagcagatcaaacgggtgaaggactcggatgacgtgcccatggtgctggtggggaacaagtgtgacctggctgcacgcactgtggaatctcggcaggctcaggacctcgcccgaagctacggcatcccctacatcgagacctcggccaagacccggcagggcagccgctctggctctagctccagctccgggaccctctgggaccccccgggacccatgtgacccagcggcccctcgcgctggagtggaggatgccttctacacgttggtgcgtgagatccggcagcacaagctgcggaagctgaaccctcctgatgagagtggccccggctgcatgagctgcaagtgtgtgctctcctgacgcaggtgagggggactcccagggcggccgccacgcccaccggatgaccccggctccccgcccctgccggtctcctggcctgcggtcagcagcctcccttgtgccccgcccagcacaagctcaggacatggaggtgccggatgcaggaaggaggtgcagacggaaggaggaggaaggaaggacggaagcaaggaaggaaggaagggctgctggagcccagtcaccccgggaccgtgggccgaggtgactgcagaccctcccagggaggctgtgcacagactgtcttgaacatcccaaatgccaccggaaccccagcccttagctcccctcccaggcctctgtgggcccttgtcgggcacagatgggatcacagtaaattattggatggtcttga

SEQ ID NO: 139584 - DNA, 1100 bp, Homo sapiens
  Payload ID: 7377
  Gene Symbol: HRAS
  Gene Name: Harvey rat sarcoma viral oncogene homolog
  Uniprot ID: P01112
  ENST ID: ENST00000397596
  CDS Start-End: 137-706
gggggcgcggggccggcgggcgtaagcggcggcggcggcggcggcggcgggtgggtggggccgggcggggcccgcgggcacaggtggggcaggagaccctgtaggaggaccccgggccgcaggcccctgaggagcgatgacggaatataagctggtggtggtgggcgccggcggtgtgggcaagagtgcgctgaccatccagctgatccagaaccattttgtggacgaatacgaccccactatagaggattcctaccggaagcaggtggtcattgatggggagacgtgcctgttggacatcctggataccgccggccaggaggagtacagcgccatgcgggaccagtacatgcgcaccggggagggcttcctgtgtgtgtttgccatcaacaacaccaagtcttttgaggacatccaccagtacagggagcagatcaaacgggtgaaggactcggatgacgtgcccatggtgctggtggggaacaagtgtgacctggctgcacgcactgtggaatctcggcaggctcaggacctcgcccgaagctacggcatcccctacatcgagacctcggccaagacccggcagggagtggaggatgccttctacacgttggtgcgtgagatccggcagcacaagctgcggaagctgaaccctcctgatgagagtggccccggctgcatgagctgcaagtgtgtgctctcctgacgcaggtgagggggactcccagggcggccgccacgcccaccggatgaccccggctccccgcccctgccggtctcctggcctgcggtcagcagcctcccttgtgccccgcccagcacaagctcaggacatggaggtgccggatgcaggaaggaggtgcagacggaaggaggaggaaggaaggacggaagcaaggaaggaaggaagggctgctggagcccagtcaccccgggaccgtgggccgaggtgactgcagaccctcccagggaggctgtgcacagactgtcttgaacatcccaaatgccaccggaaccccagcccttagctcccctcccaggcctctgtgggcccttgtcgggcacagatgggatcacagtaaattattggatggtcttga

SEQ ID NO: 139585 - DNA, 1233 bp, Homo sapiens
  Payload ID: 7377
  Gene Symbol: HRAS
  Gene Name: Harvey rat sarcoma viral oncogene homolog
  Uniprot ID: P01112
  ENST ID: ENST00000417302
  CDS Start-End: 189-701
tgccctgcgcccgcaacccgagccgcacccgccgcggacggagcccatgcgcggggcgaaccgcgcgcccccgcccccgccccgccccggcctcggccccggccctggccccgggggcagtcgcgcctgtgaacggtggggcaggagaccctgtaggaggaccccgggccgcaggcccctgaggagcgatgacggaatataagctggtggtggtgggcgccggcggtgtgggcaagagtgcgctgaccatccagctgatccagaaccattttgtggacgaatacgaccccactatagaggattcctaccggaagcaggtggtcattgatggggagacgtgcctgttggacatcctggataccgccggccaggaggagtacagcgccatgcgggaccagtacatgcgcaccggggagggcttcctgtgtgtgtttgccatcaacaacaccaagtcttttgaggacatccaccagtacagggagcagatcaaacgggtgaaggactcggatgacgtgcccatggtgctggtggggaacaagtgtgacctggctgcacgcactgtggaatctcggcaggctcaggacctcgcccgaagctacggcatcccctacatcgagacctcggccaagacccggcagggcagccgctctggctctagctccagctccgggaccctctgggaccccccgggacccatgtgacccagcggcccctcgcgctggagtggaggatgccttctacacgttggtgcgtgagatccggcagcacaagctgcggaagctgaaccctcctgatgagagtggccccggctgcatgagctgcaagtgtgtgctctcctgacgcaggtgagggggactcccagggcggccgccacgcccaccggatgaccccggctccccgcccctgccggtctcctggcctgcggtcagcagcctcccttgtgccccgcccagcacaagctcaggacatggaggtgccggatgcaggaaggaggtgcagacggaaggaggaggaaggaaggacggaagcaaggaaggaaggaagggctgctggagcccagtcaccccgggaccgtgggccgaggtgactgcagaccctcccagggaggctgtgcacagactgtcttgaacatcccaaatgccaccggaaccccagcccttagctcccctcccaggcctctgtgggcccttgtcgggcacagatgggatcacagtaaattattggatggtcttg

SEQ ID NO: 139586 - DNA, 1151 bp, Homo sapiens
  Payload ID: 7377
  Gene Symbol: HRAS
  Gene Name: Harvey rat sarcoma viral oncogene homolog
  Uniprot ID: P01112
  ENST ID: ENST00000451590
  CDS Start-End: 189-758
tgccctgcgcccgcaacccgagccgcacccgccgcggacggagcccatgcgcggggcgaaccgcgcgcccccgcccccgccccgccccggcctcggccccggccctggccccgggggcagtcgcgcctgtgaacggtggggcaggagaccctgtaggaggaccccgggccgcaggcccctgaggagcgatgacggaatataagctggtggtggtgggcgccggcggtgtgggcaagagtgcgctgaccatccagctgatccagaaccattttgtggacgaatacgaccccactatagaggattcctaccggaagcaggtggtcattgatggggagacgtgcctgttggacatcctggataccgccggccaggaggagtacagcgccatgcgggaccagtacatgcgcaccggggagggcttcctgtgtgtgtttgccatcaacaacaccaagtcttttgaggacatccaccagtacagggagcagatcaaacgggtgaaggactcggatgacgtgcccatggtgctggtggggaacaagtgtgacctggctgcacgcactgtggaatctcggcaggctcaggacctcgcccgaagctacggcatcccctacatcgagacctcggccaagacccggcagggagtggaggatgccttctacacgttggtgcgtgagatccggcagcacaagctgcggaagctgaaccctcctgatgagagtggccccggctgcatgagctgcaagtgtgtgctctcctgacgcaggtgagggggactcccagggcggccgccacgcccaccggatgaccccggctccccgcccctgccggtctcctggcctgcggtcagcagcctcccttgtgccccgcccagcacaagctcaggacatggaggtgccggatgcaggaaggaggtgcagacggaaggaggaggaaggaaggacggaagcaaggaaggaaggaagggctgctggagcccagtcaccccgggaccgtgggccgaggtgactgcagaccctcccagggaggctgtgcacagactgtcttgaacatcccaaatgccaccggaaccccagcccttagctcccctcccaggcctctgtgggcccttgtcgggcacagatgggatcacagtaaattattggatggtcttg

SEQ ID NO: 139587 - DNA, 1114 bp, Homo sapiens
  Payload ID: 7377
  Gene Symbol: HRAS
  Gene Name: Harvey rat sarcoma viral oncogene homolog
  Uniprot ID: P01112
  ENST ID: ENST00000493230
  CDS Start-End: 177-689
gcaacccgagccgcacccgccgcggacggagcccatgcgcggggcgaaccgcgcgcccccgcccccgccccgccccggcctcggccccggccctggccccgggggcagtcgcgcctgtgaacggtggggcaggagaccctgtaggaggaccccgggccgcaggcccctgaggagcgatgacggaatataagctggtggtggtgggcgccggcggtgtgggcaagagtgcgctgaccatccagctgatccagaaccattttgtggacgaatacgaccccactatagaggattcctaccggaagcaggtggtcattgatggggagacgtgcctgttggacatcctggataccgccggccaggaggagtacagcgccatgcgggaccagtacatgcgcaccggggagggcttcctgtgtgtgtttgccatcaacaacaccaagtcttttgaggacatccaccagtacagggagcagatcaaacgggtgaaggactcggatgacgtgcccatggtgctggtggggaacaagtgtgacctggctgcacgcactgtggaatctcggcaggctcaggacctcgcccgaagctacggcatcccctacatcgagacctcggccaagacccggcagggcagccgctctggctctagctccagctccgggaccctctgggaccccccgggacccatgtgacccagcggcccctcgcgctggagtggaggatgccttctacacgttggtgcgtgagatccggcagcacaagctgcggaagctgaaccctcctgatgagagtggccccggctgcatgagctgcaagtgtgtgctctcctgacgcagcacaagctcaggacatggaggtgccggatgcaggaaggaggtgcagacggaaggaggaggaaggaaggacggaagcaaggaaggaaggaagggctgctggagcccagtcaccccgggaccgtgggccgaggtgactgcagaccctcccagggaggctgtgcacagactgtcttgaacatcccaaatgccaccggaaccccagcccttagctcccctcccaggcctctgtgggcccttgtcgggcacagatgggatcacagtaaattattggatggtcttga

SEQ ID NO: 139588 - DNA, 1233 bp, Homo sapiens; identical to SEQ ID NO: 139585
  Payload ID: 7377
  Gene Symbol: HRAS
  Gene Name: Harvey rat sarcoma viral oncogene homolog
  Uniprot ID: P01112
  ENST ID: ENST00000616241
  CDS Start-End: 189-701

SEQ ID NO: 139589 - DNA, 1151 bp, Homo sapiens; identical to SEQ ID NO: 139586
  Payload ID: 7377
  Gene Symbol: HRAS
  Gene Name: Harvey rat sarcoma viral oncogene homolog
  Uniprot ID: P01112
  ENST ID: ENST00000610977
  CDS Start-End: 189-758

SEQ ID NO: 139590 - DNA, 894 bp, Homo sapiens; identical to SEQ ID NO: 139582
  Payload ID: 7377
  Gene Symbol: HRAS
  Gene Name: Harvey rat sarcoma viral oncogene homolog
  Uniprot ID: P01112
  ENST ID: ENST00000615062
  CDS Start-End: 173-742

SEQ ID NO: 139591 - DNA, 1099 bp, Homo sapiens; identical to SEQ ID NO: 139583
  Payload ID: 7377
  Gene Symbol: HRAS
  Gene Name: Harvey rat sarcoma viral oncogene homolog
  Uniprot ID: P01112
  ENST ID: ENST00000631967
  CDS Start-End: 54-566

SEQ ID NO: 139592 - DNA, 1114 bp, Homo sapiens; identical to SEQ ID NO: 139587
  Payload ID: 7377
  Gene Symbol: HRAS
  Gene Name: Harvey rat sarcoma viral oncogene homolog
  Uniprot ID: P01112
  ENST ID: ENST00000634098
  CDS Start-End: 177-689

SEQ ID NO: 139593 - DNA, 167 bp, Homo sapiens
  Payload ID: 7377
  Gene Symbol: HRAS
  Gene Name: Harvey rat sarcoma viral oncogene homolog
  ENST ID: ENST00000633700
  CDS Start-End: 124-167
tcactgggtcattaagagcaagtgggggcgaggcgacagccctcccgcacgctgggttgcagctgcacaggtggggcaggagaccctgtaggaggaccccgggccgcaggcccctgaggagcgatgacggaatataagctggtggtggtgggcgccggcggtgtggg

SEQ ID NO: 139594 - DNA, 1100 bp, Homo sapiens; identical to SEQ ID NO: 139584
  Payload ID: 7377
  Gene Symbol: HRAS
  Gene Name: Harvey rat sarcoma viral oncogene homolog
  Uniprot ID: P01112
  ENST ID: ENST00000631404
  CDS Start-End: 137-706

SEQ ID NO: 139595 - DNA, 1125 bp, Homo sapiens
  Payload ID: 7378
  Gene Symbol: HAUS1
  Gene Name: HAUS augmin-like complex, subunit 1
  Uniprot ID: Q96CS2
  ENST ID: ENST00000282058
  CDS Start-End: 81-917
ggcgtgtgggcggggcctagggagtgagcggggcgcatctcccgctaggagttcctagtaaagtggcgggagccgcagctatggagccgcaggaggagagagaaacgcaggttgctgcgtggttaaaaaaaatatttggagatcatcctattccacagtatgaggtgaacccacggaccacagagattttacatcacctttcagaacgcaacagggtccgggacagggatgtctacctggtaatagaggacttgaagcagaaagcaagtgaatacgagtcagaagccaagtatcttcaagaccttctcatggagagtgtgaatttttcccccgccaatctctctagcactggttccaggtatctgaatgctttggttgacagtgcggtggcccttgaaacaaaggatacctcgctagctagttttatccctgcagtgaatgatttgacctctgatctctttcgtaccaaatccaaaagtgaagaaatcaagattgaactggaaaaacttgaaaaaaatttaactgcaactttagtattagaaaaatgtctacaagaggatgtcaagaaagcagagttgcatctgtctacagaaagggccaaagttgataatcgtcgtcagaacatggactttctaaaagcaaagtcagaggaattcagatttggaatcaaggctgcagaggagcaactttcagccagaggcatggatgcttctctgtctcatcagtccttagtagcactatcagagaaactggcaagattaaagcaacagactatacctttgaagaaaaaattggagtcctatttagacttaatgccgaatccgtctcttgctcaagtgaaaattgaagaagcaaagcgagaactagatagcattgaagctgaacttacaagaagagtagacatgatggaactgtgacaaaagccaaataaacatccttttccctaacaaagtaaattgaataggactttacagagttctttttcctcttggcatttcctaataacaaaactttctgtgttcttagattacagaatatcataattgatagaatatggtttcttactgtgtgttgcatttttgtgcccaaatacatagttttcatattaaaaagccttttctctta

SEQ ID NO: 139596 - DNA, 1098 bp, Homo sapiens
  Payload ID: 7378
  Gene Symbol: HAUS1
  Gene Name: HAUS augmin-like complex, subunit 1
  ENST ID: ENST00000591715
  CDS Start-End: 17-259
ggcgggagccgcagctatggagccgcaggaggagagagaaacgcaggttgctgcgtggttaaaaaaaatatttggagatcatcctattccacagtatgaggtgaacccacggaccacagagattttacatcacctttcagaacgcaacagggtccgggacagggatgtctacctggtaatagaggacttgaagcagaaagcaagtgaatacgagtcagaaggtgagattaagtccagagttttgaacgagaataaatagagccaagtatcttcaagaccttctcatggagagtgtgaatttttcccccgccaatctctctagcactggttccaggtatctgaatgctttggttgacagtgcggtggcccttgaaacaaaggatacctcgctagctagttttatccctgcagtgaatgatttgacctctgatctctttcgtaccaaatccaaaagtgaagaaatcaagattgaactggaaaaacttgaaaaaaatttaactgcaactttagtattagaaaaatgtctacaagaggatgtcaagaaagcagagttgcatctgtctacagaaagggccaaagttgataatcgtcgtcagaacatggactttctaaaagcaaagtcagaggaattcagatttggaatcaaggctgcagaggagcaactttcagccagaggcatggatgcttctctgtctcatcagtccttagtagcactatcagagaaactggcaagattaaagcaacagactatacctttgaagaaaaaattggagtcctatttagacttaatgccgaatccgtctcttgctcaagtgaaaattgaagaagcaaagcgagaactagatagcattgaagctgaacttacaagaagagtagacatgatggaactgtgacaaaagccaaataaacatccttttccctaacaaagtaaattgaataggactttacagagttctttttcctcttggcatttcctaataacaaaactttctgtgttcttagattacagaatatcataattgatagaatatggtttcttactgtgtgttgcatttttgtgcccaaatacatagttttcatattaaaaagccttttctc

SEQ ID NO: 139597 - DNA, 879 bp, Homo sapiens
  Payload ID: 7378
  Gene Symbol: HAUS1
  Gene Name: HAUS augmin-like complex, subunit 1
  ENST ID: ENST00000592206
  CDS Start-End: 13-228
ggagccgcagctatggagccgcaggaggagagagaaacgcaggttgctgcgtggttaaaaaaaatatttggagatcatcctattccacagtatgaggtgaacccacggaccacagagattttacatcacctttcagaacgcaacagggtccgggacagggatgtctacctggtaatagaggacttgaagcagaaagcaagtgaatacgagtcagaagttttcttttaaaagttaatatacagcagggccaggtgcagtggctcacgcctgtaatcccagcactttgggaggccaaggtgggcggatcacttgagaccaggagtttgagacaagcctggccaagatgccaagtatcttcaagaccttctcatggagagtgtgaatttttcccccgccaatctctctagcactggttccaggtatctgaatgctttggttgacagtgcggtggcccttgaaacaaaggatacctcgctagctagttttatccctgcagtgaatgatttgacctctgatctctttcgtaccaaatccaaaagtgaagaaatcaagattgaactggaaaaacttgaaaaaaatttaactgcaactttagtattagaaaaatgtctacaagaggatgtcaagaaagcagagttgcatctgtctacagaaagggccaaagttgataatcgtcgtcagaacatggactttctaaaagcaaagtcagaggaattcagatttggaatcaaggctgcagaggagcaactttcagccagaggcatggatgcttctctgtctcatcagtccttagtagcactatcagagaaactggcaagattaaagcaacagactatacctttgaagaaaaaattggagtcctatttagacttaatgccg

SEQ ID NO: 139598 - DNA, 1079 bp, Homo sapiens
  Payload ID: 7378
  Gene Symbol: HAUS1
  Gene Name: HAUS augmin-like complex, subunit 1
  ENST ID: ENST00000593165
  CDS Start-End: 1-284
aggaggagagagaaacgcaggttgctgcgtggttaaaaaaaatatttggagatcatcctattccacagtatgaggtgaacccacggaccacagagattttacatcacctttcagaacgcaacagggtccgggacagggatgtctacctggtaatagaggacttgaagcagaaagcaagtgaatacgagtcagaagagtcatgctctgtcgcccaggctggagtgctttggtgtgatctcagctcactgcaacctccgcctcttgggttcaagcaattctcctgactcagcctcctgaataactaggattacaggcacatgccaccgtgctcagccaagtatcttcaagaccttctcatggagagtgtgaatttttcccccgccaatctctctagcactggttccaggtatctgaatgctttggttgacagtgcggtggcccttgaaacaaaggatacctcgctagctagttttatccctgcagtgaatgatttgacctctgatctctttcgtaccaaatccaaaagtgaagaaatcaagattgaactggaaaaacttgaaaaaaatttaactgcaactttagtattagaaaaatgtctacaagaggatgtcaagaaagcagagttgcatctgtctacagaaagggccaaagttgataatcgtcgtcagaacatggactttctaaaagcaaagtcagaggaattcagatttggaatcaaggctgcagaggagcaactttcagccagaggcatggatgcttctctgtctcatcagtccttagtagcactatcagagaaactggcaagattaaagcaacagactatacctttgaagaaaaaattggagtcctatttagacttaatgccgaatccgtctcttgctcaagtgaaaattgaagaagcaaagcgagaactagatagcattgaagctgaacttacaagaagagtagacatgatggaactgtgacaaaagccaaataaacatccttttccctaacaaagtaaattgaataggactttacagagttctttttcctcttggcatttcctaataacaaaactttctgtgttcttagattac

SEQ ID NO: 139599 - DNA, 523 bp, Homo sapiens
  Payload ID: 7378
  Gene Symbol: HAUS1
  Gene Name: HAUS augmin-like complex, subunit 1
  ENST ID: ENST00000586060
  CDS Start-End: 28-312
cctagtaaagtggcgggagccgcagctatggagccgcaggaggagagagaaacgcaggttgctgcgtggttaaaaaaaatatttggagatcatcctattccacagtatgaggtgaacccacggaccacagagattttacatcacctttcagaacgcaacagggtccgggacagggatgtctacctggtaatagaggacttgaagcagaaagcaagtgaatacgagtcagaagggatgtcaagaaagcagagttgcatctgtctacagaaagggccaaagttgataatcgtcgtcagaacatggactttctaaaagcaaagtcagaggaattcagatttggaatcaaggctgcagagaaactggcaagattaaagcaacagactatacctttgaagaaaaaattggagtcctatttagacttaatgccgaatccgtctcttgctcaagtgaaaattgaagaagcaaagcgagaactagatagcattgaagctgaacttacaagaagagtagacatgatggaact

SEQ ID NO: 139600 - DNA, 616 bp, Homo sapiens
  Payload ID: 7378
  Gene Symbol: HAUS1
  Gene Name: HAUS augmin-like complex, subunit 1
  ENST ID: ENST00000589554
  CDS Start-End: 7-291
gcagctatggagccgcaggaggagagagaaacgcaggttgctgcgtggttaaaaaaaatatttggagatcatcctattccacagtatgaggtgaacccacggaccacagagattttacatcacctttcagaacgcaacagggtccgggacagggatgtctacctggtaatagaggacttgaagcagaaagcaagtgaatacgagtcagaagggatgtcaagaaagcagagttgcatctgtctacagaaagggccaaagttgataatcgtcgtcagaacatggactttctaaaagcaaagtcagaggaattcagatttggaatcaaggctgcagaggagcaactttcagccagaggcatggatgcttctctgtctcatcagtccttagtagcactatcagagaaactggcaagattaaagcaacagactatacctttgaagaaaaaattggagtcctatttagacttaatgccgaatccgtctcttgctcaagtgaaaattgaagaagcaaagcgagaactagatagcattgaagctgaacttacaagaagagtagacatgatggaactgtgacaaaagccaaataaacatccttttccctaacaaagtaaattgaa

SEQ ID NO: 139601 - DNA, 506 bp, Homo sapiens
  Payload ID: 7378
  Gene Symbol: HAUS1
  Gene Name: HAUS augmin-like complex, subunit 1
  ENST ID: ENST00000585518
  CDS Start-End: 11-382
agccgcagctatggagccgcaggaggagagagaaacgcaggttgctgcgtggttaaaaaaaatatttggagatcatcctattccacagtatgaggtgaacccacggaccacagagattttacatcacctttcagaacgcaacagggtccgggacagggatgtctacctggtaatagaggacttgaagcagaaagcaagtgaatacgagtcagaaggagcaactttcagccagaggcatggatgcttctctgtctcatcagtccttagtagcactatcagagaaactggcaagattaaagcaacagactatacctttgaagaaaaaattggagtcctatttagacttaatgccgaatccgtctcttgctcaagtgaaaattgaagaagcaaagcgagaactagatagcattgaagctgaacttacaagaagagtagacatgatggaactgtgacaaaagccaaataaacatccttttccctaacaaagtaaattgaataggacttta

SEQ ID NO: 139602 - DNA, 357 bp, Homo sapiens
  Payload ID: 7378
  Gene Symbol: HAUS1
  Gene Name: HAUS augmin-like complex, subunit 1
  ENST ID: ENST00000592471
  CDS Start-End: 35-357
aggagttcctagtaaagtggcgggagccgcagctatggagccgcaggaggagagagaaacgcaggtgaacccacggaccacagagattttacatcacctttcagaacgcaacagggtccgggacagggatgtctacctggtaatagaggacttgaagcagaaagcaagtgaatacgagtcagaagccaagtatcttcaagaccttctcatggagagtgtgaatttttcccccgccaatctctctagcactggttccaggtatctgaatgctttggttgacagtgcggtggcccttgaaacaaaggatacctcgctagctagttttatccctgcagtgaatgatttgacctctgatct

SEQ ID NO: 139603 - DNA, 3949 bp, Homo sapiens
  Payload ID: 7379
  Gene Symbol: HAUS2
  Gene Name: HAUS augmin-like complex, subunit 2
  Uniprot ID: Q9NVX0
  ENST ID: ENST00000260372
  CDS Start-End: 64-771
gccgtgcgttcgccctgcgatcccgctcactcttggcgccttcgcggaaggtgcgtccgagccatggccgctgccaacccgtgggacccggcgtccgcgcctaacggcgctgggctagtgctaggccacttcatagcttcggggatggtcaatcaggagatgttaaacatgtctaagaaaacagtttcttgttttgtgaacttcaccagactacagcagatcacaaatattcaagctgaaatctaccagaaaaacctggaaattgaactcctgaaactagaaaaagatacagcagatgttgttcatcctttctttttggctcagaagtgtcatactctgcaaagcatgaataatcatttggaagcagtgctgaaagagaagagatcccttaggcaaagactgttgaaacccatgtgccaggaaaacttacctattgaagctgtttatcacagatatatggtacatttgctggagttggctgtgactttcattgagagattagaaacccaccttgaaacaattagaaatattcctcatttagctgcaaatctaaagaaaatgaaccaggctttagcaaagatggatatattggtgactgagacagaagaactggcagagaatatactcaagtggcgtaaacaacaaaacgaagtttcgtcttgtatccccaaaatattagctgaagaaagttatctttataaacatgatattataatgcctcctttaccttttacttctaaagttcatgtccaaactattaatgccaagtagtcatcaactttatttttgcttaattatgtgtagtcatatgaagtctatttctagttgactgtaacatgggtattaatagtctttgctgctggtaatactgaaagaacctgctttatattggagtatcaagatctcaggttcattaagaccaaactgacttttcctttgtttttcatatatttttattctacctttcagtaaaactagagaagctaaaaaatagccatgacaatttattaatataagtgaattaaccatttctcaggtgggaaattctctttttttaaaaatgtgtgtttatcgtctggtgtggtggctcacacctgtaatcctaacacttggggaggctgaggcgggcagatcacttaaacccaggagttcaagaccagcctgggtaacatggtgaaatcccatatctacaaaataaacaaaaaattagccgaccatggtggtgcatgcctgtagtcccagctattcgggaggctgaggtaagaggatcacctaagcctgtgaggtcatggttgcaatgagtcatgatcacgccactgcgctacagcctgggcgacacagtaagaccctgtctcaaaaaaaagaagtgtgtttctggccaggcacggtggctcacgcctgtaatcccagcactttgggaggcctaggtgggcagatcatgaggtcaggagttcgagaccagcctggccaacatggcgaaacacctgtctctactaaaaatacaaaaattaggccgggcgcagtggctcacacctgtaatcccaacactttgggaggccgacccagatgggtggatcacctgaggtcaggagtttgagaccagccttgacaacatggtgaaaccccatctctggtagaaatataaaaaattaaccgggcatggtggtggacgcctgtaatcccagctacttgggaggctgaggcagaataatcgcttgaacccaggaggcagaggttgcagtaagccaagatcgtgcctctgcactccaacctgggtgatggagcaagactccatctccaaaaaaataaaaaatacaaaaattagccaggcatggtagcatgtgcctgtaatcccagctactcaggaggctgaggcaggagaatcacttgaacccaggaggcagaggttgcagtgagcccagatcgtgccaccgcactctagcctgggcaacagagcaagactctgtcttaaaaaaaaaaaaaaaaggtgtttctgaattagaagggtcttcttgaatctgaaaatgtctatgatgattattcctgtgggaatgtcactaagtatgcagaaaagagtaacacagccagcctgacttatcctttgaaaggcctgattataaggtttgtcctcagctgttgcatctgggaacttagatatcagaaggtatcttagtctgttctgctgtcataacagaattacacaaactaagtattttataatgaacagaagtttatttggttgacaggtgtggaggctaggcagtccaagaacatggtgccagcatctagtgagggtcttgccatggcagaaggcaccacatggcaagtgagcatgagaaagatatatgggtctaaacttagccttttatcatgagcccactcccaagatagcagcactaattcattaatgagggcaaagccctccttacctaattactttttaaaggtctcataacacttttacaatgtcaattaaatttccaacacttgaactttgggggacatatttaaaccttaacaggagggctccactcactgaaaagagtcgttcatggtagctaacctgtggtttgtgctgaaaacctgctttcttcctgggagtctagaattttggtacatggtaggtagaaggtacctacgtgaccagcccccagtaaaaaccctgggcactgtatctctaacaagtttccctggtaaacaacatttctcacatgttgtcacaattcagttgctggtggaatgaaacaacagatatgtgtgactccactgttagaggactctggaagcttatacctggtttcccccagactttgcctctgtaccttttctctttgctgttttgcttcatatgcttttgctgtaataaatcatagctgtgtgatgatatgctgagtcttgtgaattctcctagcaaatcatggaacctggaggtagtcttggagaccctggcatacaaagcagttcctaagtgtttactggtagctgtaggaataggcaaagaagaaacagcaaagaaaaaggcacactgtggtataactttggaggtttaccttgcaaaatgctcagatattttacctatcagaggttattgtgcatataatagagagtgatatactaacaactgcctcaggatatactctttttaatcagtattgtaactaaccttggcttattttacttttagacttggggttctattttgctttaaaacatgtacatcagttttgttttttgttttgttcttttctttcctttttttttttttttttttaaagacaggatctcactctgtcacccaggttgctgagagtgtggtgtggcccaatcttgacctcactgcagccttgacctctcaggctcaagtgatcctcccacctcagcctcccaagtagctgggactataggcacgcgccaccacgcctggctaatttttgtattttctgtagagacagagttttgccatgttgttgaggctggtcttgaactcctgggttcaaacgaccctcccgcctcagcctccgaaagtgctgggagtacaggtgttagccactgcgcctggcctcattgtactccttaacacaagaagacttcaacaatgataagtagttgtttataaggaagcaggatcattaccaaaataaatcctgctaaaacaacaggaatcatgttttaaagcctagtttgctaatttttgctagtaggataagagtgatcgtaatatctcgaacattacatagacacttaaaacctttagttgtatttcatcaaaaatctgttcataccccacgttggtttcaaaacatactatgctttttcttcgtgttatttcctatattcatttttgtgtgtatgtgtatgtcacaaatattgatatgcctggttgtttatttttgttttctattatgcctttttcaaaatataaaaataaacttgtaatttctaactaaaa

SEQ ID NO: 139604 - DNA, 2853 bp, Homo sapiens
  Payload ID: 7379
  Gene Symbol: HAUS2
  Gene Name: HAUS augmin-like complex, subunit 2
  ENST ID: ENST00000391623
  CDS Start-End: 36-317
actcttggcgccttcgcggaaggtgcgtccgagccatggccgctgccaacccgtgggacccggcgtccgcgcctaacggcgctgggctagtgctaggccacttcatagcttcggggatggtcaatcagaaaaacctggaaattgaactcctgaaactagaaaaagatacagcagatgttgttcatcctttctttttggagatgaagtcttgctatgttgcccaggctggtctcgaactcatggcctcaattctcccgtttcagtctcccaaaacactgcgattacagctcagaagtgtcatactctgcaaagcatgaataatcatttggaagcagtgctgaaagagaagagatcccttaggcaaagactgttgaaacccatgtgccaggaaaacttacctattgaagctgtttatcacagatatatggtacatttgctggagttggctgtgactttcattgagagattagaaacccaccttgaaacaattagaaatattcctcatttagctgcaaatctaaagaaaatgaaccaggctttagcaaagatggatatattggtgactgagacagaagaactggcagagaatatactcaagtggcgtaaacaacaaaacgaagtttcgtcttgtatccccaaaatattagctgaagaaagttatctttataaacatgatattataatgcctcctttaccttttacttctaaagttcatgtccaaactattaatgccaagtagtcatcaactttatttttgcttaattatgtgtagtcatatgaagtctatttctagttgactgtaacatgggtattaatagtctttgctgctggtaatactgaaagaacctgctttatattggagtatcaagatctcaggttcattaagaccaaactgacttttcctttgtttttcatatatttttattctacctttcagtaaaactagagaagctaaaaaatagccatgacaatttattaatataagtgaattaaccatttctcaggtgggaaattctctttttttaaaaatgtgtgtttatcgtctggtgtggtggctcacacctgtaatcctaacacttggggaggctgaggcgggcagatcacttaaacccaggagttcaagaccagcctgggtaacatggtgaaatcccatatctacaaaataaacaaaaaattagccgaccatggtggtgcatgcctgtagtcccagctattcgggaggctgaggtaagaggatcacctaagcctgtgaggtcatggttgcaatgagtcatgatcacgccactgcgctacagcctgggcgacacagtaagaccctgtctcaaaaaaaagaagtgtgtttctggccaggcacggtggctcacgcctgtaatcccagcactttgggaggcctaggtgggcagatcatgaggtcaggagttcgagaccagcctggccaacatggcgaaacacctgtctctactaaaaatacaaaaattaggccgggcgcagtggctcacacctgtaatcccaacactttgggaggccgacccagatgggtggatcacctgaggtcaggagtttgagaccagccttgacaacatggtgaaaccccatctctggtagaaatataaaaaattaaccgggcatggtggtggacgcctgtaatcccagctacttgggaggctgaggcagaataatcgcttgaacccaggaggcagaggttgcagtaagccaagatcgtgcctctgcactccaacctgggtgatggagcaagactccatctccaaaaaaataaaaaatacaaaaattagccaggcatggtagcatgtgcctgtaatcccagctactcaggaggctgaggcaggagaatcacttgaacccaggaggcagaggttgcagtgagcccagatcgtgccaccgcactctagcctgggcaacagagcaagactctgtcttaaaaaaaaaaaaaaaaggtgtttctgaattagaagggtcttcttgaatctgaaaatgtctatgatgattattcctgtgggaatgtcactaagtatgcagaaaagagtaacacagccagcctgacttatcctttgaaaggcctgattataaggtttgtcctcagctgttgcatctgggaacttagatatcagaaggtatcttagtctgttctgctgtcataacagaattacacaaactaagtattttataatgaacagaagtttatttggttgacaggtgtggaggctaggcagtccaagaacatggtgccagcatctagtgagggtcttgccatggcagaaggcaccacatggcaagtgagcatgagaaagatatatgggtctaaacttagccttttatcatgagcccactcccaagatagcagcactaattcattaatgagggcaaagccctccttacctaattactttttaaaggtctcataacacttttacaatgtcaattaaatttccaacacttgaactttgggggacatatttaaaccttaacaggagggctccactcactgaaaagagtcgttcatggtagctaacctgtggtttgtgctgaaaacctgctttcttcctgggagtctagaattttggtacatggtaggtagaaggtacctacgtgaccagcccccagtaaaaaccctgggcactgtatctctaacaagtttccctggtaaacaacatttctcacatgttgtcacaattcagttgctggtggaatgaaacaacagatatgtgtgactccactgttagaggactctggaagcttatacctggtttcccccagactttgcctctgtaccttttctctttgctgttttgcttcatatgcttttgctgtaataaatcatagctgtgtgatgat

SEQ ID NO: 139605 - DNA, 626 bp, Homo sapiens
  Payload ID: 7379
  Gene Symbol: HAUS2
  Gene Name: HAUS augmin-like complex, subunit 2
  ENST ID: ENST00000564279
  CDS Start-End: 16-390
aggtgcgtccgagccatggccgctgccaacccgtgggacccggcgtccgcgcctaacggcgctgggctagtgctaggccacttcatagcttcggggatggtcaatcaggagatgttaaacatgtctaagaaaacagtttcttgttttgtgaacttcaccagactacagcagatcacaaatattcaagctgaaatctaccagaaaaacctggaaattgaactcctgaaactagaaaaagatacagcagatgttgttcatcctttctttttggagatgaagtcttgctatgttgcccaggctggtctcgaactcatggcctcaattctcccgtttcagtctcccaaaacactgcgattacagctcagaagtgtcatactctgcaaagcatgaataatcatttggaagcagtgctgaaagagaagagatcccttaggcaaagactgttgaaacccatgtgccaggaaaacttacctattgaagctgtttatcacagatatatggtacatttgctggagttggctgtgactttcattgagagattagaaacccaccttgaaacaattagaaatattcctcatttagctgcaaatctaaagaaaatgaaccaggctttagcaaagatggat

SEQ ID NO: 139606 - DNA, 861 bp, Homo sapiens
  Payload ID: 7379
  Gene Symbol: HAUS2
  Gene Name: HAUS augmin-like complex, subunit 2
  ENST ID: ENST00000570178
  CDS Start-End: 7-294
cgagccatggccgctgccaacccgtgggacccggcgtccgcgcctaacggcgctgggctagtgctaggccacttcatagcttcggggatggtcaatcaggagatgttaaacatgtctaagaaaacagtttcttgttttgtgaacttcaccagactacagcagatcacaaatattcaagctgaaatctaccagaaaaacctggaaattgaactcctgaaactagaaaaagatacagcagatgttgttcatcctttctttttggatatatggtacatttgctggagttggctgtgactttcattgagagattagaaacccaccttgaaacaattagaaatattcctcatttagctgcaaatctaaagaaaatgaaccaggctttagcaaagatggatatattggtgactgagacagaagaactggcagagaatatactcaagtggcgtaaacaacaaaacgaagtttcgtcttgtatccccaaaatattagctgaagaaagttatctttataaacatgatattataatgcctcctttaccttttacttctaaagttcatgtccaaactattaatgccaagtagtcatcaactttatttttgcttaattatgtgtagtcatatgaagtctatttctagttgactgtaacatgggtattaatagtctttgctgctggtaatactgaaagaacctgctttatattggagtatcaagatctcaggttcattaagaccaaactgacttttcctttgtttttcatatatttttattctacctttcagtaaaactagagaagctaaaaaatagccatgacaatttattaatataagtgaattaaccatttctcaggtgggaaattctctt

SEQ ID NO: 139607 - DNA, 575 bp, Homo sapiens
  Payload ID: 7379
  Gene Symbol: HAUS2
  Gene Name: HAUS augmin-like complex, subunit 2
  ENST ID: ENST00000562398
  CDS Start-End: 36-575
actcttggcgccttcgcggaaggtgcgtccgagccatggccgctgccaacccgtgggacccggcgtccgcgcctaacggcgctgggctagtgctaggccacttcatagcttcggggatggtcaatcaggagatgttaaacatgtctaagaaaacagtttcttgttttgtgaacttcaccagactacagcagatcacaaatattcaagctgaaatctaccagaaaaacctggaaattgaactcctgaaactagaaaaagatacagcagatgttgttcatcctttctttttggagatgaagtcttgctatgttgcccaggctggtctcgaactcatggcctcaattctcccgtttcagtctcccaaaacactgcgattacagaagtgtcatactctgcaaagcatgaataatcatttggaagcagtgctgaaagagaagagatcccttaggcaaagactgttgaaacccatgtgccaggaaaacttacctattgaagctgtttatcacagatatatggtacatttgctggagttggctgtgactttcattgagagattagaaacccaccttgaaaca

SEQ ID NO: 139608 - DNA, 590 bp, Homo sapiens
  Payload ID: 7379
  Gene Symbol: HAUS2
  Gene Name: HAUS augmin-like complex, subunit 2
  ENST ID: ENST00000563479
  CDS Start-End: 36-251
actcttggcgccttcgcggaaggtgcgtccgagccatggccgctgccaacccgtgggacccggcgtccgcgcctaacggcgctgggctagtgctaggccacttcatagcttcggggatggtcaatcaggagatgttaaacatgtctaagaaaacagtttcttgttttgtgaacttcaccagactacagcagatcacaaatattcaagctgaaatctaccagctcagaagtgtcatactctgcaaagcatgaataatcatttggaagcagtgctgaaagagaagagatcccttaggcaaagactgttgaaacccatgtgccaggaaaacttacctattgaagctgtttatcacagatatatggtacatttgctggagttggctgtgactttcattgagagattagaaacccaccttgaaacaattagaaatattcctcatttagctgcaaatctaaagaaaatgaaccaggctttagcaaagatggatatattggtgactgagacagaagaactggcagagaatatactcaagtggcgtaaacaacaaaacgaagtttcgtcttgtatccccaaaatattagctgaagaaa

SEQ ID NO: 139609 - DNA, 1702 bp, Homo sapiens
  Payload ID: 7379
  Gene Symbol: HAUS2
  Gene Name: HAUS augmin-like complex, subunit 2
  Uniprot ID: Q9NVX0
  ENST ID: ENST00000568876
  CDS Start-End: 46-660
gatcccgctcactcttggcgccttcgcggaaggtgcgtccgagccatggccgctgccaacccgtgggacccggcgtccgcgcctaacggcgctgggctagtgctaggccacttcatagcttcggggatggtcaatcagaaaaacctggaaattgaactcctgaaactagaaaaagatacagcagatgttgttcatcctttctttttggctcagaagtgtcatactctgcaaagcatgaataatcatttggaagcagtgctgaaagagaagagatcccttaggcaaagactgttgaaacccatgtgccaggaaaacttacctattgaagctgtttatcacagatatatggtacatttgctggagttggctgtgactttcattgagagattagaaacccaccttgaaacaattagaaatattcctcatttagctgcaaatctaaagaaaatgaaccaggctttagcaaagatggatatattggtgactgagacagaagaactggcagagaatatactcaagtggcgtaaacaacaaaacgaagtttcgtcttgtatccccaaaatattagctgaagaaagttatctttataaacatgatattataatgcctcctttaccttttacttctaaagttcatgtccaaactattaatgccaagtagtcatcaactttatttttgcttaattatgtgtagtcatatgaagtctatttctagttgactgtaacatgggtattaatagtctttgctgctggtaatactgaaagaacctgctttatattggagtatcaagatctcaggttcattaagaccaaactgacttttcctttgtttttcatatatttttattctacctttcagtaaaactagagaagctaaaaaatagccatgacaatttattaatataagtgaattaaccatttctcaggtgggaaattctctttttttaaaaatgtgtgtttatcgtctggtgtggtggctcacacctgtaatcctaacacttggggaggctgaggcgggcagatcacttaaacccaggagttcaagaccagcctgggtaacatggtgaaatcccatatctacaaaataaacaaaaaattagccgaccatggtggtgcatgcctgtagtcccagctattcgggaggctgaggtaagaggatcacctaagcctgtgaggtcatggttgcaatgagtcatgatcacgccactgcgctacagcctgggcgacacagtaagaccctgtctcaaaaaaaagaagtgtgtttctggccaggcacggtggctcacgcctgtaatcccagcactttgggaggcctaggtgggcagatcatgaggtcaggagttcgagaccagcctggccaacatggcgaaacacctgtctctactaaaaatacaaaaattaggccgggcgcagtggctcacacctgtaatcccaacactttgggaggccgacccagatgggtggatcacctgaggtcaggagtttgagaccagccttgacaacatggtgaaaccccatctctggtagaaatataaaaaattaaccgggcatggtggtggacgcctgtaatcccagctacttgggaggctgaggcagaataatcgcttgaacccaggaggcagaggttgcagtaagccaagatcgtgcctctgcactccaacctgggtgatggagcaagactccatctccaaaaaaataaaaaa

SEQ ID NO: 139610 - DNA, 592 bp, Homo sapiens
  Payload ID: 7379
  Gene Symbol: HAUS2
  Gene Name: HAUS augmin-like complex, subunit 2
  ENST ID: ENST00000567640
  CDS Start-End: 46-237
gatcccgctcactcttggcgccttcgcggaaggtgcgtccgagccatggccgctgccaacccgtgggacccggcgtccgcgcctaacggcgctgggctagtgctaggccacttcatagcttcggggatggtcaatcaggagatgttaaacatgtctaagaaaacagtttcttgttttgtgaacttcaccagactacagcagatcacaaatattcaagctgaaatctaccagagatgaagtcttgctatgttgcccaggctggtctcgaactcatggcctcaattctcccgtttcagtctcccaaaacactgcgattacagctcagaagtgtcatactctgcaaagcatgaataatcatttggaagcagtgctgaaagagaagagatcccttaggcaaagactgttgaaacccatgtgccaggaaaacttacctattgaagctgtttatcacagatatatggtacatttgctggagttggctgtgactttcattgagagattagaaacccaccttgaaacaattagaaatattcctcatttagctgcaaatctaaagaaaatgaaccaggctttagcaaagatggatatattg

SEQ ID NO: 139611 - DNA, 709 bp, Homo sapiens
  Payload ID: 7379
  Gene Symbol: HAUS2
  Gene Name: HAUS augmin-like complex, subunit 2
  ENST ID: ENST00000568846
  CDS Start-End: 40-321
gctcactcttggcgccttcgcggaaggtgcgtccgagccatggccgctgccaacccgtgggacccggcgtccgcgcctaacggcgctgggctagtgctaggccacttcatagcttcggggatggtcaatcagaaaaacctggaaattgaactcctgaaactagaaaaagatacagcagatgttgttcatcctttctttttggagatgaagtcttgctatgttgcccaggctggtctcgaactcatggcctcaattctcccgtttcagtctcccaaaacactgcgattacagctcagaagtgtcatactctgcaaagcatgaataatcatttggaagcagtgctgaaagagaagagatcccttaggcaaagactgttgaaacccatgtgccaggaaaacttacctattgaagctgtttatcacaggttagactgaaaagtagaaattaacagttacacctgttttctgagtttactttttgttttgcagttactttgtagcagaattcataaaacaattagtgattgtatttgttaacattattaatggtgatatattaaatcagaaagaaaatctttgcttttaaaccattatacctatggcaaaaaggaagaacttggccatcgtgttttgggaattataaattatgagtttaatgaaagaaattagatccataacatgtaacaataaaaactgtttgtatgtgaagt

SEQ ID NO: 139612 - DNA, 443 bp, Homo sapiens
  Payload ID: 7379
  Gene Symbol: HAUS2
  Gene Name: HAUS augmin-like complex, subunit 2
  ENST ID: ENST00000607467
  CDS Start-End: 1-168
gatgttgttcatcctttctttttggctcagaagtgtcatactctgcaaagcatgaataatcatttggaagcagtgctgaaagagaagagatcccttaggcaaagactgttgaaacccatgtgccaggaaaacttacctattgaagctgtttatcacaggttagactgaaaagtagaaattaacagttacacctgttttctgagtttactttttgttttgcagttactttgtagcagaattcataaaacaattagtgattgtatttgttaacattattaatggtgatatattaaatcagaaagaaaatctttgcttttaaaccattatacctatggcaaaaaggaagaacttggccatcgtgttttgggaattataaattatgagtttaatgaaagaaattagatccataacatgtaacaataaaaactgtttgtatgtgaagt

SEQ ID NO: 139613 - DNA, 5620 bp, Homo sapiens
  Payload ID: 7380
  Gene Symbol: HAUS3
  Gene Name: HAUS augmin-like complex, subunit 3
  Uniprot ID: Q68CZ6
  ENST ID: ENST00000243706
  CDS Start-End: 231-2042
ctcccgtgaggcagtgcgaggcgcgcggggcacggagggcggtggcggcgggctcctgcgagaagcaagcggaacttcctgaggaggaatcattatagattctaaaaatatattttcccttctctgtggacttggtataaaacgtagctttttttctgcttggatttattttctaaaaatcaacaccgtaaacccatatcagatacaacaaaattggggtagttaaaaccatgagttgtggaaatgagtttgtggaaacattaaaaaaaattggttatcccaaagctgataatcttaatggagaagactttgactggttgtttgagggcgttgaagatgaatcgtttctgaagtggttttgtgggaatgtgaatgaacagaacgtgttgtctgaaagagaattggaagcttttagcattcttcagaaatcaggcaagcctattctagaaggggcggcattggatgaagctcttaaaacgtgtaaaacttctgatttgaagacacctagactggatgataaagagctggagaaattagaggatgaggttcaaactctactgaaattaaagaacctaaaaattcagcgacgtaataaatgtcaattgatggcttcagtaactagccacaaatctctgaggttaaatgctaaagaagaagaagccactaaaaagctgaagcagagtcaaggaattctaaatgcaatgatcactaagatcagtaatgaacttcaggctcttactgatgaagttacacaattgatgatgttcttcagacattctaatttaggtcaagggacaaatccactggtatttttatcgcaattttccttggaaaaatacctaagtcaggaagagcaaagcacagcagcattaactttgtataccaaaaaacagttctttcagggtatacatgaagtagttgaaagttcaaatgaagacaattttcaacttttagatatacagacaccatctatttgtgataatcaagaaatccttgaggagagacgactagagatggctagactgcagctcgcatacatttgtgctcaacatcagttaattcacttaaaagcaagtaattcgagcatgaagtcaagtataaaatgggcagaggagagtcttcacagcctaaccagcaaggctgtggacaaagaaaatttggatgctaaaatttctagcttgaccagtgagattatgaaacttgaaaaagaggtcactcaaataaaagacagaagtttacctgctgtggtaagagagaatgcccagttattgaatatgccagtggtaaagggagattttgatctgcagattgctaaacaagattattatacagcaagacaagagttagttttaaatcaattaataaaacaaaaggcatcatttgaacttctacagttatcatatgaaattgaattaagaaagcatcgggacatatatcgtcaacttgaaaatttggttcaagaacttagtcaaagtaacatgatgctctacaagcaattagaaatgttaacagatccatcagtttctcaacagataaatccaaggaataccattgatactaaggattattctactcataggctttaccaagttttggagggagagaataagaaaaaagaattgtttctaactcatggaaaccttgaggaagtggctgagaaattgaaacagaatatttctttagtacaagatcagttggcagtatctgctcaagaacattctttctttctgtccaaacggaataaggatgtggacatgctttgtgatactttgtatcaaggaggaaatcagcttttgcttagtgatcaggagttaacagagcagtttcataaagttgaatctcaactgaataagctaaatcatctcctcactgatattcttgctgatgtgaagacaaaaagaaaaactttggcaaataataaattacatcaaatggaaagagaattctatgtatattttttaaaagatgaagattatctgaaagatattgtggagaatttagaaactcaatcaaagattaaggctgttagtcttgaagattgaaaattactgaaaactgaatctttattacgtgtcctcttttatttattagaagactgtgtataataaacactactaaatttttaaaatttgaggtcaatggaacatttaatttgatgaattgaactattatattaatttgtcttttttctcatgtagtacattcagaataccagtgctttttatgacttgagcatgtgtttagtggtacttagtcctggtaattttttacttacagggaaaaagcattattacataatgcaaatattttttaatatagttatctctctcctttttagaaatagaaattttctgccgttaaatttttttttgagatagagtctcactctgtctccaggctggaatgcagtggcacgatcttggctcactgcaacctctgcctcccgggttcaagtgattctcctgcctcagcctcccaagtagctgggactacaggcgcacaccgccacacccagctaatttttttgtattttagtagaaaaggggtttcaccatgttggccaggatggtctcaatctcttgacctcttgatcccctctcccggcctcccaaagtgccggaattacaggcatgagccaccacgctcagccgctattaaatattttaaaatgtgtagaacttctagtcagcatttttaaatctgtagaccttaatatgtgaaatagccaagtcccctcatgtttgactgtcaaataaaattctgctgctcaaattgtattcctccataattccctgctatagacctttaggctgttttaatgtccctacttgtaccacagagtattaggacttccttggcctgcctgcattcattttagagtctgaattctggggactcaaaagtttctacaagacagctgagcagtgctttgactttaatgtgacttacacatcataaatgactttcaaatgaaatttgaatttcaaaattctgtaaaagtggttgctcaaaagatgtatgatactattttaatcagtttaagagcaaaaatgtctaattgtatttaacaatggtatttgggcagccagaaaatattttaagcgttgctctaaaataatttgaagtagctcatctgttattacatcagatgcttcttgagtgcccaatttatacatggcctgtggtaaataccatgtgagctttgtaggaatacctttaagaatattcctcacctgttcgtaatatggaatgccaatctaaaaactacatgttttgggtggtctttatggaattttttagctataaccatcagaaaacaggcatacctagatgacagatgaaccttcttgatttttgaaacccattgaacaaaaatattttgccaattattgtgtttatgttatttaaaattttatgtaaaccttaattttgtagcagtaaattttgtttaagattttgctatcagctccctatcacctgagcaactttttttttgttgtatatgtttttttctattctatttcggaatagagaatttacttaaaatttttattttctccaaaaatgtggaaaatatgtcacctggtttcctggtttatggtagcatattctgtttaaattagtgtcacatatttagatgtgtggccagacgcttgatttattagttaatttttgagacagagtctaactgtgtcactcaggctggagttcagtggaatgatctcggctcactgcaacctccgcctcccaggttcaagtgattctcctgcttcagcctcctgagtagatgggattgtaggcgtgcaccactgcacctggctaatttttgtattttcagtagagacggggtttcaccatgttggtcaggctggtctcaaactcctgacctcaagtgatctacccgccttggccttccatagtgctggcattacaggtgtaagccaccatgcccctgcccagatgcttgatttatactgtccccacccaaaccttgacttgctcagcccagggggccagcagggcagatcaaggcacggatggtagttgtgtgtctgccgtaattacccaagttacttataatcgttgtgttactaggtaggtttatttgaagatttatttatttatttatttattttttattttttgagacggagtttcactcttgttgcccaggctggagtgcagtggcatgatctcagctcactgcaacctctgccttctgggttcacgtgattctcctgcctcaggcctcccgagtagctgggattacaggtgccaccatgcctggttaattttttgtatttttagtagagacggggtttcatcatgttggccaggttggtctcgaactcctgacctcaggtgatccacccgcctcagtctaccaaagtgcagggatcacaggcatgagcttccgcgctcagcctatttgaagatttaataacatttttcaaacctcaggatgtatttgagtagattgcttctaaattggtcacctagaaaataagttatctatttactatgatacctggattaagcctctagctattttgcttttttctttctatctatattattggatgattgatgcctattttctgtggttatgaatatagacattttaaatgaaagttggtatataaatttttgaaaataattgtatttcctgttttatagtcttaggattaatatatgggatttatcttatgttaatcttacatttaggattttgtgaaaatggaaaattatgaggcattggtaggctttgatctctgtaatacaccgctctccagtgttgctcagaagattatgtctgctatgcattcaggtgatttagtggattctaagacttggggaaagagtacagagagtaagtaatttttatgaacctttctttctcttgatactttgaatgttaattgttctaaagactaagaattgaaaatggaatgcatgtagacagatgaagcccagctcccgccccttttacactcattcagtgcagactgagcttctgcttgctaactttcgtgttcccttaaccttcattgctttaaaaatgtaacactctcttccttattccaggtatttctgtcaaacattcccttagaatctggatcaggtattttagtattttcaaaagagatgctttaatcttggttctcaggtcatcaaacctgtacatagtatttgctattttgtgtggtgaacaagagatatgtttttgacaatatgtgtattgtgctgctatagaaatgtaaactcttaggtggcaaggattattggatcagtgtatatggatttatgatgtggtataatagtaaaagcagtggggccgggtgcggtggctcacgcctgtaatcccagcactttgggaggccgaggtcggcgatcatgaggtcaggagatcgagaccatcctggctaacacggtaaaacactgtctctactaaaaatacaaaaaattagctgggagtggtggtaggcgcctgtagtccagctacttgggaggctgaggcaggagaatggcatgaacccaggaggcggggcttgcagtgagctgaggtctccagcgtgggcgacagagtgagactctatctcaaaaaaaaaaaaaaaaaaaa

SEQ ID NO: 139614 - DNA, 2430 bp, Homo sapiens
  Payload ID: 7380
  Gene Symbol: HAUS3
  Gene Name: HAUS augmin-like complex, subunit 3
  Uniprot ID: Q68CZ6
  ENST ID: ENST00000443786
  CDS Start-End: 533-2344
gtcgccttgtgcgcttgcgcgcgtccaggcgctcccgtgaggcagtgcgaggcgcgcggggcacggagggcggtggcggcgggctcctgcgagaagcaagcggaacttcctgagcgtgcttaggtgtcacagctgggtgaccctccgaaggaaggttttgccgctggcgcgtctggtgtatcgcggccttggggccgcggatccctggggcttgccgctgcctctggggttcgcgcggccctggcgtcggggctgcctcagcgctggctgaaggccggcccgaagcacccttaattgtggccgcgcgcttccctgctgctcctgctgttctccgcgtcgcggtggtggactctggaggtggagccttgcccggcgagacgttgaggaggaatcattatagattctaaaaatatattttcccttctctgtggacttggtataaaacgtagctttttttctgcttggatttattttctaaaaatcaacaccgtaaacccatatcagatacaacaaaattggggtagttaaaaccatgagttgtggaaatgagtttgtggaaacattaaaaaaaattggttatcccaaagctgataatcttaatggagaagactttgactggttgtttgagggcgttgaagatgaatcgtttctgaagtggttttgtgggaatgtgaatgaacagaacgtgttgtctgaaagagaattggaagcttttagcattcttcagaaatcaggcaagcctattctagaaggggcggcattggatgaagctcttaaaacgtgtaaaacttctgatttgaagacacctagactggatgataaagagctggagaaattagaggatgaggttcaaactctactgaaattaaagaacctaaaaattcagcgacgtaataaatgtcaattgatggcttcagtaactagccacaaatctctgaggttaaatgctaaagaagaagaagccactaaaaagctgaagcagagtcaaggaattctaaatgcaatgatcactaagatcagtaatgaacttcaggctcttactgatgaagttacacaattgatgatgttcttcagacattctaatttaggtcaagggacaaatccactggtatttttatcgcaattttccttggaaaaatacctaagtcaggaagagcaaagcacagcagcattaactttgtataccaaaaaacagttctttcagggtatacatgaagtagttgaaagttcaaatgaagacaattttcaacttttagatatacagacaccatctatttgtgataatcaagaaatccttgaggagagacgactagagatggctagactgcagctcgcatacatttgtgctcaacatcagttaattcacttaaaagcaagtaattcgagcatgaagtcaagtataaaatgggcagaggagagtcttcacagcctaaccagcaaggctgtggacaaagaaaatttggatgctaaaatttctagcttgaccagtgagattatgaaacttgaaaaagaggtcactcaaataaaagacagaagtttacctgctgtggtaagagagaatgcccagttattgaatatgccagtggtaaagggagattttgatctgcagattgctaaacaagattattatacagcaagacaagagttagttttaaatcaattaataaaacaaaaggcatcatttgaacttctacagttatcatatgaaattgaattaagaaagcatcgggacatatatcgtcaacttgaaaatttggttcaagaacttagtcaaagtaacatgatgctctacaagcaattagaaatgttaacagatccatcagtttctcaacagataaatccaaggaataccattgatactaaggattattctactcataggctttaccaagttttggagggagagaataagaaaaaagaattgtttctaactcatggaaaccttgaggaagtggctgagaaattgaaacagaatatttctttagtacaagatcagttggcagtatctgctcaagaacattctttctttctgtccaaacggaataaggatgtggacatgctttgtgatactttgtatcaaggaggaaatcagcttttgcttagtgatcaggagttaacagagcagtttcataaagttgaatctcaactgaataagctaaatcatctcctcactgatattcttgctgatgtgaagacaaaaagaaaaactttggcaaataataaattacatcaaatggaaagagaattctatgtatattttttaaaagatgaagattatctgaaagatattgtggagaatttagaaactcaatcaaagattaaggctgttagtcttgaagattgaaaattactgaaaactgaatctttattacgtgtcctcttttatttattagaagactgtgtataataaacactactaaatttttaaaa

SEQ ID NO: 139615 - DNA, 580 bp, Homo sapiens
  Payload ID: 7380
  Gene Symbol: HAUS3
  Gene Name: HAUS augmin-like complex, subunit 3
  ENST ID: ENST00000514395
  CDS Start-End: 481-580
agtgcgaggcgcgcggggcacggagggcggtggcggcgggctcctgcgagaagcaagcggaacttcctgaggtgtcacagctgggtgaccctccgaaggaaggttttgccgctggcgcgtctggtgtatcgcggccttggggccgcggatccctggggcttgccgctgcctctggggttcgcgcggccctggcgtcggggctgcctcagcgctggctgaaggccggcccgaagcacccttaattgtggccgcgcgcttccctgctgctcctgctgttctccgcgtcgcggtggtggactctggaggtggagccttgcccggcgagacgttgaggaggaatcattatagattctaaaaatatattttcccttctctgtggacttggtataaaacgtagctttttttctgcttggatttattttctaaaaatcaacaccgtaaacccatatcagatacaacaaaattggggtagttaaaaccatgagttgtggaaatgagtttgtggaaacattaaaaaaaattggttatcccaaagctgataatcttaatggagaagactttgactggttgtttgagggcg

SEQ ID NO: 139616 - DNA, 3166 bp, Homo sapiens
  Payload ID: 7380
  Gene Symbol: HAUS3
  Gene Name: HAUS augmin-like complex, subunit 3
  Uniprot ID: Q68CZ6
  ENST ID: ENST00000506763
  CDS Start-End: 750-2219
agtgcgaggcgcgcggggcacggagggcggtggcggcgggctcctgcgagaagcaagcggaacttcctgaggtgactgacgcgggcctcggttctgggcgcaggggtgtggggctggaggagtggccgcgatccccgtctgcacccaggtgcctcttttttttcctgcgctcctgggggctccttccaggtgctccagcagctgcccggggatcagggcccggtccgctgggcgaggagctggggcgggggctgtgcggggcctgtcacccccgtcttctgcagctcggtgtcgacggcgattcggtgggcttgtgcgtttgttttgtcagcgtgcttaggtgtcacagctgggtgaccctccgaaggaaggttttgccgctggcgcgtctggtgtatcgcggccttggggccgcggatccctggggcttgccgctgcctctggggttcgcgcggccctggcgtcggggctgcctcagcgctggctgaaggccggcccgaagcacccttaattgtggccgcgcgcttccctgctgctcctgctgttctccgcgtcgcggtggtggactctggaggtggagccttgcccggcgagacgttgaggaggaatcattatagattctaaaaatatattttcccttctctgtggacttggtataaaacgtagctttttttctgcttggatttattttctaaaaatcaacaccgtaaacccatatcagatacaacaaaattggggtagttaaaaccatgagttgtggaaatgagtttgtggaaacattaaaaaaaattggttatcccaaagctgataatcttaatggagaagactttgactggttgtttgagggcgttgaagatgaatcgtttctgaagtggttttgtgggaatgtgaatgaacagaacgtgttgtctgaaagagaattggaagcttttagcattcttcagaaatcaggcaagcctattctagaaggggcggcattggatgaagctcttaaaacgtgtaaaacttctgatttgaagacacctagactggatgataaagagctggagaaattagaggatgaggttcaaactctactgaaattaaagaacctaaaaattcagcgacgtaataaatgtcaattgatggcttcagtaactagccacaaatctctgaggttaaatgctaaagaagaagaagccactaaaaagctgaagcagagtcaaggaattctaaatgcaatgatcactaagatcagtaatgaacttcaggctcttactgatgaagttacacaattgatgatgttcttcagacattctaatttaggtcaagggacaaatccactggtatttttatcgcaattttccttggaaaaatacctaagtcaggaagagcaaagcacagcagcattaactttgtataccaaaaaacagttctttcagggtatacatgaagtagttgaaagttcaaatgaagacaattttcaacttttagatatacagacaccatctatttgtgataatcaagaaatccttgaggagagacgactagagatggctagactgcagctcgcatacatttgtgctcaacatcagttaattcacttaaaagcaagtaattcgagcatgaagtcaagtataaaatgggcagaggagagtcttcacagcctaaccagcaaggctgtggacaaagaaaatttggatgctaaaatttctagcttgaccagtgagattatgaaacttgaaaaagaggtcactcaaataaaagacagaagtttacctgctgtggtaagagagaatgcccagttattgaatatgccagtggtaaagggagattttgatctgcagattgctaaacaagattattatacagcaagacaagagttagttttaaatcaattaataaaacaaaaggcatcatttgaacttctacagttatcatatgaaattgaattaagaaagcatcgggacatatatcgtcaacttgaaaatttggttcaagaacttagtcaaagtaacatgatgctctacaagcaattagaaatgttaacagatccatcagtttctcaacagataaatccaaggaataccattgatactaaggattattctactcataggctttaccaagttttggagggagagaataagaaaaaagaattgtttctaactcatggaaaccttgaggaagtggctgaggcaggagaatggcatgaacccaggaggcggggcttgcagtgagctgaggtctccagcgtgggcgacagagtgagactctatctcaaaaaaaaaaaaaaaaaaaagtgaaagcagtgatatgctcacaaatgtcactgaaatgtttataacatcagggcttttggtgtttttttgttttgttttttgttggtgttttttttttttttttgctactagcaaagcagtttttattttaaatttgcaagcctgggccaatagtttgtggttggtttctctttctacaaaataaggtataagtgagtgagatataattgagtaatgaaattgcattgaaataattgagagtattgccgaatattagcacaaaagctcttataaacacatcttgattaagatacatttgcacttaacgttttgatccattcatattgaggcatctgttgcttatatactttattatagtagaagtcactaataaactggtaagaatttttgagtgtgaattacatgcctagcaattgatagtgtaagacactatcataatcacattattccatatttttttgaataatagagggtgcatacttgacagaggtggaaatatactccccttcaaaaaccggtaagaataatgaaatgcctctggcagctataatatgaggctctgatgaaaaatttacgacagtcagtccatctcatataagctcttattgttgttctaaaatacattgttaatgcctgggacgatcacttgagcccaggagttcgagtccagcctaggcaacatagcaagatctcatctctgaaaataaaataccccgttaaaattctggcttttgtttgttaaggttattgagaaggtaatagaaaaagatatgatactacttttctctcttggatttgtaaaaatagtggaattttcataaggattttgtattttctattgctgtataacattattaatacaaacttattggcttaaaaaacac

SEQ ID NO: 139617 - DNA, 574 bp, Homo sapiens
  Payload ID: 7380
  Gene Symbol: HAUS3
  Gene Name: HAUS augmin-like complex, subunit 3
  ENST ID: ENST00000502440
  CDS Start-End: 544-574
gtgaggcagtgcgaggcgcgcggggcacggagggcggtggcggcgggctcctgcgagaagcaagcggaacttcctgagctcggtgtcgacggcgattcggtgggcttgtgcgtttgttttgtcagcgtgcttaggtgtcacagctgggtgaccctccgaaggaaggttttgccgctggcgcgtctggtgtatcgcggccttggggccgcggatccctggggcttgccgctgcctctggggttcgcgcggccctggcgtcggggctgcctcagcgctggctgaaggccggcccgaagcacccttaattgtggccgcgcgcttccctgctgctcctgctgttctccgcgtcgcggtggtggactctggaggtggagccttgcccggcgagacgttgaggaggaatcattatagattctaaaaatatattttcccttctctgtggacttggtataaaacgtagctttttttctgcttggatttattttctaaaaatcaacaccgtaaacccatatcagatacaacaaaattggggtagttaaaaccatgagttgtggaaatgagtttgtggaaacat

SEQ ID NO: 139618 - DNA, 1642 bp, Homo sapiens
  Payload ID: 7381
  Gene Symbol: HAUS4
  Gene Name: HAUS augmin-like complex, subunit 4
  Uniprot ID: Q9H6D7
  ENST ID: ENST00000206474
  CDS Start-End: 254-1345
gccccgcctccacctccttcgtcgcggcctctagtgcactttcggctccttccccttcccgggcctttcagcttggtctttccgggcctcgcttcccccagcccctgcgcccggcccgaacgagaggttccggagccccggcgcgggcgggttctggggtgtagacgctgctggccagcccgccccagccgaggttctcggcaccgccttgagagcttcagctgccccaggattagaatcccaagaaaatcaaatggcatccggggatttctgctcacctggagaagggatggaaatacttcaacaagtgtgcagcaaacaacttcctccttgtaacctgagtaaagaggacctgttacagaacccatacttcagcaagcttctcctgaatctctcacagcatgtggatgagagtggcttaagcctcaccctagcaaaggagcaggctcaggcatggaaggaagttcgactgcataagacaacatggttgaggtctgagattttacacagagtcattcaagagttgcttgtggactactatgtgaagatacaagacacaaatgtaacttctgaggacaaaaagtttcatgagacccttgaacagcggctgcttgtaactgaactgatgcggctcttaggtcctagccaggagagggagatacctccactgctggggctggagaaagcggaccttctggaactcatgccactctcagaggattttgtgtggatgagggctcggctacagcaagaagtagaggagcagctcaaaaagaaatgtttcactctgctctgctactatgatcccaattcagatgctgacagtgaaaccgtgaaggcagcaaaggtgtggaaactcgcagaggtcctggtgggtgagcagcagcagtgccaggatgccaagagccagcagaaggagcagatgttgctgctggagaagaagagtgctgcttactcccaggtgcttctccgctgcctcactttgctgcagaggcttcttcaagaacaccggctgaagactcaatccgagctagaccgcatcaatgcccagtacctggaagtcaagtgcggtgctatgatccttaagctgaggatggaggagctaaagattttgtccgacacttacactgttgagaaagtggaagttcatcgtctgattagggaccgtttggagggagccattcacctacaggagcaggacatggagaactcaagacaggtcctgaactcctatgaggtccttggggaggagtttgacaggctggtgaaagagtacaccgtactcaagcaggcaacagagaacaagcggtgggccctccaggagttcagcaaggtctaccgttgagctctggcagggccaggagacatggcttctgcatagctgctgcctcctaatcttcctgctagtgggaccaccttcacctggggctgccttcagtacaagggagtgtggaaatgcttacgcttgaaacactgcagtcatttaggcactctcctggtttctctttattttttatgactgggcctcttctggaaaatctagcaaggagatttatataatttttatgcatagctgtgtgtcagtgtcagccctgtattgtatttgattatctcctgaataaagttatgatattatatctta

SEQ ID NO: 139619 - DNA, 1474 bp, Homo sapiens
  Payload ID: 7381
  Gene Symbol: HAUS4
  Gene Name: HAUS augmin-like complex, subunit 4
  Uniprot ID: Q9H6D7
  ENST ID: ENST00000342454
  CDS Start-End: 229-1185
ggcctctagtgcactttcggctccttccccttcccgggcctttcagcttggtctttccgggcctcgcttcccccagcccctgcgcccggcccgaacgagaggttccggagccccggcgcgggcgggttctggggtgtagacgctgctggccagcccgccccagccgaggttctcggcaccgccttgagagcttcagctgccccaggattagaatcccaagaaaatcaaatggcatccggggatttctgctcacctggagaagggatggaaatacttcaacaagtgtgcagcaaacaacttcctccttgtaacctgagtaaagaggacctgttacagaacccatacttcagcaagcttctcctgaatctctcacagcatgtggatgagagtggcttaagcctcaccctagcaaaggagcaggctcaggcatggaaggaagttcgactgcataagacaacatggttgaggtctgagattttacacagagtcattcaagagttgcttgtggactactatgtgaagatacaagacacaaatgtaacttctgaggacaaaaaggattttgtgtggatgagggctcggctacagcaagaagtagaggagcagctcaaaaagaaatgtttcactctgctctgctactatgatcccaattcagatgctgacagtgaaaccgtgaaggcagcaaaggtgtggaaactcgcagaggtcctggtgggtgagcagcagcagtgccaggatgccaagagccagcagaaggagcagatgttgctgctggagaagaagagtgctgcttactcccaggtgcttctccgctgcctcactttgctgcagaggcttcttcaagaacaccggctgaagactcaatccgagctagaccgcatcaatgcccagtacctggaagtcaagtgcggtgctatgatccttaagctgaggatggaggagctaaagattttgtccgacacttacactgttgagaaagtggaagttcatcgtctgattagggaccgtttggagggagccattcacctacaggagcaggacatggagaactcaagacaggtcctgaactcctatgaggtccttggggaggagtttgacaggctggtgaaagagtacaccgtactcaagcaggcaacagagaacaagcggtgggccctccaggagttcagcaaggtctaccgttgagctctggcagggccaggagacatggcttctgcatagctgctgcctcctaatcttcctgctagtgggaccaccttcacctggggctgccttcagtacaagggagtgtggaaatgcttacgcttgaaacactgcagtcatttaggcactctcctggtttctctttattttttatgactgggcctcttctggaaaatctagcaaggagatttatataatttttatgcatagctgtgtgtcagtgtcagccctgtattgtatttgattatctcctgaataaagttatgatatt

SEQ ID NO: 139620 - DNA, 1428 bp, Homo sapiens
  Payload ID: 7381
  Gene Symbol: HAUS4
  Gene Name: HAUS augmin-like complex, subunit 4
  Uniprot ID: Q9H6D7
  ENST ID: ENST00000347758
  CDS Start-End: 426-1139
cctccacctccttcgtcgcggcctctagtgcactttcggctccttccccttcccgggcctttcagcttggtctttccgggcctcgcttcccccagcccctgcgcccggcccgaacgagaggttccggagccccggcgcgggcgggttctggggtgtagacgctgctggccagcccgccccagccgaggttctcggcaccgccttgagagcttcagctgccccagggtgtgcaggtttgctttagagggtcggcgggcggagcttcggggaagaggagctctgggagagtcattccggccagtggccggagaccgtcgtcgctcttgggaatccttggccgcccagacagaagggaagtaggcgccggagagcccgttctgcattttgattcatctcgggccctattagaatcccaagaaaatcaaatggcatccggggatttctgctcacctggagaagggatggaaatacttcaacaagtgtgcagcaaacaacttcctccttgtaacctgagtaaagaggacctgttacagaacccatacttcagcaagcttctcctgaatctctcacagcatgtggatgagagtggcttaagcctcaccctagcaaaggagcaggctcaggcatggaaggaagttcgactgcataagacaacatggttgaggtctgagattttacacagagtcattcaagagttgcttgtggactactatgtgaagatacaagacacaaatgtaacttctgaggacaaaaaggtgcttctccgctgcctcactttgctgcagaggcttcttcaagaacaccggctgaagactcaatccgagctagaccgcatcaatgcccagtacctggaagtcaagtgcggtgctatgatccttaagctgaggatggaggagctaaagattttgtccgacacttacactgttgagaaagtggaagttcatcgtctgattagggaccgtttggagggagccattcacctacaggagcaggacatggagaactcaagacaggtcctgaactcctatgaggtccttggggaggagtttgacaggctggtgaaagagtacaccgtactcaagcaggcaacagagaacaagcggtgggccctccaggagttcagcaaggtctaccgttgagctctggcagggccaggagacatggcttctgcatagctgctgcctcctaatcttcctgctagtgggaccaccttcacctggggctgccttcagtacaagggagtgtggaaatgcttacgcttgaaacactgcagtcatttaggcactctcctggtttctctttattttttatgactgggcctcttctggaaaatctagcaaggagatttatataatttttatgcatagctgtgtgtcagtgtcagccctgtattgtatttgattatctcctgaataaagttatgatatt

SEQ ID NO: 139621 - DNA, 1637 bp, Homo sapiens
  Payload ID: 7381
  Gene Symbol: HAUS4
  Gene Name: HAUS augmin-like complex, subunit 4
  Uniprot ID: Q9H6D7
  ENST ID: ENST00000541587
  CDS Start-End: 250-1341
cctccttcgtcgcggcctctagtgcactttcggctccttccccttcccgggcctttcagcttggtctttccgggcctcgcttcccccagcccctgcgcccggcccgaacgagaggttccggagccccggcgcgggcgggttctggggtgtagacgctgctggccagcccgccccagccgaggttctcggcaccgccttgagagcttcagctgccccagggtgtgcagattagaatcccaagaaaatcaaatggcatccggggatttctgctcacctggagaagggatggaaatacttcaacaagtgtgcagcaaacaacttcctccttgtaacctgagtaaagaggacctgttacagaacccatacttcagcaagcttctcctgaatctctcacagcatgtggatgagagtggcttaagcctcaccctagcaaaggagcaggctcaggcatggaaggaagttcgactgcataagacaacatggttgaggtctgagattttacacagagtcattcaagagttgcttgtggactactatgtgaagatacaagacacaaatgtaacttctgaggacaaaaagtttcatgagacccttgaacagcggctgcttgtaactgaactgatgcggctcttaggtcctagccaggagagggagatacctccactgctggggctggagaaagcggaccttctggaactcatgccactctcagaggattttgtgtggatgagggctcggctacagcaagaagtagaggagcagctcaaaaagaaatgtttcactctgctctgctactatgatcccaattcagatgctgacagtgaaaccgtgaaggcagcaaaggtgtggaaactcgcagaggtcctggtgggtgagcagcagcagtgccaggatgccaagagccagcagaaggagcagatgttgctgctggagaagaagagtgctgcttactcccaggtgcttctccgctgcctcactttgctgcagaggcttcttcaagaacaccggctgaagactcaatccgagctagaccgcatcaatgcccagtacctggaagtcaagtgcggtgctatgatccttaagctgaggatggaggagctaaagattttgtccgacacttacactgttgagaaagtggaagttcatcgtctgattagggaccgtttggagggagccattcacctacaggagcaggacatggagaactcaagacaggtcctgaactcctatgaggtccttggggaggagtttgacaggctggtgaaagagtacaccgtactcaagcaggcaacagagaacaagcggtgggccctccaggagttcagcaaggtctaccgttgagctctggcagggccaggagacatggcttctgcatagctgctgcctcctaatcttcctgctagtgggaccaccttcacctggggctgccttcagtacaagggagtgtggaaatgcttacgcttgaaacactgcagtcatttaggcactctcctggtttctctttattttttatgactgggcctcttctggaaaatctagcaaggagatttatataatttttatgcatagctgtgtgtcagtgtcagccctgtattgtatttgattatctcctgaataaagttatgatattatatctt

SEQ ID NO: 139622 - DNA, 602 bp, Homo sapiens
  Payload ID: 7381
  Gene Symbol: HAUS4
  Gene Name: HAUS augmin-like complex, subunit 4
  ENST ID: ENST00000553859
  CDS Start-End: 1-435
cacagagtcattcaagagttgcttgtggactactatgtgaagatacaagacacaaatgtaacttctgaggacaaaaagtttcatgagacccttgaacagcggctgcttgtaactgaactgatgcggctcttaggtcctagccaggagagggagatacctccactgctggggctggagaaagcggaccttctggaactcatgccactctcagaggattttgtgtggatgagggctcggctacagcaagaagtagaggagcagctcaaaaagaaatgtttcactctgctctgctactatgatcccaattcaggtgcttctccgctgcctcactttgctgcagaggcttcttcaagaacaccggctgaagactcaatccgagctagaccgcatcaatgcccagtacctggaagtcaagtgcggtgctatgatccttaagctgaggatggaggagctaaagattttgtccgacacttacactgttgagaaagtggaagttcatcgtctgattagggaccgtttggagggagccattcacctacaggagcaggacatggagaactcaagacaggtcctgaactcctatgaggtccttggggaggagt

SEQ ID NO: 139623 - DNA, 473 bp, Homo sapiens
  Payload ID: 7381
  Gene Symbol: HAUS4
  Gene Name: HAUS augmin-like complex, subunit 4
  ENST ID: ENST00000553420
  CDS Start-End: 1-443
tgtgcagcaaacaacttcctccttgtaacctgagtaaagaggacctgttacagaacccatacttcagcaagcttctcctgaatctctcacagcatgtggatgagagtggcttaagcctcaccctagcaaaggagcaggctcaggcatggaaggaagttcgactgcataagacaacatggttgaggtctgagattttacacagagtcattcaagagttgcttgtggactactatgtgaagatacaagacacaaatgtaacttctgaggacaaaaagtttcatgagacccttgaacagcggctgcttgtaactgaactgatgcggctcttaggtcctagccaggagagggagatacctccactgctggggctggagaaagcggaccttctggaactcatgccactctcagaggttggcggggagatattggaaccaaataaatgaaatggtttaatttctcccatatctttaaaa

SEQ ID NO: 139624 - DNA, 652 bp, Homo sapiens
  Payload ID: 7381
  Gene Symbol: HAUS4
  Gene Name: HAUS augmin-like complex, subunit 4
  ENST ID: ENST00000554406
  CDS Start-End: 601-652
gggcctttcagcttggtctttccgggcctcgcttcccccagcccctgcgcccggcccgaacgagaggttccggagccccggcgcgggcgggttctggggtgtagacgctgctggccagcccgccccagccgaggttctcggcaccgccttgagagcttcagctgccccagggtgtgcaggtttgctttagagggtcggcgggcggagcttcggggaagaggagctctgggagagtcattccggccagtggccggagaccgtcgtcgctcttgggaatccttggccgcccagacagaagggaagtaggcgccggagagcccgttctgcattttgattcatctcgggccctattagaatcccaagaaaatcaaatggcatccggggatttctgctcacctggagaagggatggaaatacttcaacaaggcatggaaggaagttcgactgcataagacaacatggttgaggtctgagattttacacagagtcattcaagagttgcttgtggactactatgtgaagatacaagacacaaatgtaacttctgaggacaaaaagtttcatgagacccttgaacagcggctgcttgtaactgaactgatgcggctcttaggtcctagccaggagagggagatacctccactgctggggc

SEQ ID NO: 139625 - DNA, 1626 bp, Homo sapiens
  Payload ID: 7381
  Gene Symbol: HAUS4
  Gene Name: HAUS augmin-like complex, subunit 4
  Uniprot ID: Q9H6D7
  ENST ID: ENST00000555986
  CDS Start-End: 415-1371
ttcgtcgcggcctctagtgcactttcggctccttccccttcccgggcctttcagcttggtctttccgggcctcgcttcccccagcccctgcgcccggcccgaacgagaggttccggagccccggcgcgggcgggttctggggtgtagacgctgctggccagcccgccccagccgaggttctcggcaccgccttgagagcttcagctgccccagggtgtgcaggtttgctttagagggtcggcgggcggagcttcggggaagaggagctctgggagagtcattccggccagtggccggagaccgtcgtcgctcttgggaatccttggccgcccagacagaagggaagtaggcgccggagagcccgttctgcattttgattcatctcgggccctattagaatcccaagaaaatcaaatggcatccggggatttctgctcacctggagaagggatggaaatacttcaacaagtgtgcagcaaacaacttcctccttgtaacctgagtaaagaggacctgttacagaacccatacttcagcaagcttctcctgaatctctcacagcatgtggatgagagtggcttaagcctcaccctagcaaaggagcaggctcaggcatggaaggaagttcgactgcataagacaacatggttgaggtctgagattttacacagagtcattcaagagttgcttgtggactactatgtgaagatacaagacacaaatgtaacttctgaggacaaaaaggattttgtgtggatgagggctcggctacagcaagaagtagaggagcagctcaaaaagaaatgtttcactctgctctgctactatgatcccaattcagatgctgacagtgaaaccgtgaaggcagcaaaggtgtggaaactcgcagaggtcctggtgggtgagcagcagcagtgccaggatgccaagagccagcagaaggagcagatgttgctgctggagaagaagagtgctgcttactcccaggtgcttctccgctgcctcactttgctgcagaggcttcttcaagaacaccggctgaagactcaatccgagctagaccgcatcaatgcccagtacctggaagtcaagtgcggtgctatgatccttaagctgaggatggaggagctaaagattttgtccgacacttacactgttgagaaagtggaagttcatcgtctgattagggaccgtttggagggagccattcacctacaggagcaggacatggagaactcaagacaggtcctgaactcctatgaggtccttggggaggagtttgacaggctggtgaaagagtacaccgtactcaagcaggcaacagagaacaagcggtgggccctccaggagttcagcaaggtctaccgttgagctctggcagggccaggagacatggcttctgcatagctgctgcctcctaatcttcctgctagtgggaccaccttcacctggggctgccttcagtacaagggagtgtggaaatgcttacgcttgaaacactgcagtcatttaggcactctcctggtttctctttattttttatgactgggcctcttctggaaaatctagcaaggagatttatataatttttatgcatagctgtgtgtcagtgtcagccctgtattg

SEQ ID NO: 139626 - DNA, 582 bp, Homo sapiens
  Payload ID: 7381
  Gene Symbol: HAUS4
  Gene Name: HAUS augmin-like complex, subunit 4
  ENST ID: ENST00000557591
  CDS Start-End: 102-582
tcccccagcccctgcgcccggcccgaacgagaggttctcggcaccgccttgagagcttcagctgccccagggtgtgcagattagaatcccaagaaaatcaaatggcatccggggatttctgctcacctggagaagggatggaaatacttcaacaagtgtgcagcaaacaacttcctccttgtaacctgagtaaagaggacctgttacagaacccatacttcagcaagcttctcctgaatctctcacagcatgtggatgagagtggcttaagcctcaccctagcaaaggagcaggctcaggcatggaaggaagttcgactgcataagacaacatggttgaggtctgagattttacacagagtcattcaagagttgcttgtggactactatgtgaagatacaagacacaaatgtaacttctgaggacaaaaagtttcatgagacccttgaacagcggctgcttgtaactgaactgatgcggctcttaggtcctagccaggagagggagatacctccactgctggggctggagaaagcggaccttctggaactcatgccactctcagaggattttgtgtggatga

SEQ ID NO: 139627 - DNA, 1107 bp, Homo sapiens
  Payload ID: 7381
  Gene Symbol: HAUS4
  Gene Name: HAUS augmin-like complex, subunit 4
  ENST ID: ENST00000555040
  CDS Start-End: 269-1107
gagtgtggccccgcctccacctccttcgtcgcggcctctagtgcactttcggctccttccccttcccgggcctttcagcttggtctttccgggcctcgcttcccccagcccctgcgcccggcccgaacgagaggttccggagccccggcgcgggcgggttctggggtgtagacgctgctggccagcccgccccagccgaggttctcggcaccgccttgagagcttcagctgccccagggtgtgcagattagaatcccaagaaaatcaaatggcatccggggatttctgctcacctggagaagggatggaaatacttcaacaagtgtgcagcaaacaacttcctccttgtaacctgagtaaagaggacctgttacagaacccatacttcagcaagcttctcctgaatctctcacagcatgtggatgagagtggcttaagcctcaccctagcaaaggagcaggctcaggcatggaaggaagttcgactgcataagacaacatggttgaggtctgagattttacacagagtcattcaagagttgcttgtggactactatgtgaagatacaagacacaaatgtaacttctgaggacaaaaagtttcatgagacccttgaacagcggctgcttgtaactgaactgatgcggctcttaggtcctagccaggagagggagatacctccactgctggggctggagaaagcggaccttctggaactcatgccactctcagaggattttgtgtggatgagggctcggctacagcaagaagtagaggagcagctcaaaaagaaatgtttcactctgctctgctactatgatcccaattcagatgctgacagtgaaaccgtgaaggcagcaaaggtgtggaaactcgcagaggtcctggtgggtgagcagcagcagtgccaggatgccaagagccagcagaaggagcagatgttgctgctggagaagaagagtgctgcttactcccaggtgcttctccgctgcctcactttgctgcagaggcttcttcaagaacaccggctgaagactcaatccgagctagaccgcatcaatgcccagtacctggaagtcaagtgcggtgctatgatccttaagctgag

SEQ ID NO: 139628 - DNA, 1454 bp, Homo sapiens
  Payload ID: 7381
  Gene Symbol: HAUS4
  Gene Name: HAUS augmin-like complex, subunit 4
  Uniprot ID: Q9H6D7
  ENST ID: ENST00000555367
  CDS Start-End: 234-1190
ctctagtgcactttcggctccttccccttcccgggcctttcagcttggtctttccgggcctcgcttcccccagcccctgcgcccggcccgaacgagaggttccggagccccggcgcgggcgggttctggggtgtagacgctgctggccagcccgccccagccgaggttctcggcaccgccttgagagcttcagctgccccagggtgtgcagattagaatcccaagaaaatcaaatggcatccggggatttctgctcacctggagaagggatggaaatacttcaacaagtgtgcagcaaacaacttcctccttgtaacctgagtaaagaggacctgttacagaacccatacttcagcaagcttctcctgaatctctcacagcatgtggatgagagtggcttaagcctcaccctagcaaaggagcaggctcaggcatggaaggaagttcgactgcataagacaacatggttgaggtctgagattttacacagagtcattcaagagttgcttgtggactactatgtgaagatacaagacacaaatgtaacttctgaggacaaaaaggattttgtgtggatgagggctcggctacagcaagaagtagaggagcagctcaaaaagaaatgtttcactctgctctgctactatgatcccaattcagatgctgacagtgaaaccgtgaaggcagcaaaggtgtggaaactcgcagaggtcctggtgggtgagcagcagcagtgccaggatgccaagagccagcagaaggagcagatgttgctgctggagaagaagagtgctgcttactcccaggtgcttctccgctgcctcactttgctgcagaggcttcttcaagaacaccggctgaagactcaatccgagctagaccgcatcaatgcccagtacctggaagtcaagtgcggtgctatgatccttaagctgaggatggaggagctaaagattttgtccgacacttacactgttgagaaagtggaagttcatcgtctgattagggaccgtttggagggagccattcacctacaggagcaggacatggagaactcaagacaggtcctgaactcctatgaggtccttggggaggagtttgacaggctggtgaaagagtacaccgtactcaagcaggcaacagagaacaagcggtgggccctccaggagttcagcaaggtctaccgttgagctctggcagggccaggagacatggcttctgcatagctgctgcctcctaatcttcctgctagtgggaccaccttcacctggggctgccttcagtacaagggagtgtggaaatgcttacgcttgaaacactgcagtcatttaggcactctcctggtttctctttattttttatgactgggcctcttctggaaaatctagcaaggagatttatataatttttatgcatagctgtgtgtcagtgtcagccctgtattgtatttgatt

SEQ ID NO: 139629 - DNA, 1447 bp, Homo sapiens
  Payload ID: 7381
  Gene Symbol: HAUS4
  Gene Name: HAUS augmin-like complex, subunit 4
  Uniprot ID: Q9H6D7
  ENST ID: ENST00000490506
  CDS Start-End: 431-1150
gggcctttcagcttggtctttccgggcctcgcttcccccagcccctgcgcccggcccgaacgagaggttccggagccccggcgcgggcgggttctggggtgtagacgctgctggccagcccgccccagccgaggttctcggcaccgccttgagagcttcagctgccccagggtgtgcagattagaatcccaagaaaatcaaatggcatccggggatttctgctcacctggagaagggatggaaatacttcaacaaggcatggaaggaagttcgactgcataagacaacatggttgaggtctgagattttacacagagtcattcaagagttgcttgtggactactatgtgaagatacaagacacaaatgtaacttctgaggacaaaaagtttcatgagacccttgaacagcggctgcttgtaactgaactgatgcggctcttaggtcctagccaggagagggagatacctccactgctggggctggagaaagcggaccttctggaactcatgccactctcagaggattttgtgtggatgagggctcggctacagcaagaagtagaggagcagctcaaaaagaaatgtttcactctgctctgctactatgatcccaattcagatgctgacagtgaaaccgtgaaggcagcaaaggtgtggaaactcgcagaggtcctggtgggtgagcagcagcagtgccaggatgccaagagccagcagaaggagcagatgttgctgctggagaagaagagtgctgcttactcccaggtgcttctccgctgcctcactttgctgcagaggcttcttcaagaacaccggctgaagactcaatccgagctagaccgcatcaatgcccagtacctggaagtcaagtgcggtgctatgatccttaagctgaggatggaggagctaaagattttgtccgacacttacactgttgagaaagtggaagttcatcgtctgattagggaccgtttggagggagccattcacctacaggagcaggacatggagaactcaagacaggtcctgaactcctatgaggtccttggggaggagtttgacaggctggtgaaagagtacaccgtactcaagcaggcaacagagaacaagcggtgggccctccaggagttcagcaaggtctaccgttgagctctggcagggccaggagacatggcttctgcatagctgctgcctcctaatcttcctgctagtgggaccaccttcacctggggctgccttcagtacaagggagtgtggaaatgcttacgcttgaaacactgcagtcatttaggcactctcctggtttctctttattttttatgactgggcctcttctggaaaatctagcaaggagatttatataatttttatgcatagctgtgtgtcagtgtcagccctgtattgtatttgattatctcctgaataaagttatgatattatatctta

SEQ ID NO: 139630 - DNA, 983 bp, Homo sapiens
  Payload ID: 7381
  Gene Symbol: HAUS4
  Gene Name: HAUS augmin-like complex, subunit 4
  ENST ID: ENST00000554516
  CDS Start-End: 422-983
cacctccttcgtcgcggcctctagtgcactttcggctccttccccttcccgggcctttcagcttggtctttccgggcctcgcttcccccagcccctgcgcccggcccgaacgagaggttccggagccccggcgcgggcgggttctggggtgtagacgctgctggccagcccgccccagccgaggttctcggcaccgccttgagagcttcagctgccccagggtgtgcaggtttgctttagagggtcggcgggcggagcttcggggaagaggagctctgggagagtcattccggccagtggccggagaccgtcgtcgctcttgggaatccttggccgcccagacagaagggaagtaggcgccggagagcccgttctgcattttgattcatctcgggccctattagaatcccaagaaaatcaaatggcatccggggatttctgctcacctggagaagggatggaaatacttcaacaagtgtgcagcaaacaacttcctccttgtaacctgagtaaagaggacctgttacagaacccatacttcagcaagcttctcctgaatctctcacagcatgtggatgagagtggcttaagcctcaccctagcaaaggagcaggctcaggcatggaaggaagttcgactgcataagacaacatggttgaggtctgagattttacacagagtcattcaagagttgcttgtggactactatgtgaagatacaagacacaaatgtaacttctgaggacaaaaagtttcatgagacccttgaacagcggctgcttgtaactgaactgatgcggctcttaggtcctagccaggagagggagatacctccactgctggggctggagaaagcggaccttctggaactcatgccactctcagaggattttgtgtggatgagggctcggctacagcaagaagtagaggagcagctcaaaaagaaatgtttcactctgctctgctactatgatcccaattcag

SEQ ID NO: 139631 - DNA, 578 bp, Homo sapiens
  Payload ID: 7381
  Gene Symbol: HAUS4
  Gene Name: HAUS augmin-like complex, subunit 4
  ENST ID: ENST00000556915
  CDS Start-End: 122-578
gagccccggcgcgggcgggttctggggtgtagacgctgctggccagcccgccccagccgaggttctcggcaccgccttgagagcttcagctgccccaggattagaatcccaagaaaatcaaatggcatccggggatttctgctcacctggagaagggatggaaatacttcaacaagtgtgcagcaaacaacttcctccttgtaacctgagtaaagaggacctgttacagaacccatacttcagcaagcttctcctgaatctctcacagcatgtggatgagagtggcttaagcctcaccctagcaaaggagcaggctcaggcatggaaggaagttcgactgcataagacaacatggttgaggtctgagattttacacagagtcattcaagagttgcttgtggactactatgtgaagatacaagacacaaatgtaacttctgaggacaaaaaggattttgtgtggatgagggctcggctacagcaagaagtagaggagcagctcaaaaagaaatgtttcactctgctctgctactatgatcccaattcaggtgcttctccgctgcctcactttgctgcag

SEQ ID NO: 139632 - DNA, 4283 bp, Homo sapiens
  Payload ID: 7382
  Gene Symbol: HAUS5
  Gene Name: HAUS augmin-like complex, subunit 5
  Uniprot ID: O94927
  ENST ID: ENST00000203166
  CDS Start-End: 26-1927
gcggtgtcgccgccgcggcgctgtcatggagctagcgcaggaagcgcgggaactgggttgctgggcggtcgaagagatgggggtgcccgtggcggcccgggccccggaatcgacgctgcgcaggctgtgtctgggccagggggctgacatctgggcctacatcttgcagcatgtgcacagtcagaggactgtcaagaagatccggggaaacctactctggtatggccaccaggacagtccacaggtccgtcggaagttagagctggaagctgctgtgacccgcctgcgggcagaaatccaggaactcgaccagagcctggagctgatggagcgagacactgaggctcaggacacggccatggagcaggcacgtcagcacactcaagacacccagcgtcgagctctcctcctccgggcccaagctggggccatgcgaagacagcagcatacgctccgagatcccatgcagcggctgcagaatcaactgaggcgcctgcaggacatggagaggaaagccaaagtagatgtgacctttggatccctcacgtcggcagctctgggcctggagcccgtggtcctgcgtgatgtccgaacagcctgcaccctccgggcccagttcctgcagaacctcctgcttccccaggccaagaggggcagcctcccaacccctcatgatgaccactttggcacttcgtaccagcagtggctgagctcagtggagacgctgctgacaaaccaccccccaggccacgtcctggctgccttggagcacctggctgcagagcgggaggcagagattcggtccctgtgcagtggggatgggcttggcgacacagagatatccagaccccaggccccggaccagtcagactccagccagaccctgccgtccatggttcatctcatccaggagggctggcggactgtgggtgtgctggtctcccagcggagcaccctcctgaaggagcggcaagtcttgacccagcgcctccagggcctggtggaggaggtggagagacgcgtcctgggatccagtgagaggcaggtgctgatactggggcttcggcgctgttgcctgtggacggagctcaaggccctgcacgatcagagccaggagctgcaggatgcagctgggcatcggcagctcctgctgagggagctacaggccaaacagcagcggatcctgcactggcgccagctggtggaggagacccaggaacaggtccgcctgctcatcaagggaaactcggccagcaagacccgcctgtgccggagcccgggggaggtgctagctctggtccagcgaaaggtggtccctacatttgaggcagtggcaccacagagccgggagctgctgcgctgtctggaggaggaagtccggcatttgccccacattctgttgggcacgctgctgcggcacaggccgggagagttgaagcccctgcccacggtcctcccatccatccaccagctgcaccccgcgtccccaaggggctccagcttcatagcgctgagccacaagctggggctgcctccagggaaggcctcggagctgctcctgccggcggctgcctctcttcgccaggaccttctgctcctgcaggaccagcggagcctctggtgctgggatctactccacatgaagaccagcctgccgccaggccttcccacccaggagctgctgcagatccaggcatcccaggaaaaacagcagaaagagaacctggggcaggctctgaagaggctggagaagctactgaaacaggcactggagcgaatccctgagctgcaggggatcgtgggggactggtgggagcagccaggccaggccgccctctctgaggagctctgccagggcctgtccctgccccagtggcggctgcgctgggttcaggcccagggggccctgcagaagctgtgcagctgaagagagggttcaaacggaagccgagaacttgacactgttcaccccaacacctcacctcccccaggacatttggaagaaagcagcgccaggattcctcggcagtcgtccccacccgcacctgcagtcccctcatgtgctgttctgctgccccactcagctcctggaccctgtcctttcatcccgctaaagcaccccctaaaaccccttcatcactttcattctcagcaaaaagtaattgagcacctcctctaggcgctggggagtccacactgaacaaaagaaacagaaaaccctgtcttccagcagttgagttctagggcagggagacagagtttacaagataaggaaaatatatatgtagtatgctgcaagttaactgctgtgtgggaaatccagcagggggtgggatgtgtgatttgaattgagggccacactgcccaggtcgtgctccgtcaaggggtgagcaggagcaacaggggtggctgagtaagggcttgcagctggaggcaacagcacatgcaaaggccctgagccaggatgtgctgcaataagggccactgagggggacagtgtaggttgggggtgaggaatgtattaaaagatgagattgccttctagtttgtatagtttctttttttacatgtaaatcagccatttggaatttatcctagcacatggatccaattttgtcttattttacatatatcctagtagcacttactgaaattcccagtcagagtggcagttgcctctgagggaaggtgggtggcagggatcaactgaggaggagacacagaaatgtcctagctgatgggaatgtgctgtgtcaagagcagcggcggtgacgcaggtgtagagatttgtcagagctcatgtagttgtagtcttaaggcctgtgcatttcactgcgtgggttactcaatttataaagcaaagcccttacacttttgagatgccacctttttatgcactaaatttccatgtttaattgggttatatctggcttctctccagacctgctttgtatttaactctccatgtgtcattcctacagtagcttaatagaaaggcttgtgacacattgtcatatctgttcttgttttcttttgttttttttttttttttttttgagatgcagtctcattctgttgcccaagttggagtgcagtggcatgatctcagctcactgcaacctccgcctcccaggttcaagccattctcatgcctcagcttccccagtagctaggattacaggtacgcaccaccacgcccagctcatttttgtacttttagtagggacggggtttcatcatgttggccagactggtctcgaactcctgacctcaagtgatctgcctgcctcggcctcccaaagtgctgggattacaggcatgagccaccgcgcctgaccacattgccatatctgaaatggctggattctcttaggtgcttttctttttctttctttctttctttttttgagacagaatctggctgtttcccaggctgaagtgcagtggcatgaactcagctcactgcaacctctgcctcctggattcaaacaattctcatgtctcagcctcctgaatagctgggattacaggcacccaccaccatatctggctaatatttgtattttttgtagagtcggagctttaccatgttggtcaggctgctctccaactcctggcctcaagtgattctatcgcctctgcctcccaaatcttcacctgctgggattagtttcccctgtctcagtaaattttttttcccaaactaagtgaacattagatttaatttggctggccccagaagaaaaacatgcacagatggtagttttactggtgttgcagtaagttttcaaatttggaagtttggcagctttatgatcttgaaccttgctgtccatctctcacacaactcctctcttggcctccagagtccctttactctcccagctttcctcctgcccctggctgctgtttcccagcctttccacattggctttcccatgtagtccttagtgtgtctgctcctcctctctctcctcatcacagttcccagcccccaccttcaactgaactcaacaaaatcttcaacttcatacagtagtcacattgttagtaataacactggcatttttattttgataaaatagaccgtttaaatttttgagattctaccttatattttttgaattatatactaaagcaaataagtagtgatgtaatgtcattggggaccaagatttttagtgtaaatgaaaaaagataacaaatataaactcaagtaaacaccctgtagtctttcacatgaattggaaatatcagaataaagtcatgatttttctctttct

SEQ ID NO: 139633 - DNA, 2758 bp, Homo sapiens
  Payload ID: 7382
  Gene Symbol: HAUS5
  Gene Name: HAUS augmin-like complex, subunit 5
  Uniprot ID: O94927
  ENST ID: ENST00000587439
  CDS Start-End: 52-924
cgccacacttgaagaggctgagggaggcggtgtcgccgccgcggcgctgtcatggagctagcgcaggaagcgcgggaactgggttgctgggcggtcgaagagatgggggtgcccgtggcggcccgggccccggaatcgacgctgcgcaggctgtgtctgggccagggggctgacatctgggcctacatcttgcagcatgtgcacagtcagaggactgtcaagaagatccggggaaacctactctggtatggccaccaggacagtccacaggtccgtcggaagttagagctggaagctgctgtgacccgcctgcgggcagaaatccaggaactcgaccagagcctggagctgatggagcgagacactgaggctcaggacacggccatggagcaggcacgtcagcacactcaagacacccagcgtcgagctctcctcctccgggcccaagctggggccatgcgaagacagcagcatacgctccgagatcccatgcagcggctgcagaatcaactgaggcgcctgcaggacatggagaggaaagccaaagtagatgtgacctttggatccctcacgtcggcagctctgggcctggagcccgtggtcctgcgtgatgtccgaacagcctgcaccctccgggcccagttcctgcagaacctcctgcttccccaggccaagaggggcagcctcccaacccctcatgatgaccactttggcacttcgtaccagcagtggctgagctcagtggagacgctgctgacaaaccaccccccaggccacgtcctggctgccttggagcacctggctgcagagcgggaggcagagattcggtccctgtgcagtggggatgggcttggcgacacagagatatccaggagggctggcggactgtgggtgtgctggtctcccagcggagcaccctcctgaaggagcggcaagtcttgacccagcgcctccagggcctggtggaggaggtggagagacgcgtcctgggatccagtgagaggcaggtgctgatactggggcttcggcgctgttgcctgtggacggagctcaaggccctgcacgatcagagccaggagctgcaggatgcagctgggcatcggcagctcctgctgagggagctacaggccaaacagcagcggatcctgcactggcgccagctggtggaggagacccaggaacaggtccgcctgctcatcaagggaaactcggccagcaagacccgcctgtgccggagcccgggggaggtgctagctctggtccagcgaaaggtggtccctacatttgaggcagtggcaccacagagccgggagctgctgcgctgtctggaggaggaagtccggcatttgccccacattctgttgggcacgctgctgcggcacaggccgggagagtgagactggggctgccccacccctgccctgcatcccctgccatgggtgactgtcactccctgaacctcctcaaaaaagataaccccagacccccagtgttcccaggctgccagacctcacccttgggtcagcagccctggtcttggcatcctagtccccagacccaccttgaagttcctgggcccccagagcctccagaacccaaggcctcctctcagtccccacccaacccagacttctccccgcccgtaggttgaagcccctgcccacggtcctcccatccatccaccagctgcaccccgcgtccccaaggggctccagcttcatagcgctgagccacaagctggggctgcctccagggaaggcctcggagctgctcctgccggcggctgcctctcttcgccaggaccttctgctcctgcaggaccagcggagcctctggtgctgggatctactccacatgaagaccagcctgccgccaggccttcccacccaggagctgctgcagatccaggcatcccaggaaaaacagcagaaagagaacctggggcaggctctgaagaggctggagaagctactgaaacaggcactggagcgaatccctgagctgcaggggatcgtgggggactggtgggagcagccaggccaggccgccctctctgaggagctctgccagggcctgtccctgccccagtggcggctgcgctgggttcaggcccagggggccctgcagaagctgtgcagctgaagagagggttcaaacggaagccgagaacttgacactgttcaccccaacacctcacctcccccaggacatttggaagaaagcagcgccaggattcctcggcagtcgtccccacccgcacctgcagtcccctcatgtgctgttctgctgccccactcagctcctggaccctgtcctttcatcccgctaaagcaccccctaaaaccccttcatcactttcattctcagcaaaaagtaattgagcacctcctctaggcgctggggagtccacactgaacaaaagaaacagaaaaccctgtcttccagcagttgagttctagggcagggagacagagtttacaagataaggaaaatatatatgtagtatgctgcaagttaactgctgtgtgggaaatccagcagggggtgggatgtgtgatttgaattgagggccacactgcccaggtcgtgctccgtcaaggggtgagcaggagcaacaggggtggctgagtaagggcttgcagctggaggcaacagcacatgcaaaggccctgagccaggatgtgctgcaataagggccactgagggggacagtgtaggttgggggtgaggaatgtattaaaagatgagattgccttct

SEQ ID NO: 139634 - DNA, 883 bp, Homo sapiens
  Payload ID: 7382
  Gene Symbol: HAUS5
  Gene Name: HAUS augmin-like complex, subunit 5
  ENST ID: ENST00000590994
  CDS Start-End: 1-507
cccgcgtccccaaggggctccagcttcatagcgctgagccacaagctggggctgcctccagggaaggcctcggagctgctcctgccggcggctgcctctcttcgccaggaccttctgctcctgcaggaccagcggagcctctggtgctgggatctactccacatgaagaccagcctgccgccaggccttcccacccaggagctgctgcagatccaggcatcccaggaaaaacagcagaaagagaacctggggcaggctctgaagaggctggagaagctactgaaacaggcactggagcgaatccctgagctgcaggggatcgtgggggactggacatttggaagaaagcagcgccaggattcctcggcagtcgtccccacccgcacctgcagtcccctcatgtgctgttctgctgccccactcagctcctggaccctgtcctttcatcccgctaaagcaccccctaaaaccccttcatcactttcattctcagcaaaaagtaattgagcacctcctctaggcgctggggagtccacactgaacaaaagaaacagaaaaccctgtcttccagcagttgagttctagggcagggagacagagtttacaagataaggaaaatatatatgtagtatgctgcaagttaactgctgtgtgggaaatccagcagggggtgggatgtgtgatttgaattgagggccacactgcccaggtcgtgctccgtcaaggggtgagcaggagcaacaggggtggctgagtaagggcttgcagctggaggcaacagcacatgcaaaggccctgagccaggatgtgctgcaataagggccactgagggggacagtgtaggttgggggtgaggaatgtattaaaagatgagattgccttc

SEQ ID NO: 139635 - DNA, 4462 bp, Homo sapiens
  Payload ID: 7382
  Gene Symbol: HAUS5
  Gene Name: HAUS augmin-like complex, subunit 5
  ENST ID: ENST00000424522
  CDS Start-End: 33-302
gagggaggcggtgtcgccgccgcggcgctgtcatggagctagcgcaggaagcgcgggaactgggttgctgggcggtcgaagagatgggggtgcccgtggcggcccgggccccggaatcgacgctgcgcaggctgtgtctgggccagggggctgacatctgggcctacatcttgcagcatgtgcacagtcagaggactgtcaagaagatccggggaaacctactctggtatggccaccaggacagtccacaggtgagaagcatatgctacaagattctctttcatccgaaaaatgacttgtagatcttctgctctaagcccaaccaggtgctgggtgatgctggggacaatgggtcacaagacagccttgatctccatcctcatagggcttaaagtccagtggaaacagcattagctcagccaggtccgtcggaagttagagctggaagctgctgtgacccgcctgcgggcagaaatccaggaactcgaccagagcctggagctgatggagcgagacactgaggctcaggacacggccatggagcaggcacgtcagcacactcaagacacccagcgtcgagctctcctcctccgggcccaagctggggccatgcgaagacagcagcatacgctccgagatcccatgcagcggctgcagaatcaactgaggcgcctgcaggacatggagaggaaagccaaagtagatgtgacctttggatccctcacgtcggcagctctgggcctggagcccgtggtcctgcgtgatgtccgaacagcctgcaccctccgggcccagttcctgcagaacctcctgcttccccaggccaagaggggcagcctcccaacccctcatgatgaccactttggcacttcgtaccagcagtggctgagctcagtggagacgctgctgacaaaccaccccccaggccacgtcctggctgccttggagcacctggctgcagagcgggaggcagagattcggtccctgtgcagtggggatgggcttggcgacacagagatatccagaccccaggccccggaccagtcagactccagccagaccctgccgtccatggttcatctcatccaggagggctggcggactgtgggtgtgctggtctcccagcggagcaccctcctgaaggagcggcaagtcttgacccagcgcctccagggcctggtggaggaggtggagagacgcgtcctgggatccagtgagaggcaggtgctgatactggggcttcggcgctgttgcctgtggacggagctcaaggccctgcacgatcagagccaggagctgcaggatgcagctgggcatcggcagctcctgctgagggagctacaggccaaacagcagcggatcctgcactggcgccagctggtggaggagacccaggaacaggtccgcctgctcatcaagggaaactcggccagcaagacccgcctgtgccggagcccgggggaggtgctagctctggtccagcgaaaggtggtccctacatttgaggcagtggcaccacagagccgggagctgctgcgctgtctggaggaggaagtccggcatttgccccacattctgttgggcacgctgctgcggcacaggccgggagagttgaagcccctgcccacggtcctcccatccatccaccagctgcaccccgcgtccccaaggggctccagcttcatagcgctgagccacaagctggggctgcctccagggaaggcctcggagctgctcctgccggcggctgcctctcttcgccaggaccttctgctcctgcaggaccagcggagcctctggtgctgggatctactccacatgaagaccagcctgccgccaggccttcccacccaggagctgctgcagatccaggcatcccaggaaaaacagcagaaagagaacctggggcaggctctgaagaggctggagaagctactgaaacaggcactggagcgaatccctgagctgcaggggatcgtgggggactggtgggagcagccaggccaggccgccctctctgaggagctctgccagggcctgtccctgccccagtggcggctgcgctgggttcaggcccagggggccctgcagaagctgtgcagctgaagagagggttcaaacggaagccgagaacttgacactgttcaccccaacacctcacctcccccaggacatttggaagaaagcagcgccaggattcctcggcagtcgtccccacccgcacctgcagtcccctcatgtgctgttctgctgccccactcagctcctggaccctgtcctttcatcccgctaaagcaccccctaaaaccccttcatcactttcattctcagcaaaaagtaattgagcacctcctctaggcgctggggagtccacactgaacaaaagaaacagaaaaccctgtcttccagcagttgagttctagggcagggagacagagtttacaagataaggaaaatatatatgtagtatgctgcaagttaactgctgtgtgggaaatccagcagggggtgggatgtgtgatttgaattgagggccacactgcccaggtcgtgctccgtcaaggggtgagcaggagcaacaggggtggctgagtaagggcttgcagctggaggcaacagcacatgcaaaggccctgagccaggatgtgctgcaataagggccactgagggggacagtgtaggttgggggtgaggaatgtattaaaagatgagattgccttctagtttgtatagtttctttttttacatgtaaatcagccatttggaatttatcctagcacatggatccaattttgtcttattttacatatatcctagtagcacttactgaaattcccagtcagagtggcagttgcctctgagggaaggtgggtggcagggatcaactgaggaggagacacagaaatgtcctagctgatgggaatgtgctgtgtcaagagcagcggcggtgacgcaggtgtagagatttgtcagagctcatgtagttgtagtcttaaggcctgtgcatttcactgcgtgggttactcaatttataaagcaaagcccttacacttttgagatgccacctttttatgcactaaatttccatgtttaattgggttatatctggcttctctccagacctgctttgtatttaactctccatgtgtcattcctacagtagcttaatagaaaggcttgtgacacattgtcatatctgttcttgttttcttttgttttttttttttttttttttgagatgcagtctcattctgttgcccaagttggagtgcagtggcatgatctcagctcactgcaacctccgcctcccaggttcaagccattctcatgcctcagcttccccagtagctaggattacaggtacgcaccaccacgcccagctcatttttgtacttttagtagggacggggtttcatcatgttggccagactggtctcgaactcctgacctcaagtgatctgcctgcctcggcctcccaaagtgctgggattacaggcatgagccaccgcgcctgaccacattgccatatctgaaatggctggattctcttaggtgcttttctttttctttctttctttctttttttgagacagaatctggctgtttcccaggctgaagtgcagtggcatgaactcagctcactgcaacctctgcctcctggattcaaacaattctcatgtctcagcctcctgaatagctgggattacaggcacccaccaccatatctggctaatatttgtattttttgtagagtcggagctttaccatgttggtcaggctgctctccaactcctggcctcaagtgattctatcgcctctgcctcccaaatcttcacctgctgggattagtttcccctgtctcagtaaattttttttcccaaactaagtgaacattagatttaatttggctggccccagaagaaaaacatgcacagatggtagttttactggtgttgcagtaagttttcaaatttggaagtttggcagctttatgatcttgaaccttgctgtccatctctcacacaactcctctcttggcctccagagtccctttactctcccagctttcctcctgcccctggctgctgtttcccagcctttccacattggctttcccatgtagtccttagtgtgtctgctcctcctctctctcctcatcacagttcccagcccccaccttcaactgaactcaacaaaatcttcaacttcatacagtagtcacattgttagtaataacactggcatttttattttgataaaatagaccgtttaaatttttgagattctaccttatattttttgaattatatactaaagcaaataagtagtgatgtaatgtcattggggaccaagatttttagtgtaaatgaaaaaagataacaaatataaactcaagtaaacaccctgtagtctttcacatgaattggaaatatcagaataaagtcatgatttttctctttct

SEQ ID NO: 139636 - DNA, 526 bp, Homo sapiens
  Payload ID: 7382
  Gene Symbol: HAUS5
  Gene Name: HAUS augmin-like complex, subunit 5
  ENST ID: ENST00000592291
  CDS Start-End: 25-207
cggtgtcgccgccgcggcgctgtcatggagctagcgcaggaagcgcgggaactgggttgctgggcggtcgaagagatgggggtgcccgtggcggcccgggccccggaatcgacgctgcgcaggaatgaggatcccacaccctgtgtgctgccccaggcatatgcttacacactgtccccacaggctgtgtctgggccagggggctgacatctgggcctacatcttgcagcatgtgcacagtcagaggactgtcaagaagatccggggaaacctactctggtatggccaccaggacagtccacaggtccgtcggaagttagagctggaagctgctgtgacccgcctgcgggcagaaatccaggaactcgaccagagcctggagctgatggagcgagacactgaggctcaggacacggccatggagcaggcacgtcagcacactcaagacacccagcgtcgagctctcctcctccgggcccaagctggggccatgcgaagacagcagcatacgctccgagatcccatg

SEQ ID NO: 139637 - DNA, 3756 bp, Homo sapiens
  Payload ID: 7383
  Gene Symbol: HAUS6
  Gene Name: HAUS augmin-like complex, subunit 6
  ENST ID: ENST00000380496
  CDS Start-End: 16-2424
gcaagatttgttgcaatgaaatatattaaatccaattctaaaaattcttctcatcattttgtagagacatttaacataaaaccacaggacttgcacaaatgcattgccagatgccatttcgcacgtagcagatttttacaaattttgcaaagacaagattgtgttacccaaaaatatcaggaaaatgcacaattatcagttaagcaggtacgaaacttgagatctgaatgtataggattggaaaaccaaataaagaaaatggaaccctatgatgaccacagtaatatggaagaaaaaattcaaaaggttcggtctttgtgggcttcagtgaatgaaacgctcatgtttttggaaaaagagagagaagttgttagttcggtccttagtcttgttaaccaatatgctttagatggaactaatgttgctattaatattccaaggctcttacttgacaaaattgagaaacaaatgtttcagttgcacataggaaatgtttatgaggctggaaaactgaacctcttaacagttattcagttattaaatgaagtcttgaaggtgatgaaatatgaacgttgtcaggctgatcaagcaagattgacggtagaccttcactaccttgaaaaagagaccaaatttcagaaggaaagattatcagatctgaaacatatgaggtatagaataaaagatgatctcacaactataagacattctgttgttgaaaagcaaggagaatggcataaaaagtggaaagaatttcttggtttgtctcctttcagtctaattaaaggttggactccatctgtagatcttttaccaccaatgtctcccctttcgtttgatcctgcctcagaagaagtgtatgcaaagagtattctttgtcagtatcctgcttcacttccagatgcacataagcaacataaccaagaaaatggttgcagaggagacagtgataccttgggagcgctacatgatctagccaacagccctgcctctttcttgtcgcagtcagtttcatcatcagatagaaacagtgttacagtacttgaaaaggacacaaagatgggaactcccaaagaaaaaaatgaagcaatttctaagaaaataccagaatttgaagtggaaaattctccattatcagatgttgcaaagaatacagagagtagtgcatttggagggtctttgccagctaaaaaaagtgatccatttcaaaaagagcaagatcatctggtagaagaggttgccagagcagttttatctgattcaccacagctctctgaaggaaaagaaataaaattagaggaactaattgactctctgggttctaaccccttcttaacaaggaatcagattccccgtactccagaaaacttgataactgaaattaggagctcatggagaaaagctattgaaatggaagaaaacagaactaaagaaccaattcaaatggatgctgaacatagagaagtattgccagaatcattacctgtgttgcacaatcaaagagaatttagcatggctgattttctcttagaaaccactgtatcagattttggccagtctcatttgactgaagagaaagttatttcagattgcgagtgtgtgcctcagaaacatgtgctgaccagtcacatagatgaaccaccaacacaaaatcagtcagatttgttaaataagaaagtaatttgcaagcaagatttggaatgtttagccttcaccaagctttcagaaactagccgaatggagacattctcccctgctgtcggcaataggatagatgtgatgggtggcagtgaagaggagtttatgaaaatattggaccacttagaagtttcttgtaacaaaccttccacaaataaaactatgttgtggaattcttttcagatatcaagtggaattagttctaagagttttaaagataatgattttggcatattacacgaaactctcccggaagaagttggtcatctaagttttaatagttccagtagttcagaggccaattttaaactggagccaaatagtcctatgcatggtggcactcttctagaagatgttgtgggagggagacagactactccagaatcagactttaatttacaggctcttcgcagtagatacgaggctctgaagaaatctctttccaagaaaagggaagaatcttacctctcgaattcccaaacacccgaaagacacaaaccagaattgagccctactccccaaaatgtacaaacagatgatacgcttaactttttggacacctgtgatttgcatactgagcatataaagccatctttacgcacgtccatcggtgaaagaaaacggtctctttcaccactaattaagttttctccagtggaacaaagattgagaaccacaatagcatgtagtcttggagaactacctaatttaaagggtaaggtttaaatagacctatgcatattcacctgttgaagttttctctcaacttttgataaaaccagtacacaaagaatgctgcatgacctttattgttaatgtgctcccccttccttcatttaggatgaggggaatgatccctcactggacaggtcctttcagaatctctgtttatgtatatatagttacaattgatttgagacaggggtgggaaaaaaaagcccccccaatctgaagcttacaggttttataatacaaatgactgaaaagtaaatgtcatcaaaatcttgcccagtggaaggtggtttttaaacacttgagaaacccaattttaaatatcatcactataatggtgtaatatctgggggtggggtgtagaaataaaagaagccaggtcagtgtattagtttcctagggctgccataacaaagcaccatcaagtgggtggcttagaacagcagaaatttattgtctctggagacagtaagttctagaggctagatgtccaaaatcaaggtgttgacagggccatgttccctctgaagccactagaagaggatccttctttgcctcttctagcctctggtagcaccaggcattccttggcttgtggcagtgtaattctaatctttgcctccattgtcacatggtattcttcccttgtgtgtgtattgtcttataaggacacagtcatattagctaattaatgggtcaccctactccagtatgacctcatcttacttagctaattatatctgtaatgaccacatttccaaataaggtcacattctgaggtactggggttagaacttcaacatatgtttttgggggtattcagttcataacagttagtattaataattattgaagctaggtgatggatatattgagttaatcacagttctcttcacttttgtatgtttgaatgttttcctcataaaaggttaaaaaaattgctcttgtagctcattaagagagataaggatctggtgatacagattcattacatactctgatttgcccataatagttatacactgccatattgaaaagtatttggctgggcacagtggctcacacctgcaatcccagcactttgggagtccgagatgggaggatcacttgaacccaggagttcgagactagcctcagcaacacagggagactatgtctctacaaaaaattaaacaattagctgggcacgttggcgcatgcctgtgatcccaggtacacaggaggctgaggtgggaggattgcttgggcctgggagtttgaggctgaagtgagctgcgatcgtgccactgcactccagcctgggtgacagagcaagaccctgtcgca

SEQ ID NO: 139638 - DNA, 6536 bp, Homo sapiens
  Payload ID: 7383
  Gene Symbol: HAUS6
  Gene Name: HAUS augmin-like complex, subunit 6
  Uniprot ID: Q7Z4H7
  ENST ID: ENST00000380502
  CDS Start-End: 469-3336
agaaacccgaaggcccgaggatctgggcacgacagcggttaagcaagcgcagagcaagtcgctggccgcgcaatgcccggtgggtcttgcagtttcttggctgggcatggccggaagggaggagagaaggacgcattgcatggcgggagatatagtctttgccggaagtccctcctccctcggacgcctggcggcgccggcgcacactgctcttccttaagggcgggagtctcggtttgtggtggcttcgctgaggcagtggtggccgcactataccgttagaaactcaatttcccggaggttgtgaggccctttgaggcgaaatcgctctgggcgtgaaaggagcaggcgttggcaatggaaggaccaccgcgacctcaggctgaccgtagggagggatcttgagggccctccgagtcccctgggcttgcgctttctttctttgcagccaccgtgcctaccgcgaggatgagctcggcctcggtcaccgctttcgagaaggagcatctctggatgtatctgcaggcgctcggcttcgagccaggcccggcaaccattgcctgcggaaagatcgtgtcgcacacgcacctcggagtgaacatgtttgacaagctgaaccgtgatgcctttcatataatttcttattttttgtttcaagttctggaccagtctctcaccaaagaagttttcaaattttgttggcccccatttgaccaaaaaagtgacactgaattccgaaaacattgctgtgaatggataaaaaggatttctggtgaatgtggaagtagctttcctcaagttgttggttcactatttctttctcctggtggtcctaagtttattcatctgatgtatcattttgcaagatttgttgcaatgaaatatattaaatccaattctaaaaattcttctcatcattttgtagagacatttaacataaaaccacaggacttgcacaaatgcattgccagatgccatttcgcacgtagcagatttttacaaattttgcaaagacaagattgtgttacccaaaaatatcaggaaaatgcacaattatcagttaagcaggtacgaaacttgagatctgaatgtataggattggaaaaccaaataaagaaaatggaaccctatgatgaccacagtaatatggaagaaaaaattcaaaaggttcggtctttgtgggcttcagtgaatgaaacgctcatgtttttggaaaaagagagagaagttgttagttcggtccttagtcttgttaaccaatatgctttagatggaactaatgttgctattaatattccaaggctcttacttgacaaaattgagaaacaaatgtttcagttgcacataggaaatgtttatgaggctggaaaactgaacctcttaacagttattcagttattaaatgaagtcttgaaggtgatgaaatatgaacgttgtcaggctgatcaagcaagattgacggtagaccttcactaccttgaaaaagagaccaaatttcagaaggaaagattatcagatctgaaacatatgaggtatagaataaaagatgatctcacaactataagacattctgttgttgaaaagcaaggagaatggcataaaaagtggaaagaatttcttggtttgtctcctttcagtctaattaaaggttggactccatctgtagatcttttaccaccaatgtctcccctttcgtttgatcctgcctcagaagaagtgtatgcaaagagtattctttgtcagtatcctgcttcacttccagatgcacataagcaacataaccaagaaaatggttgcagaggagacagtgataccttgggagcgctacatgatctagccaacagccctgcctctttcttgtcgcagtcagtttcatcatcagatagaaacagtgttacagtacttgaaaaggacacaaagatgggaactcccaaagaaaaaaatgaagcaatttctaagaaaataccagaatttgaagtggaaaattctccattatcagatgttgcaaagaatacagagagtagtgcatttggagggtctttgccagctaaaaaaagtgatccatttcaaaaagagcaagatcatctggtagaagaggttgccagagcagttttatctgattcaccacagctctctgaaggaaaagaaataaaattagaggaactaattgactctctgggttctaaccccttcttaacaaggaatcagattccccgtactccagaaaacttgataactgaaattaggagctcatggagaaaagctattgaaatggaagaaaacagaactaaagaaccaattcaaatggatgctgaacatagagaagtattgccagaatcattacctgtgttgcacaatcaaagagaatttagcatggctgattttctcttagaaaccactgtatcagattttggccagtctcatttgactgaagagaaagttatttcagattgcgagtgtgtgcctcagaaacatgtgctgaccagtcacatagatgaaccaccaacacaaaatcagtcagatttgttaaataagaaagtaatttgcaagcaagatttggaatgtttagccttcaccaagctttcagaaactagccgaatggagacattctcccctgctgtcggcaataggatagatgtgatgggtggcagtgaagaggagtttatgaaaatattggaccacttagaagtttcttgtaacaaaccttccacaaataaaactatgttgtggaattcttttcagatatcaagtggaattagttctaagagttttaaagataatgattttggcatattacacgaaactctcccggaagaagttggtcatctaagttttaatagttccagtagttcagaggccaattttaaactggagccaaatagtcctatgcatggtggcactcttctagaagatgttgtgggagggagacagactactccagaatcagactttaatttacaggctcttcgcagtagatacgaggctctgaagaaatctctttccaagaaaagggaagaatcttacctctcgaattcccaaacacccgaaagacacaaaccagaattgagccctactccccaaaatgtacaaacagatgatacgcttaactttttggacacctgtgatttgcatactgagcatataaagccatctttacgcacgtccatcggtgaaagaaaacggtctctttcaccactaattaagttttctccagtggaacaaagattgagaaccacaatagcatgtagtcttggagaactacctaatttaaaggaagaagacattttgaataagagccttgatgcaaaagaaccaccgtctgacttgacaagatgaagacgtacccatttaatataactatgatgcacttaaattgaagctatgccacaggatagaaaatgaattacaacttaaatacatgttggaagtgtaacactgtttttcaaggtttaaaaaaattcctaatgccttttagccttctttaatatttttaggtaaggaaagtatgtttggattttttcctctttgtaggtatatgagattgaaatgtgaagtatttggacaacaaacgtcaagcaatgggaagccattttgatttcttgagtaatcttgtaagcattaagtgaatgacaaagtagtagtgtaacttatttcttatgttataacttcagtcaattaatataaggatagtttttgttgtatgttcactaaatggttaatataatagccattgaatatactaatctttcatcttagagaactatacaacttttattgtttcttaatggaacattctggctaaccagaaaaagtgagaaaagtagtaccttgggatgtgtagtcaagatgacaaattttaagactggaaaagctctaaacaggcttaatgattcttcaggtagaatgatcctgagaagtgatgtttgatggaataaagtgcatgtgatgattaagtgaagactggggcagaatgatttaaaaaaaggaaaaagatggaagatgagtagacacttgcaaggaacactgtcaaactataaatccattcagtgggttgtataacatttatatttagtctaatttagactttgataatttaatgctacttttatattttaacaaaaatataaattaaaattttcattagtctgttttgttgttgggtttttttgtgaggtactccctgttgggggaaaggaacaaggaacaaccatcagaatcccccagtccctacagaatagcctcacagtaacttgagaaaactgaacttggggttaaataacttgtcacacttgcagtctcctgcctcactccttcaggtgccctgcctagaaaaagacttgtgtctagcatccaagtgaacacatactattgccctctgtgaaccaggaggaatggaacaggcaatggaagggtgatagtacctacaataccctttgtagaccccatctcactaccatcaaaatcttgtccactagcccccaaaaaactggcaaggaaagaaggtggaggggaaatttatggaagtagatggcttaatagttatttcttttatcttgggctgcctttctctaagttggttgtcctgtcccagtgtgaagacccatctttttgtgagaaaagacaaaagaaagcacatgtaactaccttctttgcaatggaaaaggagaaagaaaaaatcttctcctaagttgctgttttcttttattagttaataaaacaaatcagggactatgcaggtctatggggaaacctttagtctgctttaagaaaactcagtatctgaaaatcttaacttagcatgtgatactgtcttatcagcatctgcagaagtgccaaagccactgctagacacttaatgtgtattatttcatttaattatattttaaatgtgcttccttggtaattcttaagctcgagaaagagtttgagaactgctgctaggaaatagagattcacatttaaccctgtggtacttttaagaagcaggtacgttgttgcatatatacttgggtagagattggtaactatctgatagggaagctcaagttggccacccaagtctgagaaacccttaattactgagaatcaaaagagcagaatgtctgtagacattttggatttgtaaaaatcacattgttgagttatacctgtgatgggctgaaagtttttggcattctttcctgttcttcatatgccagtaccataaacaaaaagtatctcagatctgtcactttcttctcctaaaccaatgtgatggcagctttttgccttcagccttttccctatccagtatctcctacatagttaccttttgatcttaaggaactgttttgattgggtcacttccttgcctaaaattccattgattgttcattgttaattctaaaatagagttcaaatttaaaggcatgtaagttcccctgtaacggatttcctctactcccccttccgctgtaatctcccatttttttactgaaatgcttcagtgagcatgggtctttagaggtcttgatatacaattttcctgaagcaggaataccttgctttcctctactagtttaccacaattacagctctcttttaagcctcagaaaaaaatctcacttccgtcttgaagtcttaatccacgctttttatatccatgtgcctactccttctctgaaatctcctatggtttatctttttattcatttaatatcccacgaattgattttattatatattttttatggttgcatgtggtctttctagttatagcaatatacacatacatgcataaatacatatacacctatgtaaatgtgtgttgggagtatgtattcacacacatacatataccccaaggccatgtgtcatctttatcaatatttaagttttggaattgttttgtttgcctcctatatcatggaataaatggtaaagagggctaatttattactctaagtggatttcttattacattaatatcagacatatagaatgtactttgttttactatttgtaagatacaaaggtatataaactgacatacatcagcttgaaacctgagataatgctaaaatgttctaattattttaaatgtttaaagaggacaaccatgtaatgttgctaaacatgaaaaatgtcatcaagtggaataaagaatagctgaagttaacatttgggggaaattgagctgaaaacaaaaatatgagtattttgataccttttctttaccatgagactcttgactatgaagtcaaatttatctaaaggaaaaacaggaattctggagacctgtgtaaaagcagactattatcttcctactgtgagagtactaaaattaaaatacgtttaatgacgttttcctcaatgtaaaagcattgaagtaaatgtttcttttatgttgcagatacatagttgctctagagatcacctttttctttatgcattgtgaatagcagtctgcatcctaagtttaaaatatttgagaatcctctatgggactctctgtaaatgttttaaatactgttgttttcaataaatattttatacta

SEQ ID NO: 139639 - DNA, 680 bp, Homo sapiens
  Payload ID: 7383
  Gene Symbol: HAUS6
  Gene Name: HAUS augmin-like complex, subunit 6
  ENST ID: ENST00000415524
  CDS Start-End: 130-680
ttctcaagtggcatttactcatcgattccatcaatccatcaaatagttaacatccctgcctctttcttgtcgcagtcagtttcatcatcagatagaaacagtgttacagtacttgaaaaggacacaaagatgggaactcccaaagaaaaaaatgaagcaatttctaagaaaataccagaatttgaagtggaaaattctccattatcagatgttgcaaagaatacagagagtagtgcatttggagggtctttgccagctaaaaaaagtgatccatttcaaaaagagcaagatcatctggtagaagaggttgccagagcagttttatctgattcaccacagctctctgaaggaaaagaaataaaattagaggaactaattgactctctgggttctaaccccttcttaacaaggaatcagattccccgtactccagaaaacttgataactgaaattaggagctcatggagaaaagctattgaaatggaagaaaacagaactaaagaaccaattcaaatggatgctgaacatagagaagtattgccagaatcattacctgtgttgcacaatcaaagagaatttagcatggctgattttctcttagaaaccactgtatcagattttggccagtctcatttgactgaagagaaagttatttcagattgcgagtgtgtgcctcagaa

SEQ ID NO: 139640 - DNA, 1593 bp, Homo sapiens
  Payload ID: 7384
  Gene Symbol: HAUS7
  Gene Name: HAUS augmin-like complex, subunit 7
  ENST ID: ENST00000370210
  CDS Start-End: 732-1115
atgcgcctgggacttgcaatgatgaaacagggccattggcaaagctggggtaccagtcacccagccacgctctagggtggtagccaagaagacggaccccgagcgggaggcagagagacaagaggtggatgaagcagagcaagcgtgagcatggtgaagagaagacggagccccgcgctgggagaggaacgcttcagtccgagttccattctgcacccaaggctccccttggtcctcctgggaaccagggtgccccttagtggtggtggcccaggagaacccgaccaaggcaggagcgccccctcctggaagagcctcgcttcaacgcatcatcattcccggccggcagcaggggcgacgccagcaaggcctgcgactcagagccagcttggcccgttcgccccgccccttcccggtgtccgccccgcccctttcccggtgtccgccccgcctccttcccggtgtccgccccgcccccttccctgtgtccgccccgcccccttccctgtgtccgccctgcccgcttcactgtggtcctgcctctgggtggtgccggggcggggggtgggagcccggggcccgcgcaggcggagatgtcgcccaatgggaagggtcggtcgggaagggggtgggcgcaggcgggtgggcgggaagaacgctggaggttgattggcggtcttgccggccagtgaagccagggcatgggcggggcgcggctcggagcgcgaaacatggcggggcaggacgctggctgcggccgtggcggcgacgactactcagaggacgagggcgacagcagcgtgtccagggcggctgtggaggtgttcgggaagctgaaggacctaaactgccccttcctcgagggtctgtatatcacagagccaaagacaattcaggaactgctgtgcagcccctcagagtaccgcttggagatcctagagtggatgtgtacccgggtctggccctcactgcaggacaggttcagctcactgaaaggggtcccaacagaggtgaagatccaagaaatgacgaagctgggccacgagctgatgctgtgtgcgccagatgaccaggagctcctcaagagatttattcacgtgaccaatggcctatgacacagccccaggaggtcctgagaacatgtgcacaaggtggttgggctacagctggttttctacgatttagggagacataagacgtcagtgaatccatgtgagatgtacactggctggttgaacacgtgttttccatcctcttgggtgtatagctgggagtggaattgctgggtcacagggtcactctgtgcttaacttttcgaggagcccccaaactgttttccagtgcggcggcaccatcttccttttccagcagcagcgcgggagagctccagtttctcctcgtcctcgctggcacttgctggcatccgtcttgttgattctagccaccctgctcggtgtggggtggcatctcattatggttttgatttgcatttccccatgaccagtgatacggagcgtctttttgtgagcttgttggccatttctgtatatgctttggaaaaatttccatattcatgtcctttgcccacttttt

SEQ ID NO: 139641 - DNA, 1363 bp, Homo sapiens
  Payload ID: 7384
  Gene Symbol: HAUS7
  Gene Name: HAUS augmin-like complex, subunit 7
  Uniprot ID: Q99871
  ENST ID: ENST00000370211
  CDS Start-End: 45-1151
gctggaggttgattggcggtcttgccggccagtgaagccagggcatgggcggggcgcggctcggagcgcgaaacatggcggggcaggacgctggctgcggccgtggcggcgacgactactcagaggacgagggcgacagcagcgtgtccagggcggctgtggaggtgttcgggaagctgaaggacctaaactgccccttcctcgagggtctgtatatcacagagccaaagacaattcaggaactgctgtgcagcccctcagagtaccgcttggagatcctagagtggatgtgtacccgggtctggccctcactgcaggacaggttcagctcactgaaaggggtcccaacagaggtgaagatccaagaaatgacgaagctgggccacgagctgatgctgtgtgcgccagatgaccaggagctcctcaagggctgtgcctgcgcccagaagcagctacacttcatggaccagttgctcgataccatccggagcctgaccattgggtgctccagttgctcgagcctgatggagcacttcgaggacaccagggagaagaacgaggccttgctgggggagctcttctctagcccccacctgcagatgctcctgaatccagagtgcgacccgtggcccctggacatgcagcccctcctcaacaagcagagtgatgactggcagtgggccagtgcctctgccaagtccgaggaggaggagaagctggcggagcttgccaggcagctgcaggagagtgctgccaagttgcacgcgcttagaacggagtactttgcacagcatgagcaaggggctgctgcgggcgcagccgacatcagcaccctagaccagaagctgcgtctggtcacttccgacttccaccagctaatcttggcttttctccaagtctacgacgacgagctgggcgagtgctgccagcgcccaggccctgacctccacccgtgcggccccatcatccaggccacgcaccagaatctgacttcctacagccaactgctgcaagtggtcatggcagttgctgacacctctgcgaaggccgtggagaccgtgaagaagcagcaaggcgagcagatctgctggggtggcagcagctccgtcatgagtctagctaccaagatgaatgaactaatggagaaatagaaagtcttcagtgatggcctacgccaaagcacaggatggggcgggcaggaagccctctcccaagatcgagttggccgaggatggatgattgtggcagcagaagccgttgcagccccacgttgtgctctaggcagggacctttggcccctttggggagggagagacagacgggcggtttgacttggacacaaagaaagccttggtttctaagc

SEQ ID NO: 139642 - DNA, 843 bp, Homo sapiens
  Payload ID: 7384
  Gene Symbol: HAUS7
  Gene Name: HAUS augmin-like complex, subunit 7
  ENST ID: ENST00000435662
  CDS Start-End: 1-635
ccaagtccgaggaggaggagaagctggcggagcttgccaggcagctgcaggagagtgctgccaagttgcacgcgcttagaacggagtactttgcacagcatgagcaaggggctgctgcgggcgcagccgacatcagcaccctagaccagaagctgcgtctggtcacttccgacttccaccagctaatcttggcttttctccaagtctacgacgacgagctgggcgagtgctgccagcgcccaggccctgacctccacccgtgcggccccatcatccaggccacgcaccagaatctgacttcctacagccaaatccccagaggccaacctaaaaagccggctttagttacgatgactacagttcccacgtgcgcaactctgcccttggctcaaggattccgtgatgttcattttggttttctaagcgagaggctccgagccttccaacctctgactggctggtcctgtgagacccctcgatcagggatgctgctgcaagtggtcatggcagttgctgacacctctgcgaaggccgtggagaccgtgaagaagcagcaaggcgagcagatctgctggggtggcagcagctccgtcatgagtctagctaccaagatgaatgaactaatggagaaatagaaagtcttcagtgatggcctacgccaaagcacaggatggggcgggcaggaagccctctcccaagatcgagttggccgaggatggatgattgtggcagcagaagccgttgcagccccacgttgtgctctaggcagggacctttggcccctttggggagggagagacagacgggcggtttgacttggacacaaagaaagccttggtttct

SEQ ID NO: 139643 - DNA, 414 bp, Homo sapiens
  Payload ID: 7384
  Gene Symbol: HAUS7
  Gene Name: HAUS augmin-like complex, subunit 7
  ENST ID: ENST00000626181
  CDS Start-End: 31-414
atgggcggggcgcggctcggagcgcgaaacatggcggggcaggacgctggctgcggccgtggcggcgacgactactcagaggacgagggcgacagcagcgtgtccagggcggctgtggaggtgttcgggaagctgaaggacctaaactgccccttcctcgagggtctgtatatcacagagccaaagacaattcaggaactgctgtgcagcccctcagagtaccgcttggagatcctagagtggatgtgtacccgggtctggccctcactgcaggacaggttcagctcactgaaaggggtcccaacagaggtgaagatccaagaaatgacgaagctgggccacgagctgatgctgtgtgcgccagatgaccaggagctcctcaagagatttattcacgtgaccaatggcctatga

SEQ ID NO: 139644 - DNA, 1568 bp, Homo sapiens
  Payload ID: 7385
  Gene Symbol: HAUS8
  Gene Name: HAUS augmin-like complex, subunit 8
  Uniprot ID: Q9BT25
  ENST ID: ENST00000253669
  CDS Start-End: 192-1424
gcgagaccaagtgcgaggggaggacaggcgaagcgcgcgtctggggccgcgctctccacacttagccggcgctgcctcacgcctcgcagccacccctcctgcgtctccacaaatggtccgacccgcaagcaagggggcgggtccggctttgaaaagccggcgggtcgggccttgaggtggaaggcgggaaaatggcggattcctcggggcgaggcgctgggaagcctgcaaccggccccacaaattctagcagtgccaagaagaaggataaaagagttcaaggtggaagagtgattgagtcccggtatctgcagtatgaaaagaagacaacccaaaaggctcctgcaggagatgggtcacagacccgagggaagatgtctgaaggtggaaggaaatccagcctgctccagaaaagcaaagcagatagcagtggggtcggaaagggtgacctgcagtccacgttgctggaagggcatggcacagctccacctgacctggatctctctgctattaatgacaaaagcatcgtcaaaaagacgccacagttagcaaaaacaatatcaaagaaacctgagtcaacatcattttctgcccctcggaaaaagagcccggatttatctgaagcaatggaaatgatggagtctcagacactactgctgacgctactatccgtaaagatggagaacaatcttgctgagtttgaaagaagggcagaaaagaatttattaataatgtgtaaggagaaggagaagctacagaaaaaggcccacgagctgaagcgcaggcttctcctctctcagaggaagcgggagctggcagatgtcctggatgcccagatcgagatgctcagccccttcgaggcagtggccacacgcttcaaggagcaatacaggacattcgccacggccctggacactaccaggcacgagctgcccgtgaggtccatccacctggagggagatgggcagcagctcttagacgccctgcagcatgaactggtgaccactcagcgcctcctgggagaacttgatgttggtgattcggaagaaaatgtgcaggtgctggacttactgagcgaactcaaggacgtgacggcgaaaaaggaccttgagctccgaaggagctttgcccaggtgctggaactctccgcagaggcaagcaaagaggcagccttggcaaaccaggaagtctgggaagagacccagggcatggcgccccccagccggtggtatttcaatcaagacagtgcctgcagagaatctgggggagcacccaagaacacgcccctgtctgaggacgacaacccgggtgcctcgtcagcccccgctcaggccacgttcatcagcccaagcgaagatttttcttcaagcagccaggcagaagtcccgccctctctctctcgttcagggagggacttgtcatgactcatggttacattcaggatacttgagcactttatatactaccgtagcactgtagctattttttatgtgataatcttgtttgataaaaaagtaaacctgttttgcaattgaagcctccattttctatgaaggggccagttggaa

SEQ ID NO: 139645 - DNA, 1545 bp, Homo sapiens
  Payload ID: 7385
  Gene Symbol: HAUS8
  Gene Name: HAUS augmin-like complex, subunit 8
  Uniprot ID: Q9BT25
  ENST ID: ENST00000448593
  CDS Start-End: 204-1433
cgccgatggtgggcgagaccaagtgcgaggggaggacaggcgaagcgcgcgtctggggccgcgctctccacacttagccggcgctgcctcacgcctcgcagccacccctcctgcgtctccacaaatggtccgacccgcaagcaagggggcgggtccggctttgaaaagccggcgggtcgggccttgaggtggaaggcgggaaaatggcggattcctcggggcgaggcgctgggaagcctgcaaccggccccacaaattctagcagtgccaagaagaaggataaaagagttcaaggtggaagagtgattgagtcccggtatctgcagtatgaaaagaagacaacccaaaaggctcctgcaggagatgggtcacagacccgagggaagatgtctgaaggtggaaggaaatccagcctgctccagaaaagcaaagatagcagtggggtcggaaagggtgacctgcagtccacgttgctggaagggcatggcacagctccacctgacctggatctctctgctattaatgacaaaagcatcgtcaaaaagacgccacagttagcaaaaacaatatcaaagaaacctgagtcaacatcattttctgcccctcggaaaaagagcccggatttatctgaagcaatggaaatgatggagtctcagacactactgctgacgctactatccgtaaagatggagaacaatcttgctgagtttgaaagaagggcagaaaagaatttattaataatgtgtaaggagaaggagaagctacagaaaaaggcccacgagctgaagcgcaggcttctcctctctcagaggaagcgggagctggcagatgtcctggatgcccagatcgagatgctcagccccttcgaggcagtggccacacgcttcaaggagcaatacaggacattcgccacggccctggacactaccaggcacgagctgcccgtgaggtccatccacctggagggagatgggcagcagctcttagacgccctgcagcatgaactggtgaccactcagcgcctcctgggagaacttgatgttggtgattcggaagaaaatgtgcaggtgctggacttactgagcgaactcaaggacgtgacggcgaaaaaggaccttgagctccgaaggagctttgcccaggtgctggaactctccgcagaggcaagcaaagaggcagccttggcaaaccaggaagtctgggaagagacccagggcatggcgccccccagccggtggtatttcaatcaagacagtgcctgcagagaatctgggggagcacccaagaacacgcccctgtctgaggacgacaacccgggtgcctcgtcagcccccgctcaggccacgttcatcagcccaagcgaagatttttcttcaagcagccaggcagaagtcccgccctctctctctcgttcagggagggacttgtcatgactcatggttacattcaggatacttgagcactttatatactaccgtagcactgtagctattttttatgtgataatcttgtttgataaaaaagtaaacctgttttgcaattgaa

SEQ ID NO: 139646 - DNA, 3176 bp, Homo sapiens
  Payload ID: 7385
  Gene Symbol: HAUS8
  Gene Name: HAUS augmin-like complex, subunit 8
  Uniprot ID: Q9BT25
  ENST ID: ENST00000593360
  CDS Start-End: 2020-3069
gagttccgcgtcctcggctgggacgctgggcgacctccggcaagcggcctgaccgcccagtgcctcgctttcctccgctacgaaatggggccgatgacgcagctcaacctcgtaggcgtcgcgtgaggctgaaacgcgcttagatcggcgcctgggtctttactgtgatgtcgctcttggaattatcgttatgcagtgaacaagtgttgggcgaccaaagtgtcccctttaatcctcccacgcgctttattctgtgctcccagtttactgaggagatgatggagacccagggaggggaagtgacttgcctagggtaacacaccatgaacaagaaagaagttgaatactgaccgagagctaggcatgaatgatcatgaggctatatttgtctagttttgttaattctgccagtgttgattgtgccaggtgcaaactgaagtgaaattggccagcaagaggaatcactccaccgccccttgccgtaaccgatagattgacagtagcacctcccaggtacaggtgcagtagctgaggctcgcacaggttgtagggacccccctcaggtcgcagcaggttcacccaggagcccattcggtttgaggccacagccctagcacagtccccagagggagtctgtgctcttgtctctttctggctgtgagactgccccgggggtgacctatgtaaaacctgtgcgtctttgttttgcagcgacgaaaaagcaggtgtgaacagttaggaagctgtcgggttaggaggagcctacgggcgagcgcagctgctggcacctggcgaacatttgctaagttgcctctccccacggtggcctggaagtgtccccaacattgtctgggtctcactttggggtcctgggagcctgcttcagaggaggtggccgcagggaccagtggagccgcctttggtgatgggagcaggagttacagtgccctggccttggccctgcccctccacttgcccatccacttgcccctcctgtgttgctggtgtctgttcttggatcccttcttttctcaccagctcaggctgaaaccctgaaacccctagtcatcccagattctccctctcctgcacccccacagctgatgagtcagcgattcctatctcagggtcccttctttcctattacatcaggcttcattctatttttatttttatttttatttttatttatttatttattgagacggagtctcactgtcaccctggctggagtgcaatggcgtgatcttggctcactgcaacctgtgcctcccgggttcaagcagttctcctgtgtcagtctcctgagtaggagggactacaggcgcatgccaccaccccagctcatttttgtatttttagtagagatggggtttcaccatgttagccaggatggtctcgatctcctgacctcgtgatccgccagcctcagcctcccaaagtgaggtacctgctgggaccactcctcgtacctgcctgtcaagatgttgttcttccctttctgggaaggagctctgtgttttgttaccactgtgtctctactggaatatagtaggtgcatcaatgtctggtgaatgaatgaacccagggataatttgagatctgctgtgatctcttccacagagctctcattaccctcctctcttctcagtttgggtgttcacctatgccttcttgcccaggtgaccagggctggctgctccttgtgtcccttttcctgttgaggtggcccaccctcactgaaattgtcctctggcagcccttggactgggctgtctgagcttcaactagcagaggcacctcgccggcttccctgtgcttcttgggtagtgaggtgaacaagacctctctctcttctcttgcaggaagcctgcaaccggccccacaaattctagcagtgccaagaagaaggataaaagagttcaaggtggaagagtgattgagtcccggtatctgcagtatgaaaagaagacaacccaaaaggctcctgcaggagatgggtcacagacccgagggaagatgtctgaaggtggaaggaaatccagcctgctccagaaaagcaaagcagatagcagtggggtcggaaagggtgacctgcagtccacgttgctggaagggcatggcacagctccacctgacctggatctctctgctattaatgacaaaagcatcgtcaaaaagacgccacagttagcaaaaacaatatcaaagaaacctgagtcaacatcattttctgcccctcggaaaaagagcccggatttatctgaagcaatggaaatgatggagtctcagacactactgctgacgctactatccgtaaagatggagaacaatcttgctgagtttgaaagaagggcagaaaagaatttattaataatgtgtaaggagaaggagaagctacagaaaaaggcccacgagctgaagcgcaggcttctcctctctcagaggaagcgggagctggcagatgtcctggatgcccagatcgagatgctcagccccttcgaggcagtggccacacgcttcaaggagcaatacaggacattcgccacggccctggacactaccaggcacgagctgcccgtgaggtccatccacctggagggagatgggcagcagctcttagacgccctgcagcatgaactggtgaccactcagcgcctcctgggagaacttgatgttggtgattcggaagaaaatgtgcaggtgctggacttactgagcgaactcaaggacgtgacggcgaaaaaggaccttgagctccgaaggagctttgcccaggtgctggaactctccgcagaggcaagcaaagaggcagccttggcaaaccaggaagtctgggaagagacccagggcatggcgccccccagccggtggtatttcaatcaagacagtgcctgcagagaatctgggggagcacccaagaacacgcccctgtctgaggacgacaacccgggtgcctcgtcagcccccgctcaggccacgttcatcagcccaagcgaagatttttcttcaagcagccaggcagaagtcccgccctctctctctcgttcagggagggacttgtcatgactcatggttacattcaggatacttgagcactttatatactaccgtagcactgtagctattttttatgtgataatcttgtttgataaaaaagtaaacctgttttgcaa

SEQ ID NO: 139647 - DNA, 1055 bp, Homo sapiens
  Payload ID: 7385
  Gene Symbol: HAUS8
  Gene Name: HAUS augmin-like complex, subunit 8
  ENST ID: ENST00000598517
  CDS Start-End: 1-120
atggcggattcctcggggcgaggcgctgggaagcctgcaaccggccccacaaattctagcagtgccaagaagaaggataaaagagttcaagtgtgtccccacaggtggaagagtgattgagtcccggtatctgcagtatgaaaagaagacaacccaaaaggctcctgcaggagatgggtcacagacccgagggaagatgtctgaaggtggaaggaaatccagcctgctccagaaaagcaaagcagatagcagtggggtcggaaagggtgacctgcagtccacgttgctggaagggcatggcacagctccacctgacctggatctctctgctattaatgacaaaagcatcgtcaaaaagacgccacagttagcaaaaacaatatcaaagaaacctgagtcaacatcattttctgcccctcggaaaaagagcccggatttatctgaagcaatggaaatgatggagtctcagacactactgctgacgctactatccgtaaagatggagaacaatcttgctgagtttgaaagaagggcagaaaagaatttattaataatgtgtaaggagaaggagaagctacagaaaaaggcccacgagctgaagcgcaggcttctcctctctcagaggaagcgggagctggcagatgtcctggatgcccagatcgagatgctcagccccttcgaggcagtggccacacgcttcaaggagcaatacaggacattcgccacggccctggacactaccaggcacgagctgcccgtgaggtccatccacctggagggagatgggcagcagctcttagacgccctgcagcatgaactggtgaccactcagcgcctcctgggagaacttgatgttggtgattcggaagaaaatgtgcaggtgctggacttactgagcgaactcaaggacgtgacggcgaaaaaggaccttgagctccgaaggagctttgcccaggtgctggaactctccgcagaggcaagcaaagaggcagccttggcaaaccaggaagtctgggaagagacccagggcatggcgccccccagccggtggtatt

SEQ ID NO: 139648 - DNA, 826 bp, Homo sapiens
  Payload ID: 7385
  Gene Symbol: HAUS8
  Gene Name: HAUS augmin-like complex, subunit 8
  ENST ID: ENST00000601564
  CDS Start-End: 23-298
ccttgaggtggaaggcgggaaaatggcggattcctcggggcgaggcgctgggaagcctgcaaccggccccacaaattctagcagtgccaagaagaaggataaaagagttcaaggtggaagagtgattgagtcccggtatctgcagtatgaaaagaagacaacccaaaagcagatagcagtggggtcggaaagggtgacctgcagtccacgttgctggaagggcatggcacagctccacctgacctggatctctctgctattaatgacaaaagcatcgtcaaaaagacgccacagttagcaaaaacaatatcaaagaaacctgagtcaacatcattttctgcccctcggaaaaagagcccggatttatctgaagcaatggaaatgatggagtctcagacactactgctgacgctactatccgtaaagatggagaacaatcttgctgagtttgaaagaagggcagaaaagaatttattaataatgtgtaaggagaaggagaagctacagaaaaaggcccacgagctgaagcgcaggcttctcctctctcagaggaagcgggagctggcagatgtcctggatgcccagatcgagatgctcagccccttcgaggcagtggccacacgcttcaaggagcaatacaggacattcgccacggccctggacactaccaggcacgagctgcccgtgaggtccatccacctggagggagatgggcagcagctcttagacgccctgcagcatgaactggtgaccactcagcgcctcctgggagaacttgatgttggtgattcggaagaaaatgtgcaggtgctggacttactgagcg

SEQ ID NO: 139649 - DNA, 980 bp, Homo sapiens
  Payload ID: 7386
  Gene Symbol: HBS1L
  Gene Name: HBS1-like translational GTPase
  ENST ID: ENST00000314674
  CDS Start-End: 113-760
agccaagatggcgcataggggttctccaggctgcagttggcgccttatcagtatctaagcggagtgttttggaaggagttaaggggctgtggcaaacgccctctccgccgtcatggcccggcatcggaatgttcgaggctataactacgatgaagattttgaagatgatgatctctacggccagtctgtagaggatgattattgtatttcgccgtcaacagctgctcagtttatttattcacggcgtgacaaaccttccgttgagcctgtggaagaatatgattatgaagatctgaaagaatcttccaattctgtttcaaaccatcagctcagtggatttgatcaagctcgtctttattcatgccttgatcacatgagagaggtacttggagatgctgtgccagatgaaatattaattgaagcagttctgaagaacaagtttgatgtgcagaaggctttgtcaggggttctggaacaagatagagtgcagagtttgaaggacaagaatgaggcaacagtatctacaggaaagatagcaaaaggagtcttattttcttcttctgaagtttcagctgataatgttcaaagttcttatcctcagtcagcaaatcatttggattatagtagcaaaccctttgattttgctagctcagtaggaaaatacggattatctcataattcttcagttccaactcactgtttactccatagaaaaaagaaacttgacacacgtaaaagtgaaaagaaactagaatcatgaaaaccagtagattcccagacatcgcgaagtgaatctgaaattgtgccaaaagttgctaaaatgactgtatctggaaagaagcaaactatgggatttgaagtgcctgggtaagactttgagtacctccctcatccccacccccacccccaagtttttgaaatcactgttgcttctgtaagaaagagactgtttcaatttcgcataatatatcattagcact

SEQ ID NO: 139650 - DNA, 638 bp, Homo sapiens
  Payload ID: 7386
  Gene Symbol: HBS1L
  Gene Name: HBS1-like translational GTPase
  ENST ID: ENST00000367820
  CDS Start-End: 110-553
caagatggcgcataggggttctccaggctgcagttggcgccttatcagtatctaagcggagtgttttggaaggagttaaggggctgtggcaaacgccctctccgccgtcatggcccggcatcggaatgttcgaggctataactacgatgaagattttgaagatgatgatctctacggccagtctgtagaggatgattattgtatttcgccgtcaacagctgctcagtttatttattcacggcgtgacaaaccttccgttgagcctgtggaagaatatgattatgaagatctgaaagaatcttccaattctgtttcaaaccatcagctcagtggatttgatcaagctcgtctttattcatgccttgatcacatgagagaggtacttggagatgctgtgccagatgaaatattaattgaagcagttctgaagaacaagtttgatgtgcagaaggctttgtcaggggttctggaacaagatagagtgcagagtttgaaggacaagaatgaggcaacagtatctacaggaaagatagcaaaaggcccttgctgctagaccttcagcttttgcctcaacactgtgtcttcgttacccactgaaaagctgcaagcgacgcacccttgacctctataagactttt

SEQ ID NO: 139651 - DNA, 2793 bp, Homo sapiens
  Payload ID: 7386
  Gene Symbol: HBS1L
  Gene Name: HBS1-like translational GTPase
  Uniprot ID: Q9Y450
  ENST ID: ENST00000367822
  CDS Start-End: 194-2092
tgaccctgaggcattgccgtcgcgcggtgcacagctaagacgtcgcgcttgcgcaggcgctcggcgcagaggcctgcgggaagccaagatggcgcataggggttctccaggctgcagttggcgccttatcagtatctaagcggagtgttttggaaggagttaaggggctgtggcaaacgccctctccgccgtcatggcccggcatcggaatgttcgaggctataactacgatgaagattttgaagatgatgatctctacggccagtctgtagaggatgattattgtatttcgccgtcaacagctgctcagtttatttattcacggcgtgacaaaccttccgttgagcctgtggaagaatatgattatgaagatctgaaagaatcttccaattctgtttcaaaccatcagctcagtggatttgatcaagctcgtctttattcatgccttgatcacatgagagaggtacttggagatgctgtgccagatgaaatattaattgaagcagttctgaagaacaagtttgatgtgcagaaggctttgtcaggggttctggaacaagatagagtgcagagtttgaaggacaagaatgaggcaacagtatctacaggaaagatagcaaaaggagtcttattttcttcttctgaagtttcagctgataatgttcaaagttcttatcctcagtcagcaaatcatttggattatagtagcaaaccctttgattttgctagctcagtaggaaaatacggattatctcataattcttcagttccaactcactgtttactccatagaaaaaagaaacttgacacacgtaaaagtgaaaagaaactagaatcatgtaagttaacaaaagaactttcactagctaacctaattcatgatatgtcaagagattcctgtgaaagtcagccatcagtcagattatcatctacagacagtctggaaagtctgctttcaaagaacctagatgccgatttgttgagacctcatgcatctgaatgcatttccaaagatgattctgcattcaaagaaataccagatttaaagaccataatcataaagggcacaacaccgaataattctttatatattcaaaataattcactgtctgattttcaaaacattccagtacaggacagtttaggaagttcaaataatcctttgtacttaactagctcgttggaaaatatgactgttgataatttaaatgctagtaaagaaactgaagttggaaatgtttctttagttgaacaaagtgccaagaatcacacttttaaaaatgataatttgcagttttctcagtgtgaaagtccatccctaactgaactgtttcaggaacacaaagaaaacaatataagccagtgctttactttatctgacctttgtaaccagtcatctgccagtttcacagatctaagtttgggatcctttcccctgtcacaattagcaaatcgctgtcagtcttcacccggaatatcagaattaacaggatctctgtcgtcattggcatttcataaagcttctcccacaagagaccttgagaatttgtcactttctgaattgattgcagaaacaattgatgtagacaactctcagattaagaaagagtcctttgaggtcagtttatctgaagtgaggtctcctggaatagattcaaatattgatcttagtgtccttataaaaaacccagattttgttccaaagcctgtagtagacccatccattgctccatcatcacgaactaaagttctaagttcaaagctagggaagaattccaattttgctaaggataataagaaaaacaacaaaggctctctgactaggaaaccacctttttctctctcttggaccaaggcccttgctgctagaccttcagcttttgcctcaacactgtgtcttcgttacccactgaaaagctgcaagcgacgcacccttgacctctataagacttttctttatagtagacaagttcaagatgtaaaggacaaagaaataagtccacttgtagcaataacaccatttgacttcaaatcagcatcacctgatgacattgtaaaagctaatcaaaaaaaagcatttactagagaatagtaacaaaaggaaaacttgattgctgttgtagagctttttatttttaattaaagtcttcagaggatcactttatattatgggattcaaattctgatttttatgaaaattgtcgtaggtcagttgattagttgatacgtatttttgcactgattttttttttaactatgtcttctttcagtgataactggctttatttaagttggtaacctatactgagtatatgtttacaaagtggatatggaaacttgatgttgtgaaatcagacctcatatatttttgtttgaagcattcaactttctatgttttttataatgaaatatttttttctatgaaatatttttgtgctttgttcttaaacgaaaatgccagcacttgggattattatagtttagtgtgaagattattcttatgtggcacagcataactgagatgttatattttaaaatatgatataattcctagtttcattatttttctgtaaatactaaaatttttctattagaaaatcttaaaattcctgacttttgagagtactgtggagattgttgaaatacatttttgataataataaaatgaaaatcttttaagggaccatgtaaatatagaagttggattaatatgtgaattatttttatacatttttaaaaaccatttgtcctaagtatacactttaaaataaatatataaaaagtgttttcaag

SEQ ID NO: 139652 - DNA, 2703 bp, Homo sapiens
  Payload ID: 7386
  Gene Symbol: HBS1L
  Gene Name: HBS1-like translational GTPase
  Uniprot ID: Q9Y450
  ENST ID: ENST00000367826
  CDS Start-End: 129-2057
gcagaggcctgcgggaagccaagatggcgcataggggttctccaggctgcagttggcgccttatcagtatctaagcggagtgttttggaaggagttaaggggctgtggcaaacgccctctccgccgtcatggcccggcatcggaatgttcgaggctataactacgatgaagattttgaagatgatgatctctacggccagtctgtagaggatgattattgtatttcgccgtcaacagctcgtctttattcatgccttgatcacatgagagaggtacttggagatgctgtgccagatgaaatattaattgaagcagttctgaagaacaagtttgatgtgcagaaggctttgtcaggggttctggaacaagatagagtgcagagtttgaaggacaagaatgaggcaacagtatctacaggaaagatagcaaaaggaaaaccagtagattcccagacatcgcgaagtgaatctgaaattgtgccaaaagttgctaaaatgactgtatctggaaagaagcaaactatgggatttgaagtgcctggagtatcttctgaagaaaatggtcatagtttccacacacctcaaaaaggaccgcccattgaagatgccattgcttcttccgatgttcttgagactgcttctaaatctgctaatccaccccacacgattcaagcatcagaagagcagagttcaaccccagcaccggtgaaaaagtctggcaagctgaggcagcaaatagatgtgaaggcggaactggagaagcggcaaggagggaagcagctactcaacttagtggtcattggtcatgttgatgctgggaaaagtactctgatgggccatatgctttatcttctgggtaatataaacaaaagaactatgcataagtatgaacaggagtctaaaaaggctggcaaagcttcgtttgcatatgcatgggtcttggatgaaactggcgaagaaagggaaaggggagtaaccatggatgttggtatgacaaagtttgaaaccacaaccaaagttattacattaatggatgctccaggccataaggacttcattccaaatatgattacaggagcagcccaggcggatgtagctgttttagttgtagatgccagcaggggagagtttgaagctggatttgagactggaggacaaacacgagagcatggactcttggtccgttctctgggagtgacgcagcttgcagttgcagttaataaaatggatcaggttaattggcaacaagaaaggtttcaagagattactggaaaacttgggcactttcttaagcaagcaggttttaaggagagtgatgtaggttttattcctacaagtggtctcagtggtgaaaatctaatcacaagatctcagtcaagtgaactcacaaaatggtataaaggactatgtttattagaacaaattgattcctttaagcctccccagcgatctattgacaaaccttttagattatgtgtgtccgatgttttcaaagatcaaggatctggattttgcataactggtaaaatagaagctggttatatccaaactggtgaccgactactggcaatgcctcctaatgaaacttgtaccgtgaaaggaatcactctgcatgatgaacctgtcgactgggcggcagcaggcgatcatgttagtcttactttggttgggatggatatcatcaaaatcaatgttggctgcatattttgtggccccaaagtacccattaaagcttgcactcgtttcagagcccgaatcctcatctttaatattgaaattcctatcactaaaggatttcctgtgctgttacactaccaaactgtcagtgaacccgccgttattaaacgattgattagtgtcttaaacaaaagcacgggtgaagtcacaaagaaaaagcctaagtttttgactaaaggccagaatgcattggtagagctacagacacaaagaccaatagctcttgagctatataaagactttaaagagctggggaggttcatgctacgttacggtggttctacaatagctgctggtgttgtcactgagataaaagaatgatgggtcagaatttctaccacgtttctggatacagtgaaatagctaacctctgtttcaagaatgcagttattaagtcaaaggaacaatgtgcaattgatatgtttttagatgagagagaaaaattaaagctaaaattagctgcaaagaagtattaataatcacctctgcaaaaattctaagttgccaactggcaaagaaagtctaatgttaaaaacaactttgcctttgaaacgttaataaatggatttactttgctaagatttatggcaagtgtcaaaaatagtatctgaagatactgaatcatcatgaaatgaactctacttctggccaaagcacaatgtatttgcagttttctcttttgattcaattatactgcacatgttttaaggaaaagtaacttaattgggtttttcaggcagttgatatttgacctaagctttttttttttttttttttccagttaatgctaagaaaagatttggggaaggttataataaaagtattttgtggtgaccataagaatgtccctccccaaacaagtaaacttgtgaaagtttaatttggaattagtggaagctgttcctttgaaagccaagatattatttaagttgtaaagccagctaataaaatgccttagtttgagcat

SEQ ID NO: 139653 - DNA, 7163 bp, Homo sapiens
  Payload ID: 7386
  Gene Symbol: HBS1L
  Gene Name: HBS1-like translational GTPase
  Uniprot ID: Q9Y450
  ENST ID: ENST00000367837
  CDS Start-End: 208-2262
agggaggcggacagtgaccctgaggcattgccgtcgcgcggtgcacagctaagacgtcgcgcttgcgcaggcgctcggcgcagaggcctgcgggaagccaagatggcgcataggggttctccaggctgcagttggcgccttatcagtatctaagcggagtgttttggaaggagttaaggggctgtggcaaacgccctctccgccgtcatggcccggcatcggaatgttcgaggctataactacgatgaagattttgaagatgatgatctctacggccagtctgtagaggatgattattgtatttcgccgtcaacagctgctcagtttatttattcacggcgtgacaaaccttccgttgagcctgtggaagaatatgattatgaagatctgaaagaatcttccaattctgtttcaaaccatcagctcagtggatttgatcaagctcgtctttattcatgccttgatcacatgagagaggtacttggagatgctgtgccagatgaaatattaattgaagcagttctgaagaacaagtttgatgtgcagaaggctttgtcaggggttctggaacaagatagagtgcagagtttgaaggacaagaatgaggcaacagtatctacaggaaagatagcaaaaggaaaaccagtagattcccagacatcgcgaagtgaatctgaaattgtgccaaaagttgctaaaatgactgtatctggaaagaagcaaactatgggatttgaagtgcctggagtatcttctgaagaaaatggtcatagtttccacacacctcaaaaaggaccgcccattgaagatgccattgcttcttccgatgttcttgagactgcttctaaatctgctaatccaccccacacgattcaagcatcagaagagcagagttcaaccccagcaccggtgaaaaagtctggcaagctgaggcagcaaatagatgtgaaggcggaactggagaagcggcaaggagggaagcagctactcaacttagtggtcattggtcatgttgatgctgggaaaagtactctgatgggccatatgctttatcttctgggtaatataaacaaaagaactatgcataagtatgaacaggagtctaaaaaggctggcaaagcttcgtttgcatatgcatgggtcttggatgaaactggcgaagaaagggaaaggggagtaaccatggatgttggtatgacaaagtttgaaaccacaaccaaagttattacattaatggatgctccaggccataaggacttcattccaaatatgattacaggagcagcccaggcggatgtagctgttttagttgtagatgccagcaggggagagtttgaagctggatttgagactggaggacaaacacgagagcatggactcttggtccgttctctgggagtgacgcagcttgcagttgcagttaataaaatggatcaggttaattggcaacaagaaaggtttcaagagattactggaaaacttgggcactttcttaagcaagcaggttttaaggagagtgatgtaggttttattcctacaagtggtctcagtggtgaaaatctaatcacaagatctcagtcaagtgaactcacaaaatggtataaaggactatgtttattagaacaaattgattcctttaagcctccccagcgatctattgacaaaccttttagattatgtgtgtccgatgttttcaaagatcaaggatctggattttgcataactggtaaaatagaagctggttatatccaaactggtgaccgactactggcaatgcctcctaatgaaacttgtaccgtgaaaggaatcactctgcatgatgaacctgtcgactgggcggcagcaggcgatcatgttagtcttactttggttgggatggatatcatcaaaatcaatgttggctgcatattttgtggccccaaagtacccattaaagcttgcactcgtttcagagcccgaatcctcatctttaatattgaaattcctatcactaaaggatttcctgtgctgttacactaccaaactgtcagtgaacccgccgttattaaacgattgattagtgtcttaaacaaaagcacgggtgaagtcacaaagaaaaagcctaagtttttgactaaaggccagaatgcattggtagagctacagacacaaagaccaatagctcttgagctatataaagactttaaagagctggggaggttcatgctacgttacggtggttctacaatagctgctggtgttgtcactgagataaaagaatgatgggtcagaatttctaccacgtttctggatacagtgaaatagctaacctctgtttcaagaatgcagttattaagtcaaaggaacaatgtgcaattgatatgtttttagatgagagagaaaaattaaagctaaaattagctgcaaagaagtattaataatcacctctgcaaaaattctaagttgccaactggcaaagaaagtctaatgttaaaaacaactttgcctttgaaacgttaataaatggatttactttgctaagatttatggcaagtgtcaaaaatagtatctgaagatactgaatcatcatgaaatgaactctacttctggccaaagcacaatgtatttgcagttttctcttttgattcaattatactgcacatgttttaaggaaaagtaacttaattgggtttttcaggcagttgatatttgacctaagctttttttttttttttttttccagttaatgctaagaaaagatttggggaaggttataataaaagtattttgtggtgaccataagaatgtccctccccaaacaagtaaacttgtgaaagtttaatttggaattagtggaagctgttcctttgaaagccaagatattatttaagttgtaaagccagctaataaaatgccttagtttgagcataatacaaactgtgttttgttctttagacatttatgagattctctgccactaacagtaaatatgatttaggggttttgtgggatctttttcacctaagagtttcctagctctgtcacatgaattcttttttatcctaatggcagatccaatttcatctcattcatttttttaaccataacttgcttttcccattctcacttttagaattatacctatgatggccctttctttatcttgcttaccttatagattataagtcccctgtgagtaagtaagagtcatgtttttctttaaagtttcaacaacaaaccccaaggtttatttatttaacaacaggtattcgttgaggtgccttctgggtgcaaggagctttagagtagattttgacctcagctgaacctggaactctgatctgatagactgtttatgataagcttttttttttattagcagcgtgatttgtatatcgatggcttaacatatacaacagcatttcttctccctgcaccttttcgtgaacctgacattttgaacataagcaataacatctgtatggtaaagtaggcagattatacatgtgttgcttagtgaatgattaccaagtgaacacacttggtatattgctttaccaaaatacatgtgtagttgtcacttcagattcactgagttaagaaagttttatttaaatattaatattaatcaagaatttaacagatatatgtgacagaaatctaacttcaagtgactgaagcagaaagaaaaatttttgaatgacataactgagaaaattagaggtagctctagctttgattccatttagatcgagcagctcacacaatgttagcaaggactcatctccactctgccttccctggtgctggttttgctctcaaactctatatagaactctcggccgggcgcggtggctcacacctgtaatcaaaacactttgggaggctgagtcgggaggatagcgtgagcccaggagtttgagaccagctaaggcaatatagtgagaccatgtctctacagaaaaaatttaaaaacagatcagctgggtgtggtgccacatgcctgtagtcccagcttctcaggaggctggggtgggaagatcacttgagcccaggaggtcgaggctgcagtgagccatgatcacatcactgcagtccagcctgggtgacagagcaagacctgtcaccctgccacccataaaaaacctcttctgtaatgccaggttcttgacaagatgtgataattccacacttacatcctcagatctcccatccagggcaaggacagactaaaagagcatatcttctccagaagtcctagaaacatctcatcattgactatgattgaattttatttattaatacttccctaggatatcctgtgtttgagtgtgaagttaatatcacacaaagcatgtagctaacagttgtgtgagggttggaaattcagggtgctgttaggaaggggaaatggattggggtttaaggtagggggagtaaaaacaagaaaccatccactctgtatattatataagactgtgatcgaattaagaattttagtttacagtttagcataaacaaatagtagtagaaatgaatgcatttattcattccttccttctccaatagtgtttaagtacaatctttttatttgcattttattgatgattgattgtggttgaaaggagtggtgatattatttcgaggatccactgtgtaagaagactgttggcagtggaaggctcgagttgattaagtgacaaagaggtaaagcagacatgcccaagcttggttatgctctgatttcctaccctgttactttcatccataatttatagtacatccattttgtgtcattttgcttcaggtatttcttgtcctgactgtcttcttttttatgattttactgtttcttcacactaatggctttgtcctctgactttgactctttgtgagattcttctgagcagttaacctctaggataatgtggcttgaacacattacagaactatgttttgacttgttagtattattcacacattcatgacaattgagcctctctactgtgagaaatgttttagaggccagtttctaggcatagctgtttttctcccatgagtatgcaaatcaatagttttaaccattgttaaaatgcaatcatagtgacttcagaaaatttggaaaatacagaaaatatagggaagaataaaattaacccacagttctgtcacctaaaggtaactgctgccaatgttttcatgtatttcttttctgtctctccaatgcatttttttacatagttgtgagcgttagccaagttattttcatgttgttatgtaatcaatatttttcaatagaagtattagaggttttttttattgatataaaaataacaattacagatcctgatatatagaagttattcaaaattatacagttttcaaaaaatcaagacaagtaggcccaatacaaactactgaatcatcttctaatttccctctaaaatatttatagaaatatgtaagtagaaaaacattcatcctttcctcgtctaattatgatcctgccatattccaggcacaagagaaagctctggggcttgagtcttaatagggctgatagtccaaccaggggacagggtatcataaagagataattcaaaactttaagattggagggtaggtgatggtagaaaattctgcggcaaacatttgttgatgctcatcatttgttgatgtcatcaaagatcaccagggcataattataatcaaaattagttttattgatgcttgctgcagcaagagagactgcacaccactggggtctatgggtgcttctcagtgggaaggtgtaaggaggggcttgctaagaatttgagcacatgtagctaattttaaggagggctcaagtgagcaagggtttcttctggattgagtgctgtcagaaagtggattgagtgctgtcagaaagtgggagtgattttgcaactgggtatcttaatttttatgttgtgggtgggaggaaaggaaagaagcaacagtcacccatgttagccacaagaagaggttggctgtttatggtttgcacagtgactttgtttttatctgtgctcaggcatgattacagtatctcattttatccggattacagtgacctcatctgatgttagagatttgagaattgttaaatgttcagcaggagaacgccaccgcctagtgtgaatgctaggtcagaagctgctttttcacactgaaaccatttaagtatgtacaaataagttaatagtgtaaatgtaggtgtaaaatacaatgcaaaacaaaataatgaagtaagtgaattaaattattgcaccaaatatggggatatgaaatagggaaagaaaagcattaagttacttatagtccataaagggactacattattttgttactctgataatcccataaaacaaagttttaagaatgtttacagtaaccatgaatggaattagtgaaactattcatatcaatgcaaaaaaaaaaaaaaaaaaagcaaagaaactaagtctgtacagcaaaagatggaaaggaaacaagaaaattaaatgaagacaaaggttgtgattattacagtaaatgaaaataggtttttatctttaaaatgtagactcaaactgcaaagctaatgatatgctatctgcaaaatattcctattttgtaaataaataaaaccatagatttaaagaagaaagggcacagatgtactggggagacaaaaataactgatccgttgggtgtataccatgtgccaagcaattttcatatactcatttaacatgacatatctataattatatgaggcagatattattaacctcagtctatagatgagaagactaaagctcagagggattgctaaaaactagtaaataaattatggaaccatgatttgaatttagatttaagtctgactgaggcatgttcagagacactacactgcctctccagaaatcaggagtagcaatattaacactggacaaagaatttaaagcaagtaaaaaaaaattaagagaatttcatattaataacaagtataatgcacaataaaactgtaccaaatgacataaaaatgcataatgaaatttattagaaattaaaaattaaagggcatagttacaattattgaggaattctcatagctctgccttatagatcatgtaaacaaacaaggtcatagaggacttaaatagcaaagcagaaaaaaa

SEQ ID NO: 139654 - DNA, 2636 bp, Homo sapiens
  Payload ID: 7386
  Gene Symbol: HBS1L
  Gene Name: HBS1-like translational GTPase
  ENST ID: ENST00000415177
  CDS Start-End: 129-1988
gcagaggcctgcgggaagccaagatggcgcataggggttctccaggctgcagttggcgccttatcagtatctaagcggagtgttttggaaggagttaaggggctgtggcaaacgccctctccgccgtcatggcccggcatcggaatgttcgaggctataactacgatgaagattttgaagatgatgatctctacggccagtctgtagaggatgattattgtatttcgccgtcaacagctgctcagtttatttattcacggcgtgacaaaccttccgttgagcctgtggaagaatatgattatgaagatctgaaagaatcttccaattctgtttcaaaccatcagctcagtggatttgatcaaggaaaaccagtagattcccagacatcgcgaagtgaatctgaaattgtgccaaaagttgctaaaatgactgtatctggaaagaagcaaactatgggatttgaagtgcctggagtatcttctgaagaaaatggtcatagtttccacacacctcaaaaaggaccgcccattgaagatgccattgcttcttccgatgttcttgagactgcttctaaatctgctaatccaccccacacgattcaagcatcagaagagcagagttcaaccccagcaccggtgaaaaagtctggcaagctgaggcagcaaatagatgtgaaggcggaactggagaagcggcaaggagggaagcagctactcaacttagtggtcattggtcatgttgatgctgggaaaagtactctgatgggccatatgctttatcttctgggtaatataaacaaaagaactatgcataagtatgaacaggagtctaaaaaggctggcaaagcttcgtttgcatatgcatgggtcttggatgaaactggcgaagaaagggaaaggggagtaaccatggatgttggtatgacaaagtttgaaaccacaaccaaagttattacattaatggatgctccaggccataaggacttcattccaaatatgattacaggagcagcccaggcggatgtagctgttttagttgtagatgccagcaggggagagtttgaagctggatttgagactggaggacaaacacgagagcatggactcttggtccgttctctgggagtgacgcagcttgcagttgcagttaataaaatggatcaggttaattggcaacaagaaaggtttcaagagattactggaaaacttgggcactttcttaagcaagcaggttttaaggagagtgatgtaggttttattcctacaagtggtctcagtggtgaaaatctaatcacaagatctcagtcaagtgaactcacaaaatggtataaaggactatgtttattagaacaaattgattcctttaagcctccccagcgatctattgacaaaccttttagattatgtgtgtccgatgttttcaaagatcaaggatctggattttgcataactggtaaaatagaagctggttatatccaaactggtgaccgactactggcaatgcctcctaatgaaacttgtaccgtgaaaggaatcactctgcatgatgaacctgtcgactgggcggcagcaggcgatcatgttagtcttactttggttgggatggatatcatcaaaatcaatgttggctgcatattttgtggccccaaagtacccattaaagcttgcactcgtttcagagcccgaatcctcatctttaatattgaaattcctatcactaaaggatttcctgtgctgttacactaccaaactgtcagtgaacccgccgttattaaacgattgattagtgtcttaaacaaaagcacgggtgaagtcacaaagaaaaagcctaagtttttgactaaaggccagaatgcattggtagagctacagacacaaagaccaatagctcttgagctatataaagactttaaagagctggggaggttcatgctacgttacggtggttctacaatagctgctggtgttgtcactgagataaaagaatgatgggtcagaatttctaccacgtttctggatacagtgaaatagctaacctctgtttcaagaatgcagttattaagtcaaaggaacaatgtgcaattgatatgtttttagatgagagagaaaaattaaagctaaaattagctgcaaagaagtattaataatcacctctgcaaaaattctaagttgccaactggcaaagaaagtctaatgttaaaaacaactttgcctttgaaacgttaataaatggatttactttgctaagatttatggcaagtgtcaaaaatagtatctgaagatactgaatcatcatgaaatgaactctacttctggccaaagcacaatgtatttgcagttttctcttttgattcaattatactgcacatgttttaaggaaaagtaacttaattgggtttttcaggcagttgatatttgacctaagctttttttttttttttttttccagttaatgctaagaaaagatttggggaaggttataataaaagtattttgtggtgaccataagaatgtccctccccaaacaagtaaacttgtgaaagtttaatttggaattagtggaagctgttcctttgaaagccaagatattatttaagttgtaaagccagctaataaaatgccttagtttgagcataa

SEQ ID NO: 139655 - DNA, 629 bp, Homo sapiens
  Payload ID: 7386
  Gene Symbol: HBS1L
  Gene Name: HBS1-like translational GTPase
  ENST ID: ENST00000527507
  CDS Start-End: 202-629
ttttttttgagatagagtctctgtcacccaggctggagtgcagtggcgcaatctcggctcactgcaacctccgcctcctgggttcaagctgttctccggcctcagtctcccgaatatctgggattacaggctgagtgtggaaaaccagtagattcccagacatcgcgaagtgaatctgaaattgtgccaaaagttgctaaaatgactgtatctggaaagaagcaaactatgggatttgaagtgcctggagtatcttctgaagaaaatggtcatagtttccacacacctcaaaaaggaccgcccattgaagatgccattgcttcttccgatgttcttgagactgcttctaaatctgctaatccaccccacacgattcaagcatcagaagagcagagttcaaccccagcaccggtgaaaaagtctggcaagctgaggcagcaaatagatgtgaaggcggaactggagaagcggcaaggagggaagcagctactcaacttagtggtcattggtcatgttgatgctgggaaaagtactctgatgggccatatgctttatcttctgggtaatataaacaaaagaactatgcataagtatgaacaggagtctaaaaaggctggcaaagcttcgtt

SEQ ID NO: 139656 - DNA, 544 bp, Homo sapiens
  Payload ID: 7386
  Gene Symbol: HBS1L
  Gene Name: HBS1-like translational GTPase
  ENST ID: ENST00000529882
  CDS Start-End: 42-544
agcagtctacagcaggcttcaggaagtgatgagggggggccatggaaagaccagccccttggacgctctgggtcactacgtcatggtggtacatctgggcacttaggtcctcagtgacctttctcccagattttgaagatgatgatctctacggccagtctgtagaggatgattattgtatttcgccgtcaacagctgctcagtttatttattcacggcgtgacaaaccttccgttgagcctgtggaagaatatgattatgaagatctgaaagaatcttccaattctgtttcaaaccatcagctcagtggatttgatcaagctcgtctttattcatgccttgatcacatgagagaggtacttggagatgctgtgccagatgaaatattaattgaagcagttctgaagaacaagtttgatgtgcagaaggctttgtcaggggttctggaacaagatagagtgcagagtttgaaggacaagaatgaggcaacagtatctacaggaaagatagcaaaaggaaaaccagtagattcccagacatcgcg

SEQ ID NO: 139657 - DNA, 1600 bp, Homo sapiens
  Payload ID: 7386
  Gene Symbol: HBS1L
  Gene Name: HBS1-like translational GTPase
  ENST ID: ENST00000526100
  CDS Start-End: 1-224
ttgaagatgatgatctctacggccagtctgtagaggatgattattgtatttcgccgtcaacagctgctcagtttatttattcacggcgtgacaaaccttccgttgagcctgtggaagaatatgattatgaagatctgaaagaatcttccaattctgtttcaaaccatcagctcagtggatttgatcaagcagctactcaacttagtggtcattggtcatgttgatgctgggaaaagtactctgatgggccatatgctttatcttctgggtaatataaacaaaagaactatgcataagtatgaacaggagtctaaaaaggctggcaaagcttcgtttgcatatgcatgggtcttggatgaaactggcgaagaaagggaaaggggagtaaccatggatgttggtatgacaaagtttgaaaccacaaccaaagttattacattaatggatgctccaggccataaggacttcattccaaatatgattacaggagcagcccaggcggatgtagctgttttagttgtagatgccagcaggggagagtttgaagctggatttgagactggaggacaaacacgagagcatggactcttggtccgttctctgggagtgacgcagcttgcagttgcagttaataaaatggatcaggttaattggcaacaagaaaggtttcaagagattactggaaaacttgggcactttcttaagcaagcaggttttaaggagagtgatgtaggttttattcctacaagtggtctcagtggtgaaaatctaatcacaagatctcagtcaagtgaactcacaaaatggtataaaggactatgtttattagaacaaattgattcctttaagcctccccagcgatctattgacaaaccttttagattatgtgtgtccgatgttttcaaagatcaaggatctggattttgcataactggtaaaatagaagctggttatatccaaactggtgaccgactactggcaatgcctcctaatgaaacttgtaccgtgaaaggaatcactctgcatgatgaacctgtcgactgggcggcagcaggcgatcatgttagtcttactttggttgggatggatatcatcaaaatcaatgttggctgcatattttgtggccccaaagtacccattaaagcttgcactcgtttcagagcccgaatcctcatctttaatattgaaattcctatcactaaaggatttcctgtgctgttacactaccaaactgtcagtgaacccgccgttattaaacgattgattagtgtcttaaacaaaagcacgggtgaagtcacaaagaaaaagcctaagtttttgactaaaggccagaatgcattggtagagctacagacacaaagaccaatagctcttgagctatataaagactttaaagagctggggaggttcatgctacgttacggtggttctacaatagctgctggtgttgtcactgagataaaagaatgatgggtcagaatttctaccacgtttctggatacagtgaaatagctaacctctgtttcaagaatgcagttattaagtcaaaggaacaatgtgcaattgatatgtttttagatgagagagaaaaattaaagct

SEQ ID NO: 139658 - DNA, 2102 bp, Homo sapiens
  Payload ID: 7386
  Gene Symbol: HBS1L
  Gene Name: HBS1-like translational GTPase
  ENST ID: ENST00000533274
  CDS Start-End: 1-1665
cagtctgtagaggatgattattgtatttcgccgtcaacaggaaaaccagtagattcccagacatcgcgaagtgaatctgaaattgtgccaaaagttgctaaaatgactgtatctggaaagaagcaaactatgggatttgaagtgcctggagtatcttctgaagaaaatggtcatagtttccacacacctcaaaaaggaccgcccattgaagatgccattgcttcttccgatgttcttgagactgcttctaaatctgctaatccaccccacacgattcaagcatcagaagagcagagttcaaccccagcaccggtgaaaaagtctggcaagctgaggcagcaaatagatgtgaaggcggaactggagaagcggcaaggagggaagcagctactcaacttagtggtcattggtcatgttgatgctgggaaaagtactctgatgggccatatgctttatcttctgggtaatataaacaaaagaactatgcataagtatgaacaggagtctaaaaaggctggcaaagcttcgtttgcatatgcatgggtcttggatgaaactggcgaagaaagggaaaggggagtaaccatggatgttggtatgacaaagtttgaaaccacaaccaaagttattacattaatggatgctccaggccataaggacttcattccaaatatgattacaggagcagcccaggcggatgtagctgttttagttgtagatgccagcaggggagagtttgaagctggatttgagactggaggacaaacacgagagcatggactcttggtccgttctctgggagtgacgcagcttgcagttgcagttaataaaatggatcaggttaattggcaacaagaaaggtttcaagagattactggaaaacttgggcactttcttaagcaagcaggttttaaggagagtgatgtaggttttattcctacaagtggtctcagtggtgaaaatctaatcacaagatctcagtcaagtgaactcacaaaatggtataaaggactatgtttattagaacaaattgattcctttaagcctccccagcgatctattgacaaaccttttagattatgtgtgtccgatgttttcaaagatcaaggatctggattttgcataactggtaaaatagaagctggttatatccaaactggtgaccgactactggcaatgcctcctaatgaaacttgtaccgtgaaaggaatcactctgcatgatgaacctgtcgactgggcggcagcaggcgatcatgttagtcttactttggttgggatggatatcatcaaaatcaatgttggctgcatattttgtggccccaaagtacccattaaagcttgcactcgtttcagagcccgaatcctcatctttaatattgaaattcctatcactaaaggatttcctgtgctgttacactaccaaactgtcagtgaacccgccgttattaaacgattgattagtgtcttaaacaaaagcacgggtgaagtcacaaagaaaaagcctaagtttttgactaaaggccagaatgcattggtagagctacagacacaaagaccaatagctcttgagctatataaagactttaaagagctggggaggttcatgctacgttacggtggttctacaatagctgctggtgttgtcactgagataaaagaatgatgggtcagaatttctaccacgtttctggatacagtgaaatagctaacctctgtttcaagaatgcagttattaagtcaaaggaacaatgtgcaattgatatgtttttagatgagagagaaaaattaaagctaaaattagctgcaaagaagtattaataatcacctctgcaaaaattctaagttgccaactggcaaagaaagtctaatgttaaaaacaactttgcctttgaaacgttaataaatggatttactttgctaagatttatggcaagtgtcaaaaatagtatctgaagatactgaatcatcatgaaatgaactctacttctggccaaagcacaatgtatttgcagttttctcttttgattcaattatactgcacatgttttaaggaaaagtaacttaattgggtttttcaggcagttgatatttgacctaagc

SEQ ID NO: 139659 - DNA, 551 bp, Homo sapiens
  Payload ID: 7386
  Gene Symbol: HBS1L
  Gene Name: HBS1-like translational GTPase
  ENST ID: ENST00000524715
  CDS Start-End: 127-551
agaggcctgcgggaagccaagatggcgcataggggttctccaggctgcagttggcgccttatcagtatctaagcggagtgttttggaaggagttaaggggctgtggcaaacgccctctccgccgtcatggcccggcatcggaatgttcgaggctataactacgatgaagctgctcagtttatttattcacggcgtgacaaaccttccgttgagcctgtggaagaatatgattatgaagatctgaaagaatcttccaattctgtttcaaaccatcagctcagtggatttgatcaagctcgtctttattcatgccttgatcacatgagagaggtacttggagatgctgtgccagatgaaatattaattgaagcagttctgaagaacaagtttgatgtgcagaaggctttgtcaggggttctggaacaagatagagtgcagagtttgaaggacaagaatgaggcaacagtatctacaggaaagatagcaaaaggaaaaccagtagattcccagacatcgcgaagtgaatctgaaattgtgccaaaagttgctaa

SEQ ID NO: 139660 - DNA, 582 bp, Homo sapiens
  Payload ID: 7386
  Gene Symbol: HBS1L
  Gene Name: HBS1-like translational GTPase
  ENST ID: ENST00000525067
  CDS Start-End: 162-518
agctaagacgtcgcgcttgcgcaggcgctcggcgcagaggcctgcgggaagccaagatggcgcataggggttctccaggctgcagttggcgccttatcagtatctaagcggagtgttttggaaggagttaaggggctgtggcaaacgccctctccgccgtcatggcccggcatcggaatgttcgaggctataactacgatgaagctcgtctttattcatgccttgatcacatgagagaggtacttggagatgctgtgccagatgaaatattaattgaagcagttctgaagaacaagtttgatgtgcagaaggctttgtcaggggttctggaacaagatagagtgcagagtttgaaggacaagaatgaggcaacagtatctacaggaaagatagcaaaaggtaaggagtcttattttcttcttctgaagtttcagctgataatgttcaaagttcttatcctcagtcagcaaatcatttggattatagtagcaaaccctttgattttgctagctcagtaggaaaatacggattatctcataattcttcagttccaactcactgtttactccatagaaaaaagaa

SEQ ID NO: 139661 - DNA, 2618 bp, Homo sapiens
  Payload ID: 7386
  Gene Symbol: HBS1L
  Gene Name: HBS1-like translational GTPase
  ENST ID: ENST00000527578
  CDS Start-End: 406-1968
tttttttttgagatagagtctctgtcacccaggctggagtgcagtggcgcaatctcggctcactgcaacctccgcctcctgggttcaagctgttctccggcctcagtctcccgaatatctgggattacaggtgcctgcaatcacatctggctaatttttttatttttagtagagatgggatcttgccactttacctatgctggtctcgaactcctgggctcaagtggtctacccgtctcggcctcccaaagtgctaggattacaggcctgagccaccccacccggcctgttcattattcttataatctgtttttttttttggattggcaataggctgagtgtggaaaaccagtagattcccagacatcgcgaagtgaatctgaaattgtgccaaaagttgctaaaatgactgtatctggaaagaagcaaactatgggatttgaagtgcctggagtatcttctgaagaaaatggtcatagtttccacacacctcaaaaaggaccgcccattgaagatgccattgcttcttccgatgttcttgagactgcttctaaatctgctaatccaccccacacgattcaagcatcagaagagcagagttcaaccccagcaccggtgaaaaagtctggcaagctgaggcagcaaatagatgtgaaggcggaactggagaagcggcaaggagggaagcagctactcaacttagtggtcattggtcatgttgatgctgggaaaagtactctgatgggccatatgctttatcttctgggtaatataaacaaaagaactatgcataagtatgaacaggagtctaaaaaggctggcaaagcttcgtttgcatatgcatgggtcttggatgaaactggcgaagaaagggaaaggggagtaaccatggatgttggtatgacaaagtttgaaaccacaaccaaagttattacattaatggatgctccaggccataaggacttcattccaaatatgattacaggagcagcccaggcggatgtagctgttttagttgtagatgccagcaggggagagtttgaagctggatttgagactggaggacaaacacgagagcatggactcttggtccgttctctgggagtgacgcagcttgcagttgcagttaataaaatggatcaggttaattggcaacaagaaaggtttcaagagattactggaaaacttgggcactttcttaagcaagcaggttttaaggagagtgatgtaggttttattcctacaagtggtctcagtggtgaaaatctaatcacaagatctcagtcaagtgaactcacaaaatggtataaaggactatgtttattagaacaaattgattcctttaagcctccccagcgatctattgacaaaccttttagattatgtgtgtccgatgttttcaaagatcaaggatctggattttgcataactggtaaaatagaagctggttatatccaaactggtgaccgactactggcaatgcctcctaatgaaacttgtaccgtgaaaggaatcactctgcatgatgaacctgtcgactgggcggcagcaggcgatcatgttagtcttactttggttgggatggatatcatcaaaatcaatgttggctgcatattttgtggccccaaagtacccattaaagcttgcactcgtttcagagcccgaatcctcatctttaatattgaaattcctatcactaaaggatttcctgtgctgttacactaccaaactgtcagtgaacccgccgttattaaacgattgattagtgtcttaaacaaaagcacgggtgaagtcacaaagaaaaagcctaagtttttgactaaaggccagaatgcattggtagagctacagacacaaagaccaatagctcttgagctatataaagactttaaagagctggggaggttcatgctacgttacggtggttctacaatagctgctggtgttgtcactgagataaaagaatgatgggtcagaatttctaccacgtttctggatacagtgaaatagctaacctctgtttcaagaatgcagttattaagtcaaaggaacaatgtgcaattgatatgtttttagatgagagagaaaaattaaagctaaaattagctgcaaagaagtattaataatcacctctgcaaaaattctaagttgccaactggcaaagaaagtctaatgttaaaaacaactttgcctttgaaacgttaataaatggatttactttgctaagatttatggcaagtgtcaaaaatagtatctgaagatactgaatcatcatgaaatgaactctacttctggccaaagcacaatgtatttgcagttttctcttttgattcaattatactgcacatgttttaaggaaaagtaacttaattgggtttttcaggcagttgatatttgacctaagctttttttttttttttttttccagttaatgctaagaaaagatttggggaaggttataataaaagtattttgtggtgaccataagaatgtccctccccaaacaagtaaacttgtgaaagtttaatttggaattagtggaagctgttcctttgaaagccaagatattatttaagttgtaaagccagctaataaaatgccttagtttgagcataata

SEQ ID NO: 139662 - DNA, 633 bp, Homo sapiens
  Payload ID: 7386
  Gene Symbol: HBS1L
  Gene Name: HBS1-like translational GTPase
  ENST ID: ENST00000529169
  CDS Start-End: 1-512
aagctggatttgagactggaggacaaacacgagagcatggactcttggtccgttctctgggagtgacgcagcttgcagttgcagttaataaaatggatcaggttaattggcaacaagaaaggtttcaagagattactggaaaacttgggcactttcttaagcaagcaggttttaaggagagtgatgtaggttttattcctacaagtggtctcagtggtgaaaatctaatcacaagatctcagtcaagtgaactcacaaaatggtataaaggactatgtttattagaacaaattgattcctttaagcctccccagcgatctattgacaaaccttttagattatgtgtgtccgatgttttcaaagatcaaggatctggattttgcataactggtaaaatagaagctggttatatccaaactggtgaccgactactggcaatgcctcctaatgaaacttgtaccgtgaaaggtatttatctgcaagatgcttttgctaaacaagccttaagttgagacagcagatttttaaaaagtggtttagttacaactccaaagtaagtaacctcttactgaaattgtaactgactgtcaaaatgatactgactgttgaagattaaaatgtgaaaacattaaa

SEQ ID NO: 139663 - DNA, 881 bp, Homo sapiens
  Payload ID: 7386
  Gene Symbol: HBS1L
  Gene Name: HBS1-like translational GTPase
  ENST ID: ENST00000529641
  CDS Start-End: 153-881
gcagtggcgcaatctcggctcactgcaacctccgcctcctgggttcaagctgttctccggcctcagtctcccgaatatctgggattacaggaaaaccagtagattcccagacatcgcgaagtgaatctgaaattgtgccaaaagttgctaaaatgactgtatctggaaagaagcaaactatgggatttgaagtgcctggagtatcttctgaagaaaatggtcatagtttccacacacctcaaaaaggaccgcccattgaagatgccattgcttcttccgatgttcttgagactgcttctaaatctgctaatccaccccacacgattcaagcatcagaagagcagagttcaaccccagcaccggtgaaaaagtctggcaagctgaggcagcaaatagatgtgaaggcggaactggagaagcggcaaggagggaagcagctactcaacttagtggtcattggtcatgttgatgctgggaaaagtactctgatgggccatatgctttatcttctgggtaatataaacaaaagaactatgcataagtatgaacaggagtctaaaaaggctggcaaagcttcgtttgcatatgcatgggtcttggatgaaactggcgaagaaagggaaaggggagtaaccatggatgttggtatgacaaagtttgaaaccacaaccaaagttattacattaatggatgctccaggccataaggacttcattccaaatatgattacaggagcagcccaggcggatgtagctgttttagttgtagatgccagcaggggagagtttgaagctggatttgagactggaggacaaacacgagagcatggactcttggtccgttctctgggagtgacgcagcttgcagttgcagttaataaa

SEQ ID NO: 139664 - DNA, 2160 bp, Homo sapiens
  Payload ID: 7387
  Gene Symbol: HCK
  Gene Name: HCK proto-oncogene, Src family tyrosine kinase
  ENST ID: ENST00000262651
  CDS Start-End: 184-309
accacgtccctggtcccagctcgggagcacatcagaggcttagaggcgagtgggaagggactcagacagtgcaggacgagaaacgcccgcggcaccaaagcccctcagagcgtcgcccccgcctctagttctagaaagtcagtttcccggcactggcaccccggaacctcaggggctgccgagctgggggggcgctcaagctgcgaggatccgggctgcccgcgagacgaggagcgggcgcccaggggcaaccgctgtcatgagttacagtccttccaggatgtgcctctgaaaatggattgcatataaatgatggggtgcatgaagtccaagttcctccaggtcggaggcaatacattctcaaaaactgaaaccagcgccagcccacactgtcctgtgtacgtgccggatcccacatccaccatcaagccggggcctaatagccacaacagcaacacaccaggaatcagggaggcaggctctgaggacatcatcgtggttgccctgtatgattacgaggccattcaccacgaagacctcagcttccagaagggggaccagatggtggtcctagaggaatccggggagtggtggaaggctcgatccctggccacccggaaggagggctacatcccaagcaactatgtcgcccgcgttgactctctggagacagaggagtggtttttcaagggcatcagccggaaggacgcagagcgccaactgctggctcccggcaacatgctgggctccttcatgatccgggatagcgagaccactaaaggaagctactctttgtccgtgcgagactacgaccctcggcagggagataccgtgaaacattacaagatccggaccctggacaacgggggcttctacatatccccccgaagcaccttcagcactctgcaggagctggtggaccactacaagaaggggaacgacgggctctgccagaaactgtcggtgccctgcatgtcttccaagccccagaagccttgggagaaagatgcctgggagatccctcgggaatccctcaagctggagaagaaacttggagctgggcagtttggggaagtctggatggccacctacaacaagcacaccaaggtggcagtgaagacgatgaagccagggagcatgtcggtggaggccttcctggcagaggccaacgtgatgaaaactctgcagcatgacaagctggtcaaacttcatgcggtggtcaccaaggagcccatctacatcatcacggagttcatggccaaaggaagcttgctggactttctgaaaagtgatgagggcagcaagcagccattgccaaaactcattgacttctcagcccagattgcagaaggcatggccttcatcgagcagaggaactacatccaccgagacctccgagctgccaacatcttggtctctgcatccctggtgtgtaagattgctgactttggcctggcccgggtcattgaggacaacgagtacacggctcgggaaggggccaagttccccatcaagtggacagctcctgaagccatcaactttggctccttcaccatcaagtcagacgtctggtcctttggtatcctgctgatggagatcgtcacctacggccggatcccttacccagggatgtcaaaccctgaagtgatccgagctctggagcgtggataccggatgcctcgcccagagaactgcccagaggagctctacaacatcatgatgcgctgctggaaaaaccgtccggaggagcggccgaccttcgaatacatccagagtgtgctggatgacttctacacggccacagagagccagtaccaacagcagccatgatagggaggaccagggcagggccagggggtgcccaggtggtggctgcaaggtggctccagcaccatccgccagggcccacacccccttcctactcccagacacccaccctcgcttcagccacagtttcctcatctgtccagtgggtaggttggactggaaaatctctttttgactcttgcaatccacaatctgacattctcaggaagcccccaagttgatatttctatttcctggaatggttggattttagttacagctgtgatttggaagggaaactttcaaaatagtgaaatgaatatttaaataaaagatataaatgccaaagtcttt

SEQ ID NO: 139665 - DNA, 2082 bp, Homo sapiens
  Payload ID: 7387
  Gene Symbol: HCK
  Gene Name: HCK proto-oncogene, Src family tyrosine kinase
  ENST ID: ENST00000375852
  CDS Start-End: 165-1745
ctcgggagcacatcagaggcttagaggcgagtgggaagggactcagacagtgcaggacgagaaacgcccgcggcaccaaagcccctcagagcgtcgcccccgcctctagttctagaaagtcagtttcccggcactggcaccccggaacctcaggggctgccgagctgggggggcgctcaagctgcgaggatccgggctgcccgcgagacgaggagcgggcgcccaggatggggtgcatgaagtccaagttcctccaggtcggaggcaatacattctcaaaaactgaaaccagcgccagcccacactgtcctgtgtacgtgccggatcccacatccaccatcaagccggggcctaatagccacaacagcaacacaccaggaatcagggaggcaggctctgaggacatcatcgtggttgccctgtatgattacgaggccattcaccacgaagacctcagcttccagaagggggaccagatggtggtcctagaggaatccggggagtggtggaaggctcgatccctggccacccggaaggagggctacatcccaagcaactatgtcgcccgcgttgactctctggagacagaggagtggtttttcaagggcatcagccggaaggacgcagagcgccaactgctggctcccggcaacatgctgggctccttcatgatccgggatagcgagaccactaaaggaagctactctttgtccgtgcgagactacgaccctcggcagggagataccgtgaaacattacaagatccggaccctggacaacgggggcttctacatatccccccgaagcaccttcagcactctgcaggagctggtggaccactacaagaaggggaacgacgggctctgccagaaactgtcggtgccctgcatgtcttccaagccccagaagccttgggagaaagatgcctgggagatccctcgggaatccctcaagctggagaagaaacttggagctgggcagtttggggaagtctggatggccacctacaacaagcacaccaaggtggcagtgaagacgatgaagccagggagcatgtcggtggaggccttcctggcagaggccaacgtgatgaaaactctgcagcatgacaagctggtcaaacttcatgcggtggtcaccaaggagcccatctacatcatcacggagttcatggccaaaggaagcttgctggactttctgaaaagtgatgagggcagcaagcagccattgccaaaactcattgacttctcagcccagattgcagaaggcatggccttcatcgagcagaggaactacatccaccgagacctccgagctgccaacatcttggtctctgcatccctggtgtgtaagattgctgactttggcctggcccgggtcattgaggacaacgagtacacggctcgggaaggggccaagttccccatcaagtggacagctcctgaagccatcaactttggctccttcaccatcaagtcagacgtctggtcctttggtatcctgctgatggagatcgtcacctacggccggatcccttacccagggatgtcaaaccctgaagtgatccgagctctggagcgtggataccggatgcctcgcccagagaactgcccagaggagctctacaacatcatgatgcgctgctggaaaaaccgtccggaggagcggccgaccttcgaatacatccagagtgtgctggatgacttctacacggccacagagagccagtaccaacagcagccatgatagggaggaccagggcagggccagggggtgcccaggtggtggctgcaaggtggctccagcaccatccgccagggcccacacccccttcctactcccagacacccaccctcgcttcagccacagtttcctcatctgtccagtgggtaggttggactggaaaatctctttttgactcttgcaatccacaatctgacattctcaggaagcccccaagttgatatttctatttcctggaatggttggattttagttacagctgtgatttggaagggaaactttcaaaatagtgaaatgaatatttaaataaaagatataaatgccaaagtctttaccaaaa

SEQ ID NO: 139666 - DNA, 1806 bp, Homo sapiens
  Payload ID: 7387
  Gene Symbol: HCK
  Gene Name: HCK proto-oncogene, Src family tyrosine kinase
  ENST ID: ENST00000375862
  CDS Start-End: 229-1806
ctcgctcagggcgcggctaaggcgcccagatggcctgcgggcgccaccacgtccctggtcccagctcgggagcacatcagaggcttagaggcgagtgggaagggactcagacagtgcaggacgagaaacgcccgcggcaccaaagcccctcagagcgtcgcccccgcctctagttctagaaagtcagtttcccggcactggcaccccggaacctcaggggctgccgagctgggggggcgctcaagctgcgaggatccgggctgcccgcgagacgaggagcgggcgcccaggatggggtgcatgaagtccaagttcctccaggtcggaggcaatacattctcaaaaactgaaaccagcgccagcccacactgtcctgtgtacgtgccggatcccacatccaccatcaagccggggcctaatagccacaacagcaacacaccaggaatcagggagggctctgaggacatcatcgtggttgccctgtatgattacgaggccattcaccacgaagacctcagcttccagaagggggaccagatggtggtcctagaggaatccggggagtggtggaaggctcgatccctggccacccggaaggagggctacatcccaagcaactatgtcgcccgcgttgactctctggagacagaggagtggtttttcaagggcatcagccggaaggacgcagagcgccaactgctggctcccggcaacatgctgggctccttcatgatccgggatagcgagaccactaaaggaagctactctttgtccgtgcgagactacgaccctcggcagggagataccgtgaaacattacaagatccggaccctggacaacgggggcttctacatatccccccgaagcaccttcagcactctgcaggagctggtggaccactacaagaaggggaacgacgggctctgccagaaactgtcggtgccctgcatgtcttccaagccccagaagccttgggagaaagatgcctgggagatccctcgggaatccctcaagctggagaagaaacttggagctgggcagtttggggaagtctggatggccacctacaacaagcacaccaaggtggcagtgaagacgatgaagccagggagcatgtcggtggaggccttcctggcagaggccaacgtgatgaaaactctgcagcatgacaagctggtcaaacttcatgcggtggtcaccaaggagcccatctacatcatcacggagttcatggccaaaggaagcttgctggactttctgaaaagtgatgagggcagcaagcagccattgccaaaactcattgacttctcagcccagattgcagaaggcatggccttcatcgagcagaggaactacatccaccgagacctccgagctgccaacatcttggtctctgcatccctggtgtgtaagattgctgactttggcctggcccgggtcattgaggacaacgagtacacggctcgggaaggggccaagttccccatcaagtggacagctcctgaagccatcaactttggctccttcaccatcaagtcagacgtctggtcctttggtatcctgctgatggagatcgtcacctacggccggatcccttacccagggatgtcaaaccctgaagtgatccgagctctggagcgtggataccggatgcctcgcccagagaactgcccagaggagctctacaacatcatgatgcgctgctggaaaaaccgtccggaggagcggccgaccttcgaatacatccagagtgtgctggatgacttctacacggccacagagagccagtaccaacagcagccatga

SEQ ID NO: 139667 - DNA, 1969 bp, Homo sapiens
  Payload ID: 7387
  Gene Symbol: HCK
  Gene Name:: HCK proto-oncogene, Src family tyrosine kinase
  ENST ID: ENST00000486475
  CDS Start-End: 184-369
accacgtccctggtcccagctcgggagcacatcagaggcttagaggcgagtgggaagggactcagacagtgcaggacgagaaacgcccgcggcaccaaagcccctcagagcgtcgcccccgcctctagttctagaaagtcagtttcccggcactggcaccccggaacctcaggggctgccgagctgggggggcgctcaagctgcgaggatccgggctgcccgcgagacgaggagcgggcgcccagacaaacaaagcaaaaccgctcaagtcttgaggtggcaaatctttcccagttcccaccagaagaggatggggtgcatgaagtccaagttcctccaggtcggaggcaatacattctcaaaaactgaaaccagcgccagcccacactgtcctgtgtacgtgccggatcccacatccaccatcaagccggggcctaatagccacaacagcaacacaccaggaatcagggaggcaggctctgaggacatcatcgtggttgccctgtatgattacgaggccattcaccacgaagacctcagcttccagaagggggaccagatggtggtcctagaggaatccggggagtggtggaaggctcgatccctggccacccggaaggagggctacatcccaagcaactatgtcgcccgcgttgactctctggagacagaggagtggtttttcaagggcatcagccggaaggacgcagagcgccaactgctggctcccggcaacatgctgggctccttcatgatccgggatagcgagaccactaaaggaagctactctttgtccgtgcgagactacgaccctcggcagggagataccgtgaaacattacaagatccggaccctggacaacgggggcttctacatatccccccgaagcaccttcagcactctgcaggagctggtggaccactacaagaaggggaacgacgggctctgccagaaactgtcggtgccctgcatgtcttccaagccccagaagccttgggagaaagatgcctgggagatccctcgggaatccctcaagctggagaagaaacttggagctgggcagtttggggaagtctggatggccacctacaacaagcacaccaaggtggcagtgaagacgatgaagccagggagcatgtcggtggaggccttcctggcagaggccaacgtgatgaaaactctgcagcatgacaagctggtcaaacttcatgcggtggtcaccaaggagcccatctacatcatcacggagttcatggccaaaggaagcttgctggactttctgaaaagtgatgagggcagcaagcagccattgccaaaactcattgacttctcagcccagattgcagaaggcatggccttcatcgagcagaggaactacatccaccgagacctccgagctgccaacatcttggtctctgcatccctggtgtgtaagattgctgactttggcctggcccgggtcattgaggacaacgagtacacggctcgggaaggggccaagttccccatcaagtggacagctcctgaagccatcaactttggctccttcaccatcaagtcagacgtctggtcctttggtatcctgctgatggagatcgtcacctacggccggatcccttacccagggatgtcaaaccctgaagtgatccgagctctggagcgtggataccggatgcctcgcccagagaactgcccagaggagctctacaacatcatgatgcgctgctggaaaaaccgtccggaggagcggccgaccttcgaatacatccagagtgtgctggatgacttctacacggccacagagagccagtaccaacagcagccatgatagggaggaccagggcagggccagggggtgcccaggtggtggctgcaaggtggctccagcaccatccgccagggcccacacccccttcctactcccagacacccaccctcgcttcagccacagtttcctcatctgtccagt

SEQ ID NO: 139668 - DNA, 1742 bp, Homo sapiens
  Payload ID: 7387
  Gene Symbol: HCK
  Gene Name: HCK proto-oncogene, Src family tyrosine kinase
  Uniprot ID: P08631
  ENST ID: ENST00000518730
  CDS Start-End: 228-1742
ctcgggagcacatcagaggcttagaggcgagtgggaagggactcagacagtgcaggacgagaaacgcccgcggcaccaaagcccctcagagcgtcgcccccgcctctagttctagaaagtcagtttcccggcactggcaccccggaacctcaggggctgccgagctgggggggcgctcaagctgcgaggatccgggctgcccgcgagacgaggagcgggcgcccaggatggggtgcatgaagtccaagttcctccaggtcggaggcaatacattctcaaaaactgaaaccagcgccagcccacactgtcctgtgtacgtgccggatcccacatccaccatcaagccggggcctaatagccacaacagcaacacaccaggaatcagggagggctctgaggacatcatcgtggttgccctgtatgattacgaggccattcaccacgaagacctcagcttccagaagggggaccagatggtggtcctagaggaatccggggagtggtggaaggctcgatccctggccacccggaaggagggctacatcccaagcaactatgtcgcccgcgttgactctctggagacagaggagtggtttttcaagggcatcagccggaaggacgcagagcgccaactgctggctcccggcaacatgctgggctccttcatgatccgggatagcgagaccactaaaggaagctactctttgtccgtgcgagactacgaccctcggcagggagataccgtgaaacattacaagatccggaccctggacaacgggggcttctacatatccccccgaagcaccttcagcactctgcaggagctggtggaccactacaagaaggggaacgacgggctctgccagaaactgtcggtgccctgcatgtcttccaagccccagaagccttgggagaaagatgcctgggagatccctcgggaatccctcaagctggagaagaaacttggagctgggcagtttggggaagtctggatggccacctacaacaagcacaccaaggtggcagtgaagacgatgaagccagggagcatgtcggtggaggccttcctggcagaggccaacgtgatgaaaactctgcagcatgacaagctggtcaaacttcatgcggtggtcaccaaggagcccatctacatcatcacggagttcatggccaaaggaagcttgctggactttctgaaaagtgatgagggcagcaagcagccattgccaaaactcattgacttctcagcccagattgcagaaggcatggccttcatcgagcagaggaactacatccaccgagacctccgagctgccaacatcttggtctctgcatccctggtgtgtaagattgctgactttggcctggcccgggtcattgaggacaacgagtacacggctcgggaaggggccaagttccccatcaagtggacagctcctgaagccatcaactttggctccttcaccatcaagtcagacgtctggtcctttggtatcctgctgatggagatcgtcacctacggccggatcccttacccagggatgtcaaaccctgaagtgatccgagctctggagcgtggataccggatgcctcgcccagagaactgcccagaggagctctacaacatcatgatgcgctgctggaaaaaccgtccggaggagcggccgaccttcgaatacatccagagtgtgctggatgacttctacacggccacagagagccagtaccaacagcagccatga

SEQ ID NO: 139669 - DNA, 2101 bp, Homo sapiens
  Payload ID: 7387
  Gene Symbol: HCK
  Gene Name: HCK proto-oncogene, Src family tyrosine kinase
  Uniprot ID: P08631
  ENST ID: ENST00000520553
  CDS Start-End: 247-1764
accacgtccctggtcccagctcgggagcacatcagaggcttagaggcgagtgggaagggactcagacagtgcaggacgagaaacgcccgcggcaccaaagcccctcagagcgtcgcccccgcctctagttctagaaagtcagtttcccggcactggcaccccggaacctcaggggctgccgagctgggggggcgctcaagctgcgaggatccgggctgcccgcgagacgaggagcgggcgcccaggatggggtgcatgaagtccaagttcctccaggtcggaggcaatacattctcaaaaactgaaaccagcgccagcccacactgtcctgtgtacgtgccggatcccacatccaccatcaagccggggcctaatagccacaacagcaacacaccaggaatcagggaggcaggctctgaggacatcatcgtggttgccctgtatgattacgaggccattcaccacgaagacctcagcttccagaagggggaccagatggtggtcctagaggaatccggggagtggtggaaggctcgatccctggccacccggaaggagggctacatcccaagcaactatgtcgcccgcgttgactctctggagacagaggagtggtttttcaagggcatcagccggaaggacgcagagcgccaactgctggctcccggcaacatgctgggctccttcatgatccgggatagcgagaccactaaaggaagctactctttgtccgtgcgagactacgaccctcggcagggagataccgtgaaacattacaagatccggaccctggacaacgggggcttctacatatccccccgaagcaccttcagcactctgcaggagctggtggaccactacaagaaggggaacgacgggctctgccagaaactgtcggtgccctgcatgtcttccaagccccagaagccttgggagaaagatgcctgggagatccctcgggaatccctcaagctggagaagaaacttggagctgggcagtttggggaagtctggatggccacctacaacaagcacaccaaggtggcagtgaagacgatgaagccagggagcatgtcggtggaggccttcctggcagaggccaacgtgatgaaaactctgcagcatgacaagctggtcaaacttcatgcggtggtcaccaaggagcccatctacatcatcacggagttcatggccaaaggaagcttgctggactttctgaaaagtgatgagggcagcaagcagccattgccaaaactcattgacttctcagcccagattgcagaaggcatggccttcatcgagcagaggaactacatccaccgagacctccgagctgccaacatcttggtctctgcatccctggtgtgtaagattgctgactttggcctggcccgggtcattgaggacaacgagtacacggctcgggaaggggccaagttccccatcaagtggacagctcctgaagccatcaactttggctccttcaccatcaagtcagacgtctggtcctttggtatcctgctgatggagatcgtcacctacggccggatcccttacccagggatgtcaaaccctgaagtgatccgagctctggagcgtggataccggatgcctcgcccagagaactgcccagaggagctctacaacatcatgatgcgctgctggaaaaaccgtccggaggagcggccgaccttcgaatacatccagagtgtgctggatgacttctacacggccacagagagccagtaccaacagcagccatgatagggaggaccagggcagggccagggggtgcccaggtggtggctgcaaggtggctccagcaccatccgccagggcccacacccccttcctactcccagacacccaccctcgcttcagccacagtttcctcatctgtccagtgggtaggttggactggaaaatctctttttgactcttgcaatccacaatctgacattctcaggaagcccccaagttgatatttctatttcctggaatggttggattttagttacagctgtgatttggaagggaaactttcaaaatagtgaaatgaatatttaaataaaagatataaatgccaaagtctttaccaaaa

SEQ ID NO: 139670 - DNA, 2215 bp, Homo sapiens
  Payload ID: 7387
  Gene Symbol: HCK
  Gene Name: HCK proto-oncogene, Src family tyrosine kinase
  Uniprot ID: P08631
  ENST ID: ENST00000538448
  CDS Start-End: 365-1882
ggagttagcctcgctcagggcgcggctaaggcgcccagatggcctgcgggcgccaccacgtccctggtcccagctcgggagcacatcagaggcttagaggcgagtgggaagggactcagacagtgcaggacgagaaacgcccgcggcaccaaagcccctcagagcgtcgcccccgcctctagttctagaaagtcagtttcccggcactggcaccccggaacctcaggggctgccgagctgggggggcgctcaagctgcgaggatccgggctgcccgcgagacgaggagcgggcgcccagacaaacaaagcaaaaccgctcaagtcttgaggtggcaaatctttcccagttcccaccagaagaggatggggtgcatgaagtccaagttcctccaggtcggaggcaatacattctcaaaaactgaaaccagcgccagcccacactgtcctgtgtacgtgccggatcccacatccaccatcaagccggggcctaatagccacaacagcaacacaccaggaatcagggaggcaggctctgaggacatcatcgtggttgccctgtatgattacgaggccattcaccacgaagacctcagcttccagaagggggaccagatggtggtcctagaggaatccggggagtggtggaaggctcgatccctggccacccggaaggagggctacatcccaagcaactatgtcgcccgcgttgactctctggagacagaggagtggtttttcaagggcatcagccggaaggacgcagagcgccaactgctggctcccggcaacatgctgggctccttcatgatccgggatagcgagaccactaaaggaagctactctttgtccgtgcgagactacgaccctcggcagggagataccgtgaaacattacaagatccggaccctggacaacgggggcttctacatatccccccgaagcaccttcagcactctgcaggagctggtggaccactacaagaaggggaacgacgggctctgccagaaactgtcggtgccctgcatgtcttccaagccccagaagccttgggagaaagatgcctgggagatccctcgggaatccctcaagctggagaagaaacttggagctgggcagtttggggaagtctggatggccacctacaacaagcacaccaaggtggcagtgaagacgatgaagccagggagcatgtcggtggaggccttcctggcagaggccaacgtgatgaaaactctgcagcatgacaagctggtcaaacttcatgcggtggtcaccaaggagcccatctacatcatcacggagttcatggccaaaggaagcttgctggactttctgaaaagtgatgagggcagcaagcagccattgccaaaactcattgacttctcagcccagattgcagaaggcatggccttcatcgagcagaggaactacatccaccgagacctccgagctgccaacatcttggtctctgcatccctggtgtgtaagattgctgactttggcctggcccgggtcattgaggacaacgagtacacggctcgggaaggggccaagttccccatcaagtggacagctcctgaagccatcaactttggctccttcaccatcaagtcagacgtctggtcctttggtatcctgctgatggagatcgtcacctacggccggatcccttacccagggatgtcaaaccctgaagtgatccgagctctggagcgtggataccggatgcctcgcccagagaactgcccagaggagctctacaacatcatgatgcgctgctggaaaaaccgtccggaggagcggccgaccttcgaatacatccagagtgtgctggatgacttctacacggccacagagagccagtaccaacagcagccatgatagggaggaccagggcagggccagggggtgcccaggtggtggctgcaaggtggctccagcaccatccgccagggcccacacccccttcctactcccagacacccaccctcgcttcagccacagtttcctcatctgtccagtgggtaggttggactggaaaatctctttttgactcttgcaatccacaatctgacattctcaggaagcccccaagttgatatttctatttcctggaatggttggattttagttacagctgtgatttggaagggaaactttcaaaatagtgaaatgaatatttaaataaaagatataaatgccaaagtctttacc

SEQ ID NO: 139671 - DNA, 2151 bp, Homo sapiens
  Payload ID: 7387
  Gene Symbol: HCK
  Gene Name: HCK proto-oncogene, Src family tyrosine kinase
  ENST ID: ENST00000534862
  CDS Start-End: 238-1818
ggagttagcctcgctcagggcgcggctaaggcgcccagatggcctgcgggcgccaccacgtccctggtcccagctcgggagcacatcagaggcttagaggcgagtgggaagggactcagacagtgcaggacgagaaacgcccgcggcaccaaagcccctcagagcgtcgcccccgcctctagttctagaaagtcagtttcccggcactggcaccccggaacctcaggggctgccgagctgggggggcgctcaagctgcgaggatccgggctgcccgcgagacgaggagcgggcgcccaggatggggtgcatgaagtccaagttcctccaggtcggaggcaatacattctcaaaaactgaaaccagcgccagcccacactgtcctgtgtacgtgccggatcccacatccaccatcaagccggggcctaatagccacaacagcaacacaccaggaatcagggaggcaggctctgaggacatcatcgtggttgccctgtatgattacgaggccattcaccacgaagacctcagcttccagaagggggaccagatggtggtcctagaggaatccggggagtggtggaaggctcgatccctggccacccggaaggagggctacatcccaagcaactatgtcgcccgcgttgactctctggagacagaggagtggtttttcaagggcatcagccggaaggacgcagagcgccaactgctggctcccggcaacatgctgggctccttcatgatccgggatagcgagaccactaaaggaagctactctttgtccgtgcgagactacgaccctcggcagggagataccgtgaaacattacaagatccggaccctggacaacgggggcttctacatatccccccgaagcaccttcagcactctgcaggagctggtggaccactacaagaaggggaacgacgggctctgccagaaactgtcggtgccctgcatgtcttccaagccccagaagccttgggagaaagatgcctgggagatccctcgggaatccctcaagctggagaagaaacttggagctgggcagtttggggaagtctggatggccacctacaacaagcacaccaaggtggcagtgaagacgatgaagccagggagcatgtcggtggaggccttcctggcagaggccaacgtgatgaaaactctgcagcatgacaagctggtcaaacttcatgcggtggtcaccaaggagcccatctacatcatcacggagttcatggccaaaggaagcttgctggactttctgaaaagtgatgagggcagcaagcagccattgccaaaactcattgacttctcagcccagattgcagaaggcatggccttcatcgagcagaggaactacatccaccgagacctccgagctgccaacatcttggtctctgcatccctggtgtgtaagattgctgactttggcctggcccgggtcattgaggacaacgagtacacggctcgggaaggggccaagttccccatcaagtggacagctcctgaagccatcaactttggctccttcaccatcaagtcagacgtctggtcctttggtatcctgctgatggagatcgtcacctacggccggatcccttacccagggatgtcaaaccctgaagtgatccgagctctggagcgtggataccggatgcctcgcccagagaactgcccagaggagctctacaacatcatgatgcgctgctggaaaaaccgtccggaggagcggccgaccttcgaatacatccagagtgtgctggatgacttctacacggccacagagagccagtaccaacagcagccatgatagggaggaccagggcagggccagggggtgcccaggtggtggctgcaaggtggctccagcaccatccgccagggcccacacccccttcctactcccagacacccaccctcgcttcagccacagtttcctcatctgtccagtgggtaggttggactggaaaatctctttttgactcttgcaatccacaatctgacattctcaggaagcccccaagttgatatttctatttcctggaatggttggattttagttacagctgtgatttggaagggaaactttcaaaatagtgaaatgaatatttaaataaaagatataaatgccaaagtctttacc

SEQ ID NO: 139672 - DNA, 1969 bp, Homo sapiens; identical to SEQ ID NO: 139667
  Payload ID: 7387
  Gene Symbol: HCK
  Gene Name: HCK proto-oncogene, Src family tyrosine kinase
  Uniprot ID: P08631
  ENST ID: ENST00000629881
  CDS Start-End: 311-1828

SEQ ID NO: 139673 - DNA, 1227 bp, Homo sapiens
  Payload ID: 7388
  Gene Symbol: HAX1
  Gene Name: HCLS1 associated protein X-1
  Uniprot ID: O00165
  ENST ID: ENST00000328703
  CDS Start-End: 214-1053
aaagataaagcctttcaaatttgaggaagaccttcggtcccgcctccatttcacgtccggcttaccgtcgtttacgacagtgtcaggatcgcgggcttgctttccggtagcgtgggctgacgcctcgctcaatttctcacagggctgcgcaggtttcccccgtctgcgaatggaccactggaggggttcaaaggttcgcgtcccagtacgggaatgagcctctttgatctcttccggggctttttcggctttcctggacctcggagccacagagatcccttttttggagggatgactcgagatgaagatgatgatgaggaagaagaagaagaagggggctcatggggccgtgggaacccaaggttccatagtcctcagcacccccctgaggaatttggcttcggcttcagcttcagcccaggaggagggatacgtttccacgataacttcggctttgatgacctagtacgagatttcaatagcatcttcagcgatatgggggcctggaccttgccttcccatcctcctgaacttccaggtcctgagtcagagacacctggtgagagactacgggagggacagacacttcgggactcaatgcttaagtatccagatagtcaccagcccaggatctttgggggggtcttggagagtgatgcaagaagtgaatccccccaaccagcaccagactggggctcccagaggccatttcataggtttgatgatgtatggcctatggacccccatcctagaaccagagaggacaatgatcttgattcccaggtttcccaggagggtcttggcccggttctacagccccagcccaaatcctatttcaagagcatctctgtgaccaagatcactaaaccagatgggatagtggaggagcgccggactgtggtggacagtgagggccggacagagactacagtaacccgacacgaagcagatagcagtcctaggggtgatccagaatcaccaagacctccagccctggatgatgccttttccatcctggacttattcctgggacgttggttccggtcccggtagccttgttaaccctcagaggccttcaagtcctttccacctctcacccattgcccaccattaataagcttagcttctcttgccacctcaggggcttggatatgtggaatagtgaactggggccatgtcagtttgtcactcacccaaactgaccaataaaacctttatttatgctaa

SEQ ID NO: 139674 - DNA, 822 bp, Homo sapiens
  Payload ID: 7388
  Gene Symbol: HAX1
  Gene Name: HCLS1 associated protein X-1
  ENST ID: ENST00000435087
  CDS Start-End: 57-822
ccccgtctgcgaatggaccactggaggggttcaaaggttcgcgtcccagtacgggaatgagcctctttgatctcttccggggctttttcggctttcctggacctcggagccacagagatcccttttttggagggatgactcgagatgaagatgatgatgaggaagaagaagaagaagggggctcatggggccgtgggaacccaaggttccatagtcctcagcacccccctgaggaatttggcttcggcttcagcttcagcccaggaggagggatacgtttccacgataacttcggctttgatgacctaaacttccaggtcctgagtcagagacacctggtgagagactacgggagggacagacacttcgggactcaatgcttaagtatccagatagtcaccagcccaggatctttgggggggtcttggagagtgatgcaagaagtgaatccccccaaccagcaccagactggggctcccagaggccatttcataggtttgatgatgtatggcctatggacccccatcctagaaccagagaggacaatgtttcttcctgtacacttgtctccttttttcctttggactctttctctcctgcttcttcatctctctgctcttccagatcttgattcccaggtttcccaggagggtcttggcccggttctacagccccagcccaaatcctatttcaagagcatctctgtgaccaagatcactaaaccagatgggatagtggaggagcgccggactgtggtggacagtgagggccggacagagactacagtaacccgacacgaagcagatagcagtcctaggggtg

SEQ ID NO: 139675 - DNA, 842 bp, Homo sapiens
  Payload ID: 7388
  Gene Symbol: HAX1
  Gene Name: HCLS1 associated protein X-1
  Uniprot ID: O00165
  ENST ID: ENST00000447768
  CDS Start-End: 105-680
gcgtgggctgacgcctcgctcaatttctcacagggctgcgcaggtttcccccgtctgcgaatggaccactggaggggttcaaaggttcgcgtcccagtacgggaatgagcctctttgatctcttccggggctttttcggctttcctggacctcggagccacagagatcccttttttggagggatgactcgagatgaagatgatgatgaggaagaagaagaagaagggggctcatggggccgtgggaacccaaggttccatagtcctcagcacccccctgaggaatttggcttcggcttcagcttcagcccaggaggagggatacgtttccacgataacttcggctttgatgacctaaacttccaggtcctgagtcagagacacctggtgagagactacgggagggacagacacttcgggactcaatgcttaagtatccagatagtcaccagcccaggatctttgggggggtcttggagagtgatgcaagaagtgaatccccccaaccagcaccagactggggctcccagaggccatttcataggtttgatgatgtatggcctatggacccccatcctagaaccagagaggacaatgatcttgattcccaggtttcccaggagggtcttggcccggttctacagccccagcccaaatcctatttcaagagcatctctgtgaccaagatcactaaaccagatgggatagtggaggagcgccggactgtggtggacagtgagggccggacagagactacagtaacccgacacgaagcagatagcagtcctaggggtgatccagaatcaccaagacctccagccctggatgatgccttttccatcc

SEQ ID NO: 139676 - DNA, 914 bp, Homo sapiens
  Payload ID: 7388
  Gene Symbol: HAX1
  Gene Name: HCLS1 associated protein X-1
  Uniprot ID: O00165
  ENST ID: ENST00000457918
  CDS Start-End: 136-831
agtgtcaggatcgcgggcttgctttccggtagcgtgggctgacgcctcgctcaatttctcacagggctgcgcaggtttcccccgtctgcgaatggaccactggaggggttcaaaggttcgcgtcccagtacgggaatgagcctctttgatctcttccggggctttttcggctttcctggacctcggagcttcagcccaggaggagggatacgtttccacgataacttcggctttgatgacctagtacgagatttcaatagcatcttcagcgatatgggggcctggaccttgccttcccatcctcctgaacttccaggtcctgagtcagagacacctggtgagagactacgggagggacagacacttcgggactcaatgcttaagtatccagatagtcaccagcccaggatctttgggggggtcttggagagtgatgcaagaagtgaatccccccaaccagcaccagactggggctcccagaggccatttcataggtttgatgatgtatggcctatggacccccatcctagaaccagagaggacaatgatcttgattcccaggtttcccaggagggtcttggcccggttctacagccccagcccaaatcctatttcaagagcatctctgtgaccaagatcactaaaccagatgggatagtggaggagcgccggactgtggtggacagtgagggccggacagagactacagtaacccgacacgaagcagatagcagtcctaggggtgatccagaatcaccaagacctccagccctggatgatgccttttccatcctggacttattcctgggacgttggttccggtcccggtagccttgttaaccctcagaggccttcaagtcctttccacctctcacccattgcccaccattaataagcttagcttctcttgccac

SEQ ID NO: 139677 - DNA, 771 bp, Homo sapiens
  Payload ID: 7388
  Gene Symbol: HAX1
  Gene Name: HCLS1 associated protein X-1
  ENST ID: ENST00000532105
  CDS Start-End: 178-633
ccccgtctgcgaatggaccactggaggggttcaaaggttcgcgtcccagtacgggaatgagcctctttgatctcttccggggctttttcggctttcctggacctcggagaacttccaggtcctgagtcagagacacctggtgagagactacgggagggacagacacttcgggactcaatgcttaagtatccagatagtcaccagcccaggatctttgggggggtcttggagagtgatgcaagaagtgaatccccccaaccagcaccagactggggctcccagaggccatttcataggtttgatgatgtatggcctatggacccccatcctagaaccagagaggacaatgatcttgattcccaggtttcccaggagggtcttggcccggttctacagccccagcccaaatcctatttcaagagcatctctgtgaccaagatcactaaaccagatgggatagtggaggagcgccggactgtggtggacagtgagggccggacagagactacagtaacccgacacgaagcagatagcagtcctaggggtgatccagaatcaccaagacctccagccctggatgatgccttttccatcctggacttattcctgggacgttggttccggtcccggtagccttgttaaccctcagaggccttcaagtcctttccacctctcacccattgcccaccattaataagcttagcttctcttgccacctcaggggcttggatatgtggaatagtgaactggggccatgtcagtttgtcactc

SEQ ID NO: 139678 - DNA, 1151 bp, Homo sapiens
  Payload ID: 7388
  Gene Symbol: HAX1
  Gene Name: HCLS1 associated protein X-1
  Uniprot ID: O00165
  ENST ID: ENST00000483970
  CDS Start-End: 116-979
gctttccggtagcgtgggctgacgcctcgctcaatttctcacagggctgcgcaggtttcccccgtctgcgaatggaccactggaggggttcaaaggttcgcgtcccagtacgggaatgagcctctttgatctcttccggggctttttcggctttcctggacctcggagccacagagatcccttttttggagggatgactcgagatgaagatgatgatgaggaagaagaagaagaagggggctcatggggccgtgggaacccaaggttccatagtcctcagcacccccctgaggaatttggcttcggcttcagcttcagcccaggaggagggatacgtttccacgataacttcggctttgatgacctagtacgagatttcaatagcatcttcagcgatatgggggcctggaccttgccttcccatcctcctgcaaacacctgccacctttctgcagaacttccaggtcctgagtcagagacacctggtgagagactacgggagggacagacacttcgggactcaatgcttaagtatccagatagtcaccagcccaggatctttgggggggtcttggagagtgatgcaagaagtgaatccccccaaccagcaccagactggggctcccagaggccatttcataggtttgatgatgtatggcctatggacccccatcctagaaccagagaggacaatgatcttgattcccaggtttcccaggagggtcttggcccggttctacagccccagcccaaatcctatttcaagagcatctctgtgaccaagatcactaaaccagatgggatagtggaggagcgccggactgtggtggacagtgagggccggacagagactacagtaacccgacacgaagcagatagcagtcctaggggtgatccagaatcaccaagacctccagccctggatgatgccttttccatcctggacttattcctgggacgttggttccggtcccggtagccttgttaaccctcagaggccttcaagtcctttccacctctcacccattgcccaccattaataagcttagcttctcttgccacctcaggggcttggatatgtggaatagtgaactggggccatgtcagtttgtcactcacccaaactgaccaataaaacctttatttatgct

SEQ ID NO: 139679 - DNA, 2370 bp, Homo sapiens
  Payload ID: 7389
  Gene Symbol: HS1BP3
  Gene Name: HCLS1 binding protein 3
  Uniprot ID: Q53T59
  ENST ID: ENST00000304031
  CDS Start-End: 27-1205
ccccgcccggagtccccgccgccgtcatgcagtccccggcggtgctcgtcacctccaggcgacttcagaatgcccacactggcctcgacctgactgtgccccagcaccaggaggtacggggcaagatgatgtctggacacgtggagtaccagatcctggtggtgacccgtctggctgcgttcaagtcggccaagcacaggcccgaggatgtcgtccagttcttggtctccaaaaagtacagcgagattgaggagttttaccagaaactgagcagtcgttatgcagcagccagcctccccccactacccaggaaggtcctgtttgttggggagtctgacatccgggagaggagagccgtgttcaatgagatcctgcgctgtgtctccaaggatgccgagttggcaggcagcccagagctgctagagttcttaggtaccagatccccaggggctgcagggctcaccagcagagattcctctgtcctggatggcacagacagtcagacagggaatgatgaagaggctttcgacttttttgaggagcaagaccaagtggcagaagagggtccgcccgtccagagcctgaagggcgaggatgctgaggaatccttggaggaggaggaggcgctggaccctctgggcattatgcgctccaagaagcccaagaaacatcccaaagtggccgtgaaagccaagccctcgccccggctcaccatctttgacgaggaggtggaccctgatgaggggctctttggcccgggcaggaagctgtctccacaggacccctcggaggacgtgtcatccgtggaccccctgaagctatttgatgatcctgacctcggcggggccatccccctgggtgactccctcctgctgccagccgcctgtgagagtggagggcccacacccagcctcagccacagggacgcctccaaggaactgttcagagttgaagaggacttggaccagattctgaacctgggagctgagcccaaacccaagccccagcttaagcccaagccaccagtggcagctaagccggtgatacccagaaaaccagctgttccccccaaagcgggcccggctgaagctgtggctgggcagcagaagccgcaggagcagatccaagccatggacgagatggacatcttgcagtacatccaggaccacgatacaccagcccaggccgcccccagcctcttctgacccttccatgctggcccctggcccagcaggcctgtctgtggggacatcggtgtgaagggaagggactgggccctgcagggtcagaacctccccacccccaggggaggccaggcagaagcctgggtcacagcacccagaactgcatggttccattttctccggggctgtggggccaaagtagaagcctgcgggctgcgggagcggctctcaccctaggagccagagcccaatgtgtcttattccccgtggacatgaaggggagggagggtgtggggatgccttgccaaccagaagcccagccccaaggatgaagcaagacatgtggggccgtagcgaggtgtcacatggggcagggaagcttcatgcccacgggttctgccagccccagcacagacccaaactggggctgggcctctatccctcctctgcctctgttcgcatagtaagaaggagtgaccggtatcctccccttcccctaccctaagctgtagcctgggtgactgactggcctgggcctggggtggggacgtccccaagccaaattactccagggcctctgctcctcgtggctgccaggggcctgcagggtctgggtgggtctcccaggagaggaatactgagtgggagatcggctgtctggagtgttctgatgcaagtctctctctcctgagcctcctcttgatgcaagctctaaagggagaagtcaggccctgcctctccagggtatagacggccctgctaggccccagttcttcctccttccccctttcccaggaaaggccagcccagtccatggccttcttgggcctctgggcacagagccaatgttcgtcattgcagctctcagcaaactgggtcatagctttccccacagctcagcctggggcctgggcagggctcccagcctgcaccgcctcccactgccagtggggcatgattctctcaggcttctgccccgaggccttcgtcgtcctcagggtctggacttggtcagtggcctttcaccagtggagctgccttcccagggagaaggagccgtgcgccagggcagggcccgtgccttagacttctcccgacccccagagcgctggtacacaggtctaggcaccacacagtgctttggaaattctcagtgaatgatgtttaataaagcaaaaaatgtcaa

SEQ ID NO: 139680 - DNA, 4358 bp, Homo sapiens
  Payload ID: 7389
  Gene Symbol: HS1BP3
  Gene Name: HCLS1 binding protein 3
  ENST ID: ENST00000402541
  CDS Start-End: 16-657
gtccccgccgccgtcatgcagtccccggcggtgctcgtcacctccaggcgacttcagaatgcccacactggcctcgacctgactgtgccccagcaccaggaggtacggggcaagatgatgtctggacacgtggagtaccagatcctggtggtgacccgtctggctgcgttcaagtcggccaagcacaggcccgaggatgtcgtccagttcttggtctccaaaaagtacagcgagattgaggagttttaccagaaactgagcagtcgttatgcagcagccagcctccccccactacccaggaaggtcctgtttgttggggagtctgacatccgggagaggagagccgtgttcaatgagatcctgcgctgtgtctccaaggatgccgagttggcaggcagcccagagctgctagagttcttaggtaccagatccccaggggctgcagggctcaccagcagagattcctctgtcctggatggcacagacagtcagacagggaatgatgaagaggctttcgacttttttgaggagcaagaccaagtggcagaagagggtccgcccgtccagagcctgaagggcgaggatgctgaggaatccttggaggaggaggaggcgctggaccctctgggcattatgcggttggtctcctgttgttgagagggcccctttggtgtattccaggctttctggagatgacgtcccccttccctggaatctgagaaaagccctgagcatcccaggtcgccccctcgcagggatctgggccacgaggccttggcctggtgtgttgggggaagtagctctctgcgtgcccttggtggtgtgcatgtctctgggactgggcttaggtgtcgcctcccttctcgggtcacaggatgtcctccacttgtggctccgcactggggcttggtagagtcctccgtgacagctcagtagtgcaggctgcgggcctgtccggctagtgtgggaggactgggtgctccttccagctgtgggactcgcagaggtggctgcggctctctgggctgcatcatctgcatagcaggagcattcaccttggccctgcctccacacagggccattcaccagccatacatctctggccatttacaatctcttttcttcggttttcctcagtgaaaatggactcatggtcgtatcaacctcttagggctcctgtgacgatgaactgagttatgtaaatttagcaatcagctaccatcatggccccatctttcagtggaatcagaccaggccaggggtgctgtcctccccgctctctaccacaacgaatgtctcttagccgtttaccaaagccctcgggcgccagatgagtgtaggtcctgccgcagaaaggaattagagcccagtagaaattaggcagaagcaagttcaacttcatcagcatgtagaattctctcctaaaatcacagcccactctggaaaggccttcttcgtggggagggttatgggagggtgggctgcagggtggccatgagaccagcgtccaggggtgaggatttgcactgggaaagggtacgcggcgctcagggagctgcagcagaaacaggcctgagatctggggtcctgcggcacctgggcacagcaagtgccctgcagtcgctcctcctggccctccgtggctggccttgtccctgagtggggtcagcggccctgagggagaggcagccagagtagtgggtgatatggggacaagcctgtaatagtcactccttatcagcctggcccaacgcggcaggcctttcttgggctttattttggtaagggtgaggctttgtttgaactcacattctctgttgttctgagtaaccacacgtagtgccaaaccgagatggactttggtggtctgtgccaacctttggctgaagaacacacttagccgagcggctccttttttgggtaggaaaatgttctttgtggctggcaagtgctgccttgaacttcctacttacttcattagcagattgtcaggggagatgtgtcagctatcctgggaccccttggcggggcggggggggcgggggcagccccctccccagctctgtactctggggccctcacccctgaatcctgggaaagcttagcacctaagagtaatcctgccggcttaagaccctcccctgctggggtttctttttaaggacccgtgtgacaaggtgctgatgaatcaacgttatcacctctgtcaggaataataagtaaattttttgagagtttatgaaatgctgggaactaagttagcatttgcttgcatgatctcattatatctgtaagacagcatttctgaaactacttgctacaacccatagtaaaaactatatggtacgccatgacccaggacacacatgtataaacatcccataaaactgaagcaaaagttcccagaactcatacaaaaccttactaagtgtattgtactgggatattttctattctatttcaacgtttggaaaggtcatgactcgccaaactgctttcaggatccactgtgggcacaggtcaagaaacggagccctggaggcctgcactggcatcagcctcttctgtgtggtgggaaactcaagttcagggtcaggtggttcgtccacgttcctgcagcctgcagatggcagagccaggaccccacgccatctccagtccagtctttatcagcctgggaggtgggcagggccccaggattatccccctttcacagatggtaaaatcgaggaaggagttgagcaggatcttggccagagccgtgtgtgttccagagctgtgtgtgtggcagagccgtaccttgaagttgggtttccacctcggcctttcacagacacccaggtgggcttgttgatctctcttggtgccacccacctgccctttggtgggggactttctgttcttctcgggaggctgtttgtgcacccctctccctcccgtgcgcttggttcctgtgcagatgcagcggcacccgtttcccagcttgccctgccccatgtctgggcttagctctgggctctcctggagcggccaccatttccatgcaaccagcctcggtccttccccgccgtggccgcggcgaggcgctgctgctctgctgaagggctgctccacggcagggctgctgggagggtgggagtcgccagcacaaagccggagcccaggccggcctggcttttctttgtcttttaaacctggttttgattagggacaagagagcgttattacaccattagagagcaattaaagatagaaaaagccctcacctcggcccatcccaacaccaccgctctctccatctgctggggctctcttctgaccccgtcccagcagcatccatgcaaccgcaggcacaatgcacgtgccttttcgtactctgcttttccaccctatggtctgtcccgattgctgctccatgtcgcccctgttttgtatttaagtttctattttagaatgtcacggtgctgagaaaattgacattctaccctaatagttctgccttatgctggaaatcctctgcgggaaacctttttcattgtgactcaaataacacacaattagtatagaaaaattgcaaacacagataaaagtcctttccctgtgaatttctgaatgcacctttgaatattcacatcttactgccaaaatgagattgtcttgtgtgccgttctggaatttgcttttttccagcttacatgttctaggtccttccagatcaatagctgcactctccctccttcctctgctggtttctcagctcgatgggctgtaagtggcattaccaggcccttgcttgtgggcgtggcggggttttctgtaggtttttgctattacaggcaataacctgaggaacttctacatatacaaagcttttattctatggagccttcccctatatacgtgccccagagcaaggtccctgaagctgcttctgggggctttggggtaccattccagtaaaaggttctctaagggctgaagcccctctgttgggaggcccctctgcttttctaagccctgcccacccccgccctcagggcccactcctcccacctcttcttttgcacacagggaccccctccaggccctgggtccctgaggactcacagcgtccttgggacaggctggctcctgtatgaacaaatgcacctgcctgcaaagctggtcttcccagactccctggaagggggagcccacacccgggtccccgtgctgtggcctccgtggtgaagctggatgtttctctggaatgccacgttttatggttgttttttaatatggattttgcttcatctttcataaaacaaccacatgtattttagtataaaaataatatcttactctatatttggatgaaa

SEQ ID NO: 139681 - DNA, 1375 bp, Homo sapiens
  Payload ID: 7389
  Gene Symbol: HS1BP3
  Gene Name: HCLS1 binding protein 3
  ENST ID: ENST00000406618
  CDS Start-End: 22-621
cccggagtccccgccgccgtcatgcagtccccggcggtgctcgtcacctccaggcgacttcagaatgcccacactggcctcgacctgactgtgccccagcaccaggaggtacggggcaagatgatgtctggacacgtggagtaccagatcctggtggtgacccgtctggctgcgttcaagtcggccaagcacaggcccgaggatgtcgtccagttcttggtctccaaaaagtacagcgagattgaggagttttaccagaaactgagcagtcgttatgcagcagccagcctccccccactacccaggaaggtcctgtttgttggggagtctgacatccgggagaggagagccgtgttcaatgagatcctgcgctgtgtctccaaggatgccgagttggcaggcagcccagagctgctagagttcttaggtacccaaggctctgccccatgtccctcaggtctccccggcccagaactaggccccgctgccgtgccccagtgggagcatgtccacagctgcctctgcagcctggaggcttcagccaggctggtgaggcaggtggcctcgctgacatccttggctggatggtgggcagaaggaggcctacccttgagggactgaacgtctggctgtcaggtgggggctcacacagcaggcattctccatagtgtgaccccatccatggccttcctggccagccccattcctagagcttgcccgacaccccccgactgaccatgcaccacatacaaccccctgacacacaccccacactcccctctgcctcctccaaccagccctagggacctgcagtatcccgggaaagctgtgttctcacagcctggctggtgacctgcccctggggacatgtgcttctcacctgtgcccccacagagagggtcatggggacagctccgggctgaggaattgatccagcacccctgcccccagtggtggagacgtcaagcccttcccatgggtgtcctggccctgtcttctctcctcagttttctcatctgtaaggtgggagtagcctggctgataggccgttatgagaatttacagagctaacacatgcaaagtccttagaacagaaacaaccacagtaaatagtggctacaattttaccccactcctcggttagtcctgtcaacccagaacccccgtggggcaggccctggtctcacagatgcccccaggacaaggcaggttctcaccactgctggtgccggactcccaccccttctcccctctttacatccgtctgcttaactccttcccagctactgtggatctcctagttccacaagacagaagggaagttttcaaaagaaagttgaccgtaaataaaacaaattatttaaagtgaaaggtg

SEQ ID NO: 139682 - DNA, 414 bp, Homo sapiens
  Payload ID: 7389
  Gene Symbol: HS1BP3
  Gene Name: HCLS1 binding protein 3
  ENST ID: ENST00000415264
  CDS Start-End: 1-224
tgtctccacaggacccctcggaggacgtgtcatccgtggaccccctgaagctatttgatgatcctgacctcggcggggccatccccctgggtgactccctcctgctgccagccgcctgtgagagtggagggcccacacccagcctcagccacagggacgcctccaaggaactgttcaggtgggaccatctagttgcaggcaaacaagctcagggctcccactgattctacattatggtgtttctgtaagagacacacagtggagaagagaaggccacgtgaaggctgaggcagggatgggcgtggtgctgccaccagcgggggaacgccaggaactggaagaggcaaagaaggaccctctgagggcgcagggtcctgctgacacctcaacttcagacttctggcctccagggct

SEQ ID NO: 139683 - DNA, 841 bp, Homo sapiens
  Payload ID: 7389
  Gene Symbol: HS1BP3
  Gene Name: HCLS1 binding protein 3
  ENST ID: ENST00000446825
  CDS Start-End: 472-841
cggagtccccgccgccgtcatgcagtccccggcggtgctcgtcacctccaggtctccaaaaagtacagcgagattgaggagttttaccagaaactgagcagtcgttatgcagcagccagcctccccccactacccaggaaggtcctgtttgttggggagtctgacatccgggagaggagagccgtgttcaatgagatcctgcgctgtgtctccaaggatgccgagttggcaggcagcccagagctgctagagttcttaggtaccagatccccaggggctgcagggctcaccagcagagattcctctgtcctggatggcacagacagtcagacagggaatgatgaagaggctttcgacttttttgaggagcaagaccaagtggcagaagagggtccgcccgtccagagcctgaagggcgaggatgctgaggaatccttggaggaggaggaggcgctggaccctctgggcattatgcgctccaagaagcccaagaaacatcccaaagtggccgtgaaagccaagccctcgccccggctcaccatctttgacgaggaggtggaccctgatgaggggctctttggcccgggcaggaagctgtctccacaggacccctcggaggacgtgtcatccgtggaccccctgaagctatttgatgatcctgacctcggcggggccatccccctgggtgactccctcctgctgccagccgcctgtgagagtggagggcccacacccagcctcagccacagggacgcctccaaggaactgttcaggacactggctcataagggatttcaatgtgcacagagcaactgcctcctcacctccccacggattccac

SEQ ID NO: 139684 - DNA, 518 bp, Homo sapiens
  Payload ID: 7389
  Gene Symbol: HS1BP3
  Gene Name: HCLS1 binding protein 3
  ENST ID: ENST00000458740
  CDS Start-End: 1-399
cccgtccagagcctgaagggcgaggatgctgaggaatccttggaggaggaggaggcgctggaccctctgggcattatgcgctccaagaagcccaagaaacatcccaaagtggccgtgaaagccaagccctcgccccggctcaccatctttgacgaggaggtggaccctgatgaggggctctttggcccgggcaggaagctgtctccacaggacccctcggaggacgtgtcatccgtggaccccctgaagctatttgatgatcctgacctcggcggggccatccccctgggtgactccctcctgctgccagccgcctgtgagagtggagggcccacacccagcctcagccacagggacgcctccaaggaactgttcagacaaattcaaaaagagccgtaacactgggattagcttcttgagagcaggaaccacattcattctttgtgtctgccctgtgactatccagggagtagttggacttcctcataataaagaatgttctgatagccattcattca

SEQ ID NO: 139685 - DNA, 2005 bp, Homo sapiens
  Payload ID: 7389
  Gene Symbol: HS1BP3
  Gene Name: HCLS1 binding protein 3
  ENST ID: ENST00000445102
  CDS Start-End: 1-334
ctccaagaagcccaagaaacatcccaaagtggccgtgaaagccaagccctcgccccggctcaccatctttgacgaggaggtggaccctgatgaggggctctttggcccgggcaggaagctgtctccacaggacccctcggaggacgtgtcatccgtggaccccctgaagctatttgatgatcctgacctcggcggggccatccccctgggtgactccctcctgctgccagccgcctgtgagagtggagggcccacacccagcctcagccacagggacgcctccaaggaactgttcaggtaccacctgtccccagcggcgcttggccagctctgagagtgttctggacagagccaagggcccggctcattgcccagtctcagccccagcctcctctgaggggaggaccccaggcctgtgaaaagtagaagcctgtgggtgcacattgggtgagaggcggtgaagggggctgagggggaggatccgcagcccagggctgctcagctagttccagaaagagagaactttgtgtgcacaaccagtctttcttttcacaatcatattttaacagtttatgtaaagaataattaaattatataattgcaagagcaggtataactggcataagcaagtttgggaacaaattaaacggactcatggcagcatgcagcccacccagcgagggggcaaagtgcagatgtcttggtgatggcctctctgccggagggcccggtcggcagctttcacagaaggaagggagaatgaggcctcagctgtcacatggaggtcaattggcagaacctgtgccggtgacagctcctatttcctgagtccttgctgtgtacgcagtaagccagactccttacacgctctcttatgtaatcttcacgacagccccctaaggtggatgctattttctccatattataagaaatcaagtgtgggacgccacctggctaagacccctgctctgcccctggcctggcctctccacttcatcagggactgtctgagcacttggctgggtgatctgcctccccacccagccccccagttctccccaggcctttacctccactggccacattctcagcagactcagtgttgtgcgtgtctccagctcccactccatgctccaggacacaggactgtgcctgggattcagaggaagccaggccgcctctttccaggaacggcttatgtgacaccaaggcatgcaggccctggaggctgtcatctgtacccctcattagcagcctcgggctattagacagccctgcaagtgcccgccaagcctgagtcaccgtgacggcttctggtatttacatgtccccaaggcccctggcatctgttcactctcatcctgtgtcctcgctcctgacatcccagcgggctggaagaaaccaggattgttattttattagagggaaaccgaggcacagggaaatgaaatactagagtctgcctgcggagcagcagggccaggccgagcatgtctaggagtccatgtgtcccagtggggtggctctcgtgggacctttctggcctagtttattctaaatccgttacttcccaacctgtgttctgcagaacgtggtacagtggggtggtcaaaggctatcttcaaaggggctctgtggctgatgaattggggaaatgccacaaaaagcagggctcgtagtgcgcgggccagcaccacatggcacttcacgttctcattcatccctgggccccccactctgtggtgccccttagcatcccgcagagcgcttggggagtccctgctcaaaaagtgtgggtcccgcacccccaccttcactttagcagacatctgctaatgaaaggattaactgcttttcttttttttaaattcagacaaattcaaaaagagccgtaacactgggattagcttcttgagagcaggaaccacattcattctttgtgtctgccctgtgactatccagggagtagttggacttcctcataataaagaatgttctgatagcc

SEQ ID NO: 139686 - DNA, 78 bp, Homo sapiens
  Payload ID: 7389
  Gene Symbol: HS1BP3
  Gene Name: HCLS1 binding protein 3
  ENST ID: ENST00000631166
  CDS Start-End: 1-78
atgcagtccccggcggtgctcgtcacctccaggtctccaaaaagtacagcgagattgaggagttttaccagaaactga

SEQ ID NO: 139687 - DNA, 1350 bp, Homo sapiens
  Payload ID: 7390
  Gene Symbol: HDDC2
  Gene Name: HD domain containing 2
  Uniprot ID: Q7Z4H3
  ENST ID: ENST00000318787
  CDS Start-End: 43-258
cttcgccgcggcctgctccgcccagccggggtcggtggccgcatggcttcggtctcctctgcgaccttctcgggccacggggctcggtccctactgcagttcctgcggctggtagggcagctcaagagagtcccacgaactggctgggtatacagaaatgtccagaggccggagagcgtttcagatcacatgtaccggatggcagttatggctatggtgatcaaagatgaccgtcttaacaaagaccggaagctatgaagcagataacccagctcctaccagaggacctcagaaaggagctctatgaactttgggaagagtacgagacccaatctagtgcagaagccaaatttgtgaagcagctagaccaatgtgaaatgattcttcaagcatctgaatatgaagaccttgaacacaaacctgggagactgcaagacttctatgattccacagcaggaaaattcaatcaccctgagatagtccagcttgtttctgaacttgaggcagaaagaagcactaacatagctgcagctgccagtgagccacactcctgagacactctctaaattgctgcactcctgtaacaaacattatttttccatttcattgtattgtgttttgccattgttggtctgttgatttccctagatgtgagtctgtttgttttcaattgtctgaacttcagcaagaaatgtgatacaacttgggcactaaaagaagccacagaacaggaagcggtcatgaaagtgccatggatgaacactggaggtggcagtgcctgtttatgaactaaataaataaatattaaacacctaaaatattagaatatttattggagatttaaaatcatcttattctgacttaattaccgatatccccgaaggctaggttcattgaataatagaaaatttcattatgattgcttttaagaacagattcttcagctgatttagtgataagaatccagaaaagaaaatgtactagtgatgtattctctccccagatgaaattgctgccttattcagatttactctcttgagccagattttgaatttcactgcagactgcttcagacttctaatcataggcttgtaaacctactaataggctctgcccctcttcccaatactttttgtcatttagagatataaaccggggcatataaaaatgcaacttgtattcctttgtatatttttccctgtctgacttataaatcttgagacctttattgtaaaagcatgtatcatcaggtgagaaatataaataggaactggggtcattgagcctcaggtagggaatatatcaacccgatttcttcctctcttttcccttttataggataaataatcc

SEQ ID NO: 139688 - DNA, 918 bp, Homo sapiens
  Payload ID: 7390
  Gene Symbol: HDDC2
  Gene Name: HD domain containing 2
  Uniprot ID: Q7Z4H3
  ENST ID: ENST00000398153
  CDS Start-End: 44-658
gcttcgccgcggcctgctccgcccagccggggtcggtggccgcatggcttcggtctcctctgcgaccttctcgggccacggggctcggtccctactgcagttcctgcggctggtagggcagctcaagagagtcccacgaactggctgggtatacagaaatgtccagaggccggagagcgtttcagatcacatgtaccggatggcagttatggctatggtgatcaaagatgaccgtcttaacaaagaccgatgtgtacgcctagccctggttcatgatatggcagaatgcatcgttggggacatagcaccagcagataacatccccaaagaagaaaaacataggcgagaagaggaagctatgaagcagataacccagctcctaccagaggacctcagaaaggagctctatgaactttgggaagagtacgagacccaatctagtgcagaagccaaatttgtgaagcagctagaccaatgtgaaatgattcttcaagcatctgaatatgaagaccttgaacacaaacctgggagactgcaagacttctatgattccacagcaggaaaattcaatcaccctgagatagtccagcttgtttctgaacttgaggcagaaagaagcactaacatagctgcagctgccagtgagccacactcctgagacactctctaaattgctgcactcctgtaacaaacattatttttccatttcattgtattgtgttttgccattgttggtctgttgatttccctagatgtgagtctgtttgttttcaattgtctgaacttcagcaagaaatgtgatacaacttgggcactaaaagaagccacagaacaggaagcggtcatgaaagtgccatggatgaacactggaggtggcagtgcctgtttatgaactaaataaataaatattaaacacct

SEQ ID NO: 139689 - DNA, 564 bp, Homo sapiens
  Payload ID: 7390
  Gene Symbol: HDDC2
  Gene Name: HD domain containing 2
  Uniprot ID: Q7Z4H3
  ENST ID: ENST00000609477
  CDS Start-End: 27-242
tccgcccagccggggtcggtggccgcatggcttcggtctcctctgcgaccttctcgggccacggggctcggtccctactgcagttcctgcggctggtagggcagctcaagagagtcccacgaactggctgggtatacagaaatgtccagaggccggagagcgtttcagatcacatgtaccggatggcagttatggctatggtgatcaaagatgaccgtcttaacaaagaccggaagctatgaagcagataacccagctcctaccagaggacctcagaaaggagctctatgaactttgggaagagtacgagacccaatctagtgcagaagccaaatttgtgaagcagctagaccaatgtgaaatgattcttcaagcatctgaatatgaagaccttgaacacaaacctgggagactgcaagacttctatgattccacagcagctacaggagcggaatcaggagtttccaatgtgaagcttctaactcaagagaacaactgaagctttcaggcctggggcagagagctgtgctcatgtgcccctggaagtcacgacgctacctttgg

SEQ ID NO: 139690 - DNA, 538 bp, Homo sapiens
  Payload ID: 7390
  Gene Symbol: HDDC2
  Gene Name: HD domain containing 2
  ENST ID: ENST00000608284
  CDS Start-End: 147-470
aggggcagaaggaagaagaagagggggaggagaaagagatagaagagtaagaggagggggaagaaagacaaggggaaggggaggaggaggaggacggggaggagcttcgccgcggcctgctccgcccagccggggtcggtggccgcatggcttcggtctcctctgcgaccttctcgggccacggggctcggtccctactgcagttcctgcggctggtagggcagctcaagagagtcccacgaactggctgggtatacagaaatgtccagaggccggagagcgtttcagatcacatgtaccggatggcagttatggctatggtgatcaaagatgaccgtcttaacaaagaccgatgtgtacgcctagccctggttcatgatatggcagaatgcatcgttggggacatagcaccagcagataacatccccaaagaagaaaaacataggcgagaagagaaaaggaagacataagaaactccattttgatctgtacacctgtagactaacgggctcagtagccagcaggatttttgcccttc

SEQ ID NO: 139691 - DNA, 879 bp, Homo sapiens
  Payload ID: 7390
  Gene Symbol: HDDC2
  Gene Name: HD domain containing 2
  ENST ID: ENST00000608295
  CDS Start-End: 6-332
gccgcatggcttcggtctcctctgcgaccttctcgggccacggggctcggtccctactgcagttcctgcggctggtagggcagctcaagagagtcccacgaactggctgggtatacagaaatgtccagaggccggagagcgtttcagatcacatgtaccggatggcagttatggctatggtgatcaaagatgaccgtcttaacaaagaccgatgtgtacgcctagccctggttcatgatatggcagaatgcatcgttggggacatagcaccagcagataacatccccaaagaagaaaaacataggcgagaagaggtcagtgttgactattgactgtgcaaaaaaccaccagaaaaacctcttgctgaagcaaagctaagagtacgagacccaatctagtgcagaagccaaatttgtgaagcagctagaccaatgtgaaatgattcttcaagcatctgaatatgaagaccttgaacacaaacctgggagactgcaagacttctatgattccacagcaggaaaattcaatcaccctgagatagtccagcttgtttctgaacttgaggcagaaagaagcactaacatagctgcagctgccagtgagccacactcctgagacactctctaaattgctgcactcctgtaacaaacattatttttccatttcattgtattgtgttttgccattgttggtctgttgatttccctagatgtgagtctgtttgttttcaattgtctgaacttcagcaagaaatgtgatacaacttgggcactaaaagaagccacagaacaggaagcggtcatgaaagtgccatggatgaacactggaggtggcagtgcctgtttatgaactaaataaataaatattaaacacctaaaa

SEQ ID NO: 139692 - DNA, 1047 bp, Homo sapiens
  Payload ID: 7391
  Gene Symbol: HDDC3
  Gene Name: HD domain containing 3
  Uniprot ID: Q8N4P3
  ENST ID: ENST00000330334
  CDS Start-End: 7-429
cgcgcgatgggctctgaggcggcgcagctgctggaggctgccgacttcgcggctcgcaagcaccggcagcagcggcggaaggaccccgaggggaccccctacatcaaccaccccatcggtgtggcacggatcctgacccacgaggcgggaatcactgacattgtggtgttacaggcggccctgctccatgacacggtggaggacacagacaccaccctggatgaggtggagctacactttggggcacaagtgcggcgcctggtggaggaggtaacagatgacaagactctgcccaagctggagagaaagaggctgcaggtggagcaagcgccccacagtagccccggggccaaactggtgaagctggcagacaagctgtacaatctgagggacctgaatcgctgcaccccagaggtaaaaatacaatagctgggccaaggggaagttttcaggacagctcattccatcaggaactcatggccttgaaccaagcttgccaggaagtggggaaaaggcagtgctttccttgacatcacgctagcaagtttctgtcgactcttatgcaggatggtcagaacatcgagtccaggaatacttcgagtgggcagcgcaggtggtgaaggggcttcagggaacaaaccggcaactggaagaggctctaaagcatctgttcaagcagcgggggctgacaatctgatcagtgcttgaagctatccagaggcacaactccagcctcgttcaggccggacaggattcatacgccatcttttctgtgtctcctgagctccctccatccttcccagatattagaggccaaaaaaagacttgcattttttctcagtctgaaggtctcctgctaactaagctgagccccgcgtggtgggaatcagatgtacccatccatttctgatgcactcaccgcctctccccaagtcttgggtctgtttgctattttgcatggtgggatctctggcccctcagggacttgagattatttaagtactagttcctaacacgttctggaaaataaaaataactctgggttaa

SEQ ID NO: 139693 - DNA, 1880 bp, Homo sapiens
  Payload ID: 7391
  Gene Symbol: HDDC3
  Gene Name: HD domain containing 3
  Uniprot ID: Q8N4P3
  ENST ID: ENST00000394272
  CDS Start-End: 30-569
cggccgcagtcgtcggccccatccgcgcgatgggctctgaggcggcgcagctgctggaggctgccgacttcgcggctcgcaagcaccggcagcagcggcggaaggaccccgaggggaccccctacatcaaccaccccatcggtgtggcacggatcctgacccacgaggcgggaatcactgacattgtggtgttacaggcggccctgctccatgacacggtggaggacacagacaccaccctggatgaggtggagctacactttggggcacaagtgcggcgcctggtggaggaggtaacagatgacaagactctgcccaagctggagagaaagaggctgcaggtggagcaagcgccccacagtagccccggggccaaactggtgaagctggcagacaagctgtacaatctgagggacctgaatcgctgcaccccagagggatggtcagaacatcgagtccaggaatacttcgagtgggcagcgcaggtggtgaaggggcttcagggaacaaaccggcaactggaagaggctctaaagcatctgttcaagcagcgggggctgacaatctgatcagtgcttgaagctatccagaggcacaactccagcctcgttcaggccggacaggattcatacgccatcttttctgtgtctcctgagctccctccatccttcccagatattagaggccaaaaaaagacttgcattttttctcagtctgaaggtctcctgctaactaagctgagccccgcgtggtgggaatcagatgtacccatccatttctgatgcactcaccgcctctccccaagtcttgggtctgtttgctattttgcatggtgggatctctggcccctcagggacttgagattatttaagtactagttcctaacacgttctggaaaataaaaataactctgggttaaggtttaagctgctgctgctccttctccagcctccgactggtgggctgcatatctttccttcagcaaagcaggactaattgtgtgtcccggagtcacctccctcaggttgcgggcctcaacccctccgaacctggcttccttgtcagtgacatgggttgtgtaattatcaggttagactgtgacgtgcctgatggagcctgacacataggtgctcaagaaatggtagcagcctttcccgttaagaaagttggaagggggccaggcgcggtgtctctcgcctgtaatcccagcactctgggagaccgaggcgggcggatcacttgaggtcaggagttcaagaccagcctggccagcatggcgaggccccgtctctactaaaaatacaaaaaaaaattagccgggcgcagtggctcgcgcctgtaatcccagctactcaggaggctgaggcaggagactcgcttgaacccgggaggcggagtttgtactgagccgagatcgcgccactgcactccagcttgggtgacacagcgagactccgtctcaaaaatgaaaaaagaaaagacgtatcggaagggagtgccgcccgcttactgacaaccactgctgggcaccggagagaccccagcagcaacatgattgggccggtgggggattccggttccccagtacctcaagccgcgcgggaaactcggtgactcgcaatcccctcgcccttccgcattgcgggttacttcggttgttaagtgacagggacttccgggaaggcccggaagtggcccggggctgtccgaccccgggagcccggcggtcggcgtaggggaggcggtggaactttgctcggtggccatggggagggattgcccggtggtggtttttcagtcgttgctgagcagctgaggtttatttttatgtattttattctgcatccagtcatccattaaagccaaagtttattaagttg

SEQ ID NO: 139694 - DNA, 457 bp, Homo sapiens
  Payload ID: 7391
  Gene Symbol: HDDC3
  Gene Name: HD domain containing 3
  ENST ID: ENST00000561036
  CDS Start-End: 1-457
agcggcggaaggaccccgaggggaccccctacatcaaccaccccatcggtgggcgcgtcggccgcggagcgccggctgcggcacctgggtggtgtggcacggatcctgacccacgaggcgggaatcactgacattgtggtgttacaggcggccctgctccatgacacggtggaggacacagacaccaccctggatgaggtggagctacactttggggcacaagtgcggcgcctggtggaggaggtaacagatgacaagactctgcccaagctggagagaaagaggctgcaggtggagcaagcgccccacagtagccccggggccaaactggtgaagctggcagacaagctgtacaatctgagggacctgaatcgctgcaccccagagggatggtcagaacatcgagtccaggaatacttcgagtgggcagcgcaggtggtgaaggggcttcagggaa

SEQ ID NO: 139695 - DNA, 1024 bp, Homo sapiens
  Payload ID: 7391
  Gene Symbol: HDDC3
  Gene Name: HD domain containing 3
  ENST ID: ENST00000559898
  CDS Start-End: 11-442
catccgcgcgatgggctctgaggcggcgcagctgctggaggctgccgacttcgcggctcgcaagcaccggcagcagcggcggaaggaccccgaggggaccccctacatcaaccaccccatcggtgtggcacggatcctgacccacgaggcgggaatcactgacattgtggtgttacaggcggccctgctccatgacacggtggaggacacagacaccaccctggatgaggtggagctacactttggggcacaagtgcggcgcctggtggaggaggtaacagatgacaagactctgcccaagctggagagaaagaggctgcaggtggagcaagcgccccacagtagccccggggccaaactggtgaagctggcagacaagctgtacaatctgagggacctgaatcgctgcaccccagagggtacgctttcgtatgggctgtaagggaaaagggagggggatgccgccttctgaagacacatgttggtcagttcccctgaaaaaccctgggcattcttaattcccaaattaatcctactggaccactctttgatcttctttcatacagtaaaaatacaatagctgggccaaggggaagttttcaggacagctcattccatcaggaactcatggccttgaaccaagcttgccaggaagtggggaaaaggcagtgctttccttgacatcacgctagcaagtttctgtcgactcttatgcaggatggtcagaacatcgagtccaggaatacttcgagtgggcagcgcaggtggtgaaggggcttcagggaacaaaccggcaactggaagaggctctaaagcatctgttcaagcagcgggggctgacaatctgatcagtgcttgaagctatccagaggcacaactccagcctcgttcaggccggacaggattcatacgccatcttttctgtgtctcctgagctccctccatccttcccagatattagaggccaaaaaaagacttgcattttttctcagtctgaaggtctcctgctaactaagctgagccc

SEQ ID NO: 139696 - DNA, 5614 bp, Homo sapiens
  Payload ID: 7392
  Gene Symbol: HECA
  Gene Name: hdc homolog, cell cycle regulator
  Uniprot ID: Q9UBI9
  ENST ID: ENST00000367658
  CDS Start-End: 286-1917
gccttttccctccggctcgggagcgtctcgcttgcgccccgggcccgcggcgcccgcgcggctgcgagcctcgggtggccgcgtgccggctccaggaagccggagagggcgcggcggccaggatggcgcggcacgggccgtgcggctagacgggagccgagggaaccgccggctcgcgccctccgttctttcccggagccggcttcacgcagggccgggaacggccgtgcctctgggatccgccttcgctgacgccgggcacctacctggacgcgagcgagcgagatgcccaaccccaaaaacagcaaaggcggccgcaaaaacaagcgcgccaacagcagcggcgacgagcaggaaaatggagccggggccctggcagcggcgggcgcggcgggagcggcggccgggggggccctggcggcggcggccggttgcggggcggcggcggcgggcgcgccgggcgccggaggcgcggcgggcgccggaggcgcggggactggcgccgcgaacgctgcggccgccgcgggggctgcggccgcgggcgatgccaaaaacgaagccccatgtgccactcccctgatctgcagcttcggtaggccggtggacctggagaaggacgactaccagaaggtggtgtgcaacaacgagcactgcccctgcagcacctggatgcacctgcagtgcttctacgagtgggagagcagcatcctcgtccagttcaactgcatcggccgcgcgcgcagctggaacgagaagcaatgccgccagaacatgtggacaaagaagggctacgacctggccttccgcttctgctcttgccgctgtggccagggccacttgaagaaggacacagactggtatcaggtgaagcggatgcaggacgagaaaaagaagaagtctggctccgagaagaacacagggaggcctcctggtgaggcggcggaggaggcaaaaaagtgcaggcccccaaataagccccagaaaggcccaagccacgacctcccccgccggcattccatggaccggcagaactcccaggagaaggcagtgggtgccgcagcctacggtgcccgttcccccggtggctccccgggccagtccccacccacgggctactccatcctctctcctgcccacttcagcggcccccgctcctccagatacctcggggagttcttaaagaacgccatccatctggagcctcacaagaaggccatggctgggggccatgtgttcagaaatgcccactttgattacagccctgcggggttggcagttcacagggggggacacttcgacacccccgtgcagttccttcggcggctggacctctccgaactcctcactcacatccccaggcataagctgaacactttccacgtgcgcatggaagacgatgcccaagtgggccagggggaagacttgcggaagttcattctggccgcgctcagtgccagccacagaaacgtggtaaactgtgccctgtgccaccgggcgctcccggtgttcgaacagttcccactggtggatggaactttgttcctaagcccgtcgagacatgatgagatcgaatatgatgttccttgtcaccttcaagggagactcatgcatctgtatgccgtgtgcgtggactgcctggaaggggttcacaagatcatctgcatcaagtgtaagtcacggtgggatggcagctggcaccagctgggcactatgtacacctacgacatcctggctgcctctccatgttgtcaggcccgcctgaactgtaagcactgtgggaagccggtgatcgacgtgaggatcgggatgcagtacttctccgaatatagcaacgtccagcagtgtccacactgtgggaacctggactaccacttcgtgaagccattttcctccttcaaagttctcgaagcttattgatgaaagctttgctttagtaatagctattttattgatattattactttattacatatcttttatagggaaacattctgtgacattaatttcctttctaatttaaaggagagttactttgttgtatgtgtgccactaaaataggggctgcccttgccctgtcttgattcccgagtgttaatctgtggttttgaccagagcccagatgggtaatcctgtgcatttgggttggggttcactcttaccaagaatctttgatgcagctttaagatggtggggaggatggggtgaatttaggaaaggaatttgtggttataaactaagagcttgataggagttggaaggaaactcttactaaaatgttaactttctaaaaaccttcttttagatcttccttgggcctttggaaaaatatgtgacaagtgaatgtaagtctgtgcctggagagctaatagtgcattagtctatctcagcctagtgttctgcagcacacatgggcaggcagtttactcacactgacaggtgacctgaaagtggcacaagtgctgtttctatcactattgtaatttgccagttcatttttcatgctgaaagtaatatccaaattgtaagacatatgaaagatattagtgttgcaaatatgtttaggtaaactgacctataacagaatatgtgaaatgaatttggaaataatgcaagaaggcagaactcaatcatttaaattgtgtctttgaagttggtaatatagcttttaaggagaacccatgaataacctgatttgggcagtgatgatttattacaggttgcactgttgaagtgtcatttggtgtcaggttcttctcacaggtaaatctttcagccacagaatctaactggtgagcttcagaaccaataattgccacatttattgtcctcaaaattgcttatggccatgtataaccaattaattctgagtttccaaaatcaaagatttgaccttaagagggaagggaaaaaagtgtgaaaggatgatgaagaaaataattttactatttcttttaaaagtatgttttggaaaatcaatgattttaatgcatagcagtatgtttgaaaaatagaccattctaaaaagcccatgataccttactgttgatgaaaaaggatgatcatatatatagaacttgattagtcagagcattgggcattccaaaatacagcctttggttcagtagattttaatgctttaaatagactgacgtcgcatacccttatagaattggaatatgatttctcaaaaattaatttgataatttcatgtatgatgtgcatatatgctaaaagaatgcagaaaatcattttatgaatagccaaatttggggttgatgtgaacattttatgttactcatttggtttatacttttttttttttttttttaactgtgtggtttttcttttcagaagtatttaggcaatattgcacgtgagtttcagttctttttttcttttttttgagatggagtctcactcttgtcacccaggctggagtgcagtagtgcgatctcagctcactgcaacctctgcctcctggattcaagcgattctcctgtcccagcctcccaggtagctgggactataggcacgtgccaccacacccggctaattttttgtatttttagtagagacagcgtttcaccatgttagctaggatggtctagatctcctgaccttgtgatctgcctgcctcggcctcccaaagtgctgggattacaggcgtgagtcactgtgcctggccaagtttcagttctatatgaagtatttgatgttttgtttgaaacaatacagcattaaagaaccaatgttattcactaatatcattcatctttcagtttggatgatttggtttgctgcatctaggttggtgtttgatcatctgaaaaaacatttcagtgggaagaaatgcataaaatgcctataagaagtagaaagtcattgaactgacagtgtttgatgcaactaaaagaggattgtaagacatagctttctgcaaacttgtctttaatgcacaaagctgtagtggtgaattaactatctccttattgattctctcctgtacccagatgcaaaaagtgctaagtttctcttgtcctcgtaataccatttggattttatttctgaatttaaatagtaaaatatttatgatgctgatctttaacccacctaaaattttatagtgaaacctgctttatattgttgttctgaagcttacaattgacctatacattgcattcagcaagctcctgaatttagaactgccgtcagtgtagtgtatgctgtgttccatgttgcctttttagatggctttctaccccctgaacaataaataggatgaggttttactgtaattgggtaaagtttactcttggacattatttcgatgctaaagtaaggattctgtggatgttacttaaagagaaaagcataagagcatgaagcatatctgggaatatcttttgcctttaagacgattcattcttgtctagagggaaaatctggctgatttgggaataaaatataatcgaatattcaacaccatgaagataaatcttattttggaaatctactgaccttaataccccaagcttgccctgaatactttgattggaattggaatatatcaaaaaaggttagtatttttgttgtagttaggatactaaaaggatattagttacccaagagatccaatttgtttttctgatgaatagtgttcagtaaaatgaagcagtcttaagagtgactaataatttcaaagtgatttttcgtctattcttaatattttttaattatttatttttaagagttttataccttgagcagatacaatgatctgctttagtgagaggacaatttctgattgattgttttctcttcaggccatctcacctcttcattctcttgttacatttgaagcagttgatataatgggtttatactttaaaagatagacatggtgccatgaagttggggagttgggtgaattatcccattctagttacagaggagctttccttaaatgccctttaacttctaggttttgttcaagaagttcattttctgagtaaaaggtattttcatatatgttgggggaaaattaactcatctaaaaagaatcttattaggtatttgaactctaaaactaacagataagacagatatgtaccttattagagcaccagaactaatttgctaagtcttttgtttagtcctgcaagactgatgcttaatacacagtctgttctcctgtgtctaggtcaggaactccagtttgcttttctgttttgtgtcctggtagcagctgttgagtaactttcattggaggttgggaaggaagtgaggagaaagtgttcttgtttagtgttttatttcctataataggatgctgcctaacccagttcatctctatgtcctgttcactgaatattccgggtaattgaaagaaaatataatggatgggctccattaaaaccagctcaaaaataaattcttgtcagtaaagatttcttgtcaagatgtcttggattgcacttttgttgaggaaagacagtgtaaatagttaaagaatgttgataaaattgaaacatttggttgtggaattgtgtgtggttttagagggtttctgtttgtgaaatgtatgtattaaaaataataaaattccagaaactaa

SEQ ID NO: 139697 - DNA, 1738 bp, Homo sapiens
  Payload ID: 7393
  Gene Symbol: HAND1
  Gene Name: heart and neural crest derivatives expressed 1
  Uniprot ID: O96004
  ENST ID: ENST00000231121
  CDS Start-End: 257-904
gcggtcttatataagccagatccgcaggggagtccgcagaagggttaaacaggtctttgggcttcggcgacctcgcccgcggcagaaaccggtaagaagacagtgggctgcgcgtctcattttcagccttgcccggactctcccaaagccggcgcccagtagtggctccagagcccacaggtggcccccggcagtctctggggcgcatggagcggcgttaatagggctggcggcgcaggccagtagccgctccaacatgaacctcgtgggcagctacgcacaccatcaccaccatcaccacccgcaccctgcgcaccccatgctccacgaacccttcctcttcggtccggcctcgcgctgtcatcaggaaaggccctacttccagagctggctgctgagcccggctgacgctgccccggacttccctgcgggcgggccgccgcccgcggccgctgcagccgccaccgcctatggtcctgacgccaggcctgggcagagccccgggcggctggaggcgcttggcggccgtcttggccggcggaaaggctcaggacccaagaaggagcggagacgcactgagagcattaacagcgcattcgcggagttgcgcgagtgcatccccaacgtgccggccgacaccaagctctccaagatcaagactctgcgcctagccaccagctacatcgcctacctgatggacgtgctggccaaggatgcacagtctggcgatcccgaggccttcaaggctgaactcaagaaggcggatggcggccgtgagagcaagcggaaaagggagctgcagcagcacgaaggttttcctcctgccctgggcccagtcgagaagaggattaaaggacgcaccggctggccgcagcaagtctgggcgctggagttaaaccagtgagccgaggcccgcgccgaggacctggccaggccagccactcctgaagccccgggaggagaggaaggcagcggcgaacgccaggctctgggctccggcgactggtgctacgcatcccgcggagcttctgctgagcgccggcaggtcgtcggctgcaaccacacacttggatcgcacgtgcaatgtcctttgattttttttaatacattaagagaaagagaaatatatatatatccacccccagcccaaccgagggcggcccttggcggcaacatgcaagaaggagggactgtcgaacccaagggctcaaagacgcactcttccacccttttggagcgaatttagaacctcagccctatctccatttccctatctggctctttctctcttgtccctccatatgatccgccccgacgccgtcttctctaattaaaatgcaataaggaatcaattcttttctgcctgagaaagagaaccagacgcaggaagatgaaaggctgccctttgttcttcgaatcgtggtggttttattttatttttctttttgtcgctgcacttcctgtttagttccaagggaaacactttctctctttctctgtctctctcttttcttccttcttttccttcctttttgtttctatctaaataaaagctttccctgtgttggaaagtttttatgtatttaaactacctaccatgcctgttgtgctcaggtgtttgttcatcctgccatccccaacccttttctacctcaagtctgtgtgaccactcacagcccccctcccttcgccaaagcagtgtctatgctcttgattaataaaacattttctgaaatca

SEQ ID NO: 139698 - DNA, 2780 bp, Homo sapiens
  Payload ID: 7394
  Gene Symbol: HAND2
  Gene Name: heart and neural crest derivatives expressed 2
  Uniprot ID: P61296
  ENST ID: ENST00000359562
  CDS Start-End: 941-1594
agctgtacatggagatcttgctgggaaaatccgcttgctcccctcacgtcgtccagcccaggagaaccaccgccgtcaccccggagcttcctcggccaccgcgcagagccctccgagagcccgagccgcggtcttcgagctccaaggctcattcagggccccagatccttgccccgaaaggagaggatctgagaaaatggatgcactgagacctctctgaaaaccctccgagagagcgcgagaggagcgaggacacgttactcgcagctaaaatcacatttaaggaccaaaacaacaacaaccaaaaatttcattaaaacaataagcgcccaagaacccagatcgggctggtggggggaggggaagaggcgggaaggggagggtcgcacggaggtagctttgcagtgagcagtcgaccccgccgccccccggcacagctggaccggctcctccagccgcggctcagactcgcccctggattccgggttagcttcggtgccaggaccgcggcccgggcttggattcccgagactccgcgtaccagcctcgcgggagccccggcacctttgtatgagcacgagaggattctgcctccgcgcagcagcccgggaagcaggagccgaagcgcgggccgtggagcaaggcgggaaccggaggcggcggcggcggcggccaggggcgcacggtgccaggaccagctcgccgcgccccatggggagccggcggccgcagcgctgctgaggcgggcccggctggccaggcggggggacggggcccgggctgcagcagccccctctgcggctgccgggcgggcccgggcgcccgggggctggggggtggggggtgggggaggacgccgagcgctgaggcaggggcccgggccgagggcgcggcggggctgcgcgcacgctggggcgcgtggaggggcgcggagggcgaaatgagtctggtaggtggttttccccaccacccggtggtgcaccacgagggctacccgtttgccgccgccgccgccgcagctgccgccgccgccgccagccgctgcagccatgaggagaacccctacttccatggctggctcatcggccaccccgagatgtcgccccccgactacagcatggccctgtcctacagccccgagtatgccagcggcgccgccggcctggaccactcccattacgggggggtgccgccgggcgccgggcccccgggcctgggggggccgcgcccggtgaagcgccgaggcaccgccaaccgcaaggagcggcgcaggactcagagcatcaacagcgccttcgccgaactgcgcgagtgcatccccaacgtacccgccgacaccaaactctccaaaatcaagaccctgcgcctggccaccagctacatcgcctacctcatggacctgctggccaaggacgaccagaatggcgaggcggaggccttcaaggcagagatcaagaagaccgacgtgaaagaggagaagaggaagaaggagctgaacgaaatcttgaaaagcacagtgagcagcaacgacaagaaaaccaaaggccggacgggctggccgcagcacgtctgggccctggagctcaagcagtgaggaggaggagaaggaggaggaggagagcgcgagtgagcaggggccaaggcgccagatgcagacccaggactccggaaaagccgtccgcgctccgctctgaggactccttgcatttggaatcatccggtttatttatgtgcaatttccttcccctctctttgaccccctttgaggcatctgctccccgtctccccctccaaaaaaaaagtggatatttgaagaaaagcattccatattttaatacgaagaggacactcccgtgtggtaagggatcccgtcgtctcatagattctgtgtgcgtgaatgttccctcttggctgtgtagacaccagcgttgccccccgccaacctactcaaccccttccagataaagacagtgggcactagtgcgtttgtgaagtgtatctttaatacttggcctttggatataaatattcctgggtattataaagttttatttcaaagcagaaaacagggccgctaacatttccgttggggtcggtatctagtgctatccattcatctgtggtcgttccctctttgaagatgtttccaacagccacttgttttgtgcacttccgtcctctaaaactaaatggaatttaattaatattgaaggtgtaaacgttgtaagtattcaataaaccactgtgttttttttttacaaaaaccttaatcttttaatggctgatacctcaaaagagttttgaaaacaaagctgttatacttgttttcgtaatatttaaaatattcagaagtaaactaaattatcatgattgcctctaactttattttaaagactcagtggttccaaccagtcaccctgacctgcggcctacgcaggaggaggaggtgctcttaaagagaagtgtccttgttacaaatcctgcaaatggtctggggtttgtcggtgtggtgtctccttccctcttcccccagctggagaacgctgagtagtctctagaaggaagatctgggctggagaacccagtccggcagttcgctcagaaggtgtaaaggtgctcttgctttcctgaagtcaatcagaagccatttcttgaggccgtcagtttttgtttggagagtgtttctggtggaggagttgtgaggagaaccccggcattattgctgcaacgggaactagtctggggtgtttaattcaaactatggggctttcatccaagaa

SEQ ID NO: 139699 - DNA, 706 bp, Homo sapiens
  Payload ID: 7394
  Gene Symbol: HAND2
  Gene Name: heart and neural crest derivatives expressed 2
  ENST ID: ENST00000503024
  CDS Start-End: 1-277
ccccaacgtacccgccgacaccaaactctccaaaatcaagaccctgcgcctggccaccagctacatcgcctacctcatggacctgctggccaaggacgaccagaatggcgaggcggaggccttcaaggcagagatcaagaagaccgacgtgaaagaggagaagaggaagaaggagctgaacgaaatcttgaaaagcacagtgagcagcaacgacaagaaaaccaaaggccggacgggctggccgcagcacgtctgggccctggagctcaagcagtgaggaggaggagaaggaggaggaggagagcgcgagtgagcaggggccaaggcgccagatgcagacccaggactccggaaaagccgtccgcgctccgctctgaggactccttgcatttggaatcatccggtttatttatgtgcaatttccttcccctctctttgaccccctttgaggcatctgctccccgtctccccctccaaaaaaaaagtggatatttgaagaaaagcattccatattttaatacgaagaggacactcccgtgtgcaggccgaatcagacccggcgtgggcgaattcagaagtgcccagggagagacaagctagaggctctgcggacttctgcgggcggctgacaacgcgagggcgaggggagaaagccatcaggtcctagacgtggaagaaaggagcctaccaaagtgttggagtaaac

SEQ ID NO: 139700 - DNA, 1337 bp, Homo sapiens
  Payload ID: 7394
  Gene Symbol: HAND2
  Gene Name: heart and neural crest derivatives expressed 2
  ENST ID: ENST00000621866
  CDS Start-End: 1-561
atgagtctggtaggtggttttccccaccacccggtggtgcaccacgagggctacccgtttgccgccgccgccgccgcagctgccgccgccgccgccagccgctgcagccatgaggagaacccctacttccatggctggctcatcggccaccccgagatgtcgccccccgactacagcatggccctgtcctacagccccgagtatgccagcggcaccgccaaccgcaaggagcggcgcaggactcagagcatcaacagcgccttcgccgaactgcgcgagtgcatccccaacgtacccgccgacaccaaactctccaaaatcaagaccctgcgcctggccaccagctacatcgcctacctcatggacctgctggccaaggacgaccagaatggcgaggcggaggccttcaaggcagagatcaagaagaccgacgtgaaagaggagaagaggaagaaggagctgaacgaaatcttgaaaagcacagtgagcagcaacgacaagaaaaccaaaggccggacgggctggccgcagcacgtctgggccctggagctcaagcagtgaggaggaggagaaggaggaggaggagagcgcgagtgagcaggggccaaggcgccagatgcagacccaggactccggaaaagccgtccgcgctccgctctgaggactccttgcatttggaatcatccggtttatttatgtgcaatttccttcccctctctttgaccccctttgaggcatctgctccccgtctccccctccaaaaaaaaagtggatatttgaagaaaagcattccatattttaatacgaagaggacactcccgtgtggtaagggatcccgtcgtctcatagattctgtgtgcgtgaatgttccctcttggctgtgtagacaccagcgttgccccccgccaacctactcaaccccttccagataaagacagtgggcactagtgcgtttgtgaagtgtatctttaatacttggcctttggatataaatattcctgggtattataaagttttatttcaaagcagaaaacagggccgctaacatttccgttggggtcggtatctagtgctatccattcatctgtggtcgttccctctttgaagatgtttccaacagccacttgttttgtgcacttccgtcctctaaaactaaatggaatttaattaatattgaaggtgtaaacgttgtaagtattcaataaaccactgtgttttttttttacaaaaaccttaatcttttaatggctgatacctcaaaagagttttgaaaacaaagctgttatacttgttttcgtaatatttaaaatattcagaagtaaactaaattatcatga

SEQ ID NO: 139701 - DNA, 9156 bp, Homo sapiens
  Payload ID: 7395
  Gene Symbol: HEG1
  Gene Name: heart development protein with EGF-like domains 1
  Uniprot ID: Q9ULI3
  ENST ID: ENST00000311127
  CDS Start-End: 69-4214
ccgctgcccgctgcccgctgccctcgccccgcgcgccgggcatgtgagcgcgggcgggcgccgtcaccatggcctcgccgcgcgcctcgcggtggccgccgccgctcctgctgctgttgctgccgctgctgctgctgccgccggcggcccccgggacgcgggacccgccgccttccccggctcgccgcgcgctgagcctggcgcccctcgcgggagcggggctggagctgcagctggagcgccgcccggagcgcgagccgccgcccacgccgccccgggagcgccgcgggcccgcgacccccggccccagctacagggcccctgagccaggcgccgcgacacagcggggaccctccggccgggcccccagaggcgggagcgcggatgctgcctggaaacattggccagaaagtaacactgaggcccatgtagaaaacatcaccttctatcagaatcaagaggacttttcaacagtgtcctccaaagagggcgtgatggttcagacctctgggaagagccatgctgcttcggatgctccagaaaacctcactctactcgctgaaacagcagatgctagaggaaggagcggctcttcaagtagaacaaacttcaccattttgcctgttgggtactcactggagatagcaacagctctgacttcccagagtggcaacttagcctcagaaagtcttcacctgccatccagcagttcagagttcgatgaaagaattgccgcttttcaaacaaagagtggaacagcctcggagatgggaacagagagggcgatggggctgtcagaagaatggactgtgcacagccaagaggccaccacttcggcttggagcccgtcctttcttcctgctttggagatgggagagctgaccacgccttctaggaagagaaattcctcaggaccagatctctcctggctgcatttctacaggacagcagcttcctctcctctcttagacctttcctcatcttctgaaagtacagagaagcttaacaactccactggcctccagagctcctcagtcagtcaaacaaagacaatgcatgttgccaccgtgttcactgatggtggcccgagaacgctgcgatctttgacggtcagtctgggacctgtgagcaagacagaaggcttccccaaggactccagaattgccacgacttcatcctcagtccttctttcaccctctgcagtggaatcgagaagaaacagtagagtaactgggaatccaggggatgaggaattcattgaaccatccacagaaaatgaatttggacttacgtctttgcgttggcaaaatgattccccaacctttggagaacatcagcttgccagcagctctgaggtgcaaaatggaagtcccatgtctcagactgagactgtgtctaggtcagtcgcacccatgagaggtggagagatcactgcacactggctcttgaccaacagcacaacatctgcagatgtgacaggaagctctgcttcatatcctgaaggtgtgaatgcttcagtgttgacccagttctcagactctactgtacagtctggaggaagtcacacagcattgggagataggagttattcagagtcttcatctacatcttcctcggaaagcttgaattcatcagcaccacgtggagaacgttcgatcgctgggattagctacggtcaagtgcgtggcacagctattgaacaaaggacttccagcgaccacacagaccacacctacctgtcatctactttcaccaaaggagaacgggcgttactgtccattacagataacagttcatcctcagacattgtggagagctcaacttcttatattaaaatctcaaactcttcacattcagagtattcctccttttttcatgctcagactgagagaagtaacatctcatcctatgacggggaatatgctcagccttctactgagtcgccagttctgcatacatccaaccttccgtcctacacacccaccattaatatgccgaacacttcggttgttctggacactgatgctgagtttgttagtgactcctcctcctcctcttcctcctcctcctcttcttcttcttcagggcctcctttgcctctgccctctgtgtcacaatcccaccatttattttcatcaattttaccatcaaccagggcctctgtgcatctactaaagtctacctctgatgcatccacaccatggtcttcctcaccatcacctttaccagtatccttaacgacatctacatctgccccactttctgtctcacaaacaaccttgccacagtcatcttctacccctgtcctgcccagggcaagggagactcctgtgacttcatttcagacatcaacaatgacatcattcatgacaatgctccatagtagtcaaactgcagaccttaagagccagagcaccccacaccaagagaaagtcattacagaatcaaagtcaccaagcctggtgtctctgcccacagagtccaccaaagctgtaacaacaaactctcctttgcctccatccttaacagagtcctccacagagcaaacccttccagccacaagcaccaacttagcacaaatgtctccaactttcacaactaccattctgaagacctctcagcctcttatgaccactcctggcaccctgtcaagcacagcatctctggtcactggccctatagccgtacagactacagctggaaaacagctctcgctgacccatcctgaaatactagttcctcaaatctcaacagaaggtggcatcagcacagaaaggaaccgagtgattgtggatgctaccactggattgatccctttgaccagtgtacccacatcagcaaaagaaatgaccacaaagcttggcgttacagcagagtacagcccagcttcacgttccctcggaacatctccttctccccaaaccacagttgtttccacggctgaagacttggctcccaaatctgccacctttgctgttcagagcagcacacagtcaccaacaacagtgtcctcttcagcctcagtcaacagctgtgctgtgaacccttgtcttcacaatggcgaatgcgtcgcagacaacaccagccgtggctaccactgcaggtgcccgccttcctggcaaggggatgattgcagtgtggatgtgaatgagtgcctgtcgaacccctgcccatccacagccatgtgcaacaatactcagggatcctttatctgcaaatgcccggttgggtaccagttggaaaaagggatatgcaatttggttagaaccttcgtgacagagtttaaattaaagagaacttttcttaatacaactgtggaaaaacattcagacctacaagaagttgaaaatgagatcaccaaaacgttaaatatgtgtttttcagcgttacctagttacatccgatctacagttcacgcctctagggagtccaacgcggtggtgatctcactgcaaacaaccttttccctggcctccaatgtgacgctatttgacctggctgataggatgcagaaatgtgtcaactcctgcaagtcctctgctgaggtctgccagctcttgggatctcagaggcggatctttagagcgggcagcttgtgcaagcggaagagtcccgaatgtgacaaagacacctccatctgcactgacctggacggcgttgccctgtgccagtgcaagtcgggatactttcagttcaacaagatggaccactcctgccgagcatgtgaagatggatataggcttgaaaatgaaacctgcatgagttgcccatttggccttggtggtctcaactgtggaaacccctatcagcttatcactgtggtgatcgcagccgcgggaggtgggctcctgctcatcctaggcatcgcactgattgttacctgttgcagaaagaataaaaatgacataagcaaactcatcttcaaaagtggagatttccaaatgtccccgtatgctgaataccccaaaaatcctcgctcacaagaatggggccgagaagctattgaaatgcatgagaatggaagtaccaaaaacctcctccagatgacggatgtgtactactcgcctacaagtgtaaggaatccagaacttgaacgaaacggactctacccggcctacactggactgccaggatcacggcattcttgcattttccccggacagtataacccgtctttcatcagtgatgaaagcagaagaagagactacttttaagtccaggagagagagggactcattgctctgagccagtcacctgggacctctgctcagaggaccgcaccaggaggctgcgcccaggatttgtcgggagccacgctgagtggcaagcaggaagagggacaggcatgcggggcgtgaccacagtggaggagacaggtggatgtggaaccacaggctgctcattcagcacctttgttgttactgtgaacgtgaatgtgggccagtatcaagagagtctctctgagtgactgcaccatggcactggcaccagggcgactattagccagggcagaccactagacttcagtgcagggacctggttttcccttcgtttgcactttagtaaattgggtgggaggtttccttttggatctgttttgagactgttccagaaagaaggcttcctttcccgagacacttccataggcagcaatttggtgattcatttgcagcaaaatactggcttgttaattattttcctgcccagcgcctgcgtgctaaacaacagatgaggatgagcgtaccactgaagtctgaagatgtcgccattgaacggacagtgttttcatatgtttctaggttgtcttatgctacagtttccaagccagcccccacagtgaggaaatgtgtgaggcaccgcacacaactgcaatgtgttttttaagtcaaggtgacacatgtatttaagattttttttttaaatctctttgcagttaaatctcactttttcaaacaagcctggatcagggcaaaacaacttatatttggttttagctggaggctcagcaggcagattgcaggcaggggggcacttttcatccatgagggcccagcctggggcctgggactcgatcaccattgtggaggccagaggcagctgcgtatggaggagaaatgtcaaactgaacgcaggtttcaccactctaggaaagcagcttgttgagcccctgcagctggatgtggttagagggatgggctgaataggcaggttagatttcctgcatcaacagtgctttgggaagctgtgtggattcctgaggaagaacagggagccgagatggagccacacatgagtttgctcaccggctactgcagcactttgtacccagaatctcatgtccacaaaccccatgtaaactttcaaccactcaaagctgtttattcggctgaagaaataacttttttttctcacccagtcatttgtacctcttcatatggctatgtcgcaccctccagaaacgtggttatacttccagtcagtgtgggagaactgaagacttccggttggtcgaggaactgagggttgaccttcgggaaggaagttccactcatcttatttattatgcctgtgatgtgggtcctgccagggagacatccagtactcggtgtctttaattgccacctggggaactgtgtttattggccttctttggggcatcctggttttggatgaagtgaggggaatacagaggtaaaagaattgtctccaccctgaagcggggagtcccgcttcacatttctggaaatggtgcagccactggggacagttctgccccgggcatggttgtttcttcaaggtcctctaaatataatccctattcttacataatccttggccctgatggttttaagcaagaactcctgtgtcccatggtctccaccactcaccatcaccctgctgtagcaagagtcctagtcaggggaggtgcattttagtagttacattgcacttatccatgagataaataaaaggagaactgtttttatcagtggaggctaacctaaaatttcaaagtgtcgcctttttgaaatcttgggcctctctctctgtagaaccaatggccctttgtggctcacggcctcgcacctaactggagagttctgagctcctgcagctcacctgagcccacagactaggcttcttggctccttccgcagcatgcctgctcacccccagaacccgcagctgtgggaagagccatgtagggaggctattcccaggcatacacttccactgccttcagctgacgtcacagctgacaaatcatctcctctatcggagccagaagacttcagctccacaaaatgaagtgttctgtcctgaaaacattcttgggaagaatcccaacatcgagaaaacggtgtcctgtgagttccaacaatgcttcttgttcatgggtttcttccgtatggagtggattaagagtgttttattttgttgttctaactgagaaaaaaaggaggcacccacaaggttgaggtcacacagtctccacagtttccaggaggcgtttgggggtggggaaggcacctccagagcatgaggctctaaggggacatgagtaaagcatgtctgtgacccagtgaggaagggagaggccagctgcactcctgcacggggttcctagctgcagaagggtcccgcctaggccgaggggaaacacctgatagcagaagaggcctggatgcacacctggcacgccgaggctctccgcccagacacagtgctccatgtcagcccctgcacctggggtgtgtgattcacgtgcacagatgccacaatcctgcaccaatatcccacagatgggggaaggtgagaggaaggggcaagtgatgtgtaactgctcaagagatgcttaaacctccatagagaggagccgggcgcaggggcatctgtgtgtcccgtcacacactgcagcagggaagggtggctggctggctccctggcatcagtggtttggtttaagctccagagggtcttattgccattgtcttttcctctgccccttgagccagcctaaggccctggagtctgtttctttaggcggatgaactgacatgctcctaccatgaccaggctctgggcaaggctcctcacagtatccttgagaggtgggcatggaagtgcccatttctcaggtacagaaaccttcagagaggataaatagcttgccctgtagaagcaggactgaaacccttgtctgcctgactcccccagctactctgcccactgtagccccctgccttactgtcctggcacacccctcaccatcctgtataccttaaatatcaaagagggcaagagagaaagggctttaaagataagttatttttttaaggaaccttaatattatttttaagaagtaaccaaattagtgacgtgaaatgcaaaaaaaaaaaaaaaaaaatgctgactacccttttgaaaatgtgctttcagattgttttttatatgtaattcttagacacttgtcattaagaaaatagtggctggcttgtgctcagcaagaagcacactggcacgtggctttggtataggaagtggaaggcaaggacctgggtttctgacaagtgcagtcagacatacacatccatctgagagctgcttgccttgttcccgtggtaaggccatggctcccacatactggaagcatatttttgtgaactgttttcagaattgggaacatattcagtggaatgtcttaaacgctgacacatcttcctcctttgaggggaagtatattttcagaagcagctaagacatttagagccaaaattgctgataggtggttcagtcaagttggctgatggcatctgaggtcaaaaactaagatgtgacgattgagttcttaaagaggtaactcttaaagtgggcccaagggagaaggcagcatctttggactcctaggctggatggctacccaagaatatgccattgaaggatgacacctattcagatgtgaaagttcccagagcaggcacctttgggtcacccaccacgtgtggctttttggtgcctgcatgaaactgtgttgccccctggtgagatgcccgggtgtcctgtaagccgatttaactctgcctgaggaagaggagctgtccactccagttgcccttggctaagtttagcctaacacacagggttttgacccatagttctaaaatacacaaattttgagactacagcacttctttggaaagaggaagaatgcaaagttcagtatttcaatactttgtattttacttgaaattacccttagtagcatcttttttttcctgtctgaaagcttttgtgtggatgagaagggacatttcatttcctcccttaacaaagtgtcattctgaggttctcatgtgtgtttttggaaatagagatactggttttgtagagtttgcctttgggtatgttttctttttttcttaaatctccaaggaagagaactgactaaaatagtaggaacatgaaagtattaaatgccaattaatttgttgtagtaaagtatcttcattagcgttatactccatcatatctggtgtaaactgctcacagaaaaccctatgaaaccaaagggggaccattcaggtctaaaaagcgacaggtccgagactgggtctgtcacctgggcattttcaaagaggacattttgaagaatttgcatattcagatttttaaaatgcacttaacatacttcattacagatttcttgggtagggaggatgggataggccagggatgggatggagtcagttctgcctgggaaactaatccgaatcatttacctttctgtattaaccttggcctgtcctaaaaagagaacgactgtttcatcatgagttgctctgagttttgttaatgtttgtgttggtggattgacggttaaatgaagcatttagctggaatatgaactttgggagttttcatgttgtcctggatttctctttgtaaacctttaaaccttagcccctggttgattgtgttaaacccattatgagaatgttatttaaagttgtattataattgcaacctccactaattattcagtactgtagcagcaaagtattatttgtaagaatttggttatttttatacttatatccactctaagtctggcgttctagtcagtaaaatgatgcaataaaattaatatcattttca

SEQ ID NO: 139702 - DNA, 532 bp, Homo sapiens
  Payload ID: 7395
  Gene Symbol: HEG1
  Gene Name: heart development protein with EGF-like domains 1
  ENST ID: ENST00000482699
  CDS Start-End: 1-192
agaaagaataaaaatgacataagcaaactcatcttcaaaagtggagatttccaaatgtccccgtatgctgaataccccaaaaatcctcgctcacaagaatggggccgagaagctattgaaatgcatgagaatggaagtaccaaaaacctcctccagatgacggatgtgtactactcgggagcctttttttgagatccaactggtcacttgaggattgctgttggcctcctggtttggggtcctaactccacctgcaactagatggtcgtaggaccttataaagcctacaagtgtaaggaatccagaacttgaacgaaacggactctacccggcctacactggactgccaggatcacggcattcttgcattttccccggacagtataacccgtctttcatcagtgatgaaagcagaagaagagactacttttaagtccaggagagagagggactcattgctctgagccagtcacctgggacctctgctcagaggaccgcaccaggaggctgcgcccaggatttgtcgggagcc

SEQ ID NO: 139703 - DNA, 3973 bp, Homo sapiens
  Payload ID: 7395
  Gene Symbol: HEG1
  Gene Name: heart development protein with EGF-like domains 1
  ENST ID: ENST00000487661
  CDS Start-End: 1-798
gcctatagggagtccaacgcggtggtgatctcactgcaaacaaccttttccctggcctccaatgtgacgctatttgacctggctgataggatgcagaaatgtgtcaactcctgcaagtcctctgctgaggtctgccagctcttgggatctcagaggcggatctttagagcgggcagcttgtgcaagcggaagagtcccgaatgtgacaaagacacctccatctgcactgacctggacggcgttgccctgtgccagtgcaagtcgggatactttcagttcaacaagatggaccactcctgccgagcatgtgaagatggatataggcttgaaaatgaaacctgcatgagttgcccatttggccttggtggtctcaactgtggaaacccctatcagcttatcactgtggtgatcgcagccgcgggaggtgggctcctgctcatcctaggcatcgcactgattgttacctgttgcagaaagaataaaaatgacataagcaaactcatcttcaaaagtggagatttccaaatgtccccgtatgctgaataccccaaaaatcctcgctcacaagaatggggccgagaagctattgaaatgcatgagaatggaagtaccaaaaacctcctccagatgacggatgtgtactactcgcctacaagtgtaaggaatccagaacttgaacgaaacggactctacccggcctacactggactgccaggatcacggcattcttgcattttccccggacagtataacccgtctttcatcagtgatgaaagcagaagaagagactacttttaagtccaggagagagagggactcattgctctgagccagtcacctgggacctctgctcagaggaccgcaccaggaggctgcgcccaggatttgtcgggagccacgctgagtggcaagcaggaagagggacaggcatgcggggcgtgaccacagtggaggagacaggtggatgtggaaccacaggctgctcattcagcacctttgttgttactgtgaacgtgaatgtgggccagtatcaagagagtctctctgagtgactgcaccatggcactggcaccagggcgactattagccagggcagaccactagacttcagtgcagggacctggttttcccttcgtttgcactttagtaaattgggtgggaggtttccttttggatctgttttgagactgttccagaaagaaggcttcctttcccgagacacttccataggcagcaatttggtgattcatttgcagcaaaatactggcttgttaattattttcctgcccagcgcctgcgtgctaaacaacagatgaggatgagcgtaccactgaagtctgaagatgtcgccattgaacggacagtgttttcatatgtttctaggttgtcttatgctacagtttccaagccagcccccacagtgaggaaatgtgtgaggcaccgcacacaactgcaatgtgttttttaagtcaaggtgacacatgtatttaagattttttttttaaatctctttgcagttaaatctcactttttcaaacaagcctggatcagggcaaaacaacttatatttggttttagctggaggctcagcaggcagattgcaggcaggggggcacttttcatccatgagggcccagcctggggcctgggactcgatcaccattgtggaggccagaggcagctgcgtatggaggagaaatgtcaaactgaacgcaggtttcaccactctaggaaagcagcttgttgagcccctgcagctggatgtggttagagggatgggctgaataggcaggttagatttcctgcatcaacagtgctttgggaagctgtgtggattcctgaggaagaacagggagccgagatggagccacacatgagtttgctcaccggctactgcagcactttgtacccagaatctcatgtccacaaaccccatgtaaactttcaaccactcaaagctgtttattcggctgaagaaataacttttttttctcacccagtcatttgtacctcttcatatggctatgtcgcaccctccagaaacgtggttatacttccagtcagtgtgggagaactgaagacttccggttggtcgaggaactgagggttgaccttcgggaaggaagttccactcatcttatttattatgcctgtgatgtgggtcctgccagggagacatccagtactcggtgtctttaattgccacctggggaactgtgtttattggccttctttggggcatcctggttttggatgaagtgaggggaatacagaggtaaaagaattgtctccaccctgaagcggggagtcccgcttcacatttctggaaatggtgcagccactggggacagttctgccccgggcatggttgtttcttcaaggtcctctaaatataatccctattcttacataatccttggccctgatggttttaagcaagaactcctgtgtcccatggtctccaccactcaccatcaccctgctgtagcaagagtcctagtcaggggaggtgcattttagtagttacattgcacttatccatgagataaataaaaggagaactgtttttatcagtggaggctaacctaaaatttcaaagtgtcgcctttttgaaatcttgggcctctctctctgtagaaccaatggccctttgtggctcacggcctcgcacctaactggagagttctgagctcctgcagctcacctgagcccacagactaggcttcttggctccttccgcagcatgcctgctcacccccagaacccgcagctgtgggaagagccatgtagggaggctattcccaggcatacacttccactgccttcagctgacgtcacagctgacaaatcatctcctctatcggagccagaagacttcagctccacaaaatgaagtgttctgtcctgaaaacattcttgggaagaatcccaacatcgagaaaacggtgtcctgtgagttccaacaatgcttcttgttcatgggtttcttccgtatggagtggattaagagtgttttattttgttgttctaactgagaaaaaaaggaggcacccacaaggttgaggtcacacagtctccacagtttccaggaggcgtttgggggtggggaaggcacctccagagcatgaggctctaaggggacatgagtaaagcatgtctgtgacccagtgaggaagggagaggccagctgcactcctgcacggggttcctagctgcagaagggtcccgcctaggccgaggggaaacacctgatagcagaagaggcctggatgcacacctggcacgccgaggctctccgcccagacacagtgctccatgtcagcccctgcacctggggtgtgtgattcacgtgcacagatgccacaatcctgcaccaatatcccacagatgggggaaggtgagaggaaggggcaagtgatgtgtaactgctcaagagatgcttaaacctccatagagaggagccgggcgcaggggcatctgtgtgtcccgtcacacactgcagcagggaagggtggctggctggctccctggcatcagtggtttggtttaagctccagagggtcttattgccattgtcttttcctctgccccttgagccagcctaaggccctggagtctgtttctttaggcggatgaactgacatgctcctaccatgaccaggctctgggcaaggctcctcacagtatccttgagaggtgggcatggaagtgcccatttctcaggtacagaaaccttcagagaggataaatagcttgccctgtagaagcaggactgaaacccttgtctgcctgactcccccagctactctgcccactgtagccccctgccttactgtcctggcacacccctcaccatcctgtataccttaaatatcaaagagggcaagagagaaagggctttaaagataagttatttttttaaggaaccttaatattatttttaagaagtaaccaaattagtgacgtgaaatgc

SEQ ID NO: 139704 - DNA, 793 bp, Homo sapiens
  Payload ID: 7396
  Gene Symbol: HEATR1
  Gene Name: HEAT repeat containing 1
  ENST ID: ENST00000366579
  CDS Start-End: 100-462
ggtaccatgtgggaagcgctgtgaagagttgttgccttccaagatatacccaaattcccagttccagcccgtgtcattaaaactccgctggcgtgaaagatgacgtccttagcccagcagctgcaacgactcgccctccctcaaagtgatgccagcctcttatctagagatgaagttgcttctttgttatttgaccctaaggaagcggccacaatcgacagggacaccgccttcgccattggatgtactggcctggaagagttgcttggaattgatccttcctttgagcagtttgaagcaccgttgttcagtcagctagcaaaaaccttggagcgaagtgttcagaccaaagcagtaaacaaacagttggatgaaaacatttcattattccttattcacttgtcgccttacttcctgcttaagccagcacagaagtgtctggagtggttgattcacaggtagctaatagaattacagaaataactatgggttaatcactttggtcttgtaaaaaattaagtagttgagaacttatcaaattaaagctgaaaaattaggtatattaagagattgatacaatgtccattgtgtgagataagcatgctcttctgcctttaaattcttttttgttgatagtgaaaagtagaactactggtgattttgagtaaatggtctaacctcattagtttttttttgagatagagtcttgctgggcactcaggctggagtgcaatattgaaatcttggctcactgcaacctctgcctcccaggttcaagtgattctcccacctc

SEQ ID NO: 139705 - DNA, 6538 bp, Homo sapiens
  Payload ID: 7396
  Gene Symbol: HEATR1
  Gene Name: HEAT repeat containing 1
  ENST ID: ENST00000366581
  CDS Start-End: 116-6307
gagggttgggctccttggtaccatgtgggaagcgctgtgaagagttgttgccttccaagatatacccaaattcccagttccagcccgtgtcattaaaactccgctggcgtgaaagatgacgtccttagcccagcagctgcaacgactcgccctccctcaaagtgatgccagcctcttatctagagatgaagttgcttctttgttatttgaccctaaggaagcggccacaatcgacagggacaccgccttcgccattggatgtactggcctggaagagttgcttggaattgatccttcctttgagcagtttgaagcaccgttgttcagtcagctagcaaaaaccttggagcgaagtgttcagaccaaagcagtaaacaaacagttggatgaaaacatttcattattccttattcacttgtcgccttacttcctgcttaagccagcacagaagtgtctggagtggttgattcacaggttccatatacatctctataatcaagatagcctcattgcttgtgttctgccataccacgagacaagaatatttgtgcgagtcatacagcttctaaaaattaataattcaaagcacagatggttctggttgttgccagttaagcaatctggagtgccgttagctaaaggaactttgattacccactgctacaaagatcttggattcatggatttcatttgcagtttggtgacaaaatctgtgaaggtttttgctgagtacccgggcagctcagctcagttgagggtgctcttggctttctatgcttctaccatagtgtcggcgctggtagctgcagaggacgtatcagacaatatcatcgccaaactatttccctatatccaaaagggattgaaatcatctttaccagattacagagctgcaacatacatgataatatgtcagatttctgtgaaagtgaccatggaaaatacctttgtgaattcattggcatcacagatcatcaaaacattgaccaagattccctctttgatcaaggatgggttaagttgcttgatagtgctcctgcagagacagaagccagagagccttgggaaaaagccattccctcacttatgtaatgttcctgatcttattacaatacttcatgggatttctgaaacttacgatgtcagtcctcttctgcattacatgcttccccatctggtcgtctccatcattcatcatgttacaggagaagaaactgaaggaatggatggtcaaatctacaagagacacttagaagctatacttacaaaaatatcactgaagaacaacttagaccatttgttggctagccttctatttgaagagtatatttcatatagttcacaggaagaaatggattctaataaagtgtctttgcttaatgaacaatttcttccactcattaggcttttagaaagcaaataccccagaacattagatgttgtattagaggaacacttaaaggaaattgcagatctgaaaaaacaagagcttttccatcagtttgtttctctttctacaagtggaggaaagtatcagtttttagcagattctgatacttctttgatgctcagcctgaatcatccacttgctcctgtgagaattctggccatgaatcatttgaaaaagatcatgaaaacatcaaaggagggtgttgatgaatctttcataaaagaagctgttttagcccgattaggtgatgataatatagatgttgttttgtcggctataagtgcttttgagattttcaaagaacacttcagttcagaagtgacgatttcaaatcttctgaatctctttcaaagagcagaactttcaaagaatggagaatggtacgaggtacttaagatagccgctgacatattaattaaagaagagatactgagtgaaaatgatcagttgtcaaatcaggtggttgtatgtttgctgccatttatggttatcaataatgatgatacggaatctgctgagatgaaaattgctatatatttatcaaaatcaggaatctgctccctgcaccctctattaagaggctgggaagaagctcttgaaaatgtaattaaaagcacaaagccaggaaaactaatcggtgtagcaaatcagaagatgattgagttgttggctgataatataaatttaggagatccttcttcaatgttaaagatggtggaggatttaataagcgtgggtgaggaggagtcctttaacctgaagcagaaagtaacgtttcatgtgatcctgtctgtgctcgtctcttgttgttcatctttaaaagaaacccactttccatttgcgataagagtcttcagtttgttgcagaaaaaaataaagaagcttgaaagtgtcattactgcagtggaaatcccctcagaatggcacattgaactgatgttagacagagggatcccagtggagctgtgggcacattatgtagaagagctcaacagcactcagagggtggccgtggaggactcggtttttcttgtattttccttgaaaaaatttatttatgcactgaaagctcctaaatcttttcctaaaggtgatatatggtggaatcctgaacaactgaaagaagacagcagggactatctgcacttgctcattgggctgtttgagatgatgctcaatggtgccgatgctgttcatttcagagttctgatgaaacttttcataaaggtgcatctagaagatgtttttcagttattcaagttctgttctgttttatggacctatggttctagcctttcaaatccactaaactgcagtgtgaaaacagtgctgcagactcaagctctttatgtgggctgtgcaatgctttcttctcagaagacacagtgtaaacaccaactggcatccatatcttctccagtggtgacatctttactcattaacctgggaagccccgtaaaagaagttcgtagggctgccattcagtgtctccaggccctcagtggagtggcatccccgttttatctgataatagatcatttgatttctaaagcagaggagatcacttcagatgctgcctatgttattcaggatttggctactttatttgaggaactacagagagaaaagaaactgaaatctcatcagaagttgtctgaaactttgaaaaacttacttagttgtgtgtatagttgcccatcttatatagcaaaagatttgatgaaagtacttcagggagtcaacggtgagattacaaaaccattttttgcagccatatcagatgaaaaagttcagcagaagcttttaagaatgttgtttgatttattggtgaactgtaaaaactcacattgtgctcagactgtcagcagtgtttttaaagggatttccgttaatgctgaacaagtccgaatagaactggagccaccagataaagctaaacccttgggcacagttcagcaaaaaagaaggcaaaaaatgcagcagaaaaaatcacaagatctagaatctgttcaggaagttggaggttcttactggcaaagagtaactctcatcctggaattactgcagcacaaaaagaagctcagaagtcctcagatattggtgccaactctttttaacttgctatcaagatgtttagaacccttgccacaagagcagggaaatatggaatacaccaaacaattaattcttagttgtctgctcaacatctgccaaaaactatctccagatggtggcaaaatacccaaagatattttagatgaggagaagttcaacgtggagttgatagttcagtgcatccgcctttcggagatgccgcagacccatcaccatgcccttttacttttgggcactgttgctggaatatttccggataaagttttacacaatatcatgtctatttttacatttatgggagccaatgtcatgcgcctagatgatacttacagttttcaagttattaacaagacagtgaaaatggttattcccgcacttattcagtctgatagtggagattctatagaagtttcaagaaacgttgaagagattgtggtaaaaatcattagtgtatttgtggatgcgctgccacacgtcccggagcacaggcgcctgcccatccttgttcaacttgttgatacactgggtgcagagaaattcctctggattctcctcatcttgctttttgaacagtatgtcacaaaaacagtgctggcggctgcctatggcgaaaaggatgctattttagaagcagacactgaattttggttttcagtctgttgtgagtttagtgtccagcatcagatacaaagcttgatgaatatcctccagtacttactaaagctgccagaggaaaaagaagaaaccattcccaaagcagtgtcatttaataagagtgaatcacaagaagaaatgctacaggtttttaatgtagagactcacactagcaagcaactgcggcattttaaatttttgtcagtgtccttcatgtctcagctcctgtcttccaataattttctgaaaaaggtagttgagagtggtggtcctgagattttaaaaggccttgaagagaggttgctggagaccgttctcggctatatcagtgcagttgcacagtccatggaaaggaacgcagacaaactcaccgtgaagttctggcgcgcgctccttagtaaagcttacgacctgttagataaggtcaatgccttgctgcccacagagacattcattcctgtgatcagagggctggtgggcaatcccctgccatctgttcgccgcaaagcgctggaccttttgaataacaagctgcagcaaaatatatcctggaagaagacaatagttacccgtttcctaaaactggttccagaccttttggccattgtgcagcgtaagaaaaaggaaggggaagaagaacaagcaatcaacagacagacagcgttgtataccttaaagcttttatgcaagaattttggtgcagaaaatccagatccttttgtcccagtgctgaacactgctgtgaaactgattgctccagagagaaaggaggagaagaatgtcctgggaagcgcgctgctgtgcatagcagaggtgacctccaccctggaggcgctggccatcccccagcttcccagcctgatgccatcgttgctgacaacaatgaagaacaccagcgagctggtctccagcgaggtctacctgctcagtgccttggctgctctgcagaaggttgtggagactctcccgcacttcatcagcccctatctggaaggcattctctcccaggtgattcatctggagaaaatcactagtgaaatgggttctgcgtcacaggctaatatccgtctcacatctcttaaaaagacactggctaccacacttgcaccccgagtcctgttgcccgccatcaaaaaaacttacaagcagattgagaagaactggaagaatcacatgggtccgtttatgagcatcttgcaagagcatattggggtgatgaagaaggaagagctcacctcccatcagtctcagctaaccgcctttttcctggaagccctggacttccgagcccagcactctgagaacgatctggaggaagttggaaaaacggaaaattgtatcattgactgtctagtagccatggttgtcaaactttccgaggtcacattcaggcccctgttcttcaagctgtttgattgggctaaaacagaagatgccccaaaggacaggttgttgacattttacaacttggcagattgcattgctgaaaagctgaaagggctttttactctgtttgccggccacttagtgaagccttttgctgacaccttgaaccaggtgaacatctccaaaacagatgaagcattttttgactctgaaaatgaccctgaaaagtgctgcttgctgttgcagtttattttgaactgtttatacaaaatcttcctttttgatacccagcattttataagtaaagagagagcagaagccttgatgatgcctctggtggatcagctggaaaacaggcttgggggagaagagaaattccaggaacgggtgacaaagcacctgataccatgcatcgcacagttttcggtggccatggcggatgactctctttggaaaccactgaactaccagattctgctaaagacgagagactcctcgcctaaggttcgatttgctgctttgattactgtgttagcactggctgaaaaactaaaggagaattatattgtcttgctaccagaatccattcctttcttagcagagttgatggaagatgaatgtgaagaagtagaacatcagtgccaaaagactattcagcaactggaaactgtcctgggagagccactccagagctatttctaagactttctgtggtgtttcatactctactcagagttcacactcatatttcatatttttatttttgggtgttgggtgccatgttacttttggtgccttaatacacctacttggattacttacaaatgttttatcacttctttacaaaatccccacctggcttgtgctgccacataagcctctcctgcctatcgtatagagctgcagaaagagtaaatgatacacggtattttt

SEQ ID NO: 139706 - DNA, 8447 bp, Homo sapiens
  Payload ID: 7396
  Gene Symbol: HEATR1
  Gene Name: HEAT repeat containing 1
  Uniprot ID: Q9H583
  ENST ID: ENST00000366582
  CDS Start-End: 116-6550
gagggttgggctccttggtaccatgtgggaagcgctgtgaagagttgttgccttccaagatatacccaaattcccagttccagcccgtgtcattaaaactccgctggcgtgaaagatgacgtccttagcccagcagctgcaacgactcgccctccctcaaagtgatgccagcctcttatctagagatgaagttgcttctttgttatttgaccctaaggaagcggccacaatcgacagggacaccgccttcgccattggatgtactggcctggaagagttgcttggaattgatccttcctttgagcagtttgaagcaccgttgttcagtcagctagcaaaaaccttggagcgaagtgttcagaccaaagcagtaaacaaacagttggatgaaaacatttcattattccttattcacttgtcgccttacttcctgcttaagccagcacagaagtgtctggagtggttgattcacaggttccatatacatctctataatcaagatagcctcattgcttgtgttctgccataccacgagacaagaatatttgtgcgagtcatacagcttctaaaaattaataattcaaagcacagatggttctggttgttgccagttaagcaatctggagtgccgttagctaaaggaactttgattacccactgctacaaagatcttggattcatggatttcatttgcagtttggtgacaaaatctgtgaaggtttttgctgagtacccgggcagctcagctcagttgagggtgctcttggctttctatgcttctaccatagtgtcggcgctggtagctgcagaggacgtatcagacaatatcatcgccaaactatttccctatatccaaaagggattgaaatcatctttaccagattacagagctgcaacatacatgataatatgtcagatttctgtgaaagtgaccatggaaaatacctttgtgaattcattggcatcacagatcatcaaaacattgaccaagattccctctttgatcaaggatgggttaagttgcttgatagtgctcctgcagagacagaagccagagagccttgggaaaaagccattccctcacttatgtaatgttcctgatcttattacaatacttcatgggatttctgaaacttacgatgtcagtcctcttctgcattacatgcttccccatctggtcgtctccatcattcatcatgttacaggagaagaaactgaaggaatggatggtcaaatctacaagagacacttagaagctatacttacaaaaatatcactgaagaacaacttagaccatttgttggctagccttctatttgaagagtatatttcatatagttcacaggaagaaatggattctaataaagtgtctttgcttaatgaacaatttcttccactcattaggcttttagaaagcaaataccccagaacattagatgttgtattagaggaacacttaaaggaaattgcagatctgaaaaaacaagagcttttccatcagtttgtttctctttctacaagtggaggaaagtatcagtttttagcagattctgatacttctttgatgctcagcctgaatcatccacttgctcctgtgagaattctggccatgaatcatttgaaaaagatcatgaaaacatcaaaggagggtgttgatgaatctttcataaaagaagctgttttagcccgattaggtgatgataatatagatgttgttttgtcggctataagtgcttttgagattttcaaagaacacttcagttcagaagtgacgatttcaaatcttctgaatctctttcaaagagcagaactttcaaagaatggagaatggtacgaggtacttaagatagccgctgacatattaattaaagaagagatactgagtgaaaatgatcagttgtcaaatcaggtggttgtatgtttgctgccatttatggttatcaataatgatgatacggaatctgctgagatgaaaattgctatatatttatcaaaatcaggaatctgctccctgcaccctctattaagaggctgggaagaagctcttgaaaatgtaattaaaagcacaaagccaggaaaactaatcggtgtagcaaatcagaagatgattgagttgttggctgataatataaatttaggagatccttcttcaatgttaaagatggtggaggatttaataagcgtgggtgaggaggagtcctttaacctgaagcagaaagtaacgtttcatgtgatcctgtctgtgctcgtctcttgttgttcatctttaaaagaaacccactttccatttgcgataagagtcttcagtttgttgcagaaaaaaataaagaagcttgaaagtgtcattactgcagtggaaatcccctcagaatggcacattgaactgatgttagacagagggatcccagtggagctgtgggcacattatgtagaagagctcaacagcactcagagggtggccgtggaggactcggtttttcttgtattttccttgaaaaaatttatttatgcactgaaagctcctaaatcttttcctaaaggtgatatatggtggaatcctgaacaactgaaagaagacagcagggactatctgcacttgctcattgggctgtttgagatgatgctcaatggtgccgatgctgttcatttcagagttctgatgaaacttttcataaaggtgcatctagaagatgtttttcagttattcaagttctgttctgttttatggacctatggttctagcctttcaaatccactaaactgcagtgtgaaaacagtgctgcagactcaagctctttatgtgggctgtgcaatgctttcttctcagaagacacagtgtaaacaccaactggcatccatatcttctccagtggtgacatctttactcattaacctgggaagccccgtaaaagaagttcgtagggctgccattcagtgtctccaggccctcagtggagtggcatccccgttttatctgataatagatcatttgatttctaaagcagaggagatcacttcagatgctgcctatgttattcaggatttggctactttatttgaggaactacagagagaaaagaaactgaaatctcatcagaagttgtctgaaactttgaaaaacttacttagttgtgtgtatagttgcccatcttatatagcaaaagatttgatgaaagtacttcagggagtcaacggtgagatggtgctttctcagctattgcctatggctgaacaactgctagaaaagatccagaaggagcccacagctgtgctgaaagatgaggccatggttctgcatctcactctgggaaagtataatgaattttcagtttcccttttaaatgaggatccgaagagtctagatatatttataaaagctgtgcacacaacaaaggaactttacgcgggaatgccaaccattcagatcacagcccttgaaaagattacaaaaccattttttgcagccatatcagatgaaaaagttcagcagaagcttttaagaatgttgtttgatttattggtgaactgtaaaaactcacattgtgctcagactgtcagcagtgtttttaaagggatttccgttaatgctgaacaagtccgaatagaactggagccaccagataaagctaaacccttgggcacagttcagcaaaaaagaaggcaaaaaatgcagcagaaaaaatcacaagatctagaatctgttcaggaagttggaggttcttactggcaaagagtaactctcatcctggaattactgcagcacaaaaagaagctcagaagtcctcagatattggtgccaactctttttaacttgctatcaagatgtttagaacccttgccacaagagcagggaaatatggaatacaccaaacaattaattcttagttgtctgctcaacatctgccaaaaactatctccagatggtggcaaaatacccaaagatattttagatgaggagaagttcaacgtggagttgatagttcagtgcatccgcctttcggagatgccgcagacccatcaccatgcccttttacttttgggcactgttgctggaatatttccggataaagttttacacaatatcatgtctatttttacatttatgggagccaatgtcatgcgcctagatgatacttacagttttcaagttattaacaagacagtgaaaatggttattcccgcacttattcagtctgatagtggagattctatagaagtttcaagaaacgttgaagagattgtggtaaaaatcattagtgtatttgtggatgcgctgccacacgtcccggagcacaggcgcctgcccatccttgttcaacttgttgatacactgggtgcagagaaattcctctggattctcctcatcttgctttttgaacagtatgtcacaaaaacagtgctggcggctgcctatggcgaaaaggatgctattttagaagcagacactgaattttggttttcagtctgttgtgagtttagtgtccagcatcagatacaaagcttgatgaatatcctccagtacttactaaagctgccagaggaaaaagaagaaaccattcccaaagcagtgtcatttaataagagtgaatcacaagaagaaatgctacaggtttttaatgtagagactcacactagcaagcaactgcggcattttaaatttttgtcagtgtccttcatgtctcagctcctgtcttccaataattttctgaaaaaggtagttgagagtggtggtcctgagattttaaaaggccttgaagagaggttgctggagaccgttctcggctatatcagtgcagttgcacagtccatggaaaggaacgcagacaaactcaccgtgaagttctggcgcgcgctccttagtaaagcttacgacctgttagataaggtcaatgccttgctgcccacagagacattcattcctgtgatcagagggctggtgggcaatcccctgccatctgttcgccgcaaagcgctggaccttttgaataacaagctgcagcaaaatatatcctggaagaagacaatagttacccgtttcctaaaactggttccagaccttttggccattgtgcagcgtaagaaaaaggaaggggaagaagaacaagcaatcaacagacagacagcgttgtataccttaaagcttttatgcaagaattttggtgcagaaaatccagatccttttgtcccagtgctgaacactgctgtgaaactgattgctccagagagaaaggaggagaagaatgtcctgggaagcgcgctgctgtgcatagcagaggtgacctccaccctggaggcgctggccatcccccagcttcccagcctgatgccatcgttgctgacaacaatgaagaacaccagcgagctggtctccagcgaggtctacctgctcagtgccttggctgctctgcagaaggttgtggagactctcccgcacttcatcagcccctatctggaaggcattctctcccaggtgattcatctggagaaaatcactagtgaaatgggttctgcgtcacaggctaatatccgtctcacatctcttaaaaagacactggctaccacacttgcaccccgagtcctgttgcccgccatcaaaaaaacttacaagcagattgagaagaactggaagaatcacatgggtccgtttatgagcatcttgcaagagcatattggggtgatgaagaaggaagagctcacctcccatcagtctcagctaaccgcctttttcctggaagccctggacttccgagcccagcactctgagaacgatctggaggaagttggaaaaacggaaaattgtatcattgactgtctagtagccatggttgtcaaactttccgaggtcacattcaggcccctgttcttcaagctgtttgattgggctaaaacagaagatgccccaaaggacaggttgttgacattttacaacttggcagattgcattgctgaaaagctgaaagggctttttactctgtttgccggccacttagtgaagccttttgctgacaccttgaaccaggtgaacatctccaaaacagatgaagcattttttgactctgaaaatgaccctgaaaagtgctgcttgctgttgcagtttattttgaactgtttatacaaaatcttcctttttgatacccagcattttataagtaaagagagagcagaagccttgatgatgcctctggtggatcagctggaaaacaggcttgggggagaagagaaattccaggaacgggtgacaaagcacctgataccatgcatcgcacagttttcggtggccatggcggatgactctctttggaaaccactgaactaccagattctgctaaagacgagagactcctcgcctaaggttcgatttgctgctttgattactgtgttagcactggctgaaaaactaaaggagaattatattgtcttgctaccagaatccattcctttcttagcagagttgatggaagatgaatgtgaagaagtagaacatcagtgccaaaagactattcagcaactggaaactgtcctgggagagccactccagagctatttctaagactttctgtggtgtttcatactctactcagagttcacactcatatttcatatttttatttttgggtgttgggtgccatgttacttttggtgccttaatacacctacttggattacttacaaatgttttatcacttctttacaaaatccccacctggcttgtgctgccacataagcctctcctgcctatcgtatagagctgcagaaagagtaaatgatacacggtatttttatacagactgctgtgtttgtttaaacatttattattctcttcctgattgatggtaataatattagacttgttaattttagcacccaaagctgacgcctcatttgcactgtaagccttaactcttctgtacagcagtatcttacatacatggtatccatgttgcagatttcactcaaagttgctctatttcaagaaaatgaagttatttagcaatcaacagaagtacttttgactgtaaagcctacttttcattttgggtaggcgaacttcagccttcgtttctttgttgtgcccataaagagaagtggttctggaatgctttttttaacccaggagtgtgactgtcacctttatcctttgttcttttgggaaacgggagagatgaaggcaacacgctgcttctaaaacagctcacacctggctgctcacacagagggcccagaaacactgggtggcacgaggaagctcctccaggattcagaatgaacccagttccattggtggttaactaagaactacttgtctaagaaagtaagtatcagtagatttttttcaatgctttgaagtgccctaatctctagtactgggtcatggtgaagttggaaagtgagggttcaaataaaattagatctgccccctttttaaaggcatctaagaacatcccgtagaatgttcgcattgagtttaaaagcctttgaagctaatatagaagtttaatgcagaaatgtggcaagcaaaaggccaacttgcattttagagacagagcttgctagtatagaagtgcatatttctaagaaatgtctcagtaaaattcattaataaatactaatagctttttaaatttttttcctccacgtaaaatgaaaatgaacttaagacttacaaggaatgatgtgagtgggctatttttttcctaaatgcctcacagtctccaacagctcagttaagcactctgatggtctttatggagaaaaataactctgggggattctcgagtcttcttgccttctacagctttccctgtggcaccctccacccccaaccagtgtctttgagcttggtgagactctgcatacattaatatgaaaagctggaaaagaattaagggctagcgatttctacactgagtacttttaaaaaaataagattgacaatggtattcttttcaatatatggatagaaataatatctaaaatctgttctgaaaatattcctaaatcctggcagagttctgccccagtctaatgtgataaaatgatcctcactgactgagcttttttccctccccactcccaaacctttgaaatttcctgtaacaagatctgacctgtaaagatcccatatacatggaacttctgccaactcccctcaaataatagaaaaatcacagaaatggaaccatttaacttgctgatacaggtttgattttaatcacgtaaagtggaagagtgctttgatctcagttgctaatgatgatggactaatctttagaagaacggaggccttgattggtgatttcatgggaacaaaacagatttctgcattacctctgcctgctttgtgggtcccttagttggcgtacactttctgatagtgcctgccttatgaatgcctgaagtctaatcctgaccttactttgttgcccataaatatctttcaaattgaa

SEQ ID NO: 139707 - DNA, 3560 bp, Homo sapiens
  Payload ID: 7397
  Gene Symbol: HEATR3
  Gene Name: HEAT repeat containing 3
  Uniprot ID: Q7Z4Q2
  ENST ID: ENST00000299192
  CDS Start-End: 192-2234
accccgccccgccccaaccccgacccggcagacgacgcgccgtgcgcctgcgcacggcttgcccatgtgtgctgcagccgtcagccggcccagctgagcagcagcaacggaccttgttaacggcgcggcagcctccaccgcctgctgttgccctcctctctcggtggtctgtccgcccagcgcacgtcaccatgggcaagagccggacgaagcgcttcaagcgacctcagttctcccctacgggcgactgtcaggccgaggcggctgcggcggcgaatgggaccggaggcgaggaggacgacgggccggcggcggagctgctggaaaagctccagcacccgagcgccgaggtccgcgagtgcgcctgcgcagggctggcccggctggtgcagcagcggccggcactcccgggcctggcgcgacgagacgccgtgcgccgcctcgggccgctgctgctagaccccagcctggccgtcagggagactgcagccggcgcgctgagaaatctcagtgcttgtggaggttttgaagtttgtgatgacatggtgactaaggatatcatgacccctctggttgcgctgctaaaagagtgtagtgctggactggattcaaatgagatgtctctgcaggagaaaaaagatcagaacagaaattctattgagaacatagccaatgagactgtgaacgtgctgtggaatatatgtgaatgcagtagtagagcagtgtctatattcaacaaagaagggtgtttggagattgtgttaaagtatttaagtaggtttcctaccaatgttgacctggctatttcagtagcatattgtttgcagacagtgactgaggataacccagagctgctgaagtctttcagtgctacagcattgaacatgctggaatcagcactgctttctcctgtcagttccatggaatctcttctattgaagacattggtagcaggcacaatttggaatctaaaggacattattccatgcaagagtcaagcagaaatcataaatgccttactaaagatcttatctgaagttttgggaatggatgctggtgaaatggttattcaaatgaaagaggctgaaacgcaaaggttaaaaactgctgcagaggctgaggaaatattagagaacactaatggggatgatttgattgaagatgatgaaatggaaggaatttctcataaaagaagagtcagaaggaaaactttcgtttcagatttacttccgcccactgacaaggaactgagagagactatagcattgctgacagcccaacagactgctctggaaattattgtcaacatgtgctgcaatgaagatccctctgatgacgaatgggaagagctttctagcagtgatgaaagtgacgcatttatggagaattccttcagtgagtgcgggggacagctgttttctcccctctgcctctcccatgaagttcacacggctctcaccaactacctcatcccaaagaagatttttgagaaaactgcctttccaaacagcattgcagttgacctatgttctaggaaccctacttggaaacctttgattagaaaaatgaacactattcagtgcagagccctcttctgtctccagagtcttgtgtccctcctggatgtggagcacctgggaggagccgcagcccttcagacgcttgcacagcatctgtcacagctgcttttttctcaaccagattttgctaaacatgttgactttctagaagccataagtagtgctttgagggcccttttgcaaacaatggcctccaagaacatttcccagtgcatgactcctgatcagctgatgacattatgcaaagcaggcattcatagtagtaatgtcggggttagagtgaatgtcgttagcattttaggaatcactggcagcgtccttgccaaagaagatggtacacttgaaactcttaagaacattgggtgctttctgcttgaagttaccaccaaagatccttcccttgtggtagcaggagaagctttggatgccctctttgatgtttttgcagatggtaaagaagccgaaagagcctcgattcaaattaaattattatctgctctgaaagaattccagccggtctttaaaatgaagatacgtaaagaagggagaggtaactatagcacagatcagctgtgtgttcttgacaatgtgaaaatgaatttgcgaagatttattgcttatcaagaaactgttgagaaaagactgacttcttaaacaatccaaaaaagaaaccagttcttcccccaaagtattcaatgcttagaatactaaaaggttttctttgaatgtatatgtttctgaaagtcattttttaatgattacattctgtacattctgtaaaaacttcaaaacctggccaggcatggtggctcacgcctataatcccagcaccttgggagaccgaggcgggtggatcacttgaggtcaggagtttgaggccagcctggccaacatggtgaaaccgcatgcataagcatggtggcacatgcctgtgatcccagctactcgggaggctgagggaggagagtcggttgaacctgggagacagaggttgcagtgagctgagatcacgctactgcactccagcctgggtgacagagggagaccctgtctccaaaaaaaaaaaaaaaaaaaaacttcaaaacctgtcagaaactctgttgctggtttttttgtgtgtgtgttttgtttgtttgttttgttttgttgtttttttcttttttgagatggagtctcactgctgcccaggctgtattacagtgctgcgatcttggcttactgcaacctctgccattccaggttcaagcgattctcatgcctcagcctcctgagtagctggaattacaggcacccaccaccacaccttgtttttgtttttggttttttggtttgtttttttttttcagtagagacgggtttcaccgtgttggccaggctggtctcaaattcctgacctcaagtgatccgcctgccctggcctcccaaagtgctgggattacaggcatgagccaccgtgcctggccagaaactcttttttaagtgatgagatctgtgtggcatttctagcgctctctaaattatgtctctggcatattttaatcactggaaactcaaagagtggaagagtggaagtgcgaaggaatctcaggtagctcttaactaattcgccagcagtgaagaaacttcaaccaatcatgttttccttgaattttgcaaagaaagaaaatccaaagcattgcttggatgttcttttaaggcattttatatcagttgaaccttaaactgaaatatgaagacaagctttataaactagttttttgatatgaagtatatcaattatgtttgccttttgtgaagaagtaaatgagttgaatttctatttcacttactagattatactaatgagctaatggggtcattgccatcctccctactcatgactttgatgagttattgctgtaacatcacttcttgatttaatttgatatggaatcagaattgggagaaggtatttttaaataaacaactttttaatggaaa

SEQ ID NO: 139708 - DNA, 3469 bp, Homo sapiens
  Payload ID: 7398
  Gene Symbol: HEATR4
  Gene Name: HEAT repeat containing 4
  Uniprot ID: Q86WZ0
  ENST ID: ENST00000334988
  CDS Start-End: 270-3350
ggaacctaagaaaccaaggaaggcttaagatgcagaaccttgcttctctctgaggactgccttttaggaggccatttggaaagtaattttgaaacactgctcctttgccagtatctgaaaggtgctggatggtgtcagctggaagatgaggggcaacctgaggtagctgaaaaaactttggattaggtgtcaaaagggtgccaggtctcatctccaggcctttcctctaggccaggcagtgtggaaggaagcatttgctgggacgcggtatgaccaggacccagaagggaaagacctttctcccccattgcttctatcagtcactgcccccacgactgggatggggcatgattttaaactactcaaaattgaaaggcaaggaggagtgtgcctctgtctccagtgtgcctatggtcttcttcagctcacagtaccgtctacaccgcaagagccaatatttgaaaatggctgctgcaaaccttaccttctctcaggaggtggtgtggcagcgaggcctgcccagcattccttatagccagtacagctttgaccacctctacaataccaatgacatcatccatactccccagatcaggaaggcccggcctcagaaacctgttagcttcaagttcctgggttcctcaagtcccttaacaggagacacctccctggctgtgaagacagaaagctctgccaatcccgaaaagaagctgaagaaatcaaagccagccagcaccgtccgggaagcaccccgccctctcatccatcatccctgcatgcatccagatatgctgggtcggccaccttctctagatgtgaacctggaggaaagagaagcctggcttctgcctcctgagaaggaggccagagcgtgggaggccactgtgctggaaaagctgaacgagcgcacagcccgatggatccagagcaagcgtcctcgaaggcctggggcatcccccaacaagtggcagagcttcctgcgccagcagtacgactggagtcacattcgggatgagcttacctctgccagtgacctggagctcctgaaacagctggaggcagaagagacagcagagtttgaggatcaaagtgtcatcctgcccccacaggaaaagaagaagccagaactgctgcttcccgtttactacagattgcccagttacttccaacaagcagagacagttgagatcatgcctggcaacaagagcactgaggatatccatgaaaagacgagcctctcccagccccaaacccagagctactttcgccaggtgactccccgagctggaaagtttgcctactccacagacaacacctttgaacaggagatttactttgatgaagtccagatcatccaccagattggtgcaaagagagaccagattgtcctggaaaacctaaatcggtacaacaagcagctatctaaggtcttccctgaaactccagaaaagtggagtgcccaggcaattcctgaagcatcttacagacctgtgcaaggagccctgcgctggactgctttgcccacccccgccaaggatatgctgctgcaggtgggtgagaaggatgtgcctattaagaccaggagattgaagaagcaggcaaaatcactgcaggaggatgtgacctgggaactggtggtcctgcggaggatgctgaaggaatggaagactgcctgggctctgatcatagagtggcaccatgagacagtagagaacctgcttcagagcttgggagacctgcatgatgacgttcggatcaaagctatcaccacatgtgccacagctgctttggaacggccccggattgccaccagccagagagactcagacaagaccatccaggacttgccggaggttctactgcctgccctagaggctgctctttgtgacaagaatgcccatgtgcggatggcagcagcaatatgccaatatgccatacagtcacataatccccttgcccggaacatcatgcagactgcccttctgaagggtaacagtgtggatagctgggctgcagctcagtgcttggctctggaaggtactgctacttaccctgtgattaagaggatcctccaccagctgtttacaaagaagaatgaggacactgaggaacagtcttatatcctcctgagctatctgagtgagaagacaaccctgatacacaccatgcttgctgtggagctgaacagctgtcaatggaagaaccggattgtggcctgccaggctttctcccggatcagtggaaatgtctgcttggatatgaaacataagttgatccagctgatgtggaatgactggaataaggaagtgaggagagcagctgcacaggcgcttgggcaaatgagcctcgggaaagaggtgcacgacataatcagggtcaagctaggtcaaggaaattcccaggagcgtgtggaagctctctacctgataggtgagctcaagcttatgaccgccaagcttctcccaagcttcctgcactgcttctctgatgacttcacagcagttcggcgggcagcctgtttggcagctggtgccctgcagatccgcgacaagatggtgcttgaatgcctcctgaacctgatgcagagagatccttactggaaaatcaaggcctttgccattcgagctttgggacagattgggcaagtaagtcccgagctgacggatcttctgctctgggctatccactatgaagagtcaccaggtgtacggctggaagcttgccgtagcatcctagccctgaaacttcaaggggaccgggtcagggacaccttcctagacgtgctgctcctggagaaccacgatgctgttctaaaagaaatgtaccagacaatgaagatactcaacttaggaaatgaaggaaaccaagaaatgcttcaggagatcaagaacaggattaaaacactaagccaaaaggacttgctgacacacaaaatactcaagctggagatggtcatgggaaaagtgagggaggaagcaaaacgtgtttacttgaaacccaaaggagaacaaggaccactaacactccagactttactccaagaaacttttcaggatgagatggttcttcctagaagaccttccgaggtttgtgacactgaagcagtgataaagcctgtgaagccccgcgcaccaaatccctggttacaaagttcagtcccaggcctaaccacacgaagcaaagttcgttcatcacttgtcaaagatctacgcacctcccccgagaaaaggattgctgtgggaccatttagatccgactacccagctctttatctgggtaaattctcagagagaacatttttttctcccatcatgtcttctccctctggaaagaaaggtgctcatctctaagctgaacacttgtcttacttcaagatgcaggaagcagtggacctggtcacattgggtctttttaattgatactgtacaatcttgttgtcactatgtttataaagagaaattatttaaca

SEQ ID NO: 139709 - DNA, 3523 bp, Homo sapiens
  Payload ID: 7398
  Gene Symbol: HEATR4
  Gene Name: HEAT repeat containing 4
  Uniprot ID: Q86WZ0
  ENST ID: ENST00000553558
  CDS Start-End: 323-3403
aagatgcagaaccttgcttctctctgaggactgccttttaggaggccatttggaaagtaattttgaaacactgctcctttgccagtatctgaaaggtgctggatggtgtcagctggaagatgaggggcaacctgaggtagctgaaaaaactttggattaggtgtcaaaagggcgcagtcccagcatttctggaggccaaggcaggaagatcgcttgattccaggagtttgaaaccagcctggacaacatagtgccaggtctcatctccaggcctttcctctaggccaggcagtgtggaaggaagcatttgctgggacgcggtatgaccaggacccagaagggaaagacctttctcccccattgcttctatcagtcactgcccccacgactgggatggggcatgattttaaactactcaaaattgaaaggcaaggaggagtgtgcctctgtctccagtgtgcctatggtcttcttcagctcacagtaccgtctacaccgcaagagccaatatttgaaaatggctgctgcaaaccttaccttctctcaggaggtggtgtggcagcgaggcctgcccagcattccttatagccagtacagctttgaccacctctacaataccaatgacatcatccatactccccagatcaggaaggcccggcctcagaaacctgttagcttcaagttcctgggttcctcaagtcccttaacaggagacacctccctggctgtgaagacagaaagctctgccaatcccgaaaagaagctgaagaaatcaaagccagccagcaccgtccgggaagcaccccgccctctcatccatcatccctgcatgcatccagatatgctgggtcggccaccttctctagatgtgaacctggaggaaagagaagcctggcttctgcctcctgagaaggaggccagagcgtgggaggccactgtgctggaaaagctgaacgagcgcacagcccgatggatccagagcaagcgtcctcgaaggcctggggcatcccccaacaagtggcagagcttcctgcgccagcagtacgactggagtcacattcgggatgagcttacctctgccagtgacctggagctcctgaaacagctggaggcagaagagacagcagagtttgaggatcaaagtgtcatcctgcccccacaggaaaagaagaagccagaactgctgcttcccgtttactacagattgcccagttacttccaacaagcagagacagttgagatcatgcctggcaacaagagcactgaggatatccatgaaaagacgagcctctcccagccccaaacccagagctactttcgccaggtgactccccgagctggaaagtttgcctactccacagacaacacctttgaacaggagatttactttgatgaagtccagatcatccaccagattggtgcaaagagagaccagattgtcctggaaaacctaaatcggtacaacaagcagctatctaaggtcttccctgaaactccagaaaagtggagtgcccaggcaattcctgaagcatcttacagacctgtgcaaggagccctgcgctggactgctttgcccacccccgccaaggatatgctgctgcaggtgggtgagaaggatgtgcctattaagaccaggagattgaagaagcaggcaaaatcactgcaggaggatgtgacctgggaactggtggtcctgcggaggatgctgaaggaatggaagactgcctgggctctgatcatagagtggcaccatgagacagtagagaacctgcttcagagcttgggagacctgcatgatgacgttcggatcaaagctatcaccacatgtgccacagctgctttggaacggccccggattgccaccagccagagagactcagacaagaccatccaggacttgccggaggttctactgcctgccctagaggctgctctttgtgacaagaatgcccatgtgcggatggcagcagcaatatgccaatatgccatacagtcacataatccccttgcccggaacatcatgcagactgcccttctgaagggtaacagtgtggatagctgggctgcagctcagtgcttggctctggaaggtactgctacttaccctgtgattaagaggatcctccaccagctgtttacaaagaagaatgaggacactgaggaacagtcttatatcctcctgagctatctgagtgagaagacaaccctgatacacaccatgcttgctgtggagctgaacagctgtcaatggaagaaccggattgtggcctgccaggctttctcccggatcagtggaaatgtctgcttggatatgaaacataagttgatccagctgatgtggaatgactggaataaggaagtgaggagagcagctgcacaggcgcttgggcaaatgagcctcgggaaagaggtgcacgacataatcagggtcaagctaggtcaaggaaattcccaggagcgtgtggaagctctctacctgataggtgagctcaagcttatgaccgccaagcttctcccaagcttcctgcactgcttctctgatgacttcacagcagttcggcgggcagcctgtttggcagctggtgccctgcagatccgcgacaagatggtgcttgaatgcctcctgaacctgatgcagagagatccttactggaaaatcaaggcctttgccattcgagctttgggacagattgggcaagtaagtcccgagctgacggatcttctgctctgggctatccactatgaagagtcaccaggtgtacggctggaagcttgccgtagcatcctagccctgaaacttcaaggggaccgggtcagggacaccttcctagacgtgctgctcctggagaaccacgatgctgttctaaaagaaatgtaccagacaatgaagatactcaacttaggaaatgaaggaaaccaagaaatgcttcaggagatcaagaacaggattaaaacactaagccaaaaggacttgctgacacacaaaatactcaagctggagatggtcatgggaaaagtgagggaggaagcaaaacgtgtttacttgaaacccaaaggagaacaaggaccactaacactccagactttactccaagaaacttttcaggatgagatggttcttcctagaagaccttccgaggtttgtgacactgaagcagtgataaagcctgtgaagccccgcgcaccaaatccctggttacaaagttcagtcccaggcctaaccacacgaagcaaagttcgttcatcacttgtcaaagatctacgcacctcccccgagaaaaggattgctgtgggaccatttagatccgactacccagctctttatctgggtaaattctcagagagaacatttttttctcccatcatgtcttctccctctggaaagaaaggtgctcatctctaagctgaacacttgtcttacttcaagatgcaggaagcagtggacctggtcacattgggtctttttaattgatactgtacaatcttgttgtcactatgtttataaagagaaattatttaacag

SEQ ID NO: 139710 - DNA, 552 bp, Homo sapiens
  Payload ID: 7398
  Gene Symbol: HEATR4
  Gene Name: HEAT repeat containing 4
  ENST ID: ENST00000557603
  CDS Start-End: 436-552
agaaccttgcttctctctgaggactgccttgtaggaggccatttggaaagtaattttgaaacactgctcctttgccagtatctgaaaggtgctggatggtgtcagctggaagatgaggggcaacctgagagacggagtttcaccatgttggtcaagctggtcttgaactcctaacctcagatgatccacacgcctcagcctcccaaagtgctgggattacacgcatgatccaccacgcctggccgattgacttaattttttatgctgtgtacaaaaggacccaggacctgccactctgcttttggttctagagggctatttgttggaagtgggtgctgcctcataatgctggtcacgtaatgtgtgccaggtctcatctccaggcctttcctctaggccaggcagtgtggaaggaagcatttgctgggacgcggtatgaccaggacccagaagggaaagacctttctcccccattgcttctatcagtcactgcccccacgactgggatggggcatgattttaaactactcaaaattgaaaggcaaggaggag

SEQ ID NO: 139711 - DNA, 824 bp, Homo sapiens
  Payload ID: 7398
  Gene Symbol: HEATR4
  Gene Name: HEAT repeat containing 4
  ENST ID: ENST00000556455
  CDS Start-End: 252-824
gaaggtttaagatgcagaaccttgcttctctctgaggactgccttgtaggaggccatttggaaagtaattttgaaacactgctcctttgccagtatctgaaaggtgctggatggtgtcagctggaagatgaggggcaacctgaggtagctgaaaaaactttggattaggtgtcaaaagggtgccaggtctcatctccaggcctttcctctaggccaggcagtgtggaaggaagcatttgctgggacgcggtatgaccaggacccagaagggaaagacctttctcccccattgcttctatcagtcactgcccccacgactgggatggggcatgattttaaactactcaaaattgaaaggcaaggaggagtgtgcctctgtctccagtgtgcctatggtcttcttcagctcacagtaccgtctacaccgcaagagccaatatttgaaaatggctgctgcaaaccttaccttctctcaggaggtggtgtggcagcgaggcctgcccagcattccttatagccagtacagctttgaccacctctacaataccaatgacatcatccatactccccagatcaggaaggcccggcctcagaaacctgttagcttcaagttcctgggttcctcaagtcccttaacaggagacacctccctggctgtgaagacagaaagctctgccaatcccgaaaagaagctgaagaaatcaaagccagccagcaccgtccgggaagcaccccgccctctcatccatcatccctgcatgcatccagatatgctgggtcggccaccttctctagatgtgaacctggaggaaagagaagcctgg

SEQ ID NO: 139712 - DNA, 623 bp, Homo sapiens
  Payload ID: 7398
  Gene Symbol: HEATR4
  Gene Name: HEAT repeat containing 4
  ENST ID: ENST00000563329
  CDS Start-End: 516-623
aacctaagaaaccaaggaaggcttaagatgcagaaccttgcttctctctgaggactgccttttaggaggccatttggaaagtaattttgaaacactgctcctttgccagtatctgaaaggtgctggatggtgtcagctggaagatgaggggcaacctgaggtagctgaaaaaactttggattaggtgtcaaaagggcgcagtcccagcatttctggaggccaaggcaggaagatcgcttgattccaggagtttgaaaccagcctggacaacatatttgagcttcttcaagactactattttgaattccctgtctggaaaggtcacatatctctgtcactcctggattggtcactggtgccttatttagtccatttggtgaaataatgttttcctggatgttcttgatgcttgtggatggtcatcaatgtctggacattgaagagtgccaggtctcatctccaggcctttcctctaggccaggcagtgtggaaggaagcatttgctgggacgcggtatgaccaggacccagaagggaaagacctttctcccccattgcttctatcagtcactgcccccacgactgggatggggcatgattttaaactactcaaaattgaaaggc

SEQ ID NO: 139713 - DNA, 507 bp, Homo sapiens
  Payload ID: 7399
  Gene Symbol: HEATR5A
  Gene Name: HEAT repeat containing 5A
  Uniprot ID: Q86XA9
  ENST ID: ENST00000382464
  CDS Start-End: 135-476
agagcagccggtaacgttgctggaccgggacgcacgctcagctgaggaggacccccaaagatttttattgttaggtatattgaccaaagtttaacgagaagaactgtgatcagctgggaggattgctgcaaggaatggaattagctcatagcttactgctgaatgaagaagcatacaatcaactaggtgaagttcagaaggcagagtttatttttgagtggttgagatacttggagaagctcttgttggcaaccagcaggaatgatgtaagggagaaacagaagactcttgttgaacagctcctgtctttgttgaacagctccccagggcctcctacccgcaaactgcttgctaagaatctagccatactttatagtattggagacacattctccgttcatgaagcaatcgataaatgtaatgatcttattcgtagcaaagatgattctccaagttatcttcccactaagctgtaagtgaaacattaaaacagaacagaaaacaaaa

SEQ ID NO: 139714 - DNA, 7840 bp, Homo sapiens
  Payload ID: 7399
  Gene Symbol: HEATR5A
  Gene Name: HEAT repeat containing 5A
  ENST ID: ENST00000543095
  CDS Start-End: 186-6326
aatgcctcgctgtcgccgccgccggcaattccagactctgctagggttagcagagcagccggtaacgttgctggaccgggacgcacgctcagctgaggaggacccccaaagatttttattgttaggtatattgaccaaagtttaacgagaagaactgtgatcagctgggaggattgctgcaaggaatggaattagctcatagcttactgctgaatgaagaagcatacaatcaactaggtgaagttcagaaggcagagtttatttttgagtggttgagatacttggagaagctcttgttggcaaccagcaggaatgatgtaagggagaaacagaagactcttgttgaacagctcctgtctttgttgaacagctccccagggcctcctacccgcaaactgcttgctaagaatctagccatactttatagtattggagacacattctccgttcatgaagcaatcgataaatgtaatgatcttattcgtagcaaagatgattctccaagttatcttcccactaagcttgctgctgtggtatgtttgggttccttgtacaagaagttgggtagaatactgggtaacacctttactgatacagtggggaatattcttaaagctatgaagagtgcagagtctcaaggccgatatgagattatgctaagtctgcaaaatatattgaatggactaggagctgccgctgcaccttgtcacagggatgtttataaagctgctagatcctgcttgacagatagatccatggctgttcgttgtgctgctgcaaagtgtctccttgaacttcagaatgaagccatctttatgtggagtacggacctggacagtgtggccacactgtgttttaagtcctttgaaggttccaattatgatgtgcggatttctgtttcaaagttactaggcataatattagctaaagctgtaatttctaaacatccaggaacagcagcctcacgtcaaagcattcgcagagtatctttggaggaagttctggaattactaggaacagggtttctacgtgggagttcaggattccttcgagccagtggagatatgctgaaaggaaccagttcagtcagtagggatgttcgagttggagttactcaggcttatgtggtatttgtttcaacactaggaggagcttggctagagaaaaattttgctgcctttttttctcatatcctaagccttgcgtcaccgtcacaccctaaagccacccaaactcagatcgatgccgtctgctgtcgccgttgtgtttcatttattcttcgaactactataggtggtcttcttggagaaaaggctcagcttgctgctgtaaaggatatttgccaggccatctggaagctaaagaaagttatggatgccgtaatgagtgatggtaatttggaaacccggcttggttccacagatgtagccgctagccaacatatgctggtttgtgctttacaagaacttggaaatctcatacacaatcttggcaccacagcggcacctttgctacaggattcaagtacaggtctccttgacagtatcttgtcagttattcttcatcctagcatttctgttcgactagcagcagcttggtgtttacactgcattgccgtggcattaccctcctacctaacaccactcttggatcgttgccttgaacggcttactggacataagtcttcacctgaagcagtgactggcttcagttttgctgtagcagctttgttgggagcagtaaaacattgtcctttaggaattcctcatggaaaaggcaagattattatgacattagcagaggatttgctgtgttctgctgctcaaaacagtcgcctttcagctcagcgcacacaagctggatggttgctgatttctgctctgatgacattaggtcctgcagttgttagccatcaccttgctcgagttctgctgttgtggaagtgtgtctttccagcatctcctaaagatctagaaacagaaaagagccgaggagattcgtttacatggcaggtgaccctggaaggacgagctggtgcactgtgtgctatcaagagctttgtttcccactgtggtgatcttcttactgaggaagtaactcagcgtcttcttccaccacttccttgtgctgtggatttgctaactcagctttcttcaatactaaaaatgtatggaagtcctttgaaaacaccgtcagtggtttatagacaaagactttatgaactgttgattttattacctcctgagacctatgaaggaaacctctgtgctatcctcagagagctggctgctgacttgactgcccctgatattcaggtggcagcatctacatttttacttccacccctctgtcatcaggatgatcttttgatactaagtcctttcctacaagagactgaccatagatttattgaagaacagctcctgcttggtaatggtgttgcttgcggaagtcttgaatatgacccttattcgatttatgagaaagatgtagagggagattcagtgcctaagcccttacctccagcactatcagttattagttctgcatccaagctctttggggttgtatgcgctcatgtgggagaaactcaaaggcttcttatattggaacagcttttggacagtataaagcacacaaaaggagctcgtcagcaagtggttcagttacatgttgtttcttcagtttctagtttcttgaagtacgtggctggctccaagggatgtttaggtccagaagaaatgaaaagatttgccttaacattagttatgggagccctagaaagccccaaccccttgctgagatgtgcagctgcagagtcatgggctagattagcccaagtggtagatgatggagcttttactgctggattagctcaagttagctttgacaaattgaaatcagcaagggatgtggttaccagaacaggacactcattggccttggggtccctacataggtatttaggaggaataagttcttctcaacacctaaattcttgtattggaatcctttatactttggcgcaggacagcacttctcctgatgtgcagacctgggcattacattctctatcattgatcattgattctgctggcccactctattatgtgcatgtggaacctaccctttctcttattataatgttgttgttaaatgtgcctcctactcatgctgaagttcaccaaagccttggtcgctgtttgaatgcccttattaccacgttaggtccagagctacaaggtaacagtacttcaatttctaccttaaggacttcctgtctactgggttgtgcagtaatgcaagataacccagactgccttgttcaagctcaggccatctcttgccttcagcagcttcatatgtttgctccacgacatgtcaacttgtctagcctggttagctgcctctgtgtgaatctttgtagcccctacttgttactgagaagagcagtactggcttgcttacgtcagcttgtacaaagagaagcagctgaagtttcagaacatgctgttatgcttgctaaggatagcagagaagagttgactccagatgctaacatcagagaagttggccttgagggggcattgttgatcttactagacaaggagacagatgagagattatgccatgatatcaaagagactttaaattatatgcttacatctatggcagtggaaaaactctccctgtggttaaagctttgtaaagatgtacttgctgcatcagctgattttacagctgtaacttgtgtggatacaatgcaagaagaagaaggagataaaggggatgatgcctcagtcctgaccaccagacgtgatgaaaaatcccatccttttaccaatccccgatgggctactagagtctttgctgctgaatgtgtctgtaggataattaaccaatgtgagaatgctaacagtgcacattttgacattgctttagcacaagaaatgaaaaaaagagattcaagaaatgactttttggtactgcatcttgctgacttaattcgcatggcttttatggctgccacagatcacagtgaccagctccgtctttctggccttgaaatgctgttagttgttattcggcgatttgcaactgttccagaaccagagtttccaggtcatgtgattctggaacagtatcaagccaatgtaggagcagcgcttagaccagccttcacttcagagacaccacctgatgtcactgccaaagcatgtcaggtttgcagtgcctggatagcaagtggagttgtaagtgaccttaatgatctccgaagagttcatcagttgcttgtttcatcgttaactaaaatacaggctggaaaagaagctctaagtcacttatataatgaaagtgcttctaccatggagatcttagctgtgcttaaagcctgggcagaggtctacataattgctgtgcaaagacataaaaaccacagacaacctttgaagactaccacctgtttagaagacggtatcagaaatggatcatgttcatcagatggactgcttgacttagtctatgcagatcttggcacactaagcagactctggcttgctgcacttcaggattttgctcttttaactttgccttcagaatttgcctcccaacttcctgctgaaggtggtgctttctacacagcagagactagtgaaaatgcaaaattgcattattacaactcctgggcacttatcctccatgctacagcattgtggcttacaagcacgggttttgttgttgctgacccagatgaaggagcatctaatctctccaggcctgtaacaccaacttccatgtgtcagggttcatcatctggggctaccataaagtcccctgaggatgtctacactgatagattccatcttattttaggaatcagcgtggaatttctatgttccttacgttcagatgcaaccatggaaagcataactgcttgtttacatgcattgcaagcacttctagatgtaccttggcccagatcaaaaattggcagtgatcaggacttgggtatagaattgctgaatgttctacatcgagtaattttaaccagagaatcaccttccattcagttggcttcacttgaagtggtaaggcagattatctgtgctgctcaagaacatgtgaaggaaaaaagacgaagtgcagaagttgatgatggggctgctgaaaaggaaactctgccagagtttggagagggaaaggacaccggaggacttgtgcctggaaagtctttggtctttgcaacactggaattgtgtgtatgcattctagttagacagctcccagaattaaaccctaaattgacaggtagcccaggagtaaaagctacgaagccacagatactattagaagatggaagtagattggtttcagctgcattggttatcctttccgaacttcctgcagtgtgctctcctgaaggaagcatctcaattctccctactatattgtacctcacaatcggggtcctcagagagactgctgtgaagttacctgggggccagttatcttcgacagttgcagcttccctacaggctctaaaaggaatattatcttctcccatggcccgggcagaaaagagccgtactgcttggactgaccttctccgaagtgccttaacaacaattcttgactgttgggatccagttgatgaaacacaccaagaacttgatgaagtcagtctacttactgctatcacagtgtttattttgtctaccagtccagaagtaactaccatcccatgccttcagaagcgctgtattgataaatttaaagctactcttgagataaaagatcctgtggtacaaatcaagacctaccagctcctacattccatctttcagtatccaaatccagctgtttcctacccatacatttactctttagcatcctgtatcatggaaaaactgcaggaaatagacaagagaaaacctgaaaacactgctgagcttgagatcttccaagaaggcataaaggtcttagaaacactggttactgttgctgaagaacaccatcgcgctcagctggtggcctgtcttttgcccatcctcatttccttccttttggatgaaaattctctgggatcagcaacttccataatgagaaatttacatgactttgctctacaaaatctcatgcaaattggacctcagtattcatctgtttttaaaagtttagtggcttcttctccagccctaaaagcccgccttgaggctgctataaagggcaatcaggaaagtgtcaaagtcaagataccaacatctaaatatactaagagtcctggaaaaaactcaagcatccaattaaagaccagtttcctctgattttttttttggaatagtaagcaccttaatataataaatacttgatcattgcctttggtgacaaaagggacattgtagacacaagtgcccttagaggtctagttgattgttttaccttaaatagctgtgactcttcaaagtaacagcatacttaacatttttgtgtgtgtgcgtggggtttgtgttttgttttgttttgtttttctatttaaaaagacaatggagctaacttgccaggaattttaagaaagtgctaaagaactaaacttactaaacaatccactgctttaaaaatgaaatgaatttcttctaacagtccatacatatgtggtatacttaatactgtgacagatataaatatgactctagtgtaaattatctgcactaatattgtatcccaattgctgatttaaaattctgctttggcccggcacagtggctcatccctgtaattccagcactttggaaggccaaggcgggcggatcacgaagtcgggagtttgagaccagcctgaccaacatggtgaaaccccgtctctactaaaaatacaaaaattagccgggtgtggtggcacacacctgtaatcccagctactcaggaggccgaggcaggaaaatcgcttgaacctggcaggcagaggttgcagtgagccaagattgtgccactgcactccagcctgggcgacagagtgagactccatctaaaaaaaaaaaaaaaaaattctgccttattcagtaattgtattaaactttctctgatttctccaagaagataaaatgattggagagctatttaggaaacctggtctaggattatccagtatacaatagtacaaattacttacagccttacagtgcaacataagatttggtgtctatatcatggttttccaccatcttttggtttagtttatattgggttcagaaattgagtcttactcattttaaatagaataagccatttccactatttttcaaatggatttttctgtttacctctgttcttaccaattttgttcattttcatttgtggcaaacatttgtatcaatgagttttaacctaggttcatatctacattgtatttagatcaactatgggtttatataaatgccaaatttagtacaacaaatttaggtcatcaggtgaatacaagtattttttttaacaggaaacattttattatagaaaaaagattaatgataaagtcatattggttgaaaaatattttttaactgtgttcatgattgttgattctccttctacttcagtgttatactgtgtgaatcaagcactgtgtcaaaacagagcatttccctcttaaaaattacaaaccgaagtgatagaagcatgtcagaattgagaagacattttgaagcaagaacaatgtgatgtacctattttattatgtttgtatataaatactattgtaaattgttcagagtgaaaacatttgacaaactctaacactacaatcattttttctaaattacataaataaagctaattttcatta

SEQ ID NO: 139715 - DNA, 5237 bp, Homo sapiens
  Payload ID: 7399
  Gene Symbol: HEATR5A
  Gene Name: HEAT repeat containing 5A
  ENST ID: ENST00000538864
  CDS Start-End: 1-4799
ttggagaaaaggctcagcttgctgctgtaaaggatatttgccaggccatctggaagctaaagaaagttatggatgccgtaatgagtgatggtaatttggaaacccggcttggttccacagatgtagccgctagccaacatatgctggtttgtgctttacaagaacttggaaatctcatacacaatcttggcaccacagcggcacctttgctacaggattcaagtacaggtctccttgacagtatcttgtcagttattcttcatcctagcatttctgttcgactagcagcagcttggtgtttacactgcattgccgtggcattaccctcctacctaacaccactcttggatcgttgccttgaacggcttactggacataagtcttcacctgaagcagtgactggcttcagttttgctgtagcagctttgttgggagcagtaaaacattgtcctttaggaattcctcatggaaaaggcaagattattatgacattagcagaggatttgctgtgttctgctgctcaaaacagtcgcctttcagctcagcgcacacaagctggatggttgctgatttctgctctgatgacattaggtcctgcagttgttagccatcaccttgctcgagttctgctgttgtggaagtgtgtctttccagcatctcctaaagatctagaaacagaaaagagccgaggagattcgtttacatggcaggtgaccctggaaggacgagctggtgcactgtgtgctatcaagagctttgtttcccactgtggtgatcttcttactgaggaagtaactcagcgtcttcttccaccacttccttgtgctgtggatttgctaactcagctttcttcaatactaaaaatgtatggaagtcctttgaaaacaccgtcagtggtttatagacaaagactttatgaactgttgattttattacctcctgagacctatgaaggaaacctctgtgctatcctcagagagctggctgctgacttgactgcccctgatattcaggtggcagcatctacatttttacttccacccctctgtcatcaggatgatcttttgatactaagtcctttcctacaagagactgaccatagatttattgaagaacagctcctgcttggtaatggtgttgcttgcggaagtcttgaatatgacccttattcgatttatgagaaagatgtagagggagattcagtgcctaagcccttacctccagcactatcagttattagttctgcatccaagctctttggggttgtatgcgctcatgtgggagaaactcaaaggcttcttatattggaacagcttttggacagtataaagcacacaaaaggagctcgtcagcaagtggttcagttacatgttgtttcttcagtttctagtttcttgaagtacgtggctggctccaagggatgtttaggtccagaagaaatgaaaagatttgccttaacattagttatgggagccctagaaagccccaaccccttgctgagatgtgcagctgcagagtcatgggctagattagcccaagtggtagatgatggagcttttactgctggattagctcaagttagctttgacaaattgaaatcagcaagggatgtggttaccagaacaggacactcattggccttggggtccctacataggtatttaggaggaataagttcttctcaacacctaaattcttgtattggaatcctttatactttggcgcaggacagcacttctcctgatgtgcagacctgggcattacattctctatcattgatcattgattctgctggcccactctattatgtgcatgtggaacctaccctttctcttattataatgttgttgttaaatgtgcctcctactcatgctgaagttcaccaaagccttggtcgctgtttgaatgcccttattaccacgttaggtccagagctacaaggtaacagtacttcaatttctaccttaaggacttcctgtctactgggttgtgcagtaatgcaagataacccagactgccttgttcaagctcaggccatctcttgccttcagcagcttcatatgtttgctccacgacatgtcaacttgtctagcctggttagctgcctctgtgtgaatctttgtagcccctacttgttactgagaagagcagtactggcttgcttacgtcagcttgtacaaagagaagcagctgaagtttcagaacatgctgttatgcttgctaaggatagcagagaagagttgactccagatgctaacatcagagaagttggccttgagggggcattgttgatcttactagacaaggagacagatgagagattatgccatgatatcaaagagactttaaattatatgcttacatctatggcagtggaaaaactctccctgtggttaaagctttgtaaagatgtacttgctgcatcagctgattttacagctgtaacttgtgtggatacaatgcaagaagaagaaggagataaaggggatgatgcctcagtcctgaccaccagacgtgatgaaaaatcccatccttttaccaatccccgatgggctactagagtctttgctgctgaatgtgtctgtaggataattaaccaatgtgagaatgctaacagtgcacattttgacattgctttagcacaagaaatgaaaaaaagagattcaagaaatgactttttggtactgcatcttgctgacttaattcgcatggcttttatggctgccacagatcacagtgaccagctccgtctttctggccttgaaatgctgttagttgttattcggcgatttgcaactgttccagaaccagagtttccaggtcatgtgattctggaacagtatcaagccaatgtaggagcagcgcttagaccagccttcacttcagagacaccacctgatgtcactgccaaagcatgtcaggtttgcagtgcctggatagcaagtggagttgtaagtgaccttaatgatctccgaagagttcatcagttgcttgtttcatcgttaactaaaatacaggctggaaaagaagctctaagtcacttatataatgaaagtgcttctaccatggagatcttagctgtgcttaaagcctgggcagaggtctacataattgctgtgcaaagacataaaaaccacagacaacctttgaagactaccacctgtttagaagacggtatcagaaatggatcatgttcatcagatggactgcttgacttagtctatgcagatcttggcacactaagcagactctggcttgctgcacttcaggattttgctcttttaactttgccttcagaatttgcctcccaacttcctgctgaaggtggtgctttctacacagcagagactagtgaaaatgcaaaattgcattattacaactcctgggcacttatcctccatgctacagcattgtggcttacaagcacgggttttgttgttgctgacccagatgaaggagcatctaatctctccaggcctgtaacaccaacttccatgtgtcagggttcatcatctggggctaccataaagtcccctgaggatgtctacactgatagattccatcttattttaggaatcagcgtggaatttctatgttccttacgttcagatgcaaccatggaaagcataactgcttgtttacatgcattgcaagcacttctagatgtaccttggcccagatcaaaaattggcagtgatcaggacttgggtatagaattgctgaatgttctacatcgagtaattttaaccagagaatcaccttccattcagttggcttcacttgaagtggtaaggcagattatctgtgctgctcaagaacatgtgaaggaaaaaagacgaagtgcagaagttgatgatggggctgctgaaaaggaaactctgccagagtttggagagggaaaggacaccggaggacttgtgcctggaaagtctttggtctttgcaacactggaattgtgtgtatgcattctagttagacagctcccagaattaaaccctaaattgacaggtagcccaggagtaaaagctacgaagccacagatactattagaagatggaagtagattggtttcagctgcattggttatcctttccgaacttcctgcagtgtgctctcctgaagttgatgaaacacaccaagaacttgatgaagtcagtctacttactgctatcacagtgtttattttgtctaccagtccagaagtaactaccatcccatgccttcagaagcgctgtattgataaatttaaagctactcttgagataaaagatcctgtggtacaaatcaagacctaccagctcctacattccatctttcagtatccaaatccagctgtttcctacccatacatttactctttagcatcctgtatcatggaaaaactgcaggaaatagacaagagaaaacctgaaaacactgctgagcttgagatcttccaagaaggcataaaggtcttagaaacactggttactgttgctgaagaacaccatcgcgctcagctggtggcctgtcttttgcccatcctcatttccttccttttggatgaaaattctctgggatcagcaacttccataatgagaaatttacatgactttgctctacaaaatctcatgcaaattggacctcagtattcatctgtttttaaaagtttagtggcttcttctccagccctaaaagcccgccttgaggctgctataaagggcaatcaggaaagtgtcaaagtcaagataccaacatctaaatatactaagagtcctggaaaaaactcaagcatccaattaaagaccagtttcctctgattttttttttggaatagtaagcaccttaatataataaatacttgatcattgcctttggtgacaaaagggacattgtagacacaagtgcccttagaggtctagttgattgttttaccttaaatagctgtgactcttcaaagtaacagcatacttaacatttttgtgtgtgtgcgtggggtttgtgttttgttttgttttgtttttctatttaaaaagacaatggagctaacttgccaggaattttaagaaagtgctaaagaactaaacttactaaacaatccactgctttaaaaatgaaatgaatttcttctaacagtccatacatatgtggtatacttaatactgtgacagatataaatatgactctagtgtaaattatctgcactaatattgtatcccaattgctgatttaaaattctgctttggcccggcacagtg

SEQ ID NO: 139716 - DNA, 586 bp, Homo sapiens
  Payload ID: 7399
  Gene Symbol: HEATR5A
  Gene Name: HEAT repeat containing 5A
  ENST ID: ENST00000550819
  CDS Start-End: 1-373
cttgttactgagaagagcagtactggcttgcttacgtcagcttgtacaaagagaagcagctgaagtttcagaacatgctgttatgcttgctaaggatagcagagaagagttgactccagatgctaacatcagagaagttggccttgagggggcattgttgatcttactagacaaggagacagatgagagattatgccatgatatcaaagagactttaaattatatgcttacatctatggcagtggaaaaactctccctgtggttaaagctttgtaaagatgtacttgctgcatcagctggtaagtattggacattatcagttaaaataataaaattgaaatttgaaactttacataaaattgtttaccactgagaattcatcagtcttgtctaactagctggattctgactgtctgattgttgcttttcttcaaatgaagattgtatttctagtgttttagaattctctgtaatttgaacaatataaatccaatacttaagcctgctctttttccctttggctgtcttagatgactttcctatataaaacaaattaaaaagtaaagttattgtttatgccctaaaa

SEQ ID NO: 139717 - DNA, 598 bp, Homo sapiens
  Payload ID: 7399
  Gene Symbol: HEATR5A
  Gene Name: HEAT repeat containing 5A
  ENST ID: ENST00000549719
  CDS Start-End: 1-598
tttctcttattataatgttgttgttaaatgtgcctcctactcatgctgaagttcaccaaagccttggtcgctgtttgaatgcccttattaccacgttaggtccagagctacaaggtaacagtacttcaatttctaccttaaggacttcctgtctactgggttgtgcagtaatgcaagataacccagactgccttgttcaagctcaggccatctcttgccttcagcagcttcatatgtttgctccacgacatgtcaacttgtctagcctggttagctgcctctgtgagatcttgttggataattctgtgttggtgaatctttgtagcccctacttgttactgagaagagcagtactggcttgcttacgtcagcttgtacaaagagaagcagctgaagtttcagaacatgctgttatgcttgctaaggatagcagagaagagttgactccagatgctaacatcagagaagttggccttgagggggcattgttgatcttactagacaaggagacagatgagagattatgccatgatatcaaagagactttaaattatatgcttacatctatggcagtggaaaaactctccctgtggttaaa

SEQ ID NO: 139718 - DNA, 480 bp, Homo sapiens
  Payload ID: 7399
  Gene Symbol: HEATR5A
  Gene Name: HEAT repeat containing 5A
  ENST ID: ENST00000549184
  CDS Start-End: 219-480
cggtcgaggggctaggtgtcttgaccctaagggctggagtccgccgagaaggggctgactggggcacagggtcggctgataaacagcgtggtccgttcttcctcctggactacgggaaagtctggcttcacctgtgcacaacagatttttattgttaggtatattgaccaaagtttaacgagaagaactgtgatcagctgggaggattgctgcaaggaatggaattagctcatagcttactgctgaatgaagaagcatacaatcaactaggtgaagttcagaaggcagagtttatttttgagtggttgagatacttggagaagctcttgttggcaaccagcaggaatgatgtaagggagaaacagaagactcttgttgaacagctcctgtctttgttgaacagctccccagggcctcctacccgcaaactgcttgctaagaatctagccatactttatagtattggagacacattctccg

SEQ ID NO: 139719 - DNA, 2687 bp, Homo sapiens
  Payload ID: 7399
  Gene Symbol: HEATR5A
  Gene Name: HEAT repeat containing 5A
  ENST ID: ENST00000550366
  CDS Start-End: 1-2687
gtcacaccctaaagccacccaaactcagatcgatgccgtctgctgtcgccgttgtgtttcatttattcttcgaactactataggtggtcttcttggagaaaaggctcagcttgctgctgtaaaggatatttgccaggccatctggaagctaaagaaagttatggatgtagccgctagccaacatatgctggtttgtgctttacaagaacttggaaatctcatacacaatcttggcaccacagcggcacctttgctacaggattcaagtacaggtctccttgacagtatcttgtcagttattcttcatcctagcatttctgttcgactagcagcagcttggtgtttacactgcattgccgtggcattaccctcctacctaacaccactcttggatcgttgccttgaacggcttactggacataagtcttcacctgaagcagtgactggcttcagttttgctgtagcagctttgttgggagcagtaaaacattgtcctttaggaattcctcatggaaaaggcaagattattatgacattagcagaggatttgctgtgttctgctgctcaaaacagtcgcctttcagctcagcgcacacaagctggatggttgctgatttctgctctgatgacattaggtcctgcagttgttagccatcaccttgctcgagttctgctgttgtggaagtgtgtctttccagcatctcctaaagatctagaaacagaaaagagccgaggagattcgtttacatggcaggtgaccctggaaggacgagctggtgcactgtgtgctatcaagagctttgtttcccactgtggtgatcttcttactgaggaagtaactcagcgtcttcttccaccacttccttgtgctgtggatttgctaactcagctttcttcaatactaaaaatgtatggaagtcctttgaaaacaccgtcagtggtttatagacaaagactttatgaactgttgattttattacctcctgagacctatgaaggaaacctctgtgctatcctcagagagctggctgctgacttgactgcccctgatattcaggtggcagcatctacatttttacttccacccctctgtcatcaggatgatcttttgatactaagtcctttcctacaagagactgaccatagatttattgaagaacagctcctgcttggtaatggtgttgcttgcggaagtcttgaatatgacccttattcgatttatgagaaagatgtagagggagattcagtgcctaagcccttacctccagcactatcagttattagttctgcatccaagctctttggggttgtatgcgctcatgtgggagaaactcaaaggcttcttatattggaacagcttttggacagtataaagcacacaaaaggagctcgtcagcaagtggttcagttacatgttgtttcttcagtttctagtttcttgaagtacgtggctggctccaagggatgtttaggtccagaagaaatgaaaagatttgccttaacattagttatgggagccctagaaagccccaaccccttgctgagatgtgcagctgcagagtcatgggctagattagcccaagtggtagatgatggagcttttactgctggattagctcaagttagctttgacaaattgaaatcagcaagggatgtggttaccagaacaggacactcattggccttggggtccctacataggtatttaggaggaataagttcttctcaacacctaaattcttgtattggaatcctttatactttggcgcaggacagcacttctcctgatgtgcagacctgggcattacattctctatcattgatcattgattctgctggcccactctattatgtgcatgtggaacctaccctttctcttattataatgttgttgttaaatgtgcctcctactcatgctgaagttcaccaaagccttggtcgctgtttgaatgcccttattaccacgttaggtccagagctacaaggtaacagtacttcaatttctaccttaaggacttcctgtctactgggttgtgcagtaatgcaagataacccagactgccttgttcaagctcaggccatctcttgccttcagcagcttcatatgtttgctccacgacatgtcaacttgtctagcctggttagctgcctctgtgtgaatctttgtagcccctacttgttactgagaagagcagtactggcttgcttacgtcagcttgtacaaagagaagcagctgaagtttcagaacatgctgttatgcttgctaaggatagcagagaagagttgactccagatgctaacatcagagaagttggccttgagggggcattgttgatcttactagacaaggagacagatgagagattatgccatgatatcaaagagactttaaattatatgcttacatctatggcagtggaaaaactctccctgtggttaaagctttgtaaagatgtacttgctgcatcagctgattttacagctgtaacttgtgtggatacaatgcaagaagaagaaggagataaaggggatgatgcctcagtcctgaccaccagacgtgatgaaaaatcccatccttttaccaatccccgatgggctactagagtctttgctgctgaatgtgtctgtaggataattaaccaatgtgagaatgctaacagtgcacattttgacattgctttagcac

SEQ ID NO: 139720 - DNA, 6905 bp, Homo sapiens
  Payload ID: 7400
  Gene Symbol: HEATR5B
  Gene Name: HEAT repeat containing 5B
  Uniprot ID: Q9P2D3
  ENST ID: ENST00000233099
  CDS Start-End: 97-6312
ggtggggcatccgggtctcttggtggctgcttctacccccggagctcagctgatcttcccttccagactacgaggtgtgaatttcaaacttccgtaatggagttagcccacagtttattgctaaatgaagaagctttggctcaaatcaccgaagcaaaaagaccagttttcatctttgaatggttgcgatttcttgataaagtcttggttgctgccaacaagaccgatgtaaaggaaaaacagaaaaaacttgttgaacaattaactggattaataagtagttcacctggaccacctacacgaaaattattagctaaaaatctcgcagccctttatagcattggggatactttcacagtttttcagacacttgataaatgcaatgacattatcagaaataaagatgacactgcggcctacttaccaacaaaattggctgcggtggcttgtgtcggagcattttatgaaaaaatggggagaatgttgggcagcgcatttccagaaacggtaaataatctattgaaatctctgaaaagtgcagagtctcaagggcgaagtgaaatcttaatgagtctacagaaagttctaagtggactgggtggtgcagcagcttcctcccatcgtgatatttacaagaatgccaggtctctcttgactgataggtcaatggctgttcgatgtgcagtggccaagtgtctactagaactacagaatgaagctgtatttatgtggactgctgaactagaaaatatagccactctctgctttaaggctttggaaaactcaaattatggggtacgagtggcagtgtctaaacttttaggaacagtcatggccacagcattaatgccaaaacaggcaacagtaatgcgtcagaatgtgaagcgagcaacatttgatgaagtcttagaactcatggccacaggatttctgcgtggagggtcaggtttcttaaagagcggtggagaaatgttaaaagttggagggtccgttaatcgtgaagtgagagttggagttacgcaggcgtatgttgtttttgtgacaacattgggtggtcagtggttggagcgcagctttgccacgttcctgtcccatgtacttgatctggtttcccatcctcgggcaacacaaacacatgtggaggctgtgtactccagacgatgtgtttcctttatcctaagagctactgtgggcagtttgctaggtgaaaaagcccagattgcagctgccaaagaaatctgccaagctattggaaaacaaatgaaagccgtagaagcagtagtgaatgacacaagtggagaaaacaaatctggcgcagcagacattgcagcaagccagcatgtgatggtctgtgccctccaggaactcgggagcctggtgcagagcttgaatgccaccgcatcccctcttattcaagaagcatctatagggcttttggagattgtgacttcagtgctgcttcatccaagcatggctgcccgacttgctgctgcatggtgtttgcgctgtgtggctgtggcattacctttccagctgacaccatttctagacaggtgtgcagaacggctcaacaacttgaagacctcaccagaagctgtcagtggatatagttttgcaatggctgctttgttaggtggagtacatcagtgtcctttgggcattcctcatgccaaaggaaagatggtagttagtattgctgaagatcttttacgaactgctgcccaaaatagcaggctatctttacagcgcacccaagctggctggcttttacttggagcacttatgactttaggaccatctgtcgttcgttaccatctgcccaagatgttgttattgtggcgaaatgttttcccacgttccttaaaggaattggaagctgagaaggcccgaggcgattcttttacctggcaggtaactttggaaggtcgtgctggagctctatgtgccatgaggagcttcgttgcacattgtcctgagctactaactgaagatgtgattcgaaaattgatgacccctattgaatgtgccatgactatgatgtcacacattccatctgtaatgaaagcccatggagctcatctgaaagctagtgctgcaatggtccgtttaagactttatgatatcttggctttgttacctccaaaaacttatgaaggatcttttaatgcacttcttagagaactggtagcggaattcactttgactgacaactcagccaacacaactacttccctcctcagatccctctgccattatgatgatagtgttcttcttggttcttggcttcaggaaactgatcataaatcaattgaagaccagctccagccaaacagtgcctctggaagtggggctctggagcatgatccttcctctatttatttacgcatacctgctggagaagcagtacctggtcccctccctctcggagtctcagtcattgatgcttctgtggccctttttggtgtagtgtttcctcatgtttcttataaacaccgattacaaatgttggatcactttgctgaatgtgttaaacaagctaaaggtgtccgccagcaggctgtgcagcttaacatatttactgctgttcttagtgcactaaagggcttagctgaaaacaaaagtactttaggacctgaggaagttcgtaaatctgccctgacactggttatgggtcctctggacaacccaaaccccatcttacgttgtgcagcgggggaagctcttggaagaatggctcaggtggttggagaagcaacttttattgctagaatggcccaatatagctttgacaagttgaaatcggctcgagatgttgtatctaggactggtcattcattggctcttggttgtttgcatcgttatgttggtggaataggctcaggacaacatctgaagaccagtgtcagcattttattggctctagcacaagatgggacatcccctgaagtccagacttggtctcttcattcacttgctttgatagtggattctagtggtccgatgtatcgtggctatgtggaaccaacattatctctagttcttaccttgctgttgacagttccgccttcacatacagaagttcatcagtgtttgggtcgatgcttgggtgctataataactactgttggccctgaactacaagggaatggagcaacaacttctacaattcgttcctcttgtttggtgggttgtgcaataacacaagaccattcagattctcttgttcaggcagctgccatatcttgccttcagcagcttcacatgtttgcaccacgacatgtcaatctatctagccttgttcctagcctttgtgttcacttatgtagttcccatttgttacttcgacgagcagctgtggcatgtcttcggcaacttgcacaaagagaagcagcggaagtatgtgaatatgccatgagcctggcaaaaaatacaggggacaaagagagcagtagtgccaatgtcagtccttttgcccctggggttagttctcgaactgatatccattgccggcaccaaggtgttaatataacagaaactggtcttgagggacttctttttggaatgctagaccgggagacagatcgaaaattatgttctgatattcatgacactttgggacatatgctttcttcgctggcagtagaaaaactttctcattggctaatgctttgtaaagatgtcctggcagcttctagtgatatgagtactgcaactctcttaagtagtggaaaagatgaagaagctgaaaagaaagatgagatggatgatgataccatgtttaccacgttaggtgaagaagataaatcaaagccctttgtggcccctcgctgggccactcgagtatttgctgccgattgcctgtgtcgaatcatcaatttgtgtgagaatgcagaccaggctcactttgatcttgccttggcacgttctgctaaacttcgaaaccctacaaatgacctcttggtacttcatctctctgacctcattcgcatggcattcatggctgcaactgatcatagcaaccagctgcgaatggctgggctccaggcgcttgaagacattatcaagaagtttgcgtctgtgcctgagccagaatttccaggtcatgtgatactggagcagtatcaggctaatgtgggagctgctctaagaccagccttttcacaagatacaccatcagatataatagcgaaagcttgccaggtatgtagtacatggataggaagtggagttgtcagtgatctcaatgatctccgtcgagtacacaatcttcttgtttcttctctggacaaagttcaggctggaaaaggatcttccagccagctgtaccgagagagtgccacgaccatggaaaaactggctgttctcaaagcttgggcagaggtatatgtggtcgctatgaatattaaaaaggaagcagagtcaaaaccaaaaagagcaattaaaaatactgacgatgatgatgacgactgtggtaccatcgatgaactgccaccagatagtttaataacactggtacaacctgaactaccaacactcagtcgcctgtggttagcagcattaaaagattatgcactcttgactttaccagccgaattttctagtcagcttcctccagatggtggagcattttatacccctgaaactattgatacagctagacttcactatcggaattcctgggccccaattctccatgcggtggcactttggttaaatagcacaggatttacgtgctcagagtctacagaagcagcagcaatatctggtttacaaaaacgttctacatctgtcaatttaaaccaggcatcaggagcagtgggtagtgctaaatctttgccagaaattaacaaagacagaatgcatctgattttaggtgtgagtatacagtttctttgttcccctagacctgaggagcccattgaacatgttacagcatgcctgcaggccttacataccttgctagactccccttatgctcgagtccatattgcagaagatcagctgataggtgttgagttgctgagtgttttgcaccgccttctattgacctggaatccatcatctgtccagctgttggttactggagttgtacaacagatagtaagagctgctcaggattatttgcaagagaaaagaaacactctaaatgaagatgatatggaaaaagaggcctgtaccgtattgggagaaggaggtgacagcggtggtctcattcctggaaaatctcttgtgtttgcaactatggagctgctgatgttcattttagtacggcatatgccacatctcagtaccaaggtgtcagactctccaagtcacatagccactaaaactcgactatcagaagaaagtgctcgtttggtggcagccacagttaccatactctctgatttaccatccctttgttcacccgctggatgtatgacaatcctgcccacaattctgttcttaattgcaagaatattgaaagacacagcaataaagtctgcagataatcaggttcctccaccagtcagtgcagctcttcaagggattaaaagtattgtgacactttcaatggccaaaactgaggctggcgttcaaaaacagtggacagctctgattcgtagcacgcttgcttgcatcctggaatattctcaaccagaagactctgtacctacacctgatgaagtaagcatgctaacagcaattgcactcttcctgtggtctgctagtaatgaaataataggagtccagtcattacagaatggctgcatgaacagatttaaaaatgcattaaattcatgcgacccatgggttcaagccaaatgttaccagcttctcctctcagtcttccagcattccaatcgtgccctttcaactccttatattcattcattagctccaatagtggttgaaaagctaaaagctgttgaaagaaacagaccagccagtaacatagagcttttagcggttcaagaaggaataaaagttcttgaaacactggttgctcttggtgaagaacaaaacagagtccagctacttgctcttttagttcccactttgatatcttacctgctggatgaaaattcttttgcctcagcaagttcagcttccaaagatcttcatgagtttgcactccagaatttaatgcatattggacctctgtatccacatgctttcaagacagtaatgggggctgctcctgagttgaaagtgcgtctagaaactgccgttcgagcaagccaagcgagcaaagctaaagcggctgccagacaaccagcccccgccatacattctgcaccaacaattaagctaaaaacaagttttttttaatttgtaatttcatttatttgtatttatgttgtcaactagcccctaattagtgatggccactgtatcattccaggctacctatgggttctgttttatttgtatattggtattatagtgcttccaagtaggttaagtgaaataatgctcacaccacttattgatttttaaggagtgattttttttatcatgtggtgaatatgttttcattttcctcctaataatgtttctcttttgttaacttatttatttttcaaacactgagccatagtcttaaatttaaatgctaaaaacaattgtatcatgtagtcgggcagcctattgatactgtcaggggaaaaaaatgggtcagaactcagcatctgtcatgaaaaaaatcaattgaaaaacaagcagattttaaattttgaagtaatcaaaataatggaaagtgtctgttttgtggtgtatatactatgaataaaatcacagcattttctaagcatttcccaaaatgtccttatctttctgatggatcttttagctttcatatcaaattactaaattatgctatgtatattttagttggtaacaattaaaattctcatttaaaggtt

SEQ ID NO: 139721 - DNA, 433 bp, Homo sapiens
  Payload ID: 7400
  Gene Symbol: HEATR5B
  Gene Name: HEAT repeat containing 5B
  ENST ID: ENST00000425467
  CDS Start-End: 1-348
gttcaagccaaatgttaccagcttctcctctcagtcttccagcattccaatcgtgccctttcaactccttatattcattcattagctccaatagtggttgaaaagctaaaagctgttgaaagaaacagaccagccagtaacatagagcttttagcggttcaagaaggaataaaagttcttgaaacactggttgctcttggtgaagaacaaaacattctaggtagtcagcctgaatctactttacgttccctgcctccagaccctattctcctgcctcctgcccacaactcccaggctccagtgatctacccgcctcggcctcccaaagtgctgggattacaggcgtgagccatggcgcctggccaaaatgtaaatgagtcctcgtaaagcaaaaaaagtattgtgagtaataaagttgaactacgaattaaaa

SEQ ID NO: 139722 - DNA, 3932 bp, Homo sapiens
  Payload ID: 7401
  Gene Symbol: HEATR6
  Gene Name: HEAT repeat containing 6
  Uniprot ID: Q6AI08
  ENST ID: ENST00000184956
  CDS Start-End: 18-3563
ccccgcccgtagaaaagatggctgctgtgcaagttgtcggttcgtggccttccgtgcagccgcgggaggcaccgcgggaagcaatccctgagcgaggcaatgggtttcgcctcttgtctgccaggctctgcgccctgcgcccggatgacagcagctccgcccgcaccgagatccacctgctcttcgatcagctcatctccgagaactacagcgagggcagtggcgtggccccggaggacgttagtgctcttcttgtccaggcttgccgactggtacctcttaatcagaatcatcttgtcagcaaagtgagccagcttatccaccatttacttaacagattacaggtaattgttgatgaacagcacttggatttcctgttggcatatactatttcggctattcatcagtgtagttcctggacacacagggaaattcttcaagccctggcagctctggtgtactgcaatggctccaaatgtcaaaagtacctcccagagctgctaggcaacaccggactcttaatgaagttgagtgacttggctcagtctgatcctgaagtcaggagagctgcagtacattgtatggcaaacttatgtctcagtgtgccaggacagccgtatttggaggagccctaccaaaatgtctgtttccaagcttttctgactattttacagtctccaaaatcatctgatatggatgatatcacattttgcatgttattgcaaaatgcattaaaaggtatacagtcacttctaaatggtgggagaatgaaactaacacagactgatgaacttggagcacttttagctgtgctaaagaaattcatgtttcacggactccctggactaaacatagagatgcccacggtgttatacccaactccgcttcctcagtatgatgggcgaacacctatcaaaccacagcaatcagaatccagtgcttctcgaccaactttgaataaaaagaaaaaatccaaagtaaaaccaaagaaaatccagcaaggagaggaggaggaaaaggaatccagtggtgaaatagaggcagccccagtcactggcacaggcagagtgaacctgcatgaagggaacacttggtgtccctcctccctgggtgtccagagtttgcctttagatggaagtggagctgcagaaaaagatggagtctcctcatccttcagttcttccagttggaaaagggtcagcagtagtgagtcagacttttctgatgctgaaggaggcatgcagagtaaaatgaggtcttaccaagctaaagttcgccaaggagccttagtttgttttctttctactataaaatcgatagaaaaaaaagttctttatggctactggtcagcttttattcctgatacgcctgaacttggcagcccacagtcagtgtccttgatgactcttacattgaaagacccttctccaaagacacgtgcctgtgctctgcaagttttatctgccatcttggaaggctcaaagcagtttctttctgttgctgaagataccagtgaccacagaagggcttttacccccttctccgtaatgatcgcttgcagcattagagagttgcacagatgtcttttgttagctttggtggcggagtcatcctcacagaccgttactcagataattaagtgccttgcaaatttagtatcaaatgcaccttatgatcgtctaaaactcagcctgctgaccaaagtctggaaccagataaagccttatattcgccacaaagatgttaatgttcgtgtgtcaagtctcacactcttgggagctatagtgtccacccacgcacctttacctgaagtccaactacttctgcaacagccatgttcttctggactcggtaatagcaattcagcaacccctcacctcagccctcctgattggtggaagaaagcccctgcaggaccctctctggaagaaacgtcagttagctcacctaaggggtcttcagagccctgctggctcattcgactctgcatttccattgtcgtactgcccaaggaggattcctgttcaggtagcgatgctggctctgcagcaggaagcacctacgaaccatcccccatgcgactggaggccttacaggtattgactcttctggcaaggggctacttttcaatgactcaagcctacttgatggagcttggagaggtgatttgcaagtgcatgggggaagcagatccatccattcagcttcatggagcaaagcttctggaagaactgggcacaggcttaatacagcagtataaaccagactccactgcagcacctgatcagagagcaccagtcttcttggtggtgatgttctggactatgatgctgaacggtcctttacccagagccctgcagaattcagaacacccaactctccaggcgagcgcctgtgatgccctgtcttccatcttgccagaggccttcagcaatctgccgaatgacaggcagatgctgtgcatcacagtgctgctcgggctgaatgacagcaagaatcgcttagtgaaagctgcaacttcacgggccctgggagtctatgtgctttttccctgtctcagacaggatgtcatatttgttgcagacgcagcaaatgcaatattgatgtcacttgaagacaagtctctgaatgttcgagccaaagcagcctggtccctgggcaacctgacagacactctgattgtcaacatggaaacaccagacccaagtttccaggaagagttctctggtctcctgctcttgaaaatgttacgatcagctatagaagcatccaaggataaagacaaggtaaaaagcaatgcagtccgggcccttggaaatttgcttcattttctgcaaccctctcatatagaaaaacccacatttgcagaaatcattgaggagtctatccaggccctaatttctactgttctaacagaagctgccatgaaagtccgatggaatgcttgttatgcaatgggaaatgtatttaaaaatcctgcccttcctttagggacagccccatggacctcccaggcctacaatgccctgacatcggtcgtgacatcatgcaagaacttcaaagtgcgcatcagatctgcagctgccctttccgtcccggggaagagagagcagtacgggtctgttgaccagtatgctcggatctggaatgcattggtcaccgctttacagaagagtgaagacaccatagactttttggaattcaagtactgtgtcagcctacggacccaaatctgccaggcactgattcacctcttgagcttggccagtgcctcggacctcccttgtatgaaagaaacccttgaactgagtgggaatatggtccagtcctatattctacagtttttaaaatcaggagcagagggagatgacactggagcaccccacagcccacaggaaagagaccagatggtcagaatggcccttaaacacatgggcagcatccaggcaccaactggagacacagccagaagggccatcatgggctttttagaagagatcctggccgtttgttttgactcatctggatcacaaggggcactcccagggttaacaaatcagtgaagatcccaccatactttctagatgtcgaaggcggcagtaggaagacctgagcttgagcataagatctgtgggatttcatcttaggggcagaaacaatccgttcactatttatttagaatgacttagcagccatttaaattttcacagagggctcaaccacctttggagtgactccatagcactggccatggtcagggttgttggaacatctgacctgtgcatccaggagccgaggagtcaggttgtaatacaggccaagcagacgggctttgagggcatttagtctcagaaaaaaaaaatgtagaaggatttcggaattagaattttgtgtattgtatctgtagttttgtaataaactaacgaaaaata

SEQ ID NO: 139723 - DNA, 3288 bp, Homo sapiens
  Payload ID: 7401
  Gene Symbol: HEATR6
  Gene Name: HEAT repeat containing 6
  ENST ID: ENST00000585976
  CDS Start-End: 8-3217
agaaaagatggctgctgtgcaagttgtcggttcgtggccttccgtgcagccgcgggaggcaccgcgggaagcaatccctgagcgaggcaatgggtttcgcctcttgtctgccaggctctgcgccctgcgcccggatgacagcagctccgcccgcaccgagatccacctgctcttcgatcagctcatctccgagaactacagcgagggcagtggcgtggccccggaggacgttagtgctcttcttgtccaggcttgccgactggtacctcttaatcagaatcatcttgtcagcaaagtgagccagcttatccaccatttacttaacagattacaggtaattgttgatgaacagcacttggatttcctgttggcatatactatttcggctattcatcagtgtagttcctggacacacagggaaattcttcaagccctggcagctctggtgtactgcaatggctccaaatgtcaaaagtacctcccagagctgctaggcaacaccggactcttaatgaagttgagtgacttggctcagtctgatcctgaagtcaggagagctgcagtacattgtatggcaaacttatgtctcagtgtgccaggacagccgtatttggaggagccctaccaaaatgtctgtttccaagcttttctgactattttacagtctccaaaatcatctgatatggatgatatcacattttgcatgttattgcaaaatgcattaaaaggtatacagtcacttctaaatggtgggagaatgaaactaacacagactgatgaacttggagcacttttagctgtgctaaagaaattcatgtttcacggactccctggactaaacatagagatgcccacggtgttatacccaactccgcttcctcagtatgatgggcgaacacctatcaaaccacagcaatcagaatccagtgcttctcgaccaactttgaataaaaagaaaaaatccaaagtaaaaccaaagaaaatccagcaaggagaggaggaggaaaaggaatccagtggtgaaatagaggcagccccagtcactggcacaggcagagtgaacctgcatgaagggaacacttggtgtccctcctccctgggtgtccagagtttgcctttagatggaagtggagctgcagaaaaagatggagtctcctcatccttcagttcttccagttggaaaagggtcagcagtagtgagtcagacttttctgatgctgaaggaggcatgcagagtaaaatgaggtcttaccaagctaaagttcgccaaggagccttagtttgttttctttctactataaaatcgatagaaaaaaaagttctttatggctactggtcagcttttattcctgatacgcctgaacttggcagcccacagtcagtgtccttgatgactcttacattgaaagacccttctccaaagacacgtgcctgtgctctgcaagttttatctgccatcttggaaggctcaaagcagtttctttctgttgctgaagataccagtgaccacagaagggcttttacccccttctccgtaatgatcgcttgcagcattagagagttgcacagatgtcttttgttagctttggtggcggagtcatcctcacagaccgttactcagataattaagtgccttgcaaatttagtatcaaatgcaccttatgatcgtctaaaactcagcctgctgaccaaagtctggaaccagataaagccttatattcgccacaaagatgttaatgttcgtgtgtcaagtctcacactcttgggagctatagtgtccacccacgcacctttacctgaagtccaactacttctgcaacagccatgttcttctggactcggtaatagcaattcagcaacccctcacctcagccctcctgattggtggaagaaagcccctgcaggaccctctctggaagaaacgtcagttagctcacctaaggggtcttcagagccctgctggctcattcgactctgcatttccattgtcgtactgcccaaggaggattcctgttcaggtagcgatgctggctctgcagcaggaagcacctacgaaccatcccccatgcgactggaggccttcagcaatctgccgaatgacaggcagatgctgtgcatcacagtgctgctcgggctgaatgacagcaagaatcgcttagtgaaagctgcaacttcacgggccctgggagtctatgtgctttttccctgtctcagacaggatgtcatatttgttgcagacgcagcaaatgcaatattgatgtcacttgaagacaagtctctgaatgttcgagccaaagcagcctggtccctgggcaacctgacagacactctgattgtcaacatggaaacaccagacccaagtttccaggaagagttctctggtctcctgctcttgaaaatgttacgatcagctatagaagcatccaaggataaagacaaggtaaaaagcaatgcagtccgggcccttggaaatttgcttcattttctgcaaccctctcatatagaaaaacccacatttgcagaaatcattgaggagtctatccaggccctaatttctactgttctaacagaagctgccatgaaagtccgatggaatgcttgttatgcaatgggaaatgtatttaaaaatcctgcccttcctttagggacagccccatggacctcccaggcctacaatgccctgacatcggtcgtgacatcatgcaagaacttcaaagtgcgcatcagatctgcagctgccctttccgtcccggggaagagagagcagtacgggtctgttgaccagtatgctcggatctggaatgcattggtcaccgctttacagaagagtgaagacaccatagactttttggaattcaagtactgtgtcagcctacggacccaaatctgccaggcactgattcacctcttgagcttggccagtgcctcggacctcccttgtatgaaagaaacccttgaactgagtgggaatatggtccagtcctatattctacagtttttaaaatcaggagcagagggagatgacactggagcaccccacagcccacaggaaagagaccagatggtcagaatggcccttaaacacatgggcagcatccaggcaccaactggagacacagccagaagggccatcatgggctttttagaagagatcctggccgtttgttttgactcatctggatcacaaggggcactcccagggttaacaaatcagtgaagatcccaccatactttctagatgtcgaaggcggcagtaggaagacctgagcttgagcataagatctgtgg

SEQ ID NO: 139724 - DNA, 550 bp, Homo sapiens
  Payload ID: 7401
  Gene Symbol: HEATR6
  Gene Name: HEAT repeat containing 6
  ENST ID: ENST00000593228
  CDS Start-End: 1-550
ggctgctgtgcaagttgtcggttcgtggccttccgtgcagccgcgggaggcaccgcgggaagcaatccctgagcgaggcaatgggtttcgcctcttgtctgccaggctctgcgccctgcgcccggatgacagcagctccgcccgcaccgagatccacctgctcttcgatcagctcatctccgagaactacagcgagggcagtggcgtggccccggaggacgttagtgctcttcttgtccaggcttgccgactggtacctcttaatcagaatcatcttgtcagcaaagtgagccagcttatccaccatttacttaacagattacagtacctcccagagctgctaggcaacaccggactcttaatgaagttgagtgacttggctcagtctgatcctgaagtcaggagagctgcagtacattgtatggcaaacttatgtctcagtgtgccaggacagccgtatttggaggagccctaccaaaatgtctgtttccaagcttttctgactattttacagtctccaaaatcatctgatatggatgatatcacattt

SEQ ID NO: 139725 - DNA, 687 bp, Homo sapiens
  Payload ID: 7401
  Gene Symbol: HEATR6
  Gene Name: HEAT repeat containing 6
  ENST ID: ENST00000587314
  CDS Start-End: 1-162
gccaaagcagcctggtccctgggcaacctgacagacactctgattgtcaacatggaaacaccagacccaagtttccaggaagagttctctggtctcctgctcttgaaaatgttacgatcagctatagaagcatccaaggataaagacaagaagctgccatgaaagtccgatggaatgcttgttatgcaatgggaaatgtatttaaaaatcctgcccttcctttagggacagccccatggacctcccaggcctacaatgccctgacatcggtcgtgacatcatgcaagaacttcaaagtgcgcatcagatctgcagctgccctttccgtcccggggaagagagagcagtacgggtctgttgaccagtatgctcggatctggaatgcattggtcaccgctttacagaagagtgaagacaccatagactttttggaattcaagtactgtgtcagcctacggacccaaatctgccaggcactgattcacctcttgagcttggccagtgcctcggacctcccttgtatgaaagaaacccttgaactgagtgggaatatggtccagtcctatattctacagtttttaaaatcaggagcagagggagatgacactggagcaccccacagcccacaggaaagagaccagatggtcagaatggcccttaaacacatgggcagcatccaggcaccaa

SEQ ID NO: 139726 - DNA, 843 bp, Homo sapiens
  Payload ID: 7401
  Gene Symbol: HEATR6
  Gene Name: HEAT repeat containing 6
  ENST ID: ENST00000590587
  CDS Start-End: 1-74
atcatcttgtcagcaaagtgagccagcttatccaccatttacttaacagattacagctgccaatgtctggttagttcaaggaaaagttacaaggacttcatcaagttctactttactaaagaggaagaagtgagcaagaccttggggtggggagaaggcccctacgttgatcaaactttcaggccctttagaggtgatccttttgacacataaacgacagacacacactctctcttttatacagcttgattcaggtgagcatacatgtccataaaagcataatattttttaaaagttagatcagaatatatcttttcctgtcctgttaggtaattgttgatgaacagcacttggatttcctgttggcatatactatttcggctattcatcagtgtagttcctggacacacagggaaattcttcaagccctggcagctctggtgtactgcaatggctccaaatgtcaaaagtacctcccagagctgctaggcaacaccggactcttaatgaagttgagtgacttggctcagtctgatcctgaagtcaggagagctgcagtacattgtatggcaaacttatgtctcagtgtgccaggacagccgtatttggaggagccctaccaaaatgtctgtttccaagcttttctgactattttacagtctccaaaatcatctgatatggatgatatcacattttgcatgttattgcaaaatgcattaaaaggtatacagtcacttctaaatggtgggagaatgaaactaacacagactgatgaacttggagcacttttagctgtgctaaagaaattcatgtttcacggactccctggactaaacatagaga

SEQ ID NO: 139727 - DNA, 573 bp, Homo sapiens
  Payload ID: 7401
  Gene Symbol: HEATR6
  Gene Name: HEAT repeat containing 6
  ENST ID: ENST00000592664
  CDS Start-End: 8-352
agaaaagatggctgctgtgcaagttgtcggttcgtggccttccgtgcagccgcgggaggcaccgcgggaagcaatccctgagcgaggcaatgggtttcgcctcttgtctgccaggctctgcgccctgcgcccggatgacagcagctccgcccgcaccgagatccacctgctcttcgatcagctcatctccgagaactacagcgagggcagtggcgtggccccggaggacgttagtgctcttcttgtccaggcttgccgactggtacctcttaatcagaatcatcttgtcagcaaagtgagccagcttatccaccatttacttaacagattacagctgccaatgtctggttagttcaaggaaaagttacaaggacttcatcaagttctactttactaaagaggaagaagtgagcaagaccttggggtggggagaaggcccctacgttgatcaaactttcaggccctttagaggtgatccttttgacacataaacgacagacacacactctctcttttatacagcttgattcaggtaattgttgatgaacagcacttggatttcctgttggcata

SEQ ID NO: 139728 - DNA, 490 bp, Homo sapiens
  Payload ID: 7401
  Gene Symbol: HEATR6
  Gene Name: HEAT repeat containing 6
  ENST ID: ENST00000591683
  CDS Start-End: 1-363
ctggaagaactgggcacaggcttaatacagcagtataaaccagactccactgcagcacctgatcagagagcaccagtcttcttggtggtgatgttctggactatgatgctgaacggtcctttacccagagccctgcagaattcagaacacccaactctccaggcgagcgcctgtgatgccctgtcttccatcttgccagaggccttcagcaatctgccgaatgacaggcagatgctgtgcatcacagtgctgctcgggctgaatgacagcaagaatcgcttagtgaaagctgcaacttcacgggccctgggagtctatgtgctttttccctgtctcagacagacgcagcaaatgcaatattgatgtcacttgaagacaagtctctgaatgttcgagccaaagcagcctggtccctgggcaacctgacagacactctgattgtcaacatggaaacaccagacccaagtttccaggaagagttctctggtct

SEQ ID NO: 139729 - DNA, 3566 bp, Homo sapiens
  Payload ID: 7401
  Gene Symbol: HEATR6
  Gene Name: HEAT repeat containing 6
  ENST ID: ENST00000587003
  CDS Start-End: 8-1249
agaaaagatggctgctgtgcaagttgtcggttcgtggccttccgtgcagccgcgggaggcaccgcgggaagcaatccctgagcgaggcaatgggtttcgcctcttgtctgccaggctctgcgccctgcgcccggatgacagcagctccgcccgcaccgagatccacctgctcttcgatcagctcatctccgagaactacagcgagggcagtggcgtggccccggaggacgttagtgctcttcttgtccaggcttgccgactggtacctcttaatcagaatcatcttgtcagcaaagtgagccagcttatccaccatttacttaacagattacaggtaattgttgatgaacagcacttggatttcctgttggcatatactatttcggctattcatcagtgtagttcctggacacacagggaaattcttcaagccctggcagctctggtgtactgcaatggctccaaatgtcaaaagtacctcccagagctgctaggcaacaccggactcttaatgaagttgagtgacttggctcagtctgatcctgaagtcaggagagctgcagtacattgtatggcaaacttatgtctcagtgtgccaggacagccgtatttggaggagccctaccaaaatgtctgtttccaagcttttctgactattttacagtctccaaaatcatctgatatggatgatatcacattttgcatgttattgcaaaatgcattaaaaggtatacagtcacttctaaatggtgggagaatgaaactaacacagactgatgaacttggagcacttttagctgtgctaaagaaattcatgtttcacggactccctggactaaacatagagatgcccacggtgttatacccaactccgcttcctcagtatgatgggcgaacacctatcaaaccacagcaatcagaatccagtgcttctcgaccaactttgaataaaaagaaaaaatccaaagtaaaaccaaagaaaatccagcaaggagaggaggaggaaaaggaatccagtggtgaaatagaggcagccccagtcactggcacaggcagagtgaacctgcatgaagggaacacttggtgtccctcctccctgggtgtccagagtttgcctttagatggaagtggagctgcagaaaaagatggagtctcctcatccttcagttcttccagttggaaaagggtcagcagtagtgagtcagacttttctgatgctgaaggaggcatgcagagtaaaatgaggtagttatgaaaggtcttaccaagctaaagttcgccaaggagccttagtttgttttctttctactataaaatcgatagaaaaaaaagttctttatggctactggtcagcttttattcctgatacgcctgaacttggcagcccacagtcagtgtccttgatgactcttacattgaaagacccttctccaaagacacgtgcctgtgctctgcaagttttatctgccatcttggaaggctcaaagcagtttctttctgttgctgaagataccagtgaccacagaagggcttttacccccttctccgtaatgatcgcttgcagcattagagagttgcacagatgtcttttgttagctttggtggcggagtcatcctcacagaccgttactcagataattaagtgccttgcaaatttagtatcaaatgcaccttatgatcgtctaaaactcagcctgctgaccaaagtctggaaccagataaagccttatattcgccacaaagatgttaatgttcgtgtgtcaagtctcacactcttgggagctatagtgtccacccacgcacctttacctgaagtccaactacttctgcaacagccatgttcttctggactcggtaatagcaattcagcaacccctcacctcagccctcctgattggtggaagaaagcccctgcaggaccctctctggaagaaacgtcagttagctcacctaaggggtcttcagagccctgctggctcattcgactctgcatttccattgtcgtactgcccaaggaggattcctgttcaggtagcgatgctggctctgcagcaggaagcacctacgaaccatcccccatgcgactggaggccttacaggtattgactcttctggcaaggggctacttttcaatgactcaagcctacttgatggagcttggagaggtgatttgcaagtgcatgggggaagcagatccatccattcagcttcatggagcaaagcttctggaagaactgggcacaggcttaatacagcagtataaaccagactccactgcagcacctgatcagagagcaccagtcttcttggtggtgatgttctggactatgatgctgaacggtcctttacccagagccctgcagaattcagaacacccaactctccaggcgagcgcctgtgatgccctgtcttccatcttgccagaggccttcagcaatctgccgaatgacaggcagatgctgtgcatcacagtgctgctcgggctgaatgacagcaagaatcgcttagtgaaagctgcaacttcacgggccctgggagtctatgtgctttttccctgtctcagacaggatgtcatatttgttgcagacgcagcaaatgcaatattgatgtcacttgaagacaagtctctgaatgttcgagccaaagcagcctggtccctgggcaacctgacagacactctgattgtcaacatggaaacaccagacccaagtttccaggaagagttctctggtctcctgctcttgaaaatgttacgatcagctatagaagcatccaaggataaagacaaggtaaaaagcaatgcagtccgggcccttggaaatttgcttcattttctgcaaccctctcatatagaaaaacccacatttgcagaaatcattgaggagtctatccaggccctaatttctactgttctaacagaagctgccatgaaagtccgatggaatgcttgttatgcaatgggaaatgtatttaaaaatcctgcccttcctttagggacagccccatggacctcccaggcctacaatgccctgacatcggtcgtgacatcatgcaagaacttcaaagtgcgcatcagatctgcagctgccctttccgtcccggggaagagagagcagtacgggtctgttgaccagtatgctcggatctggaatgcattggtcaccgctttacagaagagtgaagacaccatagactttttggaattcaagtactgtgtcagcctacggacccaaatctgccaggcactgattcacctcttgagcttggccagtgcctcggacctcccttgtatgaaagaaacccttgaactgagtgggaatatggtccagtcctatattctacagtttttaaaatcaggagcagagggagatgacactggagcaccccacagcccacaggaaagagaccagatggtcagaatggcccttaaacacatgggcagcatccaggcaccaactggagacacagccagaagggccatcatgggctttttagaagagatcctggccgtttgttttgactcatctggatcacaaggggcactcccagggttaacaaatcagtga

SEQ ID NO: 139730 - DNA, 648 bp, Homo sapiens
  Payload ID: 7401
  Gene Symbol: HEATR6
  Gene Name: HEAT repeat containing 6
  ENST ID: ENST00000593097
  CDS Start-End: 8-648
agaaaagatggctgctgtgcaagttgtcggttcgtggccttccgtgcagccgcgggaggcaccgcgggaagcaatccctgagcgaggcaatgggtttcgcctcttgtctgccaggctctgcgccctgcgcccggatgacagcagctccgcccgcaccgagatccacctgctcttcgatcagctcatctccgagaactacagcgagggcagtggcgtggccccggaggacgttagtgctcttcttgtccaggcttgccgactggtacctcttaatcagaatcatcttgtcagcaaagtgagccagcttatccaccatttacttaacagattacagagtttcacactgttgcccaggctggagtgtggcgcgatctcagctcacagcaagctccgcctcccgagtttacaccattcttctgcctcagcctcccaagtagctgggactacaggcacccgccaccacgtaattgttgatgaacagcacttggatttcctgttggcatatactatttcggctattcatcagtgtagttcctggacacacagggaaattcttcaagccctggcagctctggtgtactgcaatggctccaaatgtcaaaagtacctcccagagctgctaggcaacaccggactcttaatgaagtt

SEQ ID NO: 139731 - DNA, 3287 bp, Homo sapiens
  Payload ID: 7401
  Gene Symbol: HEATR6
  Gene Name: HEAT repeat containing 6
  ENST ID: ENST00000613428
  CDS Start-End: 466-3216
agaaaagatggctgctgtgcaagttgtcggttcgtggccttccgtgcagccgcgggaggcaccgcgggaagcaatccctgagcgaggcaatgggtttcgcctcttgtctgccaggctctgcgccctgcgcccggatgacagcagctccgcccgcaccgagatccacctgctcttcgatcagctcatctccgagaactacagcgagggcagtggcgtggccccggaggacgttagtgctcttcttgtccaggcttgccgactggtacctcttaatcagaatcatcttgtcagcaaagtgagccagcttatccaccatttacttaacagattacaggtaattgttgatgaacagcacttggatttcctgttggcatatactatttcggctattcatcagtgtagttcctggacacacagggaaattcttcaagccctggcagctctggtgtactgcaatggctccaaatgtcaaagtacctcccagagctgctaggcaacaccggactcttaatgaagttgagtgacttggctcagtctgatcctgaagtcaggagagctgcagtacattgtatggcaaacttatgtctcagtgtgccaggacagccgtatttggaggagccctaccaaaatgtctgtttccaagcttttctgactattttacagtctccaaaatcatctgatatggatgatatcacattttgcatgttattgcaaaatgcattaaaaggtatacagtcacttctaaatggtgggagaatgaaactaacacagactgatgaacttggagcacttttagctgtgctaaagaaattcatgtttcacggactccctggactaaacatagagatgcccacggtgttatacccaactccgcttcctcagtatgatgggcgaacacctatcaaaccacagcaatcagaatccagtgcttctcgaccaactttgaataaaaagaaaaaatccaaagtaaaaccaaagaaaatccagcaaggagaggaggaggaaaaggaatccagtggtgaaatagaggcagccccagtcactggcacaggcagagtgaacctgcatgaagggaacacttggtgtccctcctccctgggtgtccagagtttgcctttagatggaagtggagctgcagaaaaagatggagtctcctcatccttcagttcttccagttggaaaagggtcagcagtagtgagtcagacttttctgatgctgaaggaggcatgcagagtaaaatgaggtcttaccaagctaaagttcgccaaggagccttagtttgttttctttctactataaaatcgatagaaaaaaaagttctttatggctactggtcagcttttattcctgatacgcctgaacttggcagcccacagtcagtgtccttgatgactcttacattgaaagacccttctccaaagacacgtgcctgtgctctgcaagttttatctgccatcttggaaggctcaaagcagtttctttctgttgctgaagataccagtgaccacagaagggcttttacccccttctccgtaatgatcgcttgcagcattagagagttgcacagatgtcttttgttagctttggtggcggagtcatcctcacagaccgttactcagataattaagtgccttgcaaatttagtatcaaatgcaccttatgatcgtctaaaactcagcctgctgaccaaagtctggaaccagataaagccttatattcgccacaaagatgttaatgttcgtgtgtcaagtctcacactcttgggagctatagtgtccacccacgcacctttacctgaagtccaactacttctgcaacagccatgttcttctggactcggtaatagcaattcagcaacccctcacctcagccctcctgattggtggaagaaagcccctgcaggaccctctctggaagaaacgtcagttagctcacctaaggggtcttcagagccctgctggctcattcgactctgcatttccattgtcgtactgcccaaggaggattcctgttcaggtagcgatgctggctctgcagcaggaagcacctacgaaccatcccccatgcgactggaggccttcagcaatctgccgaatgacaggcagatgctgtgcatcacagtgctgctcgggctgaatgacagcaagaatcgcttagtgaaagctgcaacttcacgggccctgggagtctatgtgctttttccctgtctcagacaggatgtcatatttgttgcagacgcagcaaatgcaatattgatgtcacttgaagacaagtctctgaatgttcgagccaaagcagcctggtccctgggcaacctgacagacactctgattgtcaacatggaaacaccagacccaagtttccaggaagagttctctggtctcctgctcttgaaaatgttacgatcagctatagaagcatccaaggataaagacaaggtaaaaagcaatgcagtccgggcccttggaaatttgcttcattttctgcaaccctctcatatagaaaaacccacatttgcagaaatcattgaggagtctatccaggccctaatttctactgttctaacagaagctgccatgaaagtccgatggaatgcttgttatgcaatgggaaatgtatttaaaaatcctgcccttcctttagggacagccccatggacctcccaggcctacaatgccctgacatcggtcgtgacatcatgcaagaacttcaaagtgcgcatcagatctgcagctgccctttccgtcccggggaagagagagcagtacgggtctgttgaccagtatgctcggatctggaatgcattggtcaccgctttacagaagagtgaagacaccatagactttttggaattcaagtactgtgtcagcctacggacccaaatctgccaggcactgattcacctcttgagcttggccagtgcctcggacctcccttgtatgaaagaaacccttgaactgagtgggaatatggtccagtcctatattctacagtttttaaaatcaggagcagagggagatgacactggagcaccccacagcccacaggaaagagaccagatggtcagaatggcccttaaacacatgggcagcatccaggcaccaactggagacacagccagaagggccatcatgggctttttagaagagatcctggccgtttgttttgactcatctggatcacaaggggcactcccagggttaacaaatcagtgaagatcccaccatactttctagatgtcgaaggcggcagtaggaagacctgagcttgagcataagatctgtgg

SEQ ID NO: 139732 - DNA, 1829 bp, Homo sapiens
  Payload ID: 7402
  Gene Symbol: HEATR9
  Gene Name: HEAT repeat containing 9
  Uniprot ID: A2RTY3
  ENST ID: ENST00000603870
  CDS Start-End: 130-1722
agaagtccagacacctcccctgtacctctcgtaccacagaggacaggtctcctccagctgtgcccccactcccctaaaagccttgtattcccccctgcaggttccctctggccccaccaggagaagaagatggcctatgaaaaatcaactgatatctctgatgtctccaggtcaatgttcctgtacccatggctggaatatccagacaagaccaaagaactcagaaaagccatggctcctgttcatctgcccttgtcctgctaccagatgccaaaggaagagtttcccccaagtccagagtgctggaggcagcatccgagcaagccaaactcagtcccgtactgctacttcaagaaacctgagatctacacgcactggcacgacctgtatgatcagcgagaggaaagggaggctgagaagatgttgaggaaaatgagagatgactgtaggtacatcaaagaggaactcacaaaaagcctggaatctcccagagaggatgagcagttctatgcagcacaggctctgggatgcttacgcatcagtgacaagtttgtcatggaggcactacagcaggtggcccaaactggtccagagaaagtgaagtacgaggcctaccgaaccctggccatcctgggttgcctgaataagcatgtgatccgggctctcatcaaacagctgaaggagaaaaatgagggtcaaaggatggagactttgacggggctacgaatggctcttaactcctgggctgctgtctctaaagacaagaggactcaagtcggggatgagggcaagctggtgcctgtactacagacactgatcaagaagtcgtccagtgaagcatctctggaggcagccctgtgcctgggtttcctgaggccttgcagcaacatggtccaagagttcttgttgcagtgcctgtgccaaggactcaagacccagcggatgaaggcacttaggatgctggtcaaggtgatgcacgtgcactcagccccagtcatcaaggccatcctagaccagctgtgttcttccagtgtccttgaggaccgctttgaagccacccaaatgctcaagaccattgggctggaacagatccaggcacaggggctagaggaactcacatttaacctgctcaggaggaagacgcataatgaacccttccttgctgtgaggcaggctgtggctcaaactgtggaagagctcaagttgaagcctacgatgatgaacttggtggaggcacaactgatgaacccagatgccactgcacgccaggaagcagtcatctctttgggtgtcctggggatccgcagtccacaagtgttccacttgctcctggacttactagatgcagaaaaccaccaggctgtgaagaagagtctacaagaaacattaatcctttgtgcctcaattgatccctggatccaaaacaagctgaaaaacaaggttctctctgtatatgaggcacctaagaccaatgtgaaggcagagcccacaaggttccagaaagagcctgagaacccagaagagttaactattcaagactttcgacttgcaaagctgaaccccttgtttattgcaaagtccatcaccaaagtaggccaaaagaaaacgcctgctttcccaccgtgctgctcgaaaccacgaaaacataggccacaggtcatagggccctggcagccaaggatcaagaaacagctccgggtccttgctgaaattgccaaataagtcaattctttgggcctactccccgactccctccctgaagatgcttctcaggctcccatgagaaaacaatctatacttatcttccgtgaataaacaagtgtcactct

SEQ ID NO: 139733 - DNA, 1974 bp, Homo sapiens
  Payload ID: 7402
  Gene Symbol: HEATR9
  Gene Name: HEAT repeat containing 9
  Uniprot ID: A2RTY3
  ENST ID: ENST00000604834
  CDS Start-End: 150-1862
acttggaagcttctacctccagaagtccagacacctcccctgtacctctcgtaccacagaggacaggtctcctccagctgtgcccccactcccctaaaagccttgtattcccccctgcaggttccctctggccccaccaggagaagaagatggcctatgaaaaatcaactgatatctctgatgtctccaggtcaatgttcctgtacccatggctggaatatccagacaagaccaaagaactcagaaaagccatggctcctgttcatctgcccttgtcctgctaccagatgccaaaggaagagtttcccccaagtccagagtgctggaggcagcatccgagcaagccaaactcagtcccgtactgctacttcaagaaacctgagatctacacgcactggcacgacctgtatgatcagcgagaggaaagggaggctgagaagatgttgaggaaaatgagagatgactgtaggtacatcaaagaggtacatcaaacccacatcaaaatgttccatctcccaatgagcaagctgactataaaatctgagatgcgatccaggcccttagagcctacccaggaccccctgaagtggcaaagattaagggaactcacaaaaagcctggaatctcccagagaggatgagcagttctatgcagcacaggctctgggatgcttacgcatcagtgacaagtttgtcatggaggcactacagcaggtggcccaaactggtccagagaaagtgaagtacgaggcctaccgaaccctggccatcctgggttgcctgaataagcatgtgatccgggctctcatcaaacagctgaaggagaaaaatgagggtcaaaggatggagactttgacggggctacgaatggctcttaactcctgggctgctgtctctaaagacaagaggactcaagtcggggatgagggcaagctggtgcctgtactacagacactgatcaagaagtcgtccagtgaagcatctctggaggcagccctgtgcctgggtttcctgaggccttgcagcaacatggtccaagagttcttgttgcagtgcctgtgccaaggactcaagacccagcggatgaaggcacttaggatgctggtcaaggtgatgcacgtgcactcagccccagtcatcaaggccatcctagaccagctgtgttcttccagtgtccttgaggaccgctttgaagccacccaaatgctcaagaccattgggctggaacagatccaggcacaggggctagaggaactcacatttaacctgctcaggaggaagacgcataatgaacccttccttgctgtgaggcaggctgtggctcaaactgtggaagagctcaagttgaagcctacgatgatgaacttggtggaggcacaactgatgaacccagatgccactgcacgccaggaagcagtcatctctttgggtgtcctggggatccgcagtccacaagtgttccacttgctcctggacttactagatgcagaaaaccaccaggctgtgaagaagagtctacaagaaacattaatcctttgtgcctcaattgatccctggatccaaaacaagctgaaaaacaaggttctctctgtatatgaggcacctaagaccaatgtgaaggcagagcccacaaggttccagaaagagcctgagaacccagaagagttaactattcaagactttcgacttgcaaagctgaaccccttgtttattgcaaagtccatcaccaaagtaggccaaaagaaaacgcctgctttcccaccgtgctgctcgaaaccacgaaaacataggccacaggtcatagggccctggcagccaaggatcaagaaacagctccgggtccttgctgaaattgccaaataagtcaattctttgggcctactccccgactccctccctgaagatgcttctcaggctcccatgagaaaacaatctatacttatcttccgtgaataaacaagtgtcactctaccta

SEQ ID NO: 139734 - DNA, 549 bp, Homo sapiens
  Payload ID: 7402
  Gene Symbol: HEATR9
  Gene Name: HEAT repeat containing 9
  ENST ID: ENST00000603218
  CDS Start-End: 130-549
agaagtccagacacctcccctgtacctctcgtaccacagaggacaggtctcctccagctgtgcccccactcccctaaaagccttgtattcccccctgcaggttccctctggccccaccaggagaagaagatggcctatgaaaaatcaactgatatctctgatgtctccaggtcaatgttcctgtacccatggctggaatatccagacaagaccaaagaactcagaaaagccatggctcctgttcatctgcccttgtcctgctaccagatgccaaaggaagagtttcccccaagtccagagtgctggaggcagcatccgagcaagccaaactcagtcccgtactgctacttcaagaaacctgagatctacacgcactggcacgacctgtatgatcagcgagaggaaagggaggctgagaagatgttgaggaaaatgagagatgactgtaggtacatcaaagaggaactcacaaaaagcctggaatctcccagagaggatgagcagttctatgcagcacaggctctgggatgcttacgcatcagtgacaag

SEQ ID NO: 139735 - DNA, 1903 bp, Homo sapiens
  Payload ID: 7402
  Gene Symbol: HEATR9
  Gene Name: HEAT repeat containing 9
  ENST ID: ENST00000603323
  CDS Start-End: 86-937
aggtctcctccagctgtgcccccactcccctaaaagccttgtattcccccctgcaggttccctctggccccaccaggagaagaagatggcctatgaaaaatcaactgatatctctgatgtctccaggtcaatgttcctgtacccatggctggaatatccagacaagaccaaagaactcagaaaagccatggctcctgttcatctgcccttgtcctgctaccagatgccaaaggaagagtttcccccaagtccagagtgctggaggcagcatccgagcaagccaaactcagtcccgtactgctacttcaagaaacctgagatctacacgcactggcacgacctgtatgatcagcgagaggaaagggaggctgagaagatgttgaggaaaatgagagatgactgtaggtacatcaaagaggtacatcaaacccacatcaaaatgttccatctcccaatgagcaagctgactataaaatctgagatgcgatccaggcccttagagcctacccaggaccccctgaagtggcaaagattaagggaactcacaaaaagcctggaatctcccagagaggatgagcagttctatgcagcacaggctctgggatgcttacgcatcagtgacaagtttgtcatggaggcactacagcaggtggcccaaactggtccagagaaagtgaagtacgaggcctaccgaaccctggccatcctgggttgcctgaataagcatgtgatccgggctctcatcaaacagctgaaggagaaaaatgagggtcaaaggatggagactttgacggggctacgaatggctcttaactcctgggctgctgtctctaaagacaaggtgattgggaggacagtctttaattgggggcaaagctggacaagaggactcaagtcggggatgagggcaagctggtgcctgtactacagacactgatcaagaagtcgtccagtgaagcatctctggaggcagccctgtgcctgggtttcctgaggccttgcagcaacatggtccaagagttcttgttgcagtgcctgtgccaaggactcaagacccagcggatgaaggcacttaggatgctggtcaaggtgatgcacgtgcactcagccccagtcatcaaggccatcctagaccagctgtgttcttccagtgtccttgaggaccgctttgaagccacccaaatgctcaagaccattgggctggaacagatccaggcacaggggctagaggaactcacatttaacctgctcaggaggaagacgcataatgaacccttccttgctgtgaggcaggctgtggctcaaactgtggaagagctcaagttgaagcctacgatgatgaacttggtggaggcacaactgatgaacccagatgccactgcacgccaggaagcagtcatctctttgggtgtcctggggatccgcagtccacaagtgttccacttgctcctggacttactagatgcagaaaaccaccaggctgtgaagaagagtctacaagaaacattaatcctttgtgcctcaattgatccctggatccaaaacaagctgaaaaacaaggttctctctgtatatgaggcacctaagaccaatgtgaaggcagagcccacaaggttccagaaagagcctgagaacccagaagagttaactattcaagactttcgacttgcaaagctgaaccccttgtttattgcaaagtccatcaccaaagtaggccaaaagaaaacgcctgctttcccaccgtgctgctcgaaaccacgaaaacataggccacaggtcatagggccctggcagccaaggatcaagaaacagctccgggtccttgctgaaattgccaaataagtcaattctttgggcctactccccgactccctccctgaagatgcttctcaggctcccatga

SEQ ID NO: 139736 - DNA, 1521 bp, Homo sapiens
  Payload ID: 7402
  Gene Symbol: HEATR9
  Gene Name: HEAT repeat containing 9
  Uniprot ID: A2RTY3
  ENST ID: ENST00000605080
  CDS Start-End: 216-1238
acttggaagcttctacctccagaagtccagacacctcccctgtacctctcgtaccacagaggacaggtcaatgttcctgtacccatggctggaatatccagacaagaccaaaggtgaggctgggatggacagaaatggagccaagagcaggggactgaaaaagaaatgctacctggctctcactcccaggcaagggtctagaactcagaaaagccatggctcctgttcatctgcccttgtcctgctaccagatgccaaaggaagagtttcccccaagtccagagtgctggaggcagcatccgagcaagccaaactcagtcccgtactgctacttcaagaaacctgagatctacacgcactggcacgacctgtatgatcagcgagaggaaagggaggctgagaagatgttgaggaaaatgagagatgactgtaggtacatcaaagaggaactcacaaaaagcctggaatctcccagagaggatgagcagttctatgcagcacaggctctgggatgcttacgcatcagtgacaagtttgtcatggaggcactacagcaggtggcccaaactggtccagagaaagtgaagtacgaggcctaccgaaccctggccatcctgggttgcctgaataagcatgtgatccgggctctcatcaaacagctgaaggagaaaaatgagggtcaaaggatggagactttgacggggctacgaatggctcttaactcctgggctgctgtctctaaagacaagaggactcaagtcggggatgagggcaagctggtgcctgtactacagacactgatcaagaagtcgtccagtgaagcatctctggaggcagccctgtgcctgggtttcctgaggccttgcagcaacatggtccaagagttcttgttgcagtgcctgtgccaaggactcaagacccagcggatgaaggcacttaggatgctggtcaaggtgatgcacgtgcactcagccccagtcatcaaggccatcctagaccagctgtgttcttccagtgtccttgaggaccgctttgaagccacccaaatgctcaagaccattgggctggaacagatccaggcacaggggctagaggaactcacatttaacctgctcaggaggaagacgcataatgaacccttccttgctgtgaggcaggctgtggctcaaactgtggaagagctcaagttgaagcctacgatgatgaacttggtggaggcaaacaagagaaggaaatgaatgaaattagcatcactttgcctaattcgctctggacctgaaaagcaaccagcctcccttccacttcccctactccttaattcaactataacatactcactcccttctacacagacaactgatgaacccagatgccactgcacgccaggaagcagtcatctctttgggtgtcctggggatccgcagtccacaagtgttccacttgctcctggacttactagatgcagaaaaccaccaggctgtgaagaagagtctacaagaaacattaatcctttgtgcctca

SEQ ID NO: 139737 - DNA, 1528 bp, Homo sapiens
  Payload ID: 7402
  Gene Symbol: HEATR9
  Gene Name: HEAT repeat containing 9
  Uniprot ID: A2RTY3
  ENST ID: ENST00000603852
  CDS Start-End: 215-1357
cttggaagcttctacctccagaagtccagacacctcccctgtacctctcgtaccacagaggacaggtcaatgttcctgtacccatggctggaatatccagacaagaccaaaggtgaggctgggatggacagaaatggagccaagagcaggggactgaaaaagaaatgctacctggctctcactcccaggcaagggtctagaactcagaaaagccatggctcctgttcatctgcccttgtcctgctaccagatgccaaaggaagagtttcccccaagtccagagtgctggaggcagcatccgagcaagccaaactcagtcccgtactgctacttcaagaaacctgagatctacacgcactggcacgacctgtatgatcagcgagaggaaagggaggctgagaagatgttgaggaaaatgagagatgactgtaggtacatcaaagaggtacatcaaacccacatcaaaatgttccatctcccaatgagcaagctgactataaaatctgagatgcgatccaggcccttagagcctacccaggaccccctgaagtggcaaagattaagggaactcacaaaaagcctggaatctcccagagaggatgagcagttctatgcagcacaggctctgggatgcttacgcatcagtgacaagtttgtcatggaggcactacagcaggtggcccaaactggtccagagaaagtgaagtacgaggcctaccgaaccctggccatcctgggttgcctgaataagcatgtgatccgggctctcatcaaacagctgaaggagaaaaatgagggtcaaaggatggagactttgacggggctacgaatggctcttaactcctgggctgctgtctctaaagacaagaggactcaagtcggggatgagggcaagctggtgcctgtactacagacactgatcaagaagtcgtccagtgaagcatctctggaggcagccctgtgcctgggtttcctgaggccttgcagcaacatggtccaagagttcttgttgcagtgcctgtgccaaggactcaagacccagcggatgaaggcacttaggatgctggtcaaggtgatgcacgtgcactcagccccagtcatcaaggccatcctagaccagctgtgttcttccagtgtccttgaggaccgctttgaagccacccaaatgctcaagaccattgggctggaacagatccaggcacaggggctagaggaactcacatttaacctgctcaggaggaagacgcataatgaacccttccttgctgtgaggcaggctgtggctcaaactgtggaagagctcaagttgaagcctacgatgatgaacttggtggaggcaaacaagagaaggaaatgaatgaaattagcatcactttgcctaattcgctctggacctgaaaagcaaccagcctcccttccacttcccctactccttaattcaactataacatactcactcccttctacacagacaactgatgaacccagatgccactgcacgccaggaagcagtcatctctttgggtgt

SEQ ID NO: 139738 - DNA, 1974 bp, Homo sapiens; identical to SEQ ID NO: 139733
  Payload ID: 7402
  Gene Symbol: HEATR9
  Gene Name: HEAT repeat containing 9
  Uniprot ID: A2RTY3
  ENST ID: ENST00000614305
  CDS Start-End: 150-1862

SEQ ID NO: 139739 - DNA, 1528 bp, Homo sapiens; identical to SEQ ID NO: 139737
  Payload ID: 7402
  Gene Symbol: HEATR9
  Gene Name: HEAT repeat containing 9
  Uniprot ID: A2RTY3
  ENST ID: ENST00000633642
  CDS Start-End: 215-1357

SEQ ID NO: 139740 - DNA, 1521 bp, Homo sapiens; identical to SEQ ID NO: 139736
  Payload ID: 7402
  Gene Symbol: HEATR9
  Gene Name: HEAT repeat containing 9
  Uniprot ID: A2RTY3
  ENST ID: ENST00000632179
  CDS Start-End: 216-1238

SEQ ID NO: 139741 - DNA, 1829 bp, Homo sapiens; identical to SEQ ID NO: 139732
  Payload ID: 7402
  Gene Symbol: HEATR9
  Gene Name: HEAT repeat containing 9
  Uniprot ID: A2RTY3
  ENST ID: ENST00000632969
  CDS Start-End: 130-1722

SEQ ID NO: 139742 - DNA, 1903 bp, Homo sapiens; identical to SEQ ID NO: 139735
  Payload ID: 7402
  Gene Symbol: HEATR9
  Gene Name: HEAT repeat containing 9
  ENST ID: ENST00000631921
  CDS Start-End: 86-937

SEQ ID NO: 139743 - DNA, 5191 bp, Homo sapiens
  Payload ID: 7403
  Gene Symbol: HSPH1
  Gene Name: heat shock 105kDa/110kDa protein 1
  Uniprot ID: Q92598
  ENST ID: ENST00000320027
  CDS Start-End: 346-2922
gaggaagtgggacctccccttttgggtcggtagttcagcgccggcgccggtgtgcgagccgcggcagagtgaggcaggcaacccgaggtgcggagcgacctgcggaggctgagccccgctttctcccagggtttcttatcagccagccgccgctgtccccgggggagtaggaggctcctgacaggccgcggctgtctgtgtgtccttctgagtgtcagaggaacggccagaccccgcgggccggagcagaacgcggccagggcagaaagcggcggcaggagaagcaggcagggggccggaggacgcagaccgagacccgaggcggaggcggaccgcgagccggccatgtcggtggtggggttggacgtgggctcgcagagctgctacatcgcggtagcccgggccgggggcatcgagaccatcgccaatgagttcagcgaccggtgcaccccgtcagtcatatcatttggatcaaaaaatagaacaatcggagttgcagccaaaaatcagcaaatcactcatgcaaacaatacggtgtctaacttcaaaagatttcatggccgagcattcaatgaccccttcattcaaaaggagaaggaaaacttgagttacgatttggttccattgaaaaatggtggagttggaataaaggtaatgtacatgggtgaagaacatctatttagtgtggagcagataacagccatgttgttgactaagctgaaggaaactgctgaaaacagcctcaagaaaccagtaacagattgtgttatttcagtcccctccttctttacagatgctgagaggcgatctgtgttagatgctgcacagattgttggcctaaactgtttaagacttatgaatgacatgacagctgttgctttgaattacggaatttataagcaggatctcccaagcctggatgagaaacctcggatagtggtttttgttgatatgggacattcagcttttcaagtgtctgcttgtgcttttaacaagggaaaattgaaggtactgggaacagcttttgatcctttcttaggaggaaaaaacttcgatgaaaagttagtggaacatttttgtgcagaatttaaaactaagtacaagttggatgcaaaatccaaaatacgagcactcctacgtctgtatcaggaatgtgaaaaactgaaaaagctaatgagctctaacagcacagaccttccactgaatatcgaatgctttatgaatgataaagatgtttccggaaagatgaacaggtcacaatttgaagaactctgtgctgaacttctgcaaaagatagaagtacccctttattcactgttggaacaaactcatctcaaagtagaagatgtgagtgcagttgagattgttggaggcgctacacgaattccagctgtgaaggaaagaattgccaaattctttggaaaagatattagcacaacactcaatgcagatgaagcagtagccagaggatgtgcattacagtgtgcaatactttccccggcatttaaagttagagaattttccgtcacagatgcagttccttttccaatatctctgatctggaaccatgattcagaagatactgaaggtgttcatgaagtctttagtcgaaaccatgctgctcctttctccaaagttctcacctttctgagaagggggccttttgagctagaagctttctattctgatccccaaggagttccatatccagaagcaaaaataggccgctttgtagttcagaatgtttctgcacagaaagatggagaaaaatctagagtaaaagtcaaagtgcgagtcaacacccatggcattttcaccatctctacggcatctatggtggagaaagtcccaactgaggagaatgaaatgtcttctgaagctgacatggagtgtctgaatcagagaccaccagaaaacccagacactgataaaaatgtccagcaagacaacagtgaagctggaacacagccccaggtacaaactgatgctcaacaaacctcacagtctcccccttcacctgaacttacctcagaagaaaacaaaatcccagatgctgacaaagcaaatgaaaaaaaagttgaccagcctccagaagctaaaaagcccaaaataaaggtggtgaatgttgagctgcctattgaagccaacttggtctggcagttagggaaagaccttcttaacatgtatattgagacagagggtaagatgataatgcaagataaattggaaaaagaaaggaatgatgctaaaaatgcagttgaggaatatgtgtatgagttcagagacaagctgtgtggaccatatgaaaaatttatatgtgagcaggatcatcaaaattttttgagactcctcacagaaactgaagactggctgtatgaagaaggagaggaccaagctaaacaagcatatgttgacaagttggaagaattaatgaaaattggcactccagttaaagttcggtttcaggaagctgaagaacggccaaaaatgtttgaagaactaggacagaggctgcagcattatgccaagatagcagctgacttcagaaataaggatgagaaatacaaccatattgatgagtctgaaatgaaaaaagtggagaagtctgttaatgaagtgatggaatggatgaataatgtcatgaatgctcaggctaaaaagagtcttgatcaggatccagttgtacgtgctcaggaaattaaaacaaaaatcaaggaattgaacaacacatgtgaacccgttgtaacacaaccgaaaccaaaaattgaatcacccaaactggaaagaactccaaatggcccaaatattgataaaaaggaagaagatttagaagacaaaaacaattttggtgctgaacctccacatcagaatggtgaatgttaccctaatgagaaaaattctgttaatatggacttggactagataaccttaaattggcctattccttcaattaataaaatatttttgccatagtatgtgactctacataacatactgaaactatttatattttcttttttaaggatatttagaaattttgtgtattatatggaaaaagaaaaaaagcttaagtctgtagtctttatgatcctaaaagggaaaattgccttggtaactttcagattcctgtggaattgtgaattcatactaagctttctgtgcagtctcaccatttgcatcactgaggatgaaactgacttttgtcttttggagaaaaaaaactgtactgcttgttcaagagggctgtgattaaaatctttaagcatttgttcctgccaaggtagttttcttgcattttgctctccattcagcatgtgtgtgggtgtggatgtttataaacaagactaagtctgacttcataagggctttctaaaaccatttctgtccaagagaaaatgactttttgctttgatattaaaaattcaatgagtaaaacaaaagctagtcaaatgtgttagcagcatgcagaacaaaaactttaaactttctctctcactatacagtatattgtcatgtgaaagtgtggaatggaagaaatgtcgatcctgttgtaactgattgtgaacacttttatgagctttaaaataaagttcatcttatggtgtcatttctaaactgttgattttgtcactaatttaaaaaatgagatgagggagaatatgaattattctagcagaaatgaagttagtgtccagtttttcttttttactgcttatgttctctcttttctaagtgaaaatgtttttctcctgacagaaaaatagcatatgtttattacattaaagcattttaaaaatactataaagtgaataaaacttaaaatcttgccacccagaagaaaacattgttaacacttcgttatacatccttggagccttttacccctaatgatgggggtatatttgtgtgagtgtctatgttatagtgctgtaggctgtttttaaaaactctgtgccagggaaattagtaaatacagtcaagtgttgtaactgcataaatgtagtgagttcattataaagacgtacttaaaaataccaatcttgctattggtagatttaggtgtttctcatttttgctgttctaaataatgctgcaatgaatctatctggttgttttgtaagcacaaaattgaagtagtgttggaggtaggggagaagacacatgcacttaggataggtgacaaccagctcctcactagggtgcaacagtttattctttttttttttttggtagagctggggtttcgctatgttgcccaagttcgtcttgaactcctgggctcaagcaatctgtctgcctcagcctcccaaagtgctgggattacatggtgtgagccaccatgcccagccatttatgatcttgatgagggccaactttccctcttccacaagggattaatcttagaactatagccaatttattataagtactatttagctactctgtgctccacacatcacggagtaatatcttcaaactatgaggtttagtaacacttgactgctgaggtttatttcctcagctctgatgcttcctgggtgaagatgtaagttattaaattaactcaaattttaaagctaacacttcattccatctagaccaggtagctcgtcatttgtacgtctgataggtgcttcaacatctcagaattggcttatttttcatgcattgcatattgtactcatttgtaatattggaatgtaaaatgttcttactaagaatctttatgtcagctattcaacatttccctactttataatttctagctgctttaccatttagcaactttaaatttttatgcagttaatatgtttctttggtttttatgttttctgaatgtctttaatgcacattaatgtatacttagtagatacacatttacacattgagaagtgaagataggtttgtgttctgtgtacaattaggacatccattaaaaaagatttttaaaaactgtgaatgggaaaacatgtttttcctcctgtcctaaaatagaacctgatgacgggagggagcatcagtcagtctggcctaaatcagtgtactgcgcttttggatgcgggcaaaagtattgtcatgttgattactttataataacgtattaatatcattggctcaaacagttgtgatatatacctagtaatcatcgaggatctcaaagatatgcaccagtttgaataaatgctgttta

SEQ ID NO: 139744 - DNA, 3480 bp, Homo sapiens
  Payload ID: 7403
  Gene Symbol: HSPH1
  Gene Name: heat shock 105kDa/110kDa protein 1
  Uniprot ID: Q92598
  ENST ID: ENST00000380405
  CDS Start-End: 346-2790
gaggaagtgggacctccccttttgggtcggtagttcagcgccggcgccggtgtgcgagccgcggcagagtgaggcaggcaacccgaggtgcggagcgacctgcggaggctgagccccgctttctcccagggtttcttatcagccagccgccgctgtccccgggggagtaggaggctcctgacaggccgcggctgtctgtgtgtccttctgagtgtcagaggaacggccagaccccgcgggccggagcagaacgcggccagggcagaaagcggcggcaggagaagcaggcagggggccggaggacgcagaccgagacccgaggcggaggcggaccgcgagccggccatgtcggtggtggggttggacgtgggctcgcagagctgctacatcgcggtagcccgggccgggggcatcgagaccatcgccaatgagttcagcgaccggtgcaccccgtcagtcatatcatttggatcaaaaaatagaacaatcggagttgcagccaaaaatcagcaaatcactcatgcaaacaatacggtgtctaacttcaaaagatttcatggccgagcattcaatgaccccttcattcaaaaggagaaggaaaacttgagttacgatttggttccattgaaaaatggtggagttggaataaaggtaatgtacatgggtgaagaacatctatttagtgtggagcagataacagccatgttgttgactaagctgaaggaaactgctgaaaacagcctcaagaaaccagtaacagattgtgttatttcagtcccctccttctttacagatgctgagaggcgatctgtgttagatgctgcacagattgttggcctaaactgtttaagacttatgaatgacatgacagctgttgctttgaattacggaatttataagcaggatctcccaagcctggatgagaaacctcggatagtggtttttgttgatatgggacattcagcttttcaagtgtctgcttgtgcttttaacaagggaaaattgaaggtactgggaacagcttttgatcctttcttaggaggaaaaaacttcgatgaaaagttagtggaacatttttgtgcagaatttaaaactaagtacaagttggatgcaaaatccaaaatacgagcactcctacgtctgtatcaggaatgtgaaaaactgaaaaagctaatgagctctaacagcacagaccttccactgaatatcgaatgctttatgaatgataaagatgtttccggaaagatgaacaggtcacaatttgaagaactctgtgctgaacttctgcaaaagatagaagtacccctttattcactgttggaacaaactcatctcaaagtagaagatgtgagtgcagttgagattgttggaggcgctacacgaattccagctgtgaaggaaagaattgccaaattctttggaaaagatattagcacaacactcaatgcagatgaagcagtagccagaggatgtgcattacagtgtgcaatactttccccggcatttaaagttagagaattttccgtcacagatgcagttccttttccaatatctctgatctggaaccatgattcagaagatactgaaggtgttcatgaagtctttagtcgaaaccatgctgctcctttctccaaagttctcacctttctgagaagggggccttttgagctagaagctttctattctgatccccaaggagttccatatccagaagcaaaaataggccgctttgtagttcagaatgtttctgcacagaaagatggagaaaaatctagagtaaaagtcaaagtgcgagtcaacacccatggcattttcaccatctctacggcatctatggtggagaaagtcccaactgaggagaatgaaatgtcttctgaagctgacatggagtgtctgaatcagagaccaccagaaaacccagacactgatgcaaatgaaaaaaaagttgaccagcctccagaagctaaaaagcccaaaataaaggtggtgaatgttgagctgcctattgaagccaacttggtctggcagttagggaaagaccttcttaacatgtatattgagacagagggtaagatgataatgcaagataaattggaaaaagaaaggaatgatgctaaaaatgcagttgaggaatatgtgtatgagttcagagacaagctgtgtggaccatatgaaaaatttatatgtgagcaggatcatcaaaattttttgagactcctcacagaaactgaagactggctgtatgaagaaggagaggaccaagctaaacaagcatatgttgacaagttggaagaattaatgaaaattggcactccagttaaagttcggtttcaggaagctgaagaacggccaaaaatgtttgaagaactaggacagaggctgcagcattatgccaagatagcagctgacttcagaaataaggatgagaaatacaaccatattgatgagtctgaaatgaaaaaagtggagaagtctgttaatgaagtgatggaatggatgaataatgtcatgaatgctcaggctaaaaagagtcttgatcaggatccagttgtacgtgctcaggaaattaaaacaaaaatcaaggaattgaacaacacatgtgaacccgttgtaacacaaccgaaaccaaaaattgaatcacccaaactggaaagaactccaaatggcccaaatattgataaaaaggaagaagatttagaagacaaaaacaattttggtgctgaacctccacatcagaatggtgaatgttaccctaatgagaaaaattctgttaatatggacttggactagataaccttaaattggcctattccttcaattaataaaatatttttgccatagtatgtgactctacataacatactgaaactatttatattttcttttttaaggatatttagaaattttgtgtattatatggaaaaagaaaaaaagcttaagtctgtagtctttatgatcctaaaagggaaaattgccttggtaactttcagattcctgtggaattgtgaattcatactaagctttctgtgcagtctcaccatttgcatcactgaggatgaaactgacttttgtcttttggagaaaaaaaactgtactgcttgttcaagagggctgtgattaaaatctttaagcatttgttcctgccaaggtagttttcttgcattttgctctccattcagcatgtgtgtgggtgtggatgtttataaacaagactaagtctgacttcataagggctttctaaaaccatttctgtccaagagaaaatgactttttgctttgatattaaaaattcaatgagtaaaacaaaagctagtcaaatgtgttagcagcatgcagaacaaaaactttaaactttctctctcactatacagtatattgtcatgtgaaagtgtggaatggaagaaatgtcgatcctgttgtaactgattgtgaacacttttatgagctttaaaataaagttcatcttatggtgtcatttct

SEQ ID NO: 139745 - DNA, 4987 bp, Homo sapiens
  Payload ID: 7403
  Gene Symbol: HSPH1
  Gene Name: heat shock 105kDa/110kDa protein 1
  ENST ID: ENST00000445273
  CDS Start-End: 295-2643
acacttctcccagcgggactacgattcccaacatgctctccggacagctggccggcctccccaccatcccggtgtctggggtctctgcaaaaatggggtctgtctccgcccgcccagcctccctttagcgttaaggatcggacaccacctcccggtagtaaattgtgactattccgagttttggagtcattcttcgttgcctgttttattagggcagcaaaacgcctgtggctagggcgggagtgggcggaggcaggtttgagccaatggcacgggagcggccctgtcgctgccatggcaacggcggccgttctccggggaccggctgcccattgggtagaatctttccagaaggctcgagaagaaggaagcggaagtggcacgtggaggggccggtggaggcgccggtcagtcatatcatttggatcaaaaaatagaacaatcggagttgcagccaaaaatcagcaaatcactcatgcaaacaatacggtgtctaacttcaaaagatttcatggccgagcattcaatgaccccttcattcaaaaggagaaggaaaacttgagttacgatttggttccattgaaaaatggtggagttggaataaaggtaatgtacatgggtgaagaacatctatttagtgtggagcagataacagccatgttgttgactaagctgaaggaaactgctgaaaacagcctcaagaaaccagtaacagattgtgttatttcagtactgggaacagcttttgatcctttcttaggaggaaaaaacttcgatgaaaagttagtggaacatttttgtgcagaatttaaaactaagtacaagttggatgcaaaatccaaaatacgagcactcctacgtctgtatcaggaatgtgaaaaactgaaaaagctaatgagctctaacagcacagaccttccactgaatatcgaatgctttatgaatgataaagatgtttccggaaagatgaacaggtcacaatttgaagaactctgtgctgaacttctgcaaaagatagaagtacccctttattcactgttggaacaaactcatctcaaagtagaagatgtgagtgcagttgagattgttggaggcgctacacgaattccagctgtgaaggaaagaattgccaaattctttggaaaagatattagcacaacactcaatgcagatgaagcagtagccagaggatgtgcattacagtgtgcaatactttccccggcatttaaagttagagaattttccgtcacagatgcagttccttttccaatatctctgatctggaaccatgattcagaagatactgaaggtgttcatgaagtctttagtcgaaaccatgctgctcctttctccaaagttctcacctttctgagaagggggccttttgagctagaagctttctattctgatccccaaggagttccatatccagaagcaaaaataggccgctttgtagttcagaatgtttctgcacagaaagatggagaaaaatctagagtaaaagtcaaagtgcgagtcaacacccatggcattttcaccatctctacggcatctatggtggagaaagtcccaactgaggagaatgaaatgtcttctgaagctgacatggagtgtctgaatcagagaccaccagaaaacccagacactgataaaaatgtccagcaagacaacagtgaagctggaacacagccccaggtacaaactgatgctcaacaaacctcacagtctcccccttcacctgaacttacctcagaagaaaacaaaatcccagatgctgacaaagcaaatgaaaaaaaagttgaccagcctccagaagctaaaaagcccaaaataaaggtggtgaatgttgagctgcctattgaagccaacttggtctggcagttagggaaagaccttcttaacatgtatattgagacagagggtaagatgataatgcaagataaattggaaaaagaaaggaatgatgctaaaaatgcagttgaggaatatgtgtatgagttcagagacaagctgtgtggaccatatgaaaaatttatatgtgagcaggatcatcaaaattttttgagactcctcacagaaactgaagactggctgtatgaagaaggagaggaccaagctaaacaagcatatgttgacaagttggaagaattaatgaaaattggcactccagttaaagttcggtttcaggaagctgaagaacggccaaaaatgtttgaagaactaggacagaggctgcagcattatgccaagatagcagctgacttcagaaataaggatgagaaatacaaccatattgatgagtctgaaatgaaaaaagtggagaagtctgttaatgaagtgatggaatggatgaataatgtcatgaatgctcaggctaaaaagagtcttgatcaggatccagttgtacgtgctcaggaaattaaaacaaaaatcaaggaattgaacaacacatgtgaacccgttgtaacacaaccgaaaccaaaaattgaatcacccaaactggaaagaactccaaatggcccaaatattgataaaaaggaagaagatttagaagacaaaaacaattttggtgctgaacctccacatcagaatggtgaatgttaccctaatgagaaaaattctgttaatatggacttggactagataaccttaaattggcctattccttcaattaataaaatatttttgccatagtatgtgactctacataacatactgaaactatttatattttcttttttaaggatatttagaaattttgtgtattatatggaaaaagaaaaaaagcttaagtctgtagtctttatgatcctaaaagggaaaattgccttggtaactttcagattcctgtggaattgtgaattcatactaagctttctgtgcagtctcaccatttgcatcactgaggatgaaactgacttttgtcttttggagaaaaaaaactgtactgcttgttcaagagggctgtgattaaaatctttaagcatttgttcctgccaaggtagttttcttgcattttgctctccattcagcatgtgtgtgggtgtggatgtttataaacaagactaagtctgacttcataagggctttctaaaaccatttctgtccaagagaaaatgactttttgctttgatattaaaaattcaatgagtaaaacaaaagctagtcaaatgtgttagcagcatgcagaacaaaaactttaaactttctctctcactatacagtatattgtcatgtgaaagtgtggaatggaagaaatgtcgatcctgttgtaactgattgtgaacacttttatgagctttaaaataaagttcatcttatggtgtcatttctaaactgttgattttgtcactaatttaaaaaatgagatgagggagaatatgaattattctagcagaaatgaagttagtgtccagtttttcttttttactgcttatgttctctcttttctaagtgaaaatgtttttctcctgacagaaaaatagcatatgtttattacattaaagcattttaaaaatactataaagtgaataaaacttaaaatcttgccacccagaagaaaacattgttaacacttcgttatacatccttggagccttttacccctaatgatgggggtatatttgtgtgagtgtctatgttatagtgctgtaggctgtttttaaaaactctgtgccagggaaattagtaaatacagtcaagtgttgtaactgcataaatgtagtgagttcattataaagacgtacttaaaaataccaatcttgctattggtagatttaggtgtttctcatttttgctgttctaaataatgctgcaatgaatctatctggttgttttgtaagcacaaaattgaagtagtgttggaggtaggggagaagacacatgcacttaggataggtgacaaccagctcctcactagggtgcaacagtttattctttttttttttttggtagagctggggtttcgctatgttgcccaagttcgtcttgaactcctgggctcaagcaatctgtctgcctcagcctcccaaagtgctgggattacatggtgtgagccaccatgcccagccatttatgatcttgatgagggccaactttccctcttccacaagggattaatcttagaactatagccaatttattataagtactatttagctactctgtgctccacacatcacggagtaatatcttcaaactatgaggtttagtaacacttgactgctgaggtttatttcctcagctctgatgcttcctgggtgaagatgtaagttattaaattaactcaaattttaaagctaacacttcattccatctagaccaggtagctcgtcatttgtacgtctgataggtgcttcaacatctcagaattggcttatttttcatgcattgcatattgtactcatttgtaatattggaatgtaaaatgttcttactaagaatctttatgtcagctattcaacatttccctactttataatttctagctgctttaccatttagcaactttaaatttttatgcagttaatatgtttctttggtttttatgttttctgaatgtctttaatgcacattaatgtatacttagtagatacacatttacacattgagaagtgaagataggtttgtgttctgtgtacaattaggacatccattaaaaaagatttttaaaaactgtgaatgggaaaacatgtttttcctcctgtcctaaaatagaacctgatgacgggagggagcatcagtcagtctggcctaaatcagtgtactgcgcttttggatgcgggcaaaagtattgtcatgttgattactttataataacgtattaatatcattggctcaaacagttgtgatatatacctagtaatcatcgaggatctcaaagatatgcaccagtttgaataaatgctgtttaaagattaaattttacaattcattttaaattgtcattttgtgacaatatttctaaacaacgtccatttttaataac

SEQ ID NO: 139746 - DNA, 812 bp, Homo sapiens
  Payload ID: 7403
  Gene Symbol: HSPH1
  Gene Name: heat shock 105kDa/110kDa protein 1
  ENST ID: ENST00000435381
  CDS Start-End: 1-348
gatgagaaatacaaccatattgatgagtctgaaatgaaaaaagtggagaagtctgttaatgaagtgatggaatggatgaataatgtcatgaatgctcaggctaaaaagagtcttgatcaggatccagttgtacgtgctcaggaaattaaaacaaaaatcaaggaattgaacaacacatgtgaacccgttgtaacacaaccgaaaccaaaaattgaatcacccaaactggaaagaactccaaatggcccaaatattgataaaaaggaagaagatttagaagacaaaaacaattttggtgctgaacctccacatcagaatgattcctgtggaattgtgaattcatactaagctttctgtgcagtctcaccatttgcatcactgaggatgaaactgacttttgtcttttggagaaaaaaaactgtactgcttgttcaagagggctgtgattaaaatctttaagcatttgttcctgccaaggtagttttcttgcattttgctctccattcagcatgtgtgtgggtgtggatgtttataaacaagactaagtctgacttcataagggctttctaaaaccatttctgtccaagagaaaatgactttttgctttgatattaaaaattcaatgagtaaaacaaaagctagtcaaatgtgttagcagcatgcagaacaaaaactttaaactttctctctcactatacagtatattgtcatgtgaaagtgtggaatggaagaaatgtcgatcctgttgtaactgattgtgaacacttttatgagctttaaaataaagttcatcttatggtgtcatttctaaa

SEQ ID NO: 139747 - DNA, 3488 bp, Homo sapiens
  Payload ID: 7403
  Gene Symbol: HSPH1
  Gene Name: heat shock 105kDa/110kDa protein 1
  ENST ID: ENST00000602786
  CDS Start-End: 346-693
gaggaagtgggacctccccttttgggtcggtagttcagcgccggcgccggtgtgcgagccgcggcagagtgaggcaggcaacccgaggtgcggagcgacctgcggaggctgagccccgctttctcccagggtttcttatcagccagccgccgctgtccccgggggagtaggaggctcctgacaggccgcggctgtctgtgtgtccttctgagtgtcagaggaacggccagaccccgcgggccggagcagaacgcggccagggcagaaagcggcggcaggagaagcaggcagggggccggaggacgcagaccgagacccgaggcggaggcggaccgcgagccggccatgtcggtggtggggttggacgtgggctcgcagagctgctacatcgcggtagcccgggccgggggcatcgagaccatcgccaatgagttcagcgaccggtgcaccccgtcagtcatatcatttggatcaaaaaatagaacaatcggagttgcagccaaaaatcagcaaatcactcatgcaaacaatacggtgtctaacttcaaaagatttcatggccgagcattcaatgaccccttcattcaaaaggagaaggaaaacttgagttacgatttggttccattgaaaaatggtggagttggaataaagtcccctccttctttacagatgctgagaggcgatctgtgttagatgctgcacagattgttggcctaaactgtttaagacttatgaatgacatgacagctgttgctttgaattacggaatttataagcaggatctcccaagcctggatgagaaacctcggatagtggtttttgttgatatgggacattcagcttttcaagtgtctgcttgtgcttttaacaagggaaaattgaaggtactgggaacagcttttgatcctttcttaggaggaaaaaacttcgatgaaaagttagtggaacatttttgtgcagaatttaaaactaagtacaagttggatgcaaaatccaaaatacgagcactcctacgtctgtatcaggaatgtgaaaaactgaaaaagctaatgagctctaacagcacagaccttccactgaatatcgaatgctttatgaatgataaagatgtttccggaaagatgaacaggtcacaatttgaagaactctgtgctgaacttctgcaaaagatagaagtacccctttattcactgttggaacaaactcatctcaaagtagaagatgtgagtgcagttgagattgttggaggcgctacacgaattccagctgtgaaggaaagaattgccaaattctttggaaaagatattagcacaacactcaatgcagatgaagcagtagccagaggatgtgcattacagtgtgcaatactttccccggcatttaaagttagagaattttccgtcacagatgcagttccttttccaatatctctgatctggaaccatgattcagaagatactgaaggtgttcatgaagtctttagtcgaaaccatgctgctcctttctccaaagttctcacctttctgagaagggggccttttgagctagaagctttctattctgatccccaaggagttccatatccagaagcaaaaataggccgctttgtagttcagaatgtttctgcacagaaagatggagaaaaatctagagtaaaagtcaaagtgcgagtcaacacccatggcattttcaccatctctacggcatctatggtggagaaagtcccaactgaggagaatgaaatgtcttctgaagctgacatggagtgtctgaatcagagaccaccagaaaacccagacactgataaaaatgtccagcaagacaacagtgaagctggaacacagccccaggtacaaactgatgctcaacaaacctcacagtctcccccttcacctgaacttacctcagaagaaaacaaaatcccagatgctgacaaagcaaatgaaaaaaaagttgaccagcctccagaagctaaaaagcccaaaataaaggtggtgaatgttgagctgcctattgaagccaacttggtctggcagttagggaaagaccttcttaacatgtatattgagacagagggtaagatgataatgcaagataaattggaaaaagaaaggaatgatgctaaaaatgcagttgaggaatatgtgtatgagttcagagacaagctgtgtggaccatatgaaaaatttatatgtgagcaggatcatcaaaattttttgagactcctcacagaaactgaagactggctgtatgaagaaggagaggaccaagctaaacaagcatatgttgacaagttggaagaattaatgaaaattggcactccagttaaagttcggtttcaggaagctgaagaacggccaaaaatgtttgaagaactaggacagaggctgcagcattatgccaagatagcagctgacttcagaaataaggatgagaaatacaaccatattgatgagtctgaaatgaaaaaagtggagaagtctgttaatgaagtgatggaatggatgaataatgtcatgaatgctcaggctaaaaagagtcttgatcaggatccagttgtacgtgctcaggaaattaaaacaaaaatcaaggaattgaacaacacatgtgaacccgttgtaacacaaccgaaaccaaaaattgaatcacccaaactggaaagaactccaaatggcccaaatattgataaaaaggaagaagatttagaagacaaaaacaattttggtgctgaacctccacatcagaatggtgaatgttaccctaatgagaaaaattctgttaatatggacttggactagataaccttaaattggcctattccttcaattaataaaatatttttgccatagtatgtgactctacataacatactgaaactatttatattttcttttttaaggatatttagaaattttgtgtattatatggaaaaagaaaaaaagcttaagtctgtagtctttatgatcctaaaagggaaaattgccttggtaactttcagattcctgtggaattgtgaattcatactaagctttctgtgcagtctcaccatttgcatcactgaggatgaaactgacttttgtcttttggagaaaaaaaactgtactgcttgttcaagagggctgtgattaaaatctttaagcatttgttcctgccaaggtagttttcttgcattttgctctccattcagcatgtgtgtgggtgtggatgtttataaacaagactaagtctgacttcataagggctttctaaaaccatttctgtccaagagaaaatgactttttgctttgatattaaaaattcaatgagtaaaacaaaagctagtcaaatgtgttagcagcatgcagaacaaaaactttaaactttctctctcactatacagtatattgtcatgtgaaagtgtggaatggaagaaatgtcgatcctgttgtaactgattgtgaacacttttatgagctttaaaataaagttcatcttatggtgtcatttct

SEQ ID NO: 139748 - DNA, 3570 bp, Homo sapiens
  Payload ID: 7403
  Gene Symbol: HSPH1
  Gene Name: heat shock 105kDa/110kDa protein 1
  Uniprot ID: Q92598
  ENST ID: ENST00000630972
  CDS Start-End: 295-2877
acacttctcccagcgggactacgattcccaacatgctctccggacagctggccggcctccccaccatcccggtgtctggggtctctgcaaaaatggggtctgtctccgcccgcccagcctccctttagcgttaaggatcggacaccacctcccggtagtaaattgtgactattccgagttttggagtcattcttcgttgcctgttttattagggcagcaaaacgcctgtggctagggcgggagtgggcggaggcaggtttgagccaatggcacgggagcggccctgtcgctgccatggcaacggcggccgttctccggggaccggctgcccattgggtagaatctttccagaaggctcgagaagaaggaagcggaagtggcacgtggaggggccggtggaggcgccggtcagtcatatcatttggatcaaaaaatagaacaatcggagttgcagccaaaaatcagcaaatcactcatgcaaacaatacggtgtctaacttcaaaagatttcatggccgagcattcaatgaccccttcattcaaaaggagaaggaaaacttgagttacgatttggttccattgaaaaatggtggagttggaataaaggtaatgtacatgggtgaagaacatctatttagtgtggagcagataacagccatgttgttgactaagctgaaggaaactgctgaaaacagcctcaagaaaccagtaacagattgtgttatttcagtcccctccttctttacagatgctgagaggcgatctgtgttagatgctgcacagattgttggcctaaactgtttaagacttatgaatgacatgacagctgttgctttgaattacggaatttataagcaggatctcccaagcctggatgagaaacctcggatagtggtttttgttgatatgggacattcagcttttcaagtgtctgcttgtgcttttaacaagggaaaattgaaggtactgggaacagcttttgatcctttcttaggaggaaaaaacttcgatgaaaagttagtggaacatttttgtgcagaatttaaaactaagtacaagttggatgcaaaatccaaaatacgagcactcctacgtctgtatcaggaatgtgaaaaactgaaaaagctaatgagctctaacagcacagaccttccactgaatatcgaatgctttatgaatgataaagatgtttccggaaagatgaacaggtcacaatttgaagaactctgtgctgaacttctgcaaaagatagaagtacccctttattcactgttggaacaaactcatctcaaagtagaagatgtgagtgcagttgagattgttggaggcgctacacgaattccagctgtgaaggaaagaattgccaaattctttggaaaagatattagcacaacactcaatgcagatgaagcagtagccagaggatgtgcattacagtgtgcaatactttccccggcatttaaagttagagaattttccgtcacagatgcagttccttttccaatatctctgatctggaaccatgattcagaagatactgaaggtgttcatgaagtctttagtcgaaaccatgctgctcctttctccaaagttctcacctttctgagaagggggccttttgagctagaagctttctattctgatccccaaggagttccatatccagaagcaaaaataggccgctttgtagttcagaatgtttctgcacagaaagatggagaaaaatctagagtaaaagtcaaagtgcgagtcaacacccatggcattttcaccatctctacggcatctatggtggagaaagtcccaactgaggagaatgaaatgtcttctgaagctgacatggagtgtctgaatcagagaccaccagaaaacccagacactgataaaaatgtccagcaagacaacagtgaagctggaacacagccccaggtacaaactgatgctcaacaaacctcacagtctcccccttcacctgaacttacctcagaagaaaacaaaatcccagatgctgacaaagcaaatgaaaaaaaagttgaccagcctccagaagctaaaaagcccaaaataaaggtggtgaatgttgagctgcctattgaagccaacttggtctggcagttagggaaagaccttcttaacatgtatattgagacagagggtaagatgataatgcaagataaattggaaaaagaaaggaatgatgctaaaaatgcagttgaggaatatgtgtatgagttcagagacaagctgtgtggaccatatgaaaaatttatatgtgagcaggatcatcaaaattttttgagactcctcacagaaactgaagactggctgtatgaagaaggagaggaccaagctaaacaagcatatgttgacaagttggaagaattaatgaaaattggcactccagttaaagttcggtttcaggaagctgaagaacggccaaaaatgtttgaagaactaggacagaggctgcagcattatgccaagatagcagctgacttcagaaataaggatgagaaatacaaccatattgatgagtctgaaatgaaaaaagtggagaagtctgttaatgaagtgatggaatggatgaataatgtcatgaatgctcaggctaaaaagagtcttgatcaggatccagttgtacgtgctcaggaaattaaaacaaaaatcaaggaattgaacaacacatgtgaacccgttgtaacacaaccgaaaccaaaaattgaatcacccaaactggaaagaactccaaatggcccaaatattgataaaaaggaagaagatttagaagacaaaaacaattttggtgctgaacctccacatcagaatggtgaatgttaccctaatgagaaaaattctgttaatatggacttggactagataaccttaaattggcctattccttcaattaataaaatatttttgccatagtatgtgactctacataacatactgaaactatttatattttcttttttaaggatatttagaaattttgtgtattatatggaaaaagaaaaaaagcttaagtctgtagtctttatgatcctaaaagggaaaattgccttggtaactttcagattcctgtggaattgtgaattcatactaagctttctgtgcagtctcaccatttgcatcactgaggatgaaactgacttttgtcttttggagaaaaaaaactgtactgcttgttcaagagggctgtgattaaaatctttaagcatttgttcctgccaaggtagttttcttgcattttgctctccattcagcatgtgtgtgggtgtggatgtttataaacaagactaagtctgacttcataagggctttctaaaaccatttctgtccaagagaaaatgactttttgctttgatattaaaaattcaatgagtaaaacaaaagctagtcaaatgtgttagcagcatgcagaacaaaaactttaaactttctctctcactatacagtatattgtcatgtgaaagtgtggaatggaagaaatgtcgatcctgttgtaactgattgtgaacacttttatgagctttaaaataaagttcatcttatggtgtcatttctaaa

SEQ ID NO: 139749 - DNA, 950 bp, Homo sapiens
  Payload ID: 7404
  Gene Symbol: HSPE1
  Gene Name: heat shock 10kDa protein 1
  Uniprot ID: P61604
  ENST ID: ENST00000233893
  CDS Start-End: 444-752
cctacccgcgcagggtgtgctagcgcgctcagccctctccggccggcttagtctagttcccgggcctcgctcggttccagaactttccagaaaatgccgcgctccctacggctcaagggtcaaatcgcgtcatttccgggaggggacgaaggggtagttctttcacctcggctgggcgcctagaaaagcctagaaacagctccttttttcttccgcctccgagtcttcgcgtcagcgtcctgcgcagggcccttggggcgaatcgcggtgcgcgtcggggcgaccgccctccctccctgggaggggcgagggggctagcggcgaccgctggggcgagcgcgcctgcgcgctgggtgattttttcacgtgtcgccagggccggactgcgagtctctttgcggcgctacactagagcagagtacgagtctgaggcggagggagtaatggcaggacaagcgtttagaaagtttcttccactctttgaccgagtattggttgaaaggagtgctgctgaaactgtaaccaaaggaggcattatgcttccagaaaaatctcaaggaaaagtattgcaagcaacagtagtcgctgttggatcgggttctaaaggaaagggtggagagattcaaccagttagcgtgaaagttggagataaagttcttctcccagaatatggaggcaccaaagtagttctagatgacaaggattatttcctatttagagatggtgacattcttggaaagtacgtagactgaaataagtcactattgaaatggcatcaacatgatgctgcccattccactgaagttctgaaatctttcgtcatgtaaataatttccatatttctcttttataataaactaatgataactaatgacatccagtgtctccaaaattgtttccttgtactgatataaacacttccaaataaaaatatgtaaatgagtggttaa

SEQ ID NO: 139750 - DNA, 570 bp, Homo sapiens
  Payload ID: 7404
  Gene Symbol: HSPE1
  Gene Name: heat shock 10kDa protein 1
  ENST ID: ENST00000409468
  CDS Start-End: 59-364
gcgagtctctttgcggcgctacactagagcagagtacgagtctgaggcggagggagtaatggcaggacaagcgtttagaaagtttcttccactctttgaccgagtattggttgaaaggagtgctgctgaaactgtaaccaaaggaggcattatgcttccagaaaaatctcaaggaaaagtattgcaagcaacagtagtcgctgttggatcgggttctaaaggaaagggtggagagattcaaccagttagcgtgaaagttggagataaagttcttctcccagaatatggaggcaccaaagtagttctagatgacaaggtgtgtaaacttaataattctaaaaagaagtcagatatttgcaattagttgtcttaactaatggtttttttcacttgcaggattatttcctatttagagatggtgacattcttggaaagtacgtagactgaaataagtcactattgaaatggcatcaacatgatgctgcccattccactgaagttctgaaatctttcgtcatgtaaataatttccatatttctcttttataataaactaatgataactaatgac

SEQ ID NO: 139751 - DNA, 478 bp, Homo sapiens
  Payload ID: 7404
  Gene Symbol: HSPE1
  Gene Name: heat shock 10kDa protein 1
  ENST ID: ENST00000409729
  CDS Start-End: 298-441
cgaaggggtagttctttcacctcggctgggcgcctagaaaagcctagaaacagctccttttttcttccgcctccgagtcttcgcgtcagcgtcctgcgcagggcccttggggcgaatcgcggtgcgcgtcggggcgaccgccctccctccctgggaggggcgagggggctagcggcgaccgctggggcgagcgcgcctgcgcgctgggtgattttttcacgtgtcgccagggccggactgcgagtctctttgcggcgctacactagagcagagtacgagtctgaggcggagggagtaatgggtggagagattcaaccagttagcgtgaaagttggagataaagttcttctcccagaatatggaggcaccaaagtagttctagatgacaaggattatttcctatttagagatggtgacattcttggaaagtacgtagactgaaataagtcactattgaaatggcatcaacatgatgctg

SEQ ID NO: 139752 - DNA, 2152 bp, Homo sapiens
  Payload ID: 7405
  Gene Symbol: HSPB8
  Gene Name: heat shock 22kDa protein 8
  Uniprot ID: Q9UJY1
  ENST ID: ENST00000281938
  CDS Start-End: 672-1262
attaatagccaggccttagtgccccgctcggggagggcggctccagctcctggagcaagaggagggcggagctgagcggagtggccaggggaggagagagtgtccggagaggccggctgaacttggacgcggcccctcccagctccccccacagcccagctgttccctccgcggattctccggggctggttcatcacctccgaatattcctgtgacaggagacgcttgcaaaacccgcctccagcctccagcagcaaataaatagaaggcttgcagcccagaaggagccagaagaagtttctaggcgcgcgtgccctgggtttattaagctcctggctccgctctagacctcagcggttctggctgccagcctgggcagcctgggaagcctgggaggacggtggcttgccggtctgtcgtgaggcagtgcggacggggaccctctgggattctgctggatctgccccgggggttacctttgggggctgggaccccagtcgaggggacacaaccgtccctggcagtggttggttctgcttctccctgcagaaaagcagcattttcggaagctgaagaataagctagcccagccacaccaccttgttgtgtgaccttgggcaggtggttctgtctctctgagcctctgtttctctctgagctgagcagccaccatggctgacggtcagatgcccttctcctgccactacccaagccgcctgcgccgagaccccttccgggactctcccctctcctctcgcctgctggatgatggctttggcatggaccccttcccagacgacttgacagcctcttggcccgactgggctctgcctcgtctctcctccgcctggccaggcaccctaaggtcgggcatggtgccccggggccccactgccaccgccaggtttggggtgcctgccgagggcaggacccccccacccttccctggggagccctggaaagtgtgtgtgaatgtgcacagcttcaagccagaggagttgatggtgaagaccaaagatggatacgtggaggtgtctggcaaacatgaagagaaacagcaagaaggtggcattgtttctaagaacttcacaaagaaaatccagcttcctgcagaggtggatcctgtgacagtatttgcctcactttccccagagggtctgctgatcatcgaagctccccaggtccctccttactcaacatttggagagagcagtttcaacaacgagcttccccaggacagccaggaagtcacctgtacctgagatgccagtactggcccatccttgttttgtccccaaccctagggcttctctgattccaggatacattactttagctgaactcagatttagtgcaagtaaaatgttagagggtgcgggggtgaggactgaccacagattccctggatagtgtagtggtagatttctccacaggatagcgcaattggcaaatcatgcttggttgtgttaggccaaaatactagttttgctttctttaccttttctatcttgatgaaaatgttgcacattctatagttgcaaaacacataaaaggggacttaacatttcacgttgtatcttacttgcagtgaatgcaagggttacttttctctggggacctcccccatcacccaggttcctactctgggctcccgattcccatggctcccaaaccatgccgcatggtttggttaatgaaacccagtagctaaccccactgtgcttccacatgcctggcctaaaatgggtgatatacaggtcttatatccccatatggaatttatccatcaaccacataaaaacaaacagtgccttctgccctctgcccagatgtgtccagcacgttctcaaagtttccacattagcactccctaaggacgctgggagcctgtcagtttatgatctgacctaggtcccccctttcttctgtcccctgtgtttaagtcgggatttttacagagggagctgtctccagacagctccatcaggaaccaagcaaaggccagatagcctgacagataggctagtggtattgtgtatatgggcgggacgtgtgtgtcattattatttgagttatgctgttgtttaggggtaaataacagtaaataattaataataataataataataataaaggagctgacgttcttagc

SEQ ID NO: 139753 - DNA, 637 bp, Homo sapiens
  Payload ID: 7405
  Gene Symbol: HSPB8
  Gene Name: heat shock 22kDa protein 8
  ENST ID: ENST00000541798
  CDS Start-End: 1-458
gggagccctggaaagtgtgtgtgaatgtgcacagcttcaagccagaggagttgatggtgaagaccaaagatggatacgtggaggtgtctggcaaacatgaagagaaacagcaagaaggtggcattgtttctaagaacttcacaaagaaaatccaggaacataatacaactggatctaagcttaagcaaacacgtgatgagggaacaagtaaacaggcagacaaaatcgttactggagtaggaggctgtggacatctgaagaaataccacagaggaagcctatactgccatctttttctcattttttctgacaggatctatatcaattccttttttccattccttaattctattatttttaactacataagacattttgttacaggaaaaccagaaaacccgaaaacccagaagaaaatgaaaatcattcacattccctcctttcagagaaggctatgactattacattttcattgcttttttcccatcaactttcacatgcaccaacatatagagagtattgtttttaatattattttacagaaatggtatcaaacttggtgtatttcctcctctttattagtacatatcacgagtgtctttccttgctaataaatatggattgagttaatgtttaa

SEQ ID NO: 139754 - DNA, 909 bp, Homo sapiens
  Payload ID: 7406
  Gene Symbol: HSPB1
  Gene Name: heat shock 27kDa protein 1
  Uniprot ID: P04792
  ENST ID: ENST00000248553
  CDS Start-End: 170-787
gctgggggaggagtgcatggggaggggcggccctcaaacgggtcattgccattaatagagacctcaaacaccgcctgctaaaaatacccgactggaggagcataaaagcgcagccgagcccagcgccccgcacttttctgagcagacgtccagagcagagtcagccagcatgaccgagcgccgcgtccccttctcgctcctgcggggccccagctgggaccccttccgcgactggtacccgcatagccgcctcttcgaccaggccttcgggctgccccggctgccggaggagtggtcgcagtggttaggcggcagcagctggccaggctacgtgcgccccctgccccccgccgccatcgagagccccgcagtggccgcgcccgcctacagccgcgcgctcagccggcaactcagcagcggggtctcggagatccggcacactgcggaccgctggcgcgtgtccctggatgtcaaccacttcgccccggacgagctgacggtcaagaccaaggatggcgtggtggagatcaccggcaagcacgaggagcggcaggacgagcatggctacatctcccggtgcttcacgcggaaatacacgctgccccccggtgtggaccccacccaagtttcctcctccctgtcccctgagggcacactgaccgtggaggcccccatgcccaagctagccacgcagtccaacgagatcaccatcccagtcaccttcgagtcgcgggcccagcttgggggcccagaagctgcaaaatccgatgagactgccgccaagtaaagccttagcccggatgcccacccctgctgccgccactggctgtgcctcccccgccacctgtgtgttcttttgatacatttatcttctgtttttctcaaataaagttcaaagcaaccacctgt

SEQ ID NO: 139755 - DNA, 527 bp, Homo sapiens
  Payload ID: 7406
  Gene Symbol: HSPB1
  Gene Name: heat shock 27kDa protein 1
  ENST ID: ENST00000429938
  CDS Start-End: 292-405
agctccgcgccctgctccgttcctcccaaaactctgaatcgaagaactttccggaagtttctgagagcccagaccggcgggcacgcccccatccccaaccccctctgttaatccctaccagcctgcagtcctggctgcttccaagcaggaggcaagcacgaggagcggcaggacgagcatggctacatctcccggtgcttcacgcggaaatacacgctgccccccggtgtggaccccacccaagtttcctcctccctgtcccctgagggcacactgaccgtggaggcccccatgcccaagctagccacgcagtccaacgagatcaccatcccagtcaccttcgagtcgcgggcccagcttgggggcccagaagctgcaaaatccgatgagactgccgccaagtaaagccttagcccggatgcccacccctgctgccgccactggctgtgcctcccccgccacctgtgtgttcttttgatacatttatcttctgtttttctcaaataaagttcaaagcaaccacctgt

SEQ ID NO: 139756 - DNA, 1455 bp, Homo sapiens
  Payload ID: 7406
  Gene Symbol: HSPB1
  Gene Name: heat shock 27kDa protein 1
  ENST ID: ENST00000447574
  CDS Start-End: 26-586
gacgtccagagcagagtcagccagcatgaccgagcgccgcgtccccttctcgctcctgcggggccccagctgggaccccttccgcgactggtacccgcatagccgcctcttcgaccaggccttcgggctgccccggctgccggaggagtggtcgcagtggttaggcggcagcagctggccaggctacgtgcgccccctgccccccgccgccatcgagagccccgcagtggccgcgcccgcctacagccgcgcgctcagccggcaactcagcagcggggtctcggagatccggcacactgcggaccgctggcgcgtgtccctggatgtcaaccacttcgccccggacgagctgacggtcaagaccaaggatggcgtggtggagatcaccggtgagcccccctgctcctgcaggggagaggaggaggctagcagggcgggcagggccgggggcgtgcggttgaaacgggggtcccgggggcctggggagttaaacgttggcccagcaccgggaaaaacaggactcctgattcccttgctcaggaattgggagtgcgggtcgcttctaagggcgctttctgctctgtaatcccagcgctttgggaggccgagacgggaggatcgcttgaggccaggagttcaagactagcctgggcaacatagcgagacgcgcccccccgccccgaccccgcgccattacaaaaaaaaagcaaacaaaaatttttttaaagatcatcgatgaagagagaaaatgcgcttttctacagagtccccttcccacccacagccccatccccagataagcggggagttccctggcgcggtgccagtttctagccgctgagtgggcgtgtgcgcggctccaagtgcgcctgcgtactgctcactccccagctccgcgccctgctccgttcctcccaaaactctgaatcgaagaactttccggaagtttctgagagcccagaccggcgggcacgcccccatccccaaccccctctgttaatccctaccagcctgcagtcctggctgcttccaagcaggaggtggggcctctggcctagcggggccgaaaggcagtcccctcccccgcagtctgatttccctcttccccccaaaggcaagcacgaggagcggcaggacgagcatggctacatctcccggtgcttcacgcggaaatacacgctgccccccggtgtggaccccacccaagtttcctcctccctgtcccctgagggcacactgaccgtggaggcccccatgcccaagctagccacgcagtccaacgagatcaccatcccagtcaccttcgagtcgcgggcccagcttgggggcccagaagctgcaaaatccgatgagactgccgccaagtaaagccttagcccggatgcccacccctgctgccgccactggctgtgcctcccccgccacctgtgtgttcttttgatacatttatcttct

SEQ ID NO: 139757 - DNA, 1335 bp, Homo sapiens
  Payload ID: 7407
  Gene Symbol: HSPB2
  Gene Name: heat shock 27kDa protein 2
  Uniprot ID: Q16082
  ENST ID: ENST00000304298
  CDS Start-End: 589-1137
tgatggtcaacatgtcagcaccagccatctgcctcgtgccctgggttgacctgggtttaggagaggatcccacatctgggcagaaagaccccaccccctgaaaaaagagcaaacagatttcttgcatctttcgttctatgtggctctcagaacattaaatccaggagtgctttaggaattgggtgcacagtgcctgccaccgaagaggagaaaatgaggtgtggaaacgtgcaaaccgtttgtgagggtctcagcgaggcctcttcatgccccaggcaccaccagctccccctccccagctcgttcccagccaggaccctcagctgtcctctcaggccccctgcgacagctgaagagtgtgcgggggaggggactaggggtccgggcggcgctggtcacaccctcgttgctctcactcagggcccccactcccagcccctccccccccaagaggctcggcactattttgggtggtgtcgaccccgcccccacctcctatcgagccctggctctccgggcagctggaggggtcgcgctgcgcctgttggggctgcacctcggaccagggcttctgctgcatctgcagccatgtcgggccgctcagtgccacatgcccacccggccaccgccgagtacgaatttgccaacccgagccgcctgggtgagcagcgcttcggagaaggcctcctgccagaagagatcctgacccccacactctaccatggctactatgtccggcctcgggccgccccagctggggagggcagcagggcaggggcctccgagcttaggctcagtgagggcaagttccaggcatttctggatgtgagccactttaccccagacgaggtgactgtgaggactgtggataacctgctggaggtgtctgcccggcacccccagcgcctggaccgccacggcttcgtgtcccgagagttctgccgcacctatgtcctgcctgctgatgtcgacccctggcgagtccgagctgctctctcccatgatggcatcttaaacctggaagcacctcggggtggccgacatttggacacagaggtcaatgaggtctacatctccctgctccctgcgcctcctgatccagaggaagaggaggaggcagccatagttgagccctgattgccacagacccagcacccagcaaatccctctctacctcccaaggtgatatgggcagctgcccaccactccagaggtagcagcatccttgggggaagggaaaggtgcatggtccacaatgtatggtttggtcccatgggacatgtcatagccttggtttagttttgggtggagctgaataaacccaaatctcagggc

SEQ ID NO: 139758 - DNA, 784 bp, Homo sapiens
  Payload ID: 7408
  Gene Symbol: HSPB3
  Gene Name: heat shock 27kDa protein 3
  Uniprot ID: Q12988
  ENST ID: ENST00000302005
  CDS Start-End: 190-642
gaaaagacaagagagcattccgtgctatgattcaggcctaattaagtgattgcgtctgggcacggctataaaccactagctgcttcaactggtaatccagtcagtaggcaactgcaggggctcgccactgactgaaggcagtggaaggttggcagaaggaggctgttcaaggctgtttttgccttcactatggcaaaaatcattttgaggcacctcatagagattccagtgcgttaccaggaagagtttgaagctcgaggtctagaagactgcaggctggatcatgctttatatgcactgcctgggccaaccatcgtggacctgaggaaaaccagggcagcgcagtctcctccagtggactcagcggcagagacgccaccccgagaaggcaaatcccactttcagatcctgctggacgtggtccagttcctccctgaagacatcatcattcagaccttcgaaggctggctgctgataaaagcacaacacggaaccagaatggatgagcacggttttatctcaagaagcttcacccgacagtacaaactaccagatggtgtggaaatcaaagatttgtctgcagtcctctgtcatgatggaattttggtggtggaagtaaaggatccagttgggactaagtgacatcgtatcggttcctgttcagatgacatggggaagatgatggttcagccactggtactacgagaatgtttgtattacccacatttgaaatgatttgctatgatttttatgaagattaaaaatatatacacagttcctggta

SEQ ID NO: 139759 - DNA, 2892 bp, Homo sapiens
  Payload ID: 7409
  Gene Symbol: HSPB7
  Gene Name: heat shock 27kDa protein family, member 7 (cardiovascular)
  Uniprot ID: Q9UBY9
  ENST ID: ENST00000311890
  CDS Start-End: 828-1340
cttttacctctgactgaaatcccacctaaggcgctcgcaggcatcacctctgacacagagatggagcagacagttgccgggaacacaaccttctagacctttaaggagaaagctgccaactttgtcctcttggggctgctgaatgttctgagagtcagagggagtgcaggcacagaatccaggtccccatgggggctggcaggggacagctgcacattttacaccccctggcagggctcaacctttccttagagatgggctgtgaaggttgtctgccttgagggaaggagctcctgacgtcacagagcggtggtgcttccacctaccctgtccccaaggagcctgcacactgatggaggaggtacagccgtggaggagaaccagagtctggaggggaggcacagtcctcaggagcccccaggctgacgggggaaacaaaacacacaataaaccccaaacttgcaaggttctggggcaggcaccgaggtccgagtggcaaggagacaggatccagccctgtgcagtggtgaggaggcccctggggctgctgtgatcagcctggaatgtcaggctgtgagctcagccctctcggcctgcgtgtcgggctgtcagcagggccggcgcacgggagaagatttccagccccctctgggccatggagaggcctaaatttagctagtagacaaggggctggccccaagcccagggacagtcggccttataaagcggccgcagtcggagcctggcacgctcgcccagaggcctgcgcccacaccctctcctgtccagccctcgcccgcctgggcagggcccggcgccgtccgtggatgagccacagaacctcttccaccttccgagcggagagaagtttccattcctcttcctcttcctcctcctcttccacctcctcctcggcctcccgtgctctcccggcccaggacccgcccatggagaaggccctgagcatgttttccgatgactttggcagcttcatgcggccccactcggagcccctggccttcccagcccgccccggtggggcaggcaacatcaagaccctaggagacgcctatgagtttgcggtggacgtgagagacttctcacctgaagacatcattgtcaccacctccaacaaccacatcgaggtgcgggctgagaagctggcggctgacggcactgtcatgaacaccttcgctcacaagtgccagctgccggaggacgtggacccgacgtcggtgacctcggctctgcgggaggacggcagcctcactatccgggcacggcgtcacccgcatacagaacacgtccagcagaccttccggacggagatcaaaatctgagtgcctctcccttccctttccctgtccccccgccccacgcctgccagcaaagcctcgctaaccccattacaacagctccaggacatctcagcccaggttctagcccccacgcaccccagaccccaggtggaccatcctcccaaactagggccctccactctatccagggcaggccagggactccctggcctgacacatgatgcccagatttcagatttggcctccgtcacttaatccagagtacaggggctggggtcagggaaggaagatctaaagaacccactgtgggtcaggggaatgggaccagcaggacatatgggcaagctctgcaggacagacagacagacaaaccctctgatctatgaagtctctgcagggcaaggggaccagggacctggaaccctcttggccaaggggagtgggagggacagagggaaggtcacaggcaagggtgcctatctaagtggaactaattgcccgagggctcagcaaggccaagaggagacagccgtgacggtaaacttcccctctaccagcctccaagccccacgccagcgagcaggctgcctgcccaccccgtgcccccagccagctggctgtgccagggcagagccatgccacatctgtatatagatggggtttttccaatacagctggttcgtgataaactgcatgaaactcctgccgtcctgcgcctgctggggcctccaggcaaggccaagtggggttgggggtggggctggtccttctccctcccacaggcctgtgttcttggggctgctcccatgcagacaggatcacctaacagagatggaagccagggcatggatggggctttgggtcctcgaggttggaccccagcttcttgccaccttcccctccgggcagtcagctctccatccatccccctctttaatctatgaatctataggctcggtgtgtgtaacacacacacccctatcgttgtccttcaaatactcagcattaccattggttgaggccaaattcagagctttctcaaatcagatttacaatctccattttcattaacggggaaacatccccgagccactgagtgctgtgctttgtcactgaaggttagatctgaacccagggtgtcaactgctgctctcaactccccacctctgggcactgaggagtatttcccctcattctacctctctaaggctatgcaaccctccccacgtcttccagctgggggatgggggggagtcataggaaaagcccccatctcccatctgggatagggaccttccatcagccttaaccctgggaaatgcctgctgcccccaatgactcttggtttcgtctcccacatacagaagcagggtggaggggaagggtgggtctcagttagcaggggtccccagggcaagtcagcctcctccctccatgcctctctggtcagtgtgccttagggtggcctctcactcccaccactctgggccccttgggggaggactggggagggggccgtgggagagccctgacgctggaacctgtatacacaataaaggacagtctcacagac

SEQ ID NO: 139760 - DNA, 2415 bp, Homo sapiens
  Payload ID: 7409
  Gene Symbol: HSPB7
  Gene Name: heat shock 27kDa protein family, member 7 (cardiovascular)
  ENST ID: ENST00000375718
  CDS Start-End: 126-863
actccacataccaccagcaccgctaatacccctgtagaaggagctctccaggatgaagctccagactgggttgtagggggctcagacaaaagagaaactgcccgtcttcaagaaccttcaatctaatggggagacaggtgaaccctcgcccccgtgggaactgccagttggatagggaagaagggacacagcagagagtcacagcacacaggaagactatgtcacactgccaggtgctgtgggaggacaaagacagtcagtgctgggggcatctggactgggtgtgggcccatgtgagcaggagcagtcagagaggcctccctgggggaggaggcattggagctgatctgggacggaagggacggatttggagaggacagcagaggcccttaactgcaacctgggcagagcagagggcctggccgcctctcagaatggcctccaccctggcccagggcaaggacccgcccatggagaaggccctgagcatgttttccgatgactttggcagcttcatgcggccccactcggagcccctggccttcccagcccgccccggtggggcaggcaacatcaagaccctaggagacgcctatgagtttgcggtggacgtgagagacttctcacctgaagacatcattgtcaccacctccaacaaccacatcgaggtgcgggctgagaagctggcggctgacggcactgtcatgaacaccttcgctcacaagtgccagctgccggaggacgtggacccgacgtcggtgacctcggctctgcgggaggacggcagcctcactatccgggcacggcgtcacccgcatacagaacacgtccagcagaccttccggacggagatcaaaatctgagtgcctctcccttccctttccctgtccccccgccccacgcctgccagcaaagcctcgctaaccccattacaacagctccaggacatctcagcccaggttctagcccccacgcaccccagaccccaggtggaccatcctcccaaactagggccctccactctatccagggcaggccagggactccctggcctgacacatgatgcccagatttcagatttggcctccgtcacttaatccagagtacaggggctggggtcagggaaggaagatctaaagaacccactgtgggtcaggggaatgggaccagcaggacatatgggcaagctctgcaggacagacagacagacaaaccctctgatctatgaagtctctgcagggcaaggggaccagggacctggaaccctcttggccaaggggagtgggagggacagagggaaggtcacaggcaagggtgcctatctaagtggaactaattgcccgagggctcagcaaggccaagaggagacagccgtgacggtaaacttcccctctaccagcctccaagccccacgccagcgagcaggctgcctgcccaccccgtgcccccagccagctggctgtgccagggcagagccatgccacatctgtatatagatggggtttttccaatacagctggttcgtgataaactgcatgaaactcctgccgtcctgcgcctgctggggcctccaggcaaggccaagtggggttgggggtggggctggtccttctccctcccacaggcctgtgttcttggggctgctcccatgcagacaggatcacctaacagagatggaagccagggcatggatggggctttgggtcctcgaggttggaccccagcttcttgccaccttcccctccgggcagtcagctctccatccatccccctctttaatctatgaatctataggctcggtgtgtgtaacacacacacccctatcgttgtccttcaaatactcagcattaccattggttgaggccaaattcagagctttctcaaatcagatttacaatctccattttcattaacggggaaacatccccgagccactgagtgctgtgctttgtcactgaaggttagatctgaacccagggtgtcaactgctgctctcaactccccacctctgggcactgaggagtatttcccctcattctacctctctaaggctatgcaaccctccccacgtcttccagctgggggatgggggggagtcataggaaaagcccccatctcccatctgggatagggaccttccatcagccttaaccctgggaaatgcctgctgcccccaatgactcttggtttcgtctcccacatacagaagcagggtggaggggaagggtgggtctcagttagcaggggtccccagggcaagtcagcctcctccctccatgcctctctggtcagtgtgccttagggtggcctctcactcccaccactctgggccccttgggggaggactggggagggggccgtgggagagccctgacgctggaacctgtatacacaataaaggacagtctcacagac

SEQ ID NO: 139761 - DNA, 648 bp, Homo sapiens
  Payload ID: 7409
  Gene Symbol: HSPB7
  Gene Name: heat shock 27kDa protein family, member 7 (cardiovascular)
  ENST ID: ENST00000406363
  CDS Start-End: 43-567
ccagccctcgcccgcctgggcagggcccggcgccgtccgtggatgagccacagaacctcttccaccttccgagcggagagaagtttccattcctcttcctcttcctcctcctcttccacctcctcctcggcctcccgtgctctcccggcccaggacccgcccatggagaaggccctgagcatgttttccgatgactttggcagcttcatgcggccccactcggagcccctggccttcccagcccatcccacagcccgccccggtggggcaggcaacatcaagaccctaggagacgcctatgagtttgcggtggacgtgagagacttctcacctgaagacatcattgtcaccacctccaacaaccacatcgaggtgcgggctgagaagctggcggctgacggcactgtcatgaacaccttcgctcacaagtgccagctgccggaggacgtggacccgacgtcggtgacctcggctctgcgggaggacggcagcctcactatccgggcacggcgtcacccgcatacagaacacgtccagcagaccttccggacggagatcaaaatctgagtgcctctcccttccctttccctgtccccccgccccacgcctgccagcaaagcctcgctaaccccattacaacagctccag

SEQ ID NO: 139762 - DNA, 2128 bp, Homo sapiens
  Payload ID: 7409
  Gene Symbol: HSPB7
  Gene Name: heat shock 27kDa protein family, member 7 (cardiovascular)
  ENST ID: ENST00000411503
  CDS Start-End: 79-576
gctcgcccagaggcctgcgcccacaccctctcctgtccagccctcgcccgcctgggcagggcccggcgccgtccgtggatgagccacagaacctcttccaccttccgagcggagagaagtttccattcctcttcctcttcctcctcctcttccacctcctcctcggcctcccgtgctctcccggcccaggacccgcccatggagaaggccctgagcatgttttccgatgactttggcagcttcatgcggccccactcggagcccctggccttcccagcccgccccggtggggcaggcaacatcaagaccctaggagacgcctatgagtttgcggtggacgtgagagacttctcacctgaagacatcattgtcaccacctccaacaaccacatcgagctggcggctgacggcactgtcatgaacaccttcgctcacaagtgccagctgccggaggacgtggacccgacgtcggtgacctcggctctgcgggaggacggcagcctcactatccgggcacggcgtcacccgcatacagaacacgtccagcagaccttccggacggagatcaaaatctgagtgcctctcccttccctttccctgtccccccgccccacgcctgccagcaaagcctcgctaaccccattacaacagctccaggacatctcagcccaggttctagcccccacgcaccccagaccccaggtggaccatcctcccaaactagggccctccactctatccagggcaggccagggactccctggcctgacacatgatgcccagatttcagatttggcctccgtcacttaatccagagtacaggggctggggtcagggaaggaagatctaaagaacccactgtgggtcaggggaatgggaccagcaggacatatgggcaagctctgcaggacagacagacagacaaaccctctgatctatgaagtctctgcagggcaaggggaccagggacctggaaccctcttggccaaggggagtgggagggacagagggaaggtcacaggcaagggtgcctatctaagtggaactaattgcccgagggctcagcaaggccaagaggagacagccgtgacggtaaacttcccctctaccagcctccaagccccacgccagcgagcaggctgcctgcccaccccgtgcccccagccagctggctgtgccagggcagagccatgccacatctgtatatagatggggtttttccaatacagctggttcgtgataaactgcatgaaactcctgccgtcctgcgcctgctggggcctccaggcaaggccaagtggggttgggggtggggctggtccttctccctcccacaggcctgtgttcttggggctgctcccatgcagacaggatcacctaacagagatggaagccagggcatggatggggctttgggtcctcgaggttggaccccagcttcttgccaccttcccctccgggcagtcagctctccatccatccccctctttaatctatgaatctataggctcggtgtgtgtaacacacacacccctatcgttgtccttcaaatactcagcattaccattggttgaggccaaattcagagctttctcaaatcagatttacaatctccattttcattaacggggaaacatccccgagccactgagtgctgtgctttgtcactgaaggttagatctgaacccagggtgtcaactgctgctctcaactccccacctctgggcactgaggagtatttcccctcattctacctctctaaggctatgcaaccctccccacgtcttccagctgggggatgggggggagtcataggaaaagcccccatctcccatctgggatagggaccttccatcagccttaaccctgggaaatgcctgctgcccccaatgactcttggtttcgtctcccacatacagaagcagggtggaggggaagggtgggtctcagttagcaggggtccccagggcaagtcagcctcctccctccatgcctctctggtcagtgtgccttagggtggcctctcactcccaccactctgggccccttgggggaggactggggagggggccgtgggagagccctgacgctggaacctgtatacacaataaaggacagtctcacagac

SEQ ID NO: 139763 - DNA, 581 bp, Homo sapiens
  Payload ID: 7409
  Gene Symbol: HSPB7
  Gene Name: heat shock 27kDa protein family, member 7 (cardiovascular)
  ENST ID: ENST00000463576
  CDS Start-End: 1-375
atgttttccgatgactttggcagcttcatgcggccccactcggagcccctggccttcccagcagcccatcccacagcccgccccggtggggcaggcaacatcaagaccctaggagacgcctatgagtttgcggtggacgtgagagacttctcacctgaagacatcattgtcaccacctccaacaaccacatcgagctggcggctgacggcactgtcatgaacaccttcgctcacaagtgccagctgccggaggacgtggacccgacgtcggtgacctcggctctgcgggaggacggcagcctcactatccgggcacggcgtcacccgcatacagaacacgtccagcagaccttccggacggagatcaaaatctgagtgcctctcccttccctttccctgtccccccgccccacgcctgccagcaaagcctcgctaaccccattacaacagctccaggacatctcagcccaggttctagcccccacgcaccccagaccccaggtggaccatcctcccaaactagggccctccactctatccagggcaggccagggactccctggcctgacacatgatgccca

SEQ ID NO: 139764 - DNA, 844 bp, Homo sapiens
  Payload ID: 7409
  Gene Symbol: HSPB7
  Gene Name: heat shock 27kDa protein family, member 7 (cardiovascular)
  Uniprot ID: Q9UBY9
  ENST ID: ENST00000487046
  CDS Start-End: 111-638
cttataaagcggccgcagtcggagcctggcacgctcgcccagaggcctgcgcccacaccctctcctgtccagccctcgcccgcctgggcagggcccggcgccgtccgtggatgagccacagaacctcttccaccttccgagcggagagaagtttccattcctcttcctcttcctcctcctcttccacctcctcctcggcctcccgtgctctcccggcccaggacccgcccatggagaaggccctgagcatgttttccgatgactttggcagcttcatgcggccccactcggagcccctggccttcccagcagcccatcccacagcccgccccggtggggcaggcaacatcaagaccctaggagacgcctatgagtttgcggtggacgtgagagacttctcacctgaagacatcattgtcaccacctccaacaaccacatcgaggtgcgggctgagaagctggcggctgacggcactgtcatgaacaccttcgctcacaagtgccagctgccggaggacgtggacccgacgtcggtgacctcggctctgcgggaggacggcagcctcactatccgggcacggcgtcacccgcatacagaacacgtccagcagaccttccggacggagatcaaaatctgagtgcctctcccttccctttccctgtccccccgccccacgcctgccagcaaagcctcgctaaccccattacaacagctccaggacatctcagcccaggttctagcccccacgcaccccagaccccaggtggaccatcctcccaaactagggccctccactctatccagggcaggccagggactccctggcctgacacatgatgccca

SEQ ID NO: 139765 - DNA, 2299 bp, Homo sapiens
  Payload ID: 7410
  Gene Symbol: HSPD1
  Gene Name: heat shock 60kDa protein 1 (chaperonin)
  Uniprot ID: P10809
  ENST ID: ENST00000345042
  CDS Start-End: 118-1839
gccccgacgcgcaccgcgattcgccccaagggccctgcgcaggacgctgacgcgaagactcggaggcggaagaaaaaaggagctgtttctaggcttttctaggcgcccagccgagaaatgcttcggttacccacagtctttcgccagatgagaccggtgtccagggtactggctcctcatctcactcgggcttatgccaaagatgtaaaatttggtgcagatgcccgagccttaatgcttcaaggtgtagaccttttagccgatgctgtggccgttacaatggggccaaagggaagaacagtgattattgagcagagttggggaagtcccaaagtaacaaaagatggtgtgactgttgcaaagtcaattgacttaaaagataaatacaaaaacattggagctaaacttgttcaagatgttgccaataacacaaatgaagaagctggggatggcactaccactgctactgtactggcacgctctatagccaaggaaggcttcgagaagattagcaaaggtgctaatccagtggaaatcaggagaggtgtgatgttagctgttgatgctgtaattgctgaacttaaaaagcagtctaaacctgtgaccacccctgaagaaattgcacaggttgctacgatttctgcaaacggagacaaagaaattggcaatatcatctctgatgcaatgaaaaaagttggaagaaagggtgtcatcacagtaaaggatggaaaaacactgaatgatgaattagaaattattgaaggcatgaagtttgatcgaggctatatttctccatactttattaatacatcaaaaggtcagaaatgtgaattccaggatgcctatgttctgttgagtgaaaagaaaatttctagtatccagtccattgtacctgctcttgaaattgccaatgctcaccgtaagcctttggtcataatcgctgaagatgttgatggagaagctctaagtacactcgtcttgaataggctaaaggttggtcttcaggttgtggcagtcaaggctccagggtttggtgacaatagaaagaaccagcttaaagatatggctattgctactggtggtgcagtgtttggagaagagggattgaccctgaatcttgaagacgttcagcctcatgacttaggaaaagttggagaggtcattgtgaccaaagacgatgccatgctcttaaaaggaaaaggtgacaaggctcaaattgaaaaacgtattcaagaaatcattgagcagttagatgtcacaactagtgaatatgaaaaggaaaaactgaatgaacggcttgcaaaactttcagatggagtggctgtgctgaaggttggtgggacaagtgatgttgaagtgaatgaaaagaaagacagagttacagatgcccttaatgctacaagagctgctgttgaagaaggcattgttttgggagggggttgtgccctccttcgatgcattccagccttggactcattgactccagctaatgaagatcaaaaaattggtatagaaattattaaaagaacactcaaaattccagcaatgaccattgctaagaatgcaggtgttgaaggatctttgatagttgagaaaattatgcaaagttcctcagaagttggttatgatgctatggctggagattttgtgaatatggtggaaaaaggaatcattgacccaacaaaggttgtgagaactgctttattggatgctgctggtgtggcctctctgttaactacagcagaagttgtagtcacagaaattcctaaagaagagaaggaccctggaatgggtgcaatgggtggaatgggaggtggtatgggaggtggcatgttctaactcctagactagtgctttacctttattaatgaactgtgacaggaagcccaaggcagtgttcctcaccaataacttcagagaagtcagttggagaaaatgaagaaaaaggctggctgaaaatcactataaccatcagttactggtttcagttgacaaaatatataatggtttactgctgtcattgtccatgcctacagataatttattttgtatttttgaataaaaaacatttgtacattcctgatactgggtacaagagccatgtaccagtgtactgctttcaacttaaatcactgaggcatttttactactattctgttaaaatcaggattttagtgcttgccaccaccagatgagaagttaagcagcctttctgtggagagtgagaataattgtgtacaaagtagagaagtatccaattatgtgacaacctttgtgtaataaaaatttgtttaaagtt

SEQ ID NO: 139766 - DNA, 2455 bp, Homo sapiens
  Payload ID: 7410
  Gene Symbol: HSPD1
  Gene Name: heat shock 60kDa protein 1 (chaperonin)
  Uniprot ID: P10809
  ENST ID: ENST00000388968
  CDS Start-End: 269-1990
agactaagccggccggagagggctgagcgcgctagcacaccctgcgcgggtagggaggggcggggctcgcgcgcagggtgtgcagattgcagggcccgggctgacgggaagtgggtgggagctgcctgcacacgcggtgccgcggggcgggagtagaggcggagggaggggacacgggctcattgcggtgtgcgccctgcactctgtccctcactcgccgccgacgacctgtctcgccgagcgcacgccttgccgccgccccgcagaaatgcttcggttacccacagtctttcgccagatgagaccggtgtccagggtactggctcctcatctcactcgggcttatgccaaagatgtaaaatttggtgcagatgcccgagccttaatgcttcaaggtgtagaccttttagccgatgctgtggccgttacaatggggccaaagggaagaacagtgattattgagcagagttggggaagtcccaaagtaacaaaagatggtgtgactgttgcaaagtcaattgacttaaaagataaatacaaaaacattggagctaaacttgttcaagatgttgccaataacacaaatgaagaagctggggatggcactaccactgctactgtactggcacgctctatagccaaggaaggcttcgagaagattagcaaaggtgctaatccagtggaaatcaggagaggtgtgatgttagctgttgatgctgtaattgctgaacttaaaaagcagtctaaacctgtgaccacccctgaagaaattgcacaggttgctacgatttctgcaaacggagacaaagaaattggcaatatcatctctgatgcaatgaaaaaagttggaagaaagggtgtcatcacagtaaaggatggaaaaacactgaatgatgaattagaaattattgaaggcatgaagtttgatcgaggctatatttctccatactttattaatacatcaaaaggtcagaaatgtgaattccaggatgcctatgttctgttgagtgaaaagaaaatttctagtatccagtccattgtacctgctcttgaaattgccaatgctcaccgtaagcctttggtcataatcgctgaagatgttgatggagaagctctaagtacactcgtcttgaataggctaaaggttggtcttcaggttgtggcagtcaaggctccagggtttggtgacaatagaaagaaccagcttaaagatatggctattgctactggtggtgcagtgtttggagaagagggattgaccctgaatcttgaagacgttcagcctcatgacttaggaaaagttggagaggtcattgtgaccaaagacgatgccatgctcttaaaaggaaaaggtgacaaggctcaaattgaaaaacgtattcaagaaatcattgagcagttagatgtcacaactagtgaatatgaaaaggaaaaactgaatgaacggcttgcaaaactttcagatggagtggctgtgctgaaggttggtgggacaagtgatgttgaagtgaatgaaaagaaagacagagttacagatgcccttaatgctacaagagctgctgttgaagaaggcattgttttgggagggggttgtgccctccttcgatgcattccagccttggactcattgactccagctaatgaagatcaaaaaattggtatagaaattattaaaagaacactcaaaattccagcaatgaccattgctaagaatgcaggtgttgaaggatctttgatagttgagaaaattatgcaaagttcctcagaagttggttatgatgctatggctggagattttgtgaatatggtggaaaaaggaatcattgacccaacaaaggttgtgagaactgctttattggatgctgctggtgtggcctctctgttaactacagcagaagttgtagtcacagaaattcctaaagaagagaaggaccctggaatgggtgcaatgggtggaatgggaggtggtatgggaggtggcatgttctaactcctagactagtgctttacctttattaatgaactgtgacaggaagcccaaggcagtgttcctcaccaataacttcagagaagtcagttggagaaaatgaagaaaaaggctggctgaaaatcactataaccatcagttactggtttcagttgacaaaatatataatggtttactgctgtcattgtccatgcctacagataatttattttgtatttttgaataaaaaacatttgtacattcctgatactgggtacaagagccatgtaccagtgtactgctttcaacttaaatcactgaggcatttttactactattctgttaaaatcaggattttagtgcttgccaccaccagatgagaagttaagcagcctttctgtggagagtgagaataattgtgtacaaagtagagaagtatccaattatgtgacaacctttgtgtaataaaaatttgtttaaagttaataa

SEQ ID NO: 139767 - DNA, 619 bp, Homo sapiens
  Payload ID: 7410
  Gene Symbol: HSPD1
  Gene Name: heat shock 60kDa protein 1 (chaperonin)
  ENST ID: ENST00000440114
  CDS Start-End: 44-190
gacctgtctcgccgagcgcacgccttgccgccgccccgcagaaatgcttcggttacccacagtctttcgccagatgagaccggtgtccagggtactggctcctcatctcactcgggcttatgccaaagatgtaaaatttggtgcagatgcccgagccttaatgcttcaagggaagaacagtgattattgagcagagttggggaagtcccaaagtaacaaaagatggtgtgactgttgcaaagtcaattgacttaaaagataaatacaaaaacattggagctaaacttgttcaagatgttgccaataacacaaatgaagaagctggggatggcactaccactgctactgtactggcacgctctatagccaaggaaggcttcgagaagattagcaaaggtgctaatccagtggaaatcaggagaggtgtgatgttagctgttgatgctgtaattgctgaacttaaaaagcagtctaaacctgtgaccacccctgaagaaattgcacaggttgctacgatttctgcaaacggagacaaagaaattggcaatatcatctctgatgcaatgaaaaaagttggaagaaagggtgtcatcacagtaaaggcaagtgtgtttgtatt

SEQ ID NO: 139768 - DNA, 754 bp, Homo sapiens
  Payload ID: 7410
  Gene Symbol: HSPD1
  Gene Name: heat shock 60kDa protein 1 (chaperonin)
  ENST ID: ENST00000430176
  CDS Start-End: 52-754
cggaagaaaaaaggagctgtttctaggcttttctaggcgcccagccgagaaatgcttcggttacccacagtctttcgccagatgagaccggtgtccagggtactggctcctcatctcactcgggcttatgccaaagatgtaaaatttggtgcagatgcccgagccttaatgcttcaaggtgtagaccttttagccgatgctgtggccgttacaatggggccaaagggaagaacagtgattattgagcagagttggggaagtcccaaagtaacaaaagatggtgtgactgttgcaaagtcaattgacttaaaagataaatacaaaaacattggagctaaacttgttcaagatgttgccaataacacaaatgaagaagctggggatggcactaccactgctactgtactggcacgctctatagccaaggaaggcttcgagaagattagcaaaggtgctaatccagtggaaatcaggagaggtgtgatgttagctgttgatgctgtaattgctgaacttaaaaagcagtctaaacctgtgaccacccctgaagaaattgcacaggttgctacgatttctgcaaacggagacaaagaaattggcaatatcatctctgatgcaatgaaaaaagttggaagaaagggtgtcatcacagatggaaaaacactgaatgatgaattagaaattattgaaggcatgaagtttgatcgaggctatatttctccatactttattaatacatcaaaaggtaagaaca

SEQ ID NO: 139769 - DNA, 549 bp, Homo sapiens
  Payload ID: 7410
  Gene Symbol: HSPD1
  Gene Name: heat shock 60kDa protein 1 (chaperonin)
  ENST ID: ENST00000428204
  CDS Start-End: 268-549
attgcggtgtgcgccctgcactctgtccctcactcgccgccgacgacctgtctcgccgagcgcacgccttgccgccgccccgcaggcagctgggataccgcgcctccagtcttgaccttgctgggggcgttcggaaagaaggacacgtgggctcgcgccgagtgggccgggccgccgcccccagcatcgcggccttgctggttgctctgatacagtagccttgggtggatccatggagacactttgctgagcggctttttgcaccaaatgcttcggttacccacagtctttcgccagatgagaccggtgtccagggtactggctcctcatctcactcgggcttatgccaaagatgtaaaatttggtgcagatgcccgagccttaatgcttcaaggtgtagaccttttagccgatgctgtggccgttacaatggggccaaagggaagaacagtgattattgagcagagttggggaagtcccaaagtaacaaaagatggtgtgactgttgcaaagtcaattgacttaaaagataaatacaaaaacattgga

SEQ ID NO: 139770 - DNA, 578 bp, Homo sapiens
  Payload ID: 7410
  Gene Symbol: HSPD1
  Gene Name: heat shock 60kDa protein 1 (chaperonin)
  ENST ID: ENST00000439605
  CDS Start-End: 329-578
actcgccgccgacgacctgtctcgccgagcgcacgccttgccgccgccccgcaggcagctgggataccgcgcctccagtcttgaccttgctgggggcgttcggaaagaaggacacgtgggctcgcgccgagtgggccgggccgccgcccccagcatcgcggccttgctggttgctctgatacagtagccttgggtggatccatggagacactttgctgagcggctttttgcaccgtcaggaatacttttaacttccctggtcacttggatttgtaacttgcctctctccggctgacttggtttctcaggggccacagttggagtggaaatgcttcggttacccacagtctttcgccagatgagaccggtgtccagggtactggctcctcatctcactcgggcttatgccaaagatgtaaaatttggtgcagatgcccgagccttaatgcttcaaggtgtagaccttttagccgatgctgtggccgttacaatggggccaaagggaagaacagtgattattgagcagagttggggaagtcccaaagtaacaaaagatggtgtgactgttgcaaagtcaa

SEQ ID NO: 139771 - DNA, 533 bp, Homo sapiens
  Payload ID: 7410
  Gene Symbol: HSPD1
  Gene Name: heat shock 60kDa protein 1 (chaperonin)
  ENST ID: ENST00000418022
  CDS Start-End: 359-533
ccctcactcgccgccgacgacctgtctcgccgagcgcacgccttgccgccgccccgcaggcagctgggataccgcgcctccagtcttgaccttgctgggggcgttcggaaagaaggacacgtgggctcgcgccgagtgggccgggccgccgcccccagcatcgcggccttgctggttgctctgatacagtagccttgggtggatccatggagacactttgctgagcggctttttgcaccgtcaggaatacttttaacttccctggtcacttggatttgtaacttgcctctctccggctgacttggtttctcaggggccacagttggagtgggtctgcccacaaggccgttttcgcgaaatgcttcggttacccacagtctttcgccagatgagaccggtgtccagggtactggctcctcatctcactcgggcttatgccaaagatgtaaaatttggtgcagatgcccgagccttaatgcttcaaggtgtagaccttttagccgatgctgtggccgttacaatggggccaaagg

SEQ ID NO: 139772 - DNA, 888 bp, Homo sapiens
  Payload ID: 7410
  Gene Symbol: HSPD1
  Gene Name: heat shock 60kDa protein 1 (chaperonin)
  ENST ID: ENST00000452200
  CDS Start-End: 226-888
gaagactcggaggcggaagaaaaaaggagctgtttctaggcttttctaggcgcccagccgaggtgaaagaactaccccttcgtcccctcccggaaatgacgcgatttgacccttgagccgtagggagcgcggcattttctggaaagttctggaaccgagcgaggcccgggaactagactaagccggccggagagggctgagcgcgctagcacaccctgcgcggaaatgcttcggttacccacagtctttcgccagatgagaccggtgtccagggtactggctcctcatctcactcgggcttatgccaaagatgtaaaatttggtgcagatgcccgagccttaatgcttcaaggtgtagaccttttagccgatgctgtggccgttacaatggggccaaagggaagaacagtgattattgagcagagttggggaagtcccaaagtaacaaaagatggtgtgactgttgcaaagtcaattgacttaaaagataaatacaaaaacattggagctaaacttgttcaagatgttgccaataacacaaatgaagaagctggggatggcactaccactgctactgtactggcacgctctatagccaaggaaggcttcgagaagattagcaaaggtgctaatccagtggaaatcaggagaggtgtgatgttagctgttgatgctgtaattgctgaacttaaaaagcagtctaaacctgtgaccacccctgaagaaattgcacaggttgctacgatttctgcaaacggagacaaagaaattggcaatatcatctctgatgcaatgaaaaaagttggaagaaagggtgtcatcacagtaaaggatggaaaaacactgaatgatgaattagaaattattgaaggcatgaagtttgatcga

SEQ ID NO: 139773 - DNA, 529 bp, Homo sapiens
  Payload ID: 7410
  Gene Symbol: HSPD1
  Gene Name: heat shock 60kDa protein 1 (chaperonin)
  ENST ID: ENST00000426480
  CDS Start-End: 5-529
agtgatgaaaacttgctggaccagagaacagctccagggaaagcggcagggagaggtggtcaaagggaaacaaggaggagaatatcggcacccggatccggctagacaagctggatggcaggaaacggaaatgcttcggttacccacagtctttcgccagatgagaccggtgtccagggtactggctcctcatctcactcgggcttatgccaaagatgtaaaatttggtgcagatgcccgagccttaatgcttcaaggtgtagaccttttagccgatgctgtggccgttacaatggggccaaagggaagaacagtgattattgagcagagttggggaagtcccaaagtaacaaaagatggtgtgactgttgcaaagtcaattgacttaaaagataaatacaaaaacattggagctaaacttgttcaagatgttgccaataacacaaatgaagaagctggggatggcactaccactgctactgtactggcacgctctatagccaaggaaggcttcgagaagattagcaaa

SEQ ID NO: 139774 - DNA, 3151 bp, Homo sapiens
  Payload ID: 7411
  Gene Symbol: HSPA12B
  Gene Name: heat shock 70kD protein 12B
  Uniprot ID: Q96MM6
  ENST ID: ENST00000254963
  CDS Start-End: 146-2206
gaggaggcgggaggcctcagggccgggcgcacgtcgagggctgcggccgccgcagcgggcacggccaacgagctgcgggcccgggatcgcggcggctggacggggctggagctgtcgggagggcggagctacagggcctgcaaggatgttggctgtcccggagatgggcctgcaggggctgtacatcggctccagcccggagcggtccccagtgcctagcccacccggctccccgaggacccaggaaagctgcggcattgcccccctcacaccctcgcagtctccaaaacccgaggtccgagccccccagcaggcctccttctctgtggtggtggccattgacttcggcaccacgtctagtggctatgctttcagctttgccagtgaccctgaggccatccacatgatgaggaaatgggagggcggagacccgggcgtggcccaccagaagaccccgacctgcctgctgctgactccggagggcgccttccacagctttggctacaccgcccgcgattactaccatgacctggaccccgaagaggcgcgggactggctctacttcgagaagttcaagatgaagatccacagcgccacggatctcaccttgaagacccagctagaggcagtaaatggaaagacgatgcccgccctggaggtgttcgcccatgccctgcgcttcttcagggagcacgcccttcaggagctgagggagcagagcccatcgctgccagagaaggacactgtgcgctgggtgttgacggtgcctgccatctggaaacagccagccaagcagttcatgcgggaggctgcctacctggctggactagtgtcccgagagaatgcagagcagctactcatcgccctggagcccgaggccgcctcggtatactgccgcaagctgcgcctgcaccagctcctggacctgagtggccgggccccaggtggtgggcgcctgggtgagcgccgctccatcgactccagcttccgtcaggctcgggagcagctgcgaaggtcccgccacagccgcacgttcctggtggagtcaggcgtaggagagctgtgggcagagatgcaagcaggagaccgctacgtggtggccgactgcggcggaggcaccgtggacctgacggtgcaccagctggagcagccccatggcaccctcaaggagctctacaaggcatctgggggcccttatggcgcggtgggcgtggacctggccttcgagcagctgctgtgccgcatcttcggcgaggacttcatcgccaccttcaaaaggcaacggccggcagcctgggtagatctgaccatcgccttcgaggctcgcaagcgcactgctggcccacaccgtgcaggggcgctcaacatctcgctgcccttctccttcattgacttctaccgcaagcagcggggccacaacgtggagaccgctctgcgcaggagcagcgtgaacttcgtgaagtggtcctcacaggggatgctccgaatgtcttgtgaagccatgaacgagctctttcagcccaccgtcagcgggatcatccagcacatagaggccctgctggcacggccggaggtgcagggtgtgaagctgctgttcctagtgggcggcttcgccgagtcagcggtgctgcagcacgcggtgcaggcggcgctgggcgcccgcggtctgcgtgtcgtggtcccgcacgacgtgggcctcaccatcctcaaaggcgcggtgctgttcggccaggcgccgggcgtggtgcgggtccgccgctcgccgctcacctatggcgtgggcgtgctcaaccgctttgtgcctgggcgccacccgcccgaaaagctgctggttcgcgacggccgccgctggtgcaccgacgtcttcgagcgcttcgtggccgccgagcagtcggtggccctgggcgaggaggtgcggcgcagctactgcccggcgcgtcccggccagcggcgcgtactcatcaacctgtactgctgcgcggcagaggatgcgcgcttcatcaccgaccccggcgtgcgcaaatgcggcgcgctcagcctcgagcttgagcccgccgactgcggccaggacaccgccggcgcgcctcccggccgccgcgagatccgcgccgccatgcagtttggcgacaccgaaattaaggtcaccgccgtcgacgtcagcaccaatcgctccgtgcgcgcgtccatcgactttctttccaactgagggcgcgccggcgcggtgccagcgccgtctgcccggccccgccctctttcggttcaggggcctgcggagcgggttggggcgggggaaacgatagttctgcagtctgcgcctttccacgccctccagccccgggggagataaggtcatgggagagtgggtggggacacacccagagactggctttgggattgggcactggtccgctgactgccaggctgaagggacccgccaaggactgaacgggtaagagaagaggtttgcaagacagagcgcgcagcccggcaaggggcatgtgaccccgaaggaagaacgcaacagaagagtcctggtctgaacttggccgagtaggggtgggggtgggatggcaggaggagccgcaggaggaaggaggttgtgcagggtctggacctgcagggctgaagttcactcatcgaccgactcagccccaaccgggagccaggcagaaaaaccctgtgccgtaggaaagtgactggaagtggactccagagggacaggtgtggtggcacagtcctggtgtggtgctgaccacccaaatatgactgtgaattgtggaaagggcagtagatctctaatgtggaggtgggaacattattgtggtggaggcaattatgagggtagcatttctttcgagacaaaacacccgtctgggaaggccccaaggtcagcttatgaaggaccccacttgcaccccaccccagccatggaagagcagctggagggtggatggggaggccagagggagcaatgaggggtggtcccagctctgctattgactcggtatgcctttaggacattctcttaccgctcatgggcctcagtttcctaaagtgtgaaatgtcaggcacttccctctaactggcatgcaacagccccacctgcctgagagccctgaggtgacaataaaacatttatgctcaaggggaa

SEQ ID NO: 139775 - DNA, 3009 bp, Homo sapiens
  Payload ID: 7411
  Gene Symbol: HSPA12B
  Gene Name: heat shock 70kD protein 12B
  ENST ID: ENST00000399701
  CDS Start-End: 262-2064
ggccgccgcagcgggcacggccaacgagctgcgggcccgggatcgcggcggctggacggggctggagctgtcgggagggcggagctacagggcctgcaaggatgttggctgtcccggagatgggcctgcaggggctgtacatcgaaacccgaggtccgagccccccagcaggcctccttctctgtggtggtggccattgacttcggcaccacgtctagtggctatgctttcagctttgccagtgaccctgaggccatccacatgatgaggaaatgggagggcggagacccgggcgtggcccaccagaagaccccgacctgcctgctgctgactccggagggcgccttccacagctttggctacaccgcccgcgattactaccatgacctggaccccgaagaggcgcgggactggctctacttcgagaagttcaagatgaagatccacagcgccacggatctcaccttgaagacccagctagaggcagtaaatggaaagacgatgcccgccctggaggtgttcgcccatgccctgcgcttcttcagggagcacgcccttcaggagctgagggagcagagcccatcgctgccagagaaggacactgtgcgctgggtgttgacggtgcctgccatctggaaacagccagccaagcagttcatgcgggaggctgcctacctggctggactagtgtcccgagagaatgcagagcagctactcatcgccctggagcccgaggccgcctcggtatactgccgcaagctgcgcctgcaccagctcctggacctgagtggccgggccccaggtggtgggcgcctgggtgagcgccgctccatcgactccagcttccgtcaggctcgggagcagctgcgaaggtcccgccacagccgcacgttcctggtggagtcaggcgtaggagagctgtgggcagagatgcaagcaggagaccgctacgtggtggccgactgcggcggaggcaccgtggacctgacggtgcaccagctggagcagccccatggcaccctcaaggagctctacaaggcatctgggggcccttatggcgcggtgggcgtggacctggccttcgagcagctgctgtgccgcatcttcggcgaggacttcatcgccaccttcaaaaggcaacggccggcagcctgggtagatctgaccatcgccttcgaggctcgcaagcgcactgctggcccacaccgtgcaggggcgctcaacatctcgctgcccttctccttcattgacttctaccgcaagcagcggggccacaacgtggagaccgctctgcgcaggagcagcgtgaacttcgtgaagtggtcctcacaggggatgctccgaatgtcttgtgaagccatgaacgagctctttcagcccaccgtcagcgggatcatccagcacatagaggccctgctggcacggccggaggtgcagggtgtgaagctgctgttcctagtgggcggcttcgccgagtcagcggtgctgcagcacgcggtgcaggcggcgctgggcgcccgcggtctgcgtgtcgtggtcccgcacgacgtgggcctcaccatcctcaaaggcgcggtgctgttcggccaggcgccgggcgtggtgcgggtccgccgctcgccgctcacctatggcgtgggcgtgctcaaccgctttgtgcctgggcgccacccgcccgaaaagctgctggttcgcgacggccgccgctggtgcaccgacgtcttcgagcgcttcgtggccgccgagcagtcggtggccctgggcgaggaggtgcggcgcagctactgcccggcgcgtcccggccagcggcgcgtactcatcaacctgtactgctgcgcggcagaggatgcgcgcttcatcaccgaccccggcgtgcgcaaatgcggcgcgctcagcctcgagcttgagcccgccgactgcggccaggacaccgccggcgcgcctcccggccgccgcgagatccgcgccgccatgcagtttggcgacaccgaaattaaggtcaccgccgtcgacgtcagcaccaatcgctccgtgcgcgcgtccatcgactttctttccaactgagggcgcgccggcgcggtgccagcgccgtctgcccggccccgccctctttcggttcaggggcctgcggagcgggttggggcgggggaaacgatagttctgcagtctgcgcctttccacgccctccagccccgggggagataaggtcatgggagagtgggtggggacacacccagagactggctttgggattgggcactggtccgctgactgccaggctgaagggacccgccaaggactgaacgggtaagagaagaggtttgcaagacagagcgcgcagcccggcaaggggcatgtgaccccgaaggaagaacgcaacagaagagtcctggtctgaacttggccgagtaggggtgggggtgggatggcaggaggagccgcaggaggaaggaggttgtgcagggtctggacctgcagggctgaagttcactcatcgaccgactcagccccaaccgggagccaggcagaaaaaccctgtgccgtaggaaagtgactggaagtggactccagagggacaggtgtggtggcacagtcctggtgtggtgctgaccacccaaatatgactgtgaattgtggaaagggcagtagatctctaatgtggaggtgggaacattattgtggtggaggcaattatgagggtagcatttctttcgagacaaaacacccgtctgggaaggccccaaggtcagcttatgaaggaccccacttgcaccccaccccagccatggaagagcagctggagggtggatggggaggccagagggagcaatgaggggtggtcccagctctgctattgactcggtatgcctttaggacattctcttaccgctcatgggcctcagtttcctaaagtgtgaaatgtcaggcacttccctctaactggcatgcaacagccccacctgcctgagagccctgaggtgacaataaaacatttatgctcaaggggaa

SEQ ID NO: 139776 - DNA, 5722 bp, Homo sapiens
  Payload ID: 7412
  Gene Symbol: HSPA12A
  Gene Name: heat shock 70kDa protein 12A
  Uniprot ID: O43301
  ENST ID: ENST00000369209
  CDS Start-End: 106-2133
ggcggctcagacacggcccgagcgccgccgcggacgcggacagagacccgcacgggcacgggcgctgcgctggaggctcccctcgcggtccggggctgcgcgaccatggcggacaaggaggccggcggcagcgacgggccccgagaaacggctcccacatctgcatattcatctccagcccggagtcttggggacacaggaataacgcctctgtccccctcccatattgtgaacgacactgactccaacgtctcagaacagcagtcatttctcgtggtggtggccgtcgactttgggaccacatccagtggctatgcctacagcttcaccaaggagccggaatgcatccatgtgatgaggcgatgggagggaggtgaccctggtgtgtccaatcagaagactccaaccaccatcttgctgactcccgagaggaagttccacagcttcgggtatgccgccagggacttttaccatgacctggatcccaatgaggccaagcagtggctgtacctggagaagttcaagatgaagctgcacaccactggggacctcaccatggatacagacctgacggcagcaaatggcaagaaagtcaaagcccttgaaatctttgcttatgccctgcagtactttaaggagcaggcgctgaaggagctgagtgaccaggcgggttcggagttcgagaactctgatgtcagatgggtcatcacggtgcctgccatctggaagcagccggccaagcagttcatgagacaagctgcctaccaggcaggcctggcctcccccgagaactcggagcagctcatcattgccttggagcctgaggcagcctctatctactgccgaaagctgcggctacaccagatgattgagctgagcagcaaggcagccgtcaatgggtacagcggcagtgacacagtaggagctgggtttacacaggctaaggaacacatacggcgtaatcggcagagtcggacctttttggtggagaatgtcataggagaaatctggtccgagctggaggaaggtgataagtatgtggttgtggacagtggcggtggcaccgtagacctgacagtccatcagatccggttaccggagggacaccttaaggaactgtataaagcaacaggcggaccctatggatctttaggagtagattatgagttcgaaaaacttctgtataaaatatttggagaggattttattgaacaattcaaaatcaaacgccctgcagcctgggttgacttaatgattgcgtttgagtctcgcaaaagggcggctgccccagacagaactaacccgctgaacatcaccctgcccttctccttcattgactactacaagaagttccgcgggcacagtgtggagcacgccttgcggaaaagcaatgtggattttgtgaagtggtcctcgcaggggatgctgcggatgagtccagatgccatgaacgccctttttaagccgaccatcgatagcatcattgagcatctccgggacctgtttcagaagcccgaggtgtccaccgtcaagttcctctttctggtgggcggctttgccgaggcgcccctgctgcagcaggcggtgcaggctgcttttggggaccagtgccggatcatcatcccccaggacgtgggcctcaccatcctcaagggtgccgtcctctttggcctggaccccgcggtcatcaaggtgcgccggtcgccgctcacctacggggtaggcgtgctgaaccgctacgtggagggcaagcacccgcctgagaagctgctggtgaaggatggcactcggtggtgcaccgacgtctttgacaagttcatctctgccgaccagtctgtggctctgggtgagctggtcaagcgtagctacaccccggccaagccctcccagctggtcattgtcatcaacatctacagctctgagcacgacaacgtcagcttcatcactgatcccggggtgaagaagtgtggcacgctccgcctggatctcacagggaccagtggcactgcggtgcccgcccggagggagatccagacccttatgcagttcggggacaccgagatcaaagccacagccattgatatagccacttcgaagagtgtcaaagttgggatcgacttcttaaattactaaccctcccgccccgctgcctgtccccttggactcaacttatctgcatctgctgacctcaaccttgactgttctttccctaaccttgaccctcaccattgcccatgtgaatttcagcagggaagatgagaacaatcagggctagaaataattagtgacttttgagggcacactggagtcagaaaaacagaaattaagattaaggtttaggcatagaaaattaaaggatcctggaggagcagctagttttcataggtacaaaagtggtgaaatggccacggagaagggaatcagtacatttctgcagcagtggttgcgctgctttgaacagatctccgttatgtagaatttaggatgccctattgctgtctttctagatttaaaatgagatctttgaaccaggaggagatcttcatctgagacttgtctttctaaattttttggatggccatcaatataaaatgccacccatctgcagttaatttcttttcctcatcatgtgattaaaagtggtgattcagtgggaactgggaatgtttttagctggtggtagaaggctgcctacactgggcactgttttagattctcatatcatttaaacagcaaggaggttcagggaagaataaccgtagccttgggtaatccactagggcttttgtgagtaggagagctgatacctcacattcttagcaggtgaaaacttgccatgatggaaacagatagtgaagagttactgacgtatcccaaattatatgctgtgacataaattcccagcatgcccagccctgatttctgagttcataagtaattctagtgaaccttagtaggaattctgggtaagaaaatgaggttgccattggtcttgtttgcatcaccaagaccagacatccagaagagcccctcaccttgaaaagcagacagattttaaattaaccccctccttcccactcaccttcatctccctaagagttttggccatttaattccacattttgaaaggaatacattggtgaaatttgggaagagaatctgtgctatgcaatgtttcattaaaatcttcagtttttcaagtctctctaaaaataatttgtagatctatacttgatgtattaagtcagttttttttcacagcgggcctgtggctcgcctgcatcagaattgcctgggtgcgtgttcagaacaggttcctggatctgagccctttttaactgaggccgactcttggagaggggcaccagaatctgcatttgtagtgtataccacatcgtggttcaactgaaattggagaaatactaacctgagattttgttgaagttcacacacagatcacagcccgccctctgcaggtgtcccctttgggctcctttaggaagagggcttccatgagaaggtgaccccataccttgccctcttggtcaatgggattggggctccacctggcttggagatggcccttttaaccctcacaggaagggccaggggaggaaaaaaattgcaagaaagcgacaccaagaacggagctgactgaggaaccaactggagggtcttcactctctccttccccagtgtacaaaaccagttttctgcaacattcaggagccaaatgaggaaaaagaatcaagaatctgactcacagcccatctgatctgttcaaagctgtcttttccacctgctgaaattcattaaatcactggaggcatgcataatgaatggagaatgagtgaacttccaatgcaacttggattcacaaacccattatcatagccaatatgcagattttaaacagcatttcacatttcatttgaccatgtcttctttttcgcatcgcctgctgcagaattccctactagaatgtgaaacaacgaacaaaccacagaacttagagtgtgctggttagtcacataacttagtagcaggattgtgtatccaggcacaaaggtgtctttgctaatgttctcttgctacctgccctgcttcaaacgctaaatggtatgggtctttctttgttgccagccatattctacaaataagacttttcaatatagttatgagtaatataattttatgtacatataatgttagaatattgtacagaatcttggtttctacgatgcgcttttcttgtttcaaaaagaggaaaatgcttgatttttgttgatgatacttttgttactgtccttaattttccatagtttggtttcttaattgtgctcactaagcatcgatctgtgctgatgccaagctatggactatgtacgcaagaccgagcaatagacagaggtgcctagggtccaaacacactgaacgcacgtggaccgcctggatcaggagcctcatcagacccttctccatgcacatccttcccaaacagtcacagattccattgaaaggagcagattctatcagttcttctgtgcagactttaagagctgaacgttctggttctggaagccatgtgactgcgcagaacaacctaagaaaccctttgtgtcctgaggggtcgttgacctctccttccgggtcggagcagtcactctgagggcaaagcgtggtccactgtgtgtgatgttttcaggatgctagggtcaaagaaagaaaccaagtggtacataagcccagcttttctgctgggctaagtgtaagtgtgagtaacatggtcaagcccctcttttttgggctaatgtaaagcctttcctgccttgcattaatgctatctccctgtgtactgtttctcttaaatgagcagatagaaatctgcagtgttggcagataggtgatggagaggatgataattttatcttctggccacagagctgcagccccagttgtcagagtccttaaatgaaacccccaaatccatccctccttccctacccccactggaatattctagaataagagcactggataagtacacttgaacacatttttctaaccttagaaaatacctacaaggcctgttgtcttgacccattactcaattgtccctggcatattatctgatcttcacgtttcttggaagcagaatcatcaaggctttcctttgtaactgccctttccgtacacagcaggcatgaataaatgctgagtaacagacaagttacagacaggaggggaaagaggaggaaccatacaactgtttttgcaaaatgatggctgagtccagattatagaggttgccttacccttagaatgttatttagaccaagtttagcttttagagtccaggtctggttaattgccagggtagcaaagaatcgcatgcaccaatgtaaacaggagtcagaatgcattattagtcaaagatcgaatttcacattgtagagatgtatagctgtgattaagctgcatatgtatgctgggaaacggcttgagtggatggctaatataaaagttgttggccataatgccacacctctcatctgcttgaaatatggaccagtattctaaaatatcagctactggggtctcattcactacaagataaattcaaacttcacagaactttgcagcagttcaccaccagacgggactgtgtctgcaaactctcttgtcttcacagacgcctaataaagcaaaactctgaatctca

SEQ ID NO: 139777 - DNA, 624 bp, Homo sapiens
  Payload ID: 7412
  Gene Symbol: HSPA12A
  Gene Name: heat shock 70kDa protein 12A
  ENST ID: ENST00000480802
  CDS Start-End: 1-360
gagctgagtgaccaggcgggttcggagttcgagaactctgatgtcagatgggtcatcacggtgcctgccatctggaagcagccggccaagcagttcatgagacaagctgcctaccaggcaggcctggcctcccccgagaactcggagcagctcatcattgccttggagcctgaggcagcctctatctactgccgaaagctgcggctacaccagatgattgagctgagcagcaaggcagccgtcaatgggtacagcggcagtgacacagtaggagctgggtttacacagggtacctctgctctctctctccccctcctgctctccttccttcccaagccctggatgtctctctccctctgatgattttaaaggcacttagtgccataatgaagaatcaggatactccgggaggaggtgggctttaagcacctctctgctcagcccccctacctggcccctccaaggacccccataaatggaggcatggttaccctggttcatcacccaccaagtgtctgggggcggggagcttctctctaagaatctgagggtagcctgagagcggttattggcctcacattgtactaggctcttaatctttcttgtgtattaacagattcttaa

SEQ ID NO: 139778 - DNA, 596 bp, Homo sapiens
  Payload ID: 7412
  Gene Symbol: HSPA12A
  Gene Name: heat shock 70kDa protein 12A
  ENST ID: ENST00000468935
  CDS Start-End: 188-596
tgcccggccttcgtctctgcggtgggagcacgcagtcttcactcagcttctctgtgccctgccagccctaggcagcaggcagggagagcactgtagcgcgttccaatgccggccagggagagtgttttttctcccggggggcccattcctggggcagagccactggctctgggaagacttcagaaaaatgctaggcctgaatgatgaaacggctcccacatctgcatattcatctccagcccggagtcttggggacacaggaataacgcctctgtccccctcccatattgtgaacgacactgactccaacgtctcagaacagcagtcatttctcgtggtggtggccgtcgactttgggaccacatccagtggctatgcctacagcttcaccaaggagccggaatgcatccatgtgatgaggcgatgggagggaggtgaccctggtgtgtccaatcagaagactccaaccaccatcttgctgactcccgagaggaagttccacagcttcgggtatgccgccagggacttttaccatgacctggatcccaatgaggccaagcagtggctgtacctggagaagttcaagatgaagctgc

SEQ ID NO: 139779 - DNA, 1904 bp, Homo sapiens
  Payload ID: 7413
  Gene Symbol: HSPA14
  Gene Name: heat shock 70kDa protein 14
  Uniprot ID: Q0VDF9
  ENST ID: ENST00000378372
  CDS Start-End: 240-1769
gcactgtgcagtttccgcggagcgcagagacgcgctgaagctactcgcggactgcgcgtgaagaaaggcggaaccttcacgctgattggcggcgacgcgggaggctgtagcggccgaccggacgcagggggctggcgggaacgtgaagctccgcggtgcctgatggggccgttgggcggccggtagctgttgctgttgggggaccccctcattcctgccgctgccgtccctgctgcctcatggcggccatcggagttcacctgggctgcacctcagcctgtgtggccgtctataaggatggccgggctggtgtggttgcaaatgatgccggtgaccgagttactccagctgttgttgcttactcagaaaatgaagagattgttggattggcagcaaaacaaagtagaataagaaatatttcaaatacagtaatgaaagtaaagcagatcctgggcagaagctccagtgatccacaagctcagaaatacatcgcggaaagtaaatgtttagtcattgaaaaaaatgggaaattacgatatgaaatagatactggagaagaaacaaaatttgttaacccagaagatgttgccagactgatatttagtaaaatgaaagaaacggcacattctgtattgggctcagatgcaaatgatgtagttattactgtcccgtttgattttggagaaaagcaaaaaaatgctcttggagaagcagctagagctgctggatttaatgttttgcgattaattcacgaaccgtctgcagctcttcttgcttatggaattggacaagactcccctactggaaaaagcaatattttggtgtttaagcttggaggaacatccttatctctcagcgtcatggaagttaacagtggaatatatcgggttctttcaacaaacactgatgataacatcggtggtgcacatttcacagaaaccttagcacagtatctagcttctgagttccaaagatccttcaaacatgatgtgagaggaaatgcgcgagccatgatgaaattaacgaacagtgctgaagtagcgaaacattctttgtcaaccttgggaagtgccaactgttttcttgactcattatatgaaggtcaagattttgattgcaatgtgtccagagcaagatttgaacttctttgttctccactttttaataagtgtatagaagcaatcagaggactcttagatcaaaatggatttacagcagatgatatcaacaaggttgtcctttgtggagggtcttctcgaatcccaaagctacagcaactgattaaagatcttttcccagctgttgagcttctcaattctatccctcctgatgaagtgatccctattggtgcagctatagaagcaggaattcttattgggaaagaaaacctgttggtggaagactctcttatgatagagtgttcagccagagatattttagttaagggtgtggacgaatcaggagccagtagattcacagtgctgtttccatcagggactcctttgccagctcgaagacaacacacattgcaagcccctggaagcatatcttcagtgtgccttgaactctatgagtctgatgggaagaactctgccaaagaggaaaccaagtttgcacaggttgtactccaggatttagataaaaaagaaaatggattacgtgatatattagctgttcttactatgaaaagggatggatctttacatgtgacatgcacagatcaagaaactggaaaatgtgaagcaatctctattgagatagcatcttagtgttttagagaaatcaagaatttttaaaaacaagaatatcaacatttggttttgtgtataagtggtgtttgtattaaaatactttttcaatgaactgtataaactatgttttattaaactacaatatatcagtaa

SEQ ID NO: 139780 - DNA, 1689 bp, Homo sapiens
  Payload ID: 7413
  Gene Symbol: HSPA14
  Gene Name: heat shock 70kDa protein 14
  ENST ID: ENST00000437161
  CDS Start-End: 102-533
gaacgtgaagctccgcggtgcctgatggggccgttgggcggccggtagctgttgctgttgggggaccccctcattcctgccgctgccgtccctgctgcctcatggcggccatcggagttcacctgggctgcacctcagcctgtgtggccgtctataaggatggccgggctggtgtggttgcaaatgatgccggtgaccgagttactccagctgttgttgcttactcagaaaatgaagagattgttggattggcagcaaaacaaagtagaataagaaatatttcaaatacagtaatgaaagtaaagcagatcctgggcagaagggtgctctcaagggacccccagctacagcagctcccacagccttttcagaggtgcagttgctccctgtcagagcagccccatggccagactgggtgtgtccggggagcccagcccctgcaccagcaccaaccgcagcactcctggggtagcctccacaccgcagactccagtctcctcttcgagagctggttttgtttctggtggggataggcccttgaccagtgagccccctccaaggtgggcaaggcgaagaaggcggtcagtggccaggactatcgcagccgagttggcagaaaacaggcgattggcacgagaactctcaaagcgggaggaagaaaaactggacaggctgattgctattggtgaggaggccagtgctcagcaagatactgccaatgagctccgcagggatgctgtcatcgcagtcagacgtttggcaacagcagtggaagaggcaactggtgcttttcagctaggccttgaaaaattgcttcagaggttgatttcgaataccaaaagctaggaaccaattacaaaaggctctgcttcctaaactggtagaagtctagttcccaaacctgccttctgaatccctggctccttttctgtgtcctcagaaaaaaacatggatgaaccatttatatccagatagtatgaaaataattgctagttcattttcccaagattctccaccaaatggaagacctttcagaaatgccaggggtgacctaatagaaaacgatggagccacgttctagacagctggttcatcctagctttgtcacagatgtgaagcagtttacctccctccagtggtttcctcatccgtaaaatggggatcaataataactcctgccctgcctacctcacagggttgttgtgaggatcacgtagttcatagatgtgaaagggtttaaaagtttaaaagcactgtacacatttaagttattaattcatatggccttggctgaggtaaggcagattggtttacaagatacagaagtatggatatatactgtgacttcattgcttgaatctttcctttgctggtctaacttgactgcttcatggagtttgaaatcttaatttttaaaatccctgtgtggctcattagacgactataagcacaacctgtatttgtaccttaatctcttacatttccactgctgtgtatctgacatatctactagtaagcactgttttgtcaaaccgtctttctctccttcattttactggttcttagtctcctatcaatataaggaaataagaagtgccagggagccgccattgtgtgttacggtttatatcgataatcttcaatataaaatactggccattttataaaatattaaatatatgtaaattc

SEQ ID NO: 139781 - DNA, 578 bp, Homo sapiens
  Payload ID: 7413
  Gene Symbol: HSPA14
  Gene Name: heat shock 70kDa protein 14
  ENST ID: ENST00000441647
  CDS Start-End: 1-386
cagcctgtgtggccgtctataaggatggccgggctggtgtggttgcaaatgatgccggtgaccgagttactccagctgttgttgcttactcagaaaatgaagagattgttggattggcagcaaaacaaagtagaataagaaatatttcaaatacagtaatgaaagtaaagcagatcctgggcagaagctccagtgatccacaagctcagaaatacatcgcggaaagtaaatgtttagtcattgaaaaaaatgggaaattacgatatgaaatagatactggagaagaaacaaaatttgttaacccagaagatgttgccagactgatatttagtaaaatgaaaggagcttattctccatggagtcagtctaattcagaagatggttgatactgaagcctaagagccaggctgtttggaaagctaattctgtgtccaaatatatcaccaaaaccacaagaagtgctgcatgatttcagagcgcagagaagaaaattgacacgggggcggggtgggcaagcaagtgtattgggaaatatgttaagtgagatctttgtcataaattaataaacctcagaaagt

SEQ ID NO: 139782 - DNA, 2483 bp, Homo sapiens
  Payload ID: 7414
  Gene Symbol: HSPA1A
  Gene Name: heat shock 70kDa protein 1A
  Uniprot ID: P0DMV8
  ENST ID: ENST00000375651
  CDS Start-End: 294-2219
gagctcggtgattggctcagaagggaaaaggcgggtctccgtgacgacttataaaagcccaggggcaagcggtccggataacggctagcctgaggagctgctgcgacagtccactacctttttcgagagtgactcccgttgtcccaaggcttcccagagcgaacctgtgcggctgcaggcaccggcgcgtcgagtttccggcgtccggaaggaccgagctcttctcgcggatccagtgttccgtttccagcccccaatctcagagcggagccgacagagagcagggaaccggcatggccaaagccgcggcgatcggcatcgacctgggcaccacctactcctgcgtgggggtgttccaacacggcaaggtggagatcatcgccaacgaccagggcaaccgcaccacccccagctacgtggccttcacggacaccgagcggctcatcggggatgcggccaagaaccaggtggcgctgaacccgcagaacaccgtgtttgacgcgaagcggctgattggccgcaagttcggcgacccggtggtgcagtcggacatgaagcactggcctttccaggtgatcaacgacggagacaagcccaaggtgcaggtgagctacaagggggagaccaaggcattctaccccgaggagatctcgtccatggtgctgaccaagatgaaggagatcgccgaggcgtacctgggctacccggtgaccaacgcggtgatcaccgtgccggcctacttcaacgactcgcagcgccaggccaccaaggatgcgggtgtgatcgcggggctcaacgtgctgcggatcatcaacgagcccacggccgccgccatcgcctacggcctggacagaacgggcaagggggagcgcaacgtgctcatctttgacctgggcgggggcaccttcgacgtgtccatcctgacgatcgacgacggcatcttcgaggtgaaggccacggccggggacacccacctgggtggggaggactttgacaacaggctggtgaaccacttcgtggaggagttcaagagaaaacacaagaaggacatcagccagaacaagcgagccgtgaggcggctgcgcaccgcctgcgagagggccaagaggaccctgtcgtccagcacccaggccagcctggagatcgactccctgtttgagggcatcgacttctacacgtccatcaccagggcgaggttcgaggagctgtgctccgacctgttccgaagcaccctggagcccgtggagaaggctctgcgcgacgccaagctggacaaggcccagattcacgacctggtcctggtcgggggctccacccgcatccccaaggtgcagaagctgctgcaggacttcttcaacgggcgcgacctgaacaagagcatcaaccccgacgaggctgtggcctacggggcggcggtgcaggcggccatcctgatgggggacaagtccgagaacgtgcaggacctgctgctgctggacgtggctcccctgtcgctggggctggagacggccggaggcgtgatgactgccctgatcaagcgcaactccaccatccccaccaagcagacgcagatcttcaccacctactccgacaaccaacccggggtgctgatccaggtgtacgagggcgagagggccatgacgaaagacaacaatctgttggggcgcttcgagctgagcggcatccctccggcccccaggggcgtgccccagatcgaggtgaccttcgacatcgatgccaacggcatcctgaacgtcacggccacggacaagagcaccggcaaggccaacaagatcaccatcaccaacgacaagggccgcctgagcaaggaggagatcgagcgcatggtgcaggaggcggagaagtacaaagcggaggacgaggtgcagcgcgagagggtgtcagccaagaacgccctggagtcctacgccttcaacatgaagagcgccgtggaggatgaggggctcaagggcaagatcagcgaggcggacaagaagaaggtgctggacaagtgtcaagaggtcatctcgtggctggacgccaacaccttggccgagaaggacgagtttgagcacaagaggaaggagctggagcaggtgtgtaaccccatcatcagcggactgtaccagggtgccggtggtcccgggcctgggggcttcggggctcagggtcccaagggagggtctgggtcaggccccaccattgaggaggtagattaggggcctttccaagattgctgtttttgttttggagcttcaagactttgcatttcctagtatttctgtttgtcagttctcaatttcctgtgtttgcaatgttgaaattttttggtgaagtactgaacttgctttttttccggtttctacatgcagagatgaatttatactgccatcttacgactatttcttctttttaatacacttaactcaggccattttttaagttggttacttcaaagtaaataaactttaaaattcaagtga

SEQ ID NO: 139783 - DNA, 1909 bp, Homo sapiens
  Payload ID: 7414
  Gene Symbol: HSPA1A
  Gene Name: heat shock 70kDa protein 1A
  ENST ID: ENST00000383389
  CDS Start-End: 215-1645
aacggctagcctgaggagctgctgcgacagtccactacctttttcgagagtgactcccgttgtcccaaggcttcccagagcgaacctgtgcggctgcaggcaccggcgcgtcgagtttccggcgtccggaaggaccgagctcttctcgcggatccagtgttccgtttccagcccccaatctcagagccgagccgacagagagcagggaaccggcatggccaaagccgcggcgatcggcatcgacctgggcaccacctactcctgcgtgggggtgttccaacacggcaagggggagcgcaacgtgctcatctttgacctgggcgggggcaccttcgacgtgtccatcctgacgatcgacgacggcatcttcgaggtgaaggccacggccggggacacccacctgggtggggaggactttgacaacaggctggtgaaccacttcgtggaggagttcaagagaaaacacaagaaggacatcagccagaacaagcgagccgtgaggcggctgcgcaccgcctgcgagagggccaagaggaccctgtcgtccagcacccaggccagcctggagatcgactccctgtttgagggcatcgacttctacacgtccatcaccagggcgaggttcgaggagctgtgctccgacctgttccgaagcaccctggagcccgtggagaaggctctgcgcgacgccaagctggacaaggcccagattcacgacctggtcctggtcgggggctccacccgcatccccaaggtgcagaagctgctgcaggacttcttcaacgggcgcgacctgaacaagagcatcaaccccgacgaggctgtggcctacggggcggcggtgcaggcggccatcctgatgggggacaagtccgagaacgtgcaggacctgctgctgctggacgtggctcccctgtcgctggggctggagacggccggaggcgtgatgactgccctgatcaagcgcaactccaccatccccaccaagcagacgcagatcttcaccacctactccgacaaccaacccggggtgctgatccaggtgtacgagggcgagagggccatgacgaaagacaacaatctgttggggcgcttcgagctgagcggcatccctccggcccccaggggcgtgccccagatcgaggtgaccttcgacatcgatgccaacggcatcctgaacgtcacggccacggacaagagcaccggcaaggccaacaagatcaccatcaccaacgacaagggccgcctgagcaaggaggagatcgagcgcatggtgcaggaggcggagaagtacaaagcggaggacgaggtgcagcgcgagagggtgtcagccaagaacgccctggagtcctacgccttcaacatgaagagcgccgtggaggatgaggggctcaagggcaagatcagcgaggccgacaagaagaaggtgctggacaagtgtcaagaggtcatctcgtggctggacgccaacaccttggccgagaaggacgagtttgagcacaagaggaaggagctggagcaggtgtgtaaccccatcatcagcggactgtaccagggtgccggtggtcccgggcctgggggcttcggggctcagggtcccaagggagggtctgggtcaggccccaccattgaggaggtagattaggggcctttccaagattgctgtttttgttttggagcttcaagactttgcatttcctagtatttctgtttgtcagttctcaatttcctgtgtttgcaatgttgaaattttttggtgaagtactgaacttgctttttttccggtttctacatgcagagatgaatttatactgccatcttacgactatttcttctttttaatacacttaactcaggccattttttaagttggttacttcaaagtaaataaactttaaaattcaagtga

SEQ ID NO: 139784 - DNA, 2483 bp, Homo sapiens
  Payload ID: 7414
  Gene Symbol: HSPA1A
  Gene Name: heat shock 70kDa protein 1A
  Uniprot ID: P0DMV8
  ENST ID: ENST00000400040
  CDS Start-End: 294-2219
gagctcggtgattggctcagaagggaaaaggcgggtctccgtgacgacttataaaagcccaggggcaagcggtccggataacggctagcctgaggagctgctgcgacagtccactacctttttcgagagtgactcccgttgtcccaaggcttcccagagcgaacctgtgcggctgcaggcaccggcgcgtcgagtttccggcgtccggaaggaccgagctcttctcgcggatccagtgttccgtttccagcccccaatctcagagccgagccgacagagagcagggaaccggcatggccaaagccgcggcgatcggcatcgacctgggcaccacctactcctgcgtgggggtgttccaacacggcaaggtggagatcatcgccaacgaccagggcaaccgcaccacccccagctacgtggccttcacggacaccgagcggctcatcggggatgcggccaagaaccaggtggcgctgaacccgcagaacaccgtgtttgacgcgaagcggctgatcggccgcaagttcggcgacccggtggtgcagtcggacatgaagcactggcctttccaggtgatcaacgacggagacaagcccaaggtgcaggtgagctacaagggggacaccaaggcattctaccccgaggagatctcgtccatggtgctgaccaagatgaaggagatcgccgaggcgtacctgggctacccggtgaccaacgcggtgatcaccgtgccggcctacttcaacgactcgcagcgccaggccaccaaggatgcgggtgtgatcgcggggctcaacgtgctgcggatcatcaacgagcccacggccgccgccatcgcctacggcctggacagaacgggcaagggggagcgcaacgtgctcatctttgacctgggcgggggcaccttcgacgtgtccatcctgacgatcgacgacggcatcttcgaggtgaaggccacggccggggacacccacctgggtggggaggactttgacaacaggctggtgaaccacttcgtggaggagttcaagagaaaacacaagaaggacatcagccagaacaagcgagccgtgaggcggctgcgcaccgcctgcgagagggccaagaggaccctgtcgtccagcacccaggccagcctggagatcgactccctgtttgagggcatcgacttctacacgtccatcaccagggcgaggttcgaggagctgtgctccgacctgttccgaagcaccctggagcccgtggagaaggctctgcgcgacgccaagctggacaaggcccagattcacgacctggtcctggtcgggggctccacccgcatccccaaggtgcagaagctgctgcaggacttcttcaacgggcgcgacctgaacaagagcatcaaccccgacgaggctgtggcctacggggcggcggtgcaggcggccatcctgatgggggacaagtccgagaacgtgcaggacctgctgctgctggacgtggctcccctgtcgctggggctggagacggccggaggcgtgatgactgccctgatcaagcgcaactccaccatccccaccaagcagacgcagatcttcaccacctactccgacaaccaacccggggtgctgatccaggtgtacgagggcgagagggccatgacgaaagacaacaatctgttggggcgcttcgagctgagcggcatccctccggcccccaggggcgtgccccagatcgaggtgaccttcgacatcgatgccaacggcatcctgaacgtcacggccacggacaagagcaccggcaaggccaacaagatcaccatcaccaacgacaagggccgcctgagcaaggaggagatcgagcgcatggtgcaggaggcggagaagtacaaagcggaggacgaggtgcagcgcgagagggtgtcagccaagaacgccctggagtcctacgccttcaacatgaagagcgccgtggaggatgaggggctcaagggcaagatcagcgaggccgacaagaagaaggtgctggacaagtgtcaagaggtcatctcgtggctggacgccaacaccttggccgagaaggacgagtttgagcacaagaggaaggagctggagcaggtgtgtaaccccatcatcagcggactgtaccagggtgccggtggtcccgggcctgggggcttcggggctcagggtcccaagggagggtctgggtcaggccccaccattgaggaggtagattaggggcctttccaagattgctgtttttgttttggagcttcaagactttgcatttcctagtatttctgtttgtcagttctcaatttcctgtgtttgcaatgttgaaattttttggtgaagtactgaacttgctttttttccggtttctacatgcagagatgaatttatactgccatcttacgactatttcttctttttaatacacttaactcaggccattttttaagttggttacttcaaagtaaataaactttaaaattcaagtga

SEQ ID NO: 139785 - DNA, 1909 bp, Homo sapiens
  Payload ID: 7414
  Gene Symbol: HSPA1A
  Gene Name: heat shock 70kDa protein 1A
  ENST ID: ENST00000452298
  CDS Start-End: 215-1645
aacggctagcctgaggagctgctgcgacagtccactacctttttcgagagtgactcccgttgtcccaaggcttcccagagcgaacctgtgcggctgcaggcaccggcgcgtcgagtttccggcgtccggaaggaccgagctcttctcgcggatccagtgttccgtttccagcccccaatctcagagcggagccgacagagagcagggaaccggcatggccaaagccgcggcgatcggcatcgacctgggcaccacctactcctgcgtgggggtgttccaacacggcaagggggagcgcaacgtgctcatctttgacctgggcgggggcaccttcgacgtgtccatcctgacgatcgacgacggcatcttcgaggtgaaggccacggccggggacacccacctgggtggggaggactttgacaacaggctggtgaaccacttcgtggaggagttcaagagaaaacacaagaaggacatcagccagaacaagcgagccgtgaggcggctgcgcaccgcctgcgagagggccaagaggaccctgtcgtccagcacccaggccagcctggagatcgactccctgtttgagggcatcgacttctacacgtccatcaccagggcgaggttcgaggagctgtgctccgacctgttccgaagcaccctggagcccgtggagaaggctctgcgcgacgccaagctggacaaggcccagattcacgacctggtcctggtcgggggctccacccgcatccccaaggtgcagaagctgctgcaggacttcttcaacgggcgcgacctgaacaagagcatcaaccccgacgaggctgtggcctacggggcggcggtgcaggcggccatcctgatgggggacaagtccgagaacgtgcaggacctgctgctgctggacgtggctcccctgtcgctggggctggagacggccggaggcgtgatgactgccctgatcaagcgcaactccaccatccccaccaagcagacgcagatcttcaccacctactccgacaaccaacccggggtgctgatccaggtgtacgagggcgagagggccatgacgaaagacaacaatctgttggggcgcttcgagctgagcggcatccctccggcccccaggggcgtgccccagatcgaggtgaccttcgacatcgatgccaacggcatcctgaacgtcacggccacggacaagagcaccggcaaggccaacaagatcaccatcaccaacgacaagggccgcctgagcaaggaggagatcgagcgcatggtgcaggaggcggagaagtacaaagcggaggacgaggtgcagcgcgagagggtgtcagccaagaacgccctggagtcctacgccttcaacatgaagagcgccgtggaggatgaggggctcaagggcaagatcagcgaggcggacaagaagaaggtgctggacaagtgtcaagaggtcatctcgtggctggacgccaacaccttggccgagaaggacgagtttgagcacaagaggaaggagctggagcaggtgtgtaaccccatcatcagcggactgtaccagggtgccggtggtcccgggcctgggggcttcggggctcagggtcccaagggagggtctgggtcaggccccaccattgaggaggtagattaggggcctttccaagattgctgtttttgttttggagcttcaagactttgcatttcctagtatttctgtttgtcagttctcaatttcctgtgtttgcaatgttgaaattttttggtgaagtactgaacttgctttttttccggtttctacatgcagagatgaatttatactgccatcttacgactatttcttctttttaatacacttaactcaggccattttttaagttggttacttcaaagtaaataaactttaaaattcaagtga

SEQ ID NO: 139786 - DNA, 2483 bp, Homo sapiens
  Payload ID: 7414
  Gene Symbol: HSPA1A
  Gene Name: heat shock 70kDa protein 1A
  Uniprot ID: P0DMV8
  ENST ID: ENST00000430065
  CDS Start-End: 294-2219
gagctcggtgattggctcagaagggaaaaggcgggtctccgtgacgacttataaaagcccaggggcaagcggtccggataacggctagcctgaggagctgctgcgacagtccactacctttttcgagagtgactcccgttgtcccaaggcttcccagagcgaacctgtgcggctgcaggcaccggcgcgtcgagtttccggcgtccggaaggaccgagctcttctcgcggatccagtgttccgtttccagcccccaatctcagagcggagccgacagagagcagggaaccggcatggccaaagccgcggcgatcggcatcgacctgggcaccacctactcctgcgtgggggtgttccaacacggcaaggtggagatcatcgccaacgaccagggcaaccgcaccacccccagctacgtggccttcacggacaccgagcggctcatcggggatgcggccaagaaccaggtggcgctgaacccgcagaacaccgtgtttgacgcgaagcggctgatcggccgcaagttcggcgacccggtggtgcagtcggacatgaagcactggcctttccaggtgatcaacgacggagacaagcccaaggtgcaggtgagctacaagggggagaccaaggcattctaccccgaggagatctcgtccatggtgctgaccaagatgaaggagatcgccgaggcgtacctgggctacccggtgaccaacgcggtgatcaccgtgccggcctacttcaacgactcgcagcgccaggccaccaaggatgcgggtgtgatcgcggggctcaacgtgctgcggatcatcaacgagcccacggccgccgccatcgcctacggcctggacagaacgggcaagggggagcgcaacgtgctcatctttgacctgggcgggggcaccttcgacgtgtccatcctgacgatcgacgacggcatcttcgaggtgaaggccacggccggggacacccacctgggtggggaggactttgacaacaggctggtgaaccacttcgtggaggagttcaagagaaaacacaagaaggacatcagccagaacaagcgagccgtgaggcggctgcgcaccgcctgcgagagggccaagaggaccctgtcgtccagcacccaggccagcctggagatcgactccctgtttgagggcatcgacttctacacgtccatcaccagggcgaggttcgaggagctgtgctccgacctgttccgaagcaccctggagcccgtggagaaggctctgcgcgacgccaagctggacaaggcccagattcacgacctggtcctggtcgggggctccacccgcatccccaaggtgcagaagctgctgcaggacttcttcaacgggcgcgacctgaacaagagcatcaaccccgacgaggctgtggcctacggggcggcggtgcaggcggccatcctgatgggggacaagtccgagaacgtgcaggacctgctgctgctggacgtggctcccctgtcgctggggctggagacggccggaggcgtgatgactgccctgatcaagcgcaactccaccatccccaccaagcagacgcagatcttcaccacctactccgacaaccaacccggggtgctgatccaggtgtacgagggcgagagggccatgacgaaagacaacaatctgttggggcgcttcgagctgagcggcatccctccggcccccaggggcgtgccccagatcgaggtgaccttcgacatcgatgccaacggcatcctgaacgtcacggccacggacaagagcaccggcaaggccaacaagatcaccatcaccaacgacaagggccgcctgagcaaggaggagatcgagcgcatggtgcaggaggcggagaagtacaaagcggaggacgaggtgcagcgcgagagggtgtcagccaagaacgccctggagtcctacgccttcaacatgaagagcgccgtggaggatgaggggctcaagggcaagatcagcgaggccgacaagaagaaggtgctggacaagtgtcaagaggtcatctcgtggctggacgccaacaccttggccgagaaggacgagtttgagcacaagaggaaggagctggagcaggtgtgtaaccccatcatcagcggactgtaccagggtgccggtggtcccgggcctgggggcttcggggctcagggtcccaagggagggtctgggtcaggccccaccattgaggaggtagattaggggcctttccaagattgctgtttttgttttggagcttcaagactttgcatttcctagtatttctgtttgtcagttctcaatttcctgtgtttgcaatgttgaaattttttggtgaagtactgaacttgctttttttccggtttctacatgcagagatgaatttatactgccatcttacgactatttcttctttttaatacacttaactcaggccattttttaagttggttacttcaaagtaaataaactttaaaattcaagtga

SEQ ID NO: 139787 - DNA, 2483 bp, Homo sapiens
  Payload ID: 7414
  Gene Symbol: HSPA1A
  Gene Name: heat shock 70kDa protein 1A
  Uniprot ID: P0DMV8
  ENST ID: ENST00000441618
  CDS Start-End: 294-2219
gagctcggtgattggctcagaagggaaaaggcgggtctccgtgacgacttataaaagcccaggggcaagcggtccggataacggctagcctgaggagctgctgcgacagtccactacctttttcgagagtgactcccgttgtcccaaggcttcccagagcgaacctgtgcggctgcaggcaccggcgcgtcgagtttccggcgtccggaaggaccgagctcttctcgcggatccagtgttccgtttccagcccccaatctcagagccgagccgacagagagcagggaaccggcatggccaaagccgcggcgatcggcatcgacctgggcaccacctactcctgcgtgggggtgttccaacacggcaaggtggagatcatcgccaacgaccagggcaaccgcaccacccccagctacgtggccttcacggacaccgagcggctcatcggggatgcggccaagaaccaggtggcgctgaacccgcagaacaccgtgtttgacgcgaagcggctgatcggccgcaagttcggcgacccggtggtgcagtcggacatgaagcactggcctttccaggtgatcaacgacggagacaagcccaaggtgcaggtgagctacaagggggagaccaaggcattctaccccgaggagatctcgtccatggtgctgaccaagatgaaggagatcgccgaggcgtacctgggctacccggtgaccaacgcggtgatcaccgtgccggcctacttcaacgactcgcagcgccaggccaccaaggatgcgggtgtgatcgcggggctcaacgtgctgcggatcatcaacgagcccacggccgccgccatcgcctacggcctggacagaacgggcaagggggagcgcaacgtgctcatctttgacctgggcgggggcaccttcgacgtgtccatcctgacgatcgacgacggcatcttcgaggtgaaggccacggccggggacacccacctgggtggggaggactttgacaacaggctggtgaaccacttcgtggaggagttcaagagaaaacacaagaaggacatcagccagaacaagcgagccgtgaggcggctgcgcaccgcctgcgagagggccaagaggaccctgtcgtccagcacccaggccagcctggagatcgactccctgtttgagggcatcgacttctacacgtccatcaccagggcgaggttcgaggagctgtgctccgacctgttccgaagcaccctggagcccgtggagaaggctctgcgcgacgccaagctggacaaggcccagattcacgacctggtcctggtcgggggctccacccgcatccccaaggtgcagaagctgctgcaggacttcttcaacgggcgcgacctgaacaagagcatcaaccccgacgaggctgtggcctacggggcggcggtgcaggcggccatcctgatgggggacaagtccgagaacgtgcaggacctgctgctgctggacgtggctcccctgtcgctggggctggagacggccggaggcgtgatgactgccctgatcaagcgcaactccaccatccccaccaagcagacgcagatcttcaccacctactccgacaaccaacccggggtgctgatccaggtgtacgagggcgagagggccatgacgaaagacaacaatctgttggggcgcttcgagctgagcggcatccctccggcccccaggggcgtgccccagatcgaggtgaccttcgacatcgatgccaacggcatcctgaacgtcacggccacggacaagagcaccggcaaggccaacaagatcaccatcaccaacgacaagggccgcctgagcaaggaggagatcgagcgcatggtgcaggaggcggagaagtacaaagcggaggacgaggtgcagcgcgagagggtgtcagccaagaacgccctggagtcctacgccttcaacatgaagagcgccgtggaggatgaggggctcaagggcaagatcagcgaggccgacaagaagaaggtgctggacaagtgtcaagaggtcatctcgtggctggacgccaacaccttggccgagaaggacgagtttgagcacaagaggaaggagctggagcaggtgtgtaaccccatcatcagcggactgtaccagggtgccggtggtcccgggcctgggggcttcggggctcagggtcccaagggagggtctgggtcaggccccaccattgaggaggtagattaggggcctttccaagattgctgtttttgttttggagcttcaagactttgcatttcctagtatttctgtttgtcagttctcaatttcctgtgtttgcaatgttgaaattttttggtgaagtactgaacttgctttttttccggtttctacatgcagagatgaatttatactgccatcttacgactatttcttctttttaatacacttaactcaggccattttttaagttggttacttcaaagtaaataaactttaaaattcaagtga

SEQ ID NO: 139788 - DNA, 2483 bp, Homo sapiens
  Payload ID: 7414
  Gene Symbol: HSPA1A
  Gene Name: heat shock 70kDa protein 1A
  Uniprot ID: P0DMV8
  ENST ID: ENST00000433487
  CDS Start-End: 294-2219
gagctcggtgattggctcagaagggaaaaggcgggtctccgtgacgacttataaaagcccaggggcaagcggtccggataacggctagcctgaggagctgctgcgacagtccactacctttttcgagagtgactcccgttgtcccaaggcttcccagagcgaacctgtgcggctgcaggcaccggcgcgtcgagtttccggcgtccggaaggaccgagctcttctcgcggatccagtgttccgtttccagcccccaatctcagagcggagccgacagagagcagggaaccggcatggccaaagccgcggcgatcggcatcgacctgggcaccacctactcctgcgtgggggtgttccaacacggcaaggtggagatcatcgccaacgaccagggcaaccgcaccacccccagctacgtggccttcacggacaccgagcggctcatcggggatgcggccaagaaccaggtggcgctgaacccgcagaacaccgtgtttgacgcgaagcggctgatcggccgcaagttcggcgacccggtggtgcagtcggacatgaagcactggcctttccaggtgatcaacgacggagacaagcccaaggtgcaggtgagctacaagggggagaccaaggcattctaccccgaggagatctcgtccatggtgctgaccaagatgaaggagatcgccgaggcgtacctgggctacccggtgaccaacgcggtgatcaccgtgccggcctacttcaacgactcgcagcgccaggccaccaaggatgcgggtgtgatcgcggggctcaacgtgctgcggatcatcaacgagcccacggccgccgccatcgcctacggcctggacagaacgggcaagggggagcgcaacgtgctcatctttgacctgggcgggggcaccttcgacgtgtccatcctgacgatcgacgacggcatcttcgaggtgaaggccacggccggggacacccacctgggtggggaggactttgacaacaggctggtgaaccacttcgtggaggagttcaagagaaaacacaagaaggacatcagccagaacaagcgagccgtgaggcggctgcgcaccgcctgcgagagggccaagaggaccctgtcgtccagcacccaggccagcctggagatcgactccctgtttgagggcatcgacttctacacgtccatcaccagggcgaggttcgaggagctgtgctccgacctgttccgaagcaccctggagcccgtggagaaggctctgcgcgacgccaagctggacaaggcccagattcacgacctggtcctggtcgggggctccacccgcatccccaaggtgcagaagctgctgcaggacttcttcaacgggcgcgacctgaacaagagcatcaaccccgacgaggctgtggcctacggggcggcggtgcaggcggccatcctgatgggggacaagtccgagaacgtgcaggacctgctgctgctggacgtggctcccctgtcgctggggctggagacggccggaggcgtgatgactgccctgatcaagcgcaactccaccatccccaccaagcagacgcagatcttcaccacctactccgacaaccaacccggggtgctgatccaggtgtacgagggcgagagggccatgacgaaagacaacaatctgttggggcgcttcgagctgagcggcatccctccggcccccaggggcgtgccccagatcgaggtgaccttcgacatcgatgccaacggcatcctgaacgtcacggccacggacaagagcaccggcaaggccaacaagatcaccatcaccaacgacaagggccgcctgagcaaggaggagatcgagcgcatggtgcaggaggcggagaagtacaaagcggaggacgaggtgcagcgcgagagggtgtcagccaagaacgccctggagtcctacgccttcaacatgaagagcgccgtggaggatgaggggctcaagggcaagatcagcgaggcggacaagaagaaggtgctggacaagtgtcaagaggtcatctcgtggctggacgccaacaccttggccgagaaggacgagtttgagcacaagaggaaggagctggagcaggtgtgtaaccccatcatcagcggactgtaccagggtgccggtggtcccgggcctgggggcttcggggctcagggtcccaagggagggtctgggtcaggccccaccattgaggaggtagattaggggcctttccaagattgctgtttttgttttggagcttcaagactttgcatttcctagtatttctgtttgtcagttctcaatttcctgtgtttgcaatgttgaaattttttggtgaagtactgaacttgctttttttccggtttctacatgcagagatgaatttatactgccatcttacgactatttcttctttttaatacacttaactcaggccattttttaagttggttacttcaaagtaaataaactttaaaattcaagtga

SEQ ID NO: 139789 - DNA, 1909 bp, Homo sapiens; identical to SEQ ID NO: 139783
  Payload ID: 7414
  Gene Symbol: HSPA1A
  Gene Name: heat shock 70kDa protein 1A
  ENST ID: ENST00000449876
  CDS Start-End: 215-1645

SEQ ID NO: 139790 - DNA, 1909 bp, Homo sapiens
  Payload ID: 7414
  Gene Symbol: HSPA1A
  Gene Name: heat shock 70kDa protein 1A
  ENST ID: ENST00000422919
  CDS Start-End: 215-1645
aacggctagcctgaggagctgctgcgacagtccactacctttttcgagagtgactcccgttgtcccaaggcttcccagagcgaacctgtgcggctgcaggcaccggcgcgtcgagtttccggcgtccggaaggaccgagctcttctcgcggatccagtgttccgtttccagcccccaatctcagagcggagccgacagagagcagggaaccggcatggccaaagccgcggcgatcggcatcgacctgggcaccacctactcctgcgtgggggtgttccaacacggcaagggggagcgcaacgtgctcatctttgacctgggcgggggcaccttcgacgtgtccatcctgacgatcgacgacggcatcttcgaggtgaaggccacggccggggacacccacctgggtggggaggactttgacaacaggctggtgaaccacttcgtggaggagttcaagagaaaacacaagaaggacatcagccagaacaagcgagccgtgaggcggctgcgcaccgcctgcgagagggccaagaggaccctgtcgtccagcacccaggccagcctggagatcgactccctgtttgagggcatcgacttctacacgtccatcaccagggcgaggttcgaggagctgtgctccgacctgttccgaagcaccctggagcccgtggagaaggctctgcgcgacgccaagctggacaaggcccagattcacgacctggtcctggtcgggggctccacccgcatccccaaggtgcagaagctgctgcaggacttcttcaacgggcgcgacctgaacaagagcatcaaccccgacgaggctgtggcctacggggcggcggtgcaggcggccatcctgatgggggacaagtccgagaacgtgcaggacctgctgctgctggacgtggctcccctgtcgctggggctggagacggccggaggcgtgatgactgccctgatcaagcgcaactccaccatccccaccaagcagacgcagatcttcaccacctactccgacaaccaacccggggtgctgatccaggtgtacgagggcgagagggccatgacgaaagacaacaatctgttggggcgcttcgagctgagcggcatccctccggcccccaggggcgtgccccagatcgaggtgaccttcgacatcgatgccaacggcatcctgaacgtcacggccacggacaagagcaccggcaaggccaacaagatcaccatcaccaacgacaagggccgcctgagcaaggaggagatcgagcgcatggtgcaggaggcggagaagtacaaagcggaggacgaggtgcagcgcgagagggtgtcagccaagaacgccctggagtcctacgccttcaacatgaagagcgccgtggaggatgaggggctcaagggcaagatcagcgaggccgacaagaagaaggtgctggacaagtgtcaagaggtcatctcgtggctggacgccaacaccttggccgagaaggacgagtttgagcacaagaggaaggagctggagcaggtgtgtaaccccatcatcagcggactgtaccagggtgccggtggtcccgggcctgggggcttcggggctcagggtcccaagggagggtctgggtcaggccccaccattgaggaggtagattaggggcctttccaagattgctgtttttgttttggagcttcaagactttgcatttcctagtatttctgtttgtcagttctcaatttcctgtgtttgcaatgttgaaattttttggtgaagtactgaacttgctttttttccggtttctacatgcagagatgaatttatactgccatcttacgactatttcttctttttaatacacttaactcaggccattttttaagttggttacttcaaagtaaataaactttaaaattcaagtga

SEQ ID NO: 139791 - DNA, 1909 bp, Homo sapiens; identical to SEQ ID NO: 139785
  Payload ID: 7414
  Gene Symbol: HSPA1A
  Gene Name: heat shock 70kDa protein 1A
  ENST ID: ENST00000608703
  CDS Start-End: 215-1645

SEQ ID NO: 139792 - DNA, 2521 bp, Homo sapiens
  Payload ID: 7415
  Gene Symbol: HSPA1B
  Gene Name: heat shock 70kDa protein 1B
  Uniprot ID: P0DMV9
  ENST ID: ENST00000375650
  CDS Start-End: 217-2142
ggaaaacggccagcctgaggagctgctgcgagggtccgcttcgtctttcgagagtgactcccgcggtcccaaggctttccagagcgaacctgtgcggctgcaggcaccggcgtgttgagtttccggcgttccgaaggactgagctcttgtcgcggatcccgtccgccgtttccagcccccagtctcagagcggagcccacagagcagggcaccggcatggccaaagccgcggcgatcggcatcgacctgggcaccacctactcctgcgtgggggtgttccaacacggcaaggtggagatcatcgccaacgaccagggcaaccgcaccacccccagctacgtggccttcacggacaccgagcggctcatcggggatgcggccaagaaccaggtggcgctgaacccgcagaacaccgtgtttgacgcgaagcggctgattggccgcaagttcggcgacccggtggtgcagtcggacatgaagcactggcctttccaggtgatcaacgacggagacaagcccaaggtgcaggtgagctacaagggggagaccaaggcattctaccccgaggagatctcgtccatggtgctgaccaagatgaaggagatcgccgaggcgtacctgggctacccggtgaccaacgcggtgatcaccgtgccggcctacttcaacgactcgcagcgccaggccaccaaggatgcgggtgtgatcgcggggctcaacgtgctgcggatcatcaacgagcccacggccgccgccatcgcctacggcctggacagaacgggcaagggggagcgcaacgtgctcatctttgacctgggcgggggcaccttcgacgtgtccatcctgacgatcgacgacggcatcttcgaggtgaaggccacggccggggacacccacctgggtggggaggactttgacaacaggctggtgaaccacttcgtggaggagttcaagagaaaacacaagaaggacatcagccagaacaagcgagccgtgaggcggctgcgcaccgcctgcgagagggccaagaggaccctgtcgtccagcacccaggccagcctggagatcgactccctgtttgagggcatcgacttctacacgtccatcaccagggcgaggttcgaggagctgtgctccgacctgttccgaagcaccctggagcccgtggagaaggctctgcgcgacgccaagctggacaaggcccagattcacgacctggtcctggtcgggggctccacccgcatccccaaggtgcagaagctgctgcaggacttcttcaacgggcgcgacctgaacaagagcatcaaccccgacgaggctgtggcctacggggcggcggtgcaggcggccatcctgatgggggacaagtccgagaacgtgcaggacctgctgctgctggacgtggctcccctgtcgctggggctggagacggccggaggcgtgatgactgccctgatcaagcgcaactccaccatccccaccaagcagacgcagatcttcaccacctactccgacaaccaacccggggtgctgatccaggtgtacgagggcgagagggccatgacgaaagacaacaatctgttggggcgcttcgagctgagcggcatccctccggcccccaggggcgtgccccagatcgaggtgaccttcgacatcgatgccaacggcatcctgaacgtcacggccacggacaagagcaccggcaaggccaacaagatcaccatcaccaacgacaagggccgcctgagcaaggaggagatcgagcgcatggtgcaggaggcggagaagtacaaagcggaggacgaggtgcagcgcgagagggtgtcagccaagaacgccctggagtcctacgccttcaacatgaagagcgccgtggaggatgaggggctcaagggcaagatcagcgaggcggacaagaagaaggttctggacaagtgtcaagaggtcatctcgtggctggacgccaacaccttggccgagaaggacgagtttgagcacaagaggaaggagctggagcaggtgtgtaaccccatcatcagcggactgtaccagggtgccggtggtcccgggcctggcggcttcggggctcagggtcccaagggagggtctgggtcaggccctaccattgaggaggtggattaggggcctttgttctttagtatgtttgtctttgaggtggactgttgggactcaaggactttgctgctgttttcctatgtcatttctgcttcagctctttgctgcttcacttctttgtaaagttgtaacctgatggtaattagctggcttcattatttttgtagtacaaccgatatgttcattagaattctttgcatttaatgttgatactgtaagggtgtttcgttccctttaaatgaatcaacactgccaccttctgtacgagtttgtttgttttttttttttttttttttttttgcttggcgaaaacactacaaaggctgggaatgtatgtttttataatttgtttatttaaatatgaaaaataaaatgttaaactttt

SEQ ID NO: 139793 - DNA, 2524 bp, Homo sapiens
  Payload ID: 7415
  Gene Symbol: HSPA1B
  Gene Name: heat shock 70kDa protein 1B
  Uniprot ID: P0DMV9
  ENST ID: ENST00000391548
  CDS Start-End: 217-2142
ggaaaacggccagcctgaggagctgctgcgagggtccgcttcgtctttcgagagtgactcccgcggtcccaaggctttccagagcgaacctgtgcggctgcaggcaccggcgtgttgagtttccggcgttccgaaggactgagctcttgtcgcggatcccgtccgccgtttccagcccccagtctcagagcggagcccacagagcagggcaccggcatggccaaagccgcggcgatcggcatcgacctgggcaccacctactcctgcgtgggggtgttccaacacggcaaggtggagatcatcgccaacgaccagggcaaccgcaccacccccagctacgtggccttcacggacaccgagcggctcatcggggatgcggccaagaaccaggtggcgctgaacccgcagaacaccgtgtttgacgcgaagcggctgatcggccgcaagttcggcgacccggtggtgcagtcggacatgaagcactggcctttccaggtgatcaacgacggagacaagcccaaggtgcaggtgagctacaagggggagaccaaggcattctaccccgaggagatctcgtccatggtgctgaccaagatgaaggagatcgccgaggcgtacctgggctacccggtgaccaacgcggtgatcaccgtgccggcctacttcaacgactcgcagcgccaggccaccaaggatgcgggtgtgatcgcggggctcaacgtgctgcggatcatcaacgagcccacggccgccgccatcgcctacggcctggacagaacgggcaagggggagcgcaacgtgctcatctttgacctgggcgggggcaccttcgacgtgtccatcctgacgatcgacgacggcatcttcgaggtgaaggccacggccggggacacccacctgggtggggaggactttgacaacaggctggtgaaccacttcgtggaggagttcaagagaaaacacaagaaggacatcagccagaacaagcgagccgtgaggcggctgcgcaccgcctgcgagagggccaagaggaccctgtcgtccagcacccaggccagcctggagatcgactccctgtttgagggcatcgacttctacacgtccatcaccagggcgaggttcgaggagctgtgctccgacctgttccgaagcaccctggagcccgtggagaaggctctgcgcgacgccaagctggacaaggcccagattcacgacctggtcctggtcgggggctccacccgcatccccaaggtgcagaagctgctgcaggacttcttcaacgggcgcgacctgaacaagagcatcaaccccgacgaggctgtggcctacggggcggcggtgcaggcggccatcctgatgggggacaagtccgagaacgtgcaggacctgctgctgctggacgtggctcccctgtcgctggggctggagacggccggaggcgtgatgactgccctgatcaagcgcaactccaccatccccaccaagcagacgcagatcttcaccacctactccgacaaccaacccggggtgctgatccaggtgtacgagggcgagagggccatgacgaaagacaacaatctgttggggcgcttcgagctgagcggcatccctccggcccccaggggcgtgccccagatcgaggtgaccttcgacatcgatgccaacggcatcctgaacgtcacggccacggacaagagcaccggcaaggccaacaagatcaccatcaccaacgacaagggccgcctgagcaaggaggagatcgagcgcatggtgcaggaggcggagaagtacaaagcggaggacgaggtgcagcgcgagagggtgtcagccaagaacgccctggagtcctacgccttcaacatgaagagcgccgtggaggatgaggggctcaagggcaagatcagcgaggcggacaagaagaaggttctggacaagtgtcaagaggtcatctcgtggctggacgccaacaccttggccgagaaggacgagtttgagcacaagaggaaggagctggagcaggtgtgtaaccccatcatcagcggactgtaccagggtgccggtggtcccgggcctggcggcttcggggctcagggtcccaagggagggtctgggtcaggccctaccattgaggaggtggattaggggcctttgttctttagtatgtttgtctttgaggtggactgttgggactcaaggactttgctgctgttttcctatgtcatttctgcttcagctctttgctgcttcacttctttgtaaagttaagttgtaacctgatggtaattagctggcttcattatttttgtagtacaaccgatatgttcattagaattctttgcatttaatgttgatactgtaagggtgtttcgttccctttaaatgaatcaacactgccaccttctgtacgagtttgtttgttttttttttttttttttttttgcttggcgaaaacactacaaaggctgggaatgtatgtttttataatttgtttatttaaatatgaaaaataaaatgttaaactttt

SEQ ID NO: 139794 - DNA, 2525 bp, Homo sapiens
  Payload ID: 7415
  Gene Symbol: HSPA1B
  Gene Name: heat shock 70kDa protein 1B
  Uniprot ID: P0DMV9
  ENST ID: ENST00000391555
  CDS Start-End: 217-2142
ggaaaacggccagcctgaggagctgctgcgagggtccgcttcgtctttcgagagtgactcccgcggtcccaaggctttccagagcgaacctgtgcggctgcaggcaccggcgtgttgagtttccggcgttccgaaggactgagctcttgtcgcggatcccgtccgccgtttccagcccccagtctcagagcggagcccacagagcagggcaccggcatggccaaagccgcggcgatcggcatcgacctgggcaccacctactcctgcgtgggggtgttccaacacggcaaggtggagatcatcgccaacgaccagggcaaccgcaccacccccagctacgtggccttcacggacaccgagcggctcatcggggatgcggccaagaaccaggtggcgctgaacccgcagaacaccgtgtttgacgcgaagcggctgatcggccgcaagttcggcgacccggtggtgcagtcggacatgaagcactggcctttccaggtgatcaacgacggagacaagcccaaggtgcaggtgagctacaagggggagaccaaggcattctaccccgaggagatctcgtccatggtgctgaccaagatgaaggagatcgccgaggcgtacctgggctacccggtgaccaacgcggtgatcaccgtgccggcctacttcaacgactcgcagcgccaggccaccaaggatgcgggtgtgatcgcggggctcaacgtgctgcggatcatcaacgagcccacggccgccgccatcgcctacggcctggacagaacgggcaagggggagcgcaacgtgctcatctttgacctgggcgggggcaccttcgacgtgtccatcctgacgatcgacgacggcatcttcgaggtgaaggccacggccggggacacccacctgggtggggaggactttgacaacaggctggtgaaccacttcgtggaggagttcaagagaaaacacaagaaggacatcagccagaacaagcgagccgtgaggcggctgcgcaccgcctgcgagagggccaagaggaccctgtcgtccagcacccaggccagcctggagatcgactccctgtttgagggcatcgacttctacacgtccatcaccagggcgaggttcgaggagctgtgctccgacctgttccgaagcaccctggagcccgtggagaaggctctgcgcgacgccaagctggacaaggcccagattcacgacctggtcctggtcgggggctccacccgcatccccaaggtgcagaagctgctgcaggacttcttcaacgggcgcgacctgaacaagagcatcaaccccgacgaggctgtggcctacggggcggcggtgcaggcggccatcctgatgggggacaagtccgagaacgtgcaggacctgctgctgctggacgtggctcccctgtcgctggggctggagacggccggaggcgtgatgactgccctgatcaagcgcaactccaccatccccaccaagcagacgcagatcttcaccacctactccgacaaccaacccggggtgctgatccaggtgtacgagggcgagagggccatgacgaaagacaacaatctgttggggcgcttcgagctgagcggcatccctccggcccccaggggcgtgccccagatcgaggtgaccttcgacatcgatgccaacggcatcctgaacgtcacggccacggacaagagcaccggcaaggccaacaagatcaccatcaccaacgacaagggccgcctgagcaaggaggagatcgagcgcatggtgcaggaggcggagaagtacaaagcggaggacgaggtgcagcgcgagagggtgtcagccaagaacgccctggagtcctacgccttcaacatgaagagcgccgtggaggatgaggggctcaagggcaagatcagcgaggcggacaagaagaaggttctggacaagtgtcaagaggtcatctcgtggctggacgccaacaccttggccgagaaggacgagtttgagcacaagaggaaggagctggagcaggtgtgtaaccccatcatcagcggactgtaccagggtgccggtggtcccgggcctgggggcttcggggctcagggtcccaagggagggtctgggtcaggccctaccattgaggaggtggattaggggcctttgttctttagtatgtttgtctttgaggtggactgttgggactcaaggactttgctgctgttttcctatgtcatttctgcttcagctctttgctgcttcacttctttgtaaagttaagttgtaacctgatggtaattagctggcttcattatttttgtagtacaaccgatatgttcattagaattctttgcatttaatgttgatactgtaagggtgtttcgttccctttaaatgaatcaacactgccaccttctgtacgagtttttttttttttttttttttttttttttttgcttggcgaaaacactacaaaggctgggaatgtatgtttttataatttgtttatttaaatatgaaaaataaaatgttaaactttt

SEQ ID NO: 139795 - DNA, 1929 bp, Homo sapiens
  Payload ID: 7415
  Gene Symbol: HSPA1B
  Gene Name: heat shock 70kDa protein 1B
  ENST ID: ENST00000417199
  CDS Start-End: 1-1929
ggcatggccaaagccgcggcgatcggcatcgacctgggcaccacctactcctgcgtgggggtgttccaacacggcaaggtggagatcatcgccaacgaccagggcaaccgcaccacccccagctacgtggccttcacggacaccgagcggctcatcggggatgcggccaagaaccaggtggcgctgaacccgcagaacaccgtgtttgacgcgaagcggctgatcggccgcaagttcggcgacccggtggtgcagtcggacatgaagcactggcctttccaggtgatcaacgacggagacaagcccaaggtgcaggtgagctacaagggggagaccaaggcattctaccccgaggagatctcgtccatggtgctgaccaagatgaaggagatcgccgaggcgtacctgggctacccggtgaccaacgcggtgatcaccgtgccggcctacttcaacgactcgcagcgccaggccaccaaggatgcgggtgtgatcgcggggctcaacgtgctgcggatcatcaacgagcccacggccgccgccatcgcctacggcctggacagaacgggcaagggggagcgcaacgtgctcatctttgacctgggcgggggcaccttcgacgtgtccatcctgacgatcgacgacggcatcttcgaggtgaaggccacggccggggacacccacctgggtggggaggactttgacaacaggctggtgaaccacttcgtggaggagttcaagagaaaacacaagaaggacatcagccagaacaagcgagccgtgaggcggctgcgcaccgcctgcgagagggccaagaggaccctgtcgtccagcacccaggccagcctggagatcgactccctgtttgagggcatcgacttctacacgtccatcaccagggcgaggttcgaggagctgtgctccgacctgttccgaagcaccctggagcccgtggagaaggctctgcgcgacgccaagctggacaaggcccagattcacgacctggtcctggtcgggggctccacccgcatccccaaggtgcagaagctgctgcaagacttcttcaacgggcgcgacctgaacaagagcatcaaccccgacgaggctgtggcctacggggcggcggtgcaggcggccatcctgatgggggacaagtccgagaacgtgcaggacctgctgctgctggacgtggctcccctgtcgctggggctggagacggccggaggcgtgatgactgccctgatcaagcgcaactccaccatccccaccaagcagacgcagatcttcaccacctactccgacaaccaacccggggtgctgatccaggtgtacgagggcgagagggccatgacgaaagacaacaatctgttggggcgcttcgagctgagcggcatccctccggcccccaggggcgtgccccagatcgaggtgaccttcgacatcgatgccaacggcatcctgaacgtcacggccacggacaagagcaccggcaaggccaacaagatcaccatcaccaacgacaagggccgcctgagcaaggaggagatcgagcgcatggtgcaggaggcggagaagtacaaagcggaggacgaggtgcagcgcgagagggtgtcagccaagaacgccctggagtcctacgccttcaacatgaagagcgccgtggaggatgaggggctcaagggcaagatcagcgaggcggacaagaagaaggttctggacaagtgtcaagaggtcatctcgtggctggacgccaacaccttggccgagaaggacgagtttgagcacaagaggaaggagctggagcaggtgtgtaaccccatcatcagcggactgtaccagggtgccggtggtcccgggcctgggggcttcggggctcagggtcccaagggagggtctgggtcaggccctaccattgaggaggtggattag

SEQ ID NO: 139796 - DNA, 2515 bp, Homo sapiens
  Payload ID: 7415
  Gene Symbol: HSPA1B
  Gene Name: heat shock 70kDa protein 1B
  Uniprot ID: P0DMV9
  ENST ID: ENST00000450744
  CDS Start-End: 217-2142
ggaaaacggccagcctgaggagctgctgcgagggtccgcttcgtctttcgagagtgactcccgcggtcccaaggctttccagagcgaacctgtgcggctgcaggcaccggcgtgttgagtttccggcgttccgaaggactgagctcttgtcgcggatcccgtccgccgtttccagcccccagtctcagagcggagcccacagagcagggcaccggcatggccaaagccgcggcgatcggcatcgacctgggcaccacctactcctgcgtgggggtgttccaacacggcaaggtggagatcatcgccaacgaccagggcaaccgcaccacccccagctacgtggccttcacggacaccgagcggctcatcggggatgcggccaagaaccaggtggcgctgaacccgcagaacaccgtgtttgacgcgaagcggctgatcggccgcaagttcggcgacccggtggtgcagtcggacatgaagcactggcctttccaggtgatcaacgacggagacaagcccaaggtgcaggtgagctacaagggggagaccaaggcattctaccccgaggagatctcgtccatggtgctgaccaagatgaaggagatcgccgaggcgtacctgggctacccggtgaccaacgcggtgatcaccgtgccggcctacttcaacgactcgcagcgccaggccaccaaggatgcgggtgtgatcgcggggctcaacgtgctgcggatcatcaacgagcccacggccgccgccatcgcctacggcctggacagaacgggcaagggggagcgcaacgtgctcatctttgacctgggcgggggcaccttcgacgtgtccatcctgacgatcgacgacggcatcttcgaggtgaaggccacggccggggacacccacctgggtggggaggactttgacaacaggctggtgaaccacttcgtggaggagttcaagagaaaacacaagaaggacatcagccagaacaagcgagccgtgaggcggctgcgcaccgcctgcgagagggccaagaggaccctgtcgtccagcacccaggccagcctggagatcgactccctgtttgagggcatcgacttctacacgtccatcaccagggcgaggttcgaggagctgtgctccgacctgttccgaagcaccctggagcccgtggagaaggctctgcgcgacgccaagctggacaaggcccagattcacgacctggtcctggtcgggggctccacccgcatccccaaggtgcagaagctgctgcaagacttcttcaacgggcgcgacctgaacaagagcatcaaccccgacgaggctgtggcctacggggcggcggtgcaggcggccatcctgatgggggacaagtccgagaacgtgcaggacctgctgctgctggacgtggctcccctgtcgctggggctggagacggccggaggcgtgatgactgccctgatcaagcgcaactccaccatccccaccaagcagacgcagatcttcaccacctactccgacaaccaacccggggtgctgatccaggtgtacgagggcgagagggccatgacgaaagacaacaatctgttggggcgcttcgagctgagcggcatccctccggcccccaggggcgtgccccagatcgaggtgaccttcgacatcgatgccaacggcatcctgaacgtcacggccacggacaagagcaccggcaaggccaacaagatcaccatcaccaacgacaagggccgcctgagcaaggaggagatcgagcgcatggtgcaggaggcggagaagtacaaagcggaggacgaggtgcagcgcgagagggtgtcagccaagaacgccctggagtcctacgccttcaacatgaagagcgccgtggaggatgaggggctcaagggcaagatcagcgaggcggacaagaagaaggttctggacaagtgtcaagaggtcatctcgtggctggacgccaacaccttggccgagaaggacgagtttgagcacaagaggaaggagctggagcaggtgtgtaaccccatcatcagcggactgtaccagggtgccggtggtcccgggcctgggggcttcggggctcagggtcccaagggagggtctgggtcaggccctaccattgaggaggtggattaggggcctttgttctttagtatgtttgtctttgaggtggactgttgggactcaaggactttgctgctgttttcctatgtcatttctgcttcagctctttgctgcttcacttctttgtaaagttgtaacctgatggtaattagctggcttcattatttttgtagtacaaccgatatgttcattagaattctttgcatttaatgttgatactgtaagggtgtttcgttccctttaaatgaatcaacactgccaccttctgtacgagtttgttttttttttttttttttttttgcttggcgaaaacactacaaaggctgggaatgtatgtttttataatttgtttatttaaatatgaaaaataaaatgttaaactttt

SEQ ID NO: 139797 - DNA, 2348 bp, Homo sapiens
  Payload ID: 7415
  Gene Symbol: HSPA1B
  Gene Name: heat shock 70kDa protein 1B
  ENST ID: ENST00000458062
  CDS Start-End: 38-1966
ccccagtctcagagcggagcccacagagcagggcaccggcatggccaaagccgcggcgatcggcatcgacctgggcaccacctactcctgcgtgggggtgttccaacacggcaaggtggagatcatcgccaacgaccagggcaaccgcaccacccccagctacgtggccttcacggacaccgagcggctcatcggggatgcggccaagaaccaggtggcgctgaacccgcagaacaccgtgtttgacgcgaagcggctgatcggccgcaagttcggcgacccggtggtgcagtcggacatgaagcactggcctttccaggtgatcaacgacggagacaagcccaaggtgcaggtgagctacaagggggagaccaaggcattctaccccgaggagatctcgtccatggtgctgaccaagatgaaggagatcgccgaggcgtacctgggctacccggtgaccaacgcggtgatcaccgtgccggcctacttcaacgactcgcagcgccaggccaccaaggatgcgggtgtgatcgcggggctcaacgtgctgcggatcatcaacgagcccacggccgccgccatcgcctacggcctggacagaacgggcaagggggagcgcaacgtgctcatctttgacctgggcgggggcaccttcgacgtgtccatcctgacgatcgacgacggcatcttcgaggtgaaggccacggccggggacacccacctgggtggggaggactttgacaacaggctggtgaaccacttcgtggaggagttcaagagaaaacacaagaaggacatcagccagaacaagcgagccgtgaggcggctgcgcaccgcctgcgagagggccaagaggaccctgtcgtccagcacccaggccagcctggagatcgactccctgtttgagggcatcgacttctacacgtccatcaccagggcgaggttcgaggagctgtgctccgacctgttccgaagcaccctggagcccgtggagaaggctctgcgcgacgccaagctggacaaggcccagattcacgacctggtcctggtcgggggctccacccgcatccccaaggtgcagaagctgctgcaggacttcttcaacgggcgcgacctgaacaagagcatcaaccccgacgaggctgtggcctacggggcggcggtgcaggcggccatcctgatgggggacaagtccgagaacgtgcaggacctgctgctgctggacgtggctcccctgtcgctggggctggagacggccggaggcgtgatgactgccctgatcaagcgcaactccaccatccccaccaagcagacgcagatcttcaccacctactccgacaaccaacccggggtgctgatccaggtgtacgagggcgagagggccatgacgaaagacaacaatctgttggggcgcttcgagctgagcggcatccctccggcccccaggggcgtgccccagatcgaggtgaccttcgacatcgatgccaacggcatcctgaacgtcacggccacggacaagagcaccggcaaggccaacaagatcaccatcaccaacgacaagggccgcctgagcaaggaggagatcgagcgcatggtgcaggaggcggagaagtacaaagcggaggacgaggtgcagcgcgagagggtgtcagccaagaacgccctggagtcctacgccttcaacatgaagagcgccgtggaggatgaggggctcaagggcaagatcagcgaggcggacaagaagaaggttctggacaagtgtcaagaggtcatctcgtggctggacgccaacaccttggccgagaaggacgagtttgagcacaagaggaaggagctggagcaggtgtgtaaccccatcatcagcggactgtaccagggtgccggtggtcccgggcctgggggcttcggggctcagggtcccaagggagggtctgggtcaggccctaccattgaggaggtggattaggggcctttgttctttagtatgtttgtctttgaggtggactgttgggactcaaggactttgctgctgttttcctatgtcatttctgcttcagctctttgctgcttcacttctttgtaaagttaagttgtaacctgatggtaattagctggcttcattatttttgtagtacaaccgatatgttcattagaattctttgcatttaatgttgatactgtaagggtgtttcgttccctttaaatgaatcaacactgccaccttctgtacgagtttttttttttttttttttttttttttttttgcttggcgaaaacactacaaaggctgggaatgtatgtttttataatttgtttatttaaatatgaaaaataaaatgttaaacttt

SEQ ID NO: 139798 - DNA, 2521 bp, Homo sapiens
  Payload ID: 7415
  Gene Symbol: HSPA1B
  Gene Name: heat shock 70kDa protein 1B
  Uniprot ID: P0DMV9
  ENST ID: ENST00000445736
  CDS Start-End: 217-2142
ggaaaacggccagcctgaggagctgctgcgagggtccgcttcgtctttcgagagtgactcccgcggtcccaaggctttccagagcgaacctgtgcggctgcaggcaccggcgtgttgagtttccggcgttccgaaggactgagctcttgtcgcggatcccgtccgccgtttccagcccccagtctcagagcggagcccacagagcagggcaccggcatggccaaagccgcggcgatcggcatcgacctgggcaccacctactcctgcgtgggggtgttccaacacggcaaggtggagatcatcgccaacgaccagggcaaccgcaccacccccagctacgtggccttcacggacaccgagcggctcatcggggatgcggccaagaaccaggtggcgctgaacccgcagaacaccgtgtttgacgcgaagcggctgatcggccgcaagttcggcgacccggtggtgcagtcggacatgaagcactggcctttccaggtgatcaacgacggagacaagcccaaggtgcaggtgagctacaagggggagaccaaggcattctaccccgaggagatctcgtccatggtgctgaccaagatgaaggagatcgccgaggcgtacctgggctacccggtgaccaacgcggtgatcaccgtgccggcctacttcaacgactcgcagcgccaggccaccaaggatgcgggtgtgatcgcggggctcaacgtgctgcggatcatcaacgagcccacggccgccgccatcgcctacggcctggacagaacgggcaagggggagcgcaacgtgctcatctttgacctgggcgggggcaccttcgacgtgtccatcctgacgatcgacgacggcatcttcgaggtgaaggccacggccggggacacccacctgggtggggaggactttgacaacaggctggtgaaccacttcgtggaggagttcaagagaaaacacaagaaggacatcagccagaacaagcgagccgtgaggcggctgcgcaccgcctgcgagagggccaagaggaccctgtcgtccagcacccaggccagcctggagatcgactccctgtttgagggcatcgacttctacacgtccatcaccagggcgaggttcgaggagctgtgctccgacctgttccgaagcaccctggagcccgtggagaaggctctgcgcgacgccaagctggacaaggcccagattcacgacctggtcctggtcgggggctccacccgcatccccaaggtgcagaagctgctgcaagacttcttcaacgggcgcgacctgaacaagagcatcaaccccgacgaggctgtggcctacggggcggcggtgcaggcggccatcctgatgggggacaagtccgagaacgtgcaggacctgctgctgctggacgtggctcccctgtcgctggggctggagacggccggaggcgtgatgactgccctgatcaagcgcaactccaccatccccaccaagcagacgcagatcttcaccacctactccgacaaccaacccggggtgctgatccaggtgtacgagggcgagagggccatgacgaaagacaacaatctgttggggcgcttcgagctgagcggcatccctccggcccccaggggcgtgccccagatcgaggtgaccttcgacatcgatgccaacggcatcctgaacgtcacggccacggacaagagcaccggcaaggccaacaagatcaccatcaccaacgacaagggccgcctgagcaaggaggagatcgagcgcatggtgcaggaggcggagaagtacaaagcggaggacgaggtgcagcgcgagagggtgtcagccaagaacgccctggagtcctacgccttcaacatgaagagcgccgtggaggatgaggggctcaagggcaagatcagcgaggcggacaagaagaaggttctggacaagtgtcaagaggtcatctcgtggctggacgccaacaccttggccgagaaggacgagtttgagcacaagaggaaggagctggagcaggtgtgtaaccccatcatcagcggactgtaccagggtgccggtggtcccgggcctggcggcttcggggctcagggtcccaagggagggtctgggtcaggccctaccattgaggaggtggattaggggcctttgttctttagtatgtttgtctttgaggtggactgttgggactcaaggactttgctgctgttttcctatgtcatttctgcttcagctctttgctgcttcacttctttgtaaagttgtaacctgatggtaattagctggcttcattatttttgtagtacaaccgatatgttcattagaattctttgcatttaatgttgatactgtaagggtgtttcgttccctttaaatgaatcaacactgccaccttctgtacgagtttgtttgttttttttttttttttttttttttgcttggcgaaaacactacaaaggctgggaatgtatgtttttataatttgtttatttaaatatgaaaaataaaatgttaaactttt

SEQ ID NO: 139799 - DNA, 2347 bp, Homo sapiens
  Payload ID: 7415
  Gene Symbol: HSPA1B
  Gene Name: heat shock 70kDa protein 1B
  ENST ID: ENST00000545241
  CDS Start-End: 38-1966
ccccagtctcagagcggagcccacagagcagggcaccggcatggccaaagccgcggcgatcggcatcgacctgggcaccacctactcctgcgtgggggtgttccaacacggcaaggtggagatcatcgccaacgaccagggcaaccgcaccacccccagctacgtggccttcacggacaccgagcggctcatcggggatgcggccaagaaccaggtggcgctgaacccgcagaacaccgtgtttgacgcgaagcggctgatcggccgcaagttcggcgacccggtggtgcagtcggacatgaagcactggcctttccaggtgatcaacgacggagacaagcccaaggtgcaggtgagctacaagggggagaccaaggcattctaccccgaggagatctcgtccatggtgctgaccaagatgaaggagatcgccgaggcgtacctgggctacccggtgaccaacgcggtgatcaccgtgccggcctacttcaacgactcgcagcgccaggccaccaaggatgcgggtgtgatcgcggggctcaacgtgctgcggatcatcaacgagcccacggccgccgccatcgcctacggcctggacagaacgggcaagggggagcgcaacgtgctcatctttgacctgggcgggggcaccttcgacgtgtccatcctgacgatcgacgacggcatcttcgaggtgaaggccacggccggggacacccacctgggtggggaggactttgacaacaggctggtgaaccacttcgtggaggagttcaagagaaaacacaagaaggacatcagccagaacaagcgagccgtgaggcggctgcgcaccgcctgcgagagggccaagaggaccctgtcgtccagcacccaggccagcctggagatcgactccctgtttgagggcatcgacttctacacgtccatcaccagggcgaggttcgaggagctgtgctccgacctgttccgaagcaccctggagcccgtggagaaggctctgcgcgacgccaagctggacaaggcccagattcacgacctggtcctggtcgggggctccacccgcatccccaaggtgcagaagctgctgcaggacttcttcaacgggcgcgacctgaacaagagcatcaaccccgacgaggctgtggcctacggggcggcggtgcaggcggccatcctgatgggggacaagtccgagaacgtgcaggacctgctgctgctggacgtggctcccctgtcgctggggctggagacggccggaggcgtgatgactgccctgatcaagcgcaactccaccatccccaccaagcagacgcagatcttcaccacctactccgacaaccaacccggggtgctgatccaggtgtacgagggcgagagggccatgacgaaagacaacaatctgttggggcgcttcgagctgagcggcatccctccggcccccaggggcgtgccccagatcgaggtgaccttcgacatcgatgccaacggcatcctgaacgtcacggccacggacaagagcaccggcaaggccaacaagatcaccatcaccaacgacaagggccgcctgagcaaggaggagatcgagcgcatggtgcaggaggcggagaagtacaaagcggaggacgaggtgcagcgcgagagggtgtcagccaagaacgccctggagtcctacgccttcaacatgaagagcgccgtggaggatgaggggctcaagggcaagatcagcgaggcggacaagaagaaggttctggacaagtgtcaagaggtcatctcgtggctggacgccaacaccttggccgagaaggacgagtttgagcacaagaggaaggagctggagcaggtgtgtaaccccatcatcagcggactgtaccagggtgccggtggtcccgggcctggcggcttcggggctcagggtcccaagggagggtctgggtcaggccctaccattgaggaggtggattaggggcctttgttctttagtatgtttgtctttgaggtggactgttgggactcaaggactttgctgctgttttcctatgtcatttctgcttcagctctttgctgcttcacttctttgtaaagttaagttgtaacctgatggtaattagctggcttcattatttttgtagtacaaccgatatgttcattagaattctttgcatttaatgttgatactgtaagggtgtttcgttccctttaaatgaatcaacactgccaccttctgtacgagtttgtttgttttttttttttttttttttttgcttggcgaaaacactacaaaggctgggaatgtatgtttttataatttgtttatttaaatatgaaaaataaaatgttaaacttt

SEQ ID NO: 139800 - DNA, 2544 bp, Homo sapiens
  Payload ID: 7416
  Gene Symbol: HSPA1L
  Gene Name: heat shock 70kDa protein 1-like
  Uniprot ID: P34931
  ENST ID: ENST00000375654
  CDS Start-End: 191-2116
gggccagtttggaaaaagattactgagttggagccgtctcaaatttgcagggagggacggggtggggggtggggggaccccggttgtgcagtttgatattgagggagcccccacctactcgctggggctgcgtaatctggacgtttccaaactgaagcgaaggcgtcgggagactaggcctcagagaaccatggctactgccaagggaatcgccataggcatcgacctgggcaccacctactcctgtgtgggggtgttccagcacggcaaggtggagatcatcgccaacgaccagggcaaccgcaccacccccagctacgtggccttcacagacaccgagcggctcattggggatgcggccaagaaccaggtagcaatgaatccccagaacactgtttttgatgctaaacgtctgatcggcaggaaatttaatgatcctgttgtacaagcagatatgaaactttggccttttcaagtgattaatgaaggaggcaagcccaaagtccttgtgtcctacaaaggggagaataaagctttctaccctgaggaaatctcttcgatggtattgactaagttgaaggagactgctgaggcctttttgggccaccctgtcaccaatgcagtgattaccgtgccagcctatttcaatgactctcaacgtcaggctactaaggatgcaggtgtgattgctggacttaatgtgctaagaatcatcaatgagcccacggctgctgccattgcctatggtttagataaaggaggtcaaggagaacgacatgtcctgatttttgatctgggtggaggcacatttgatgtgtcaattctgaccatagatgatgggatttttgaggtaaaggccactgctggggacactcacctgggtggggaggactttgacaacaggcttgtgagccacttcgtggaggagttcaagaggaaacacaaaaaggacatcagccagaacaagcgagccgtgaggcggctgcgcaccgcctgcgagagggccaagaggaccctgtcgtccagcacccaggccaacctagaaattgattcactttatgaaggcattgacttctatacatccatcaccagagctcgatttgaagagttgtgtgcagacctgtttaggggtaccctggagcctgtagaaaaagcgcttcgggatgccaagatggataaggctaaaatccatgacattgttttagtagggggctccacccgcatccccaaggtgcagcggctgcttcaggactacttcaatggacgtgatctcaacaagagcatcaaccctgatgaggccgtagcatatggggctgcggtacaagcagccatcctgatgggggacaagtctgagaaggtacaggacctgctgctgctggacgtggctcccctgtccctggggctggagacggctgggggcgtgatgactgccctgataaagcgcaactccaccatccccaccaagcagacacagattttcaccacctactctgacaaccaacccggggtgctgatccaggtgtatgagggcgagagggccatgacaaaggacaacaacctgctggggcggtttgacctgactggaatccctccagcacccaggggagttcctcagatcgaggtgacgtttgacattgatgccaatggtattctcaatgtcacagccacggacaagagcaccggcaaggtgaacaagatcaccatcaccaatgacaagggccgcctgagcaaggaggagattgagcgcatggttctggatgctgagaaatataaagctgaagatgaggtccagagggagaaaattgctgcaaagaatgccttagaatcctatgcttttaacatgaagagtgttgtgagtgatgaaggtttgaagggcaagattagtgagtctgataaaaataaaatattggataaatgcaacgagctcctttcgtggctggaggtcaatcaactggcagagaaagatgagtttgatcataagagaaaggaattggagcagatgtgtaaccctatcatcacaaaactctaccaaggaggatgcactgggcctgcctgcggaacagggtatgtgcctggaaggcctgccacaggccccacaattgaagaagtagattaattctttttagaactgaagcatcctaggatgcctctacatgtatttcattcccctcatcttcaaacatcattattattcttgaccagacctgaatctaagttaccatcccttggaaattctggagaaggagtctcatgcaccacctatcacactccctcacatcctgtttctgactttggaatggactcaggaaaactaggcccctctttaaaccgtgtgatgtatttgaatgtctgttatttccagccaccctaacattcttcttcctgtgtggatgcttatttgtcaatcagtaaatttgttcgtaaagaaaattacttctggtatttaggctgtgaatgtaccttgaaggggagagttcatggagagagcatgtgttctctgattgtgaggtcactgtgaatgattaaattggtaagggtaaagta

SEQ ID NO: 139801 - DNA, 2544 bp, Homo sapiens
  Payload ID: 7416
  Gene Symbol: HSPA1L
  Gene Name: heat shock 70kDa protein 1-like
  Uniprot ID: P34931
  ENST ID: ENST00000383390
  CDS Start-End: 191-2116
gggccagtttggaaaaagattactgagttggagccgtctcaaatttgcagggagggacggggtggggggtggggggaccccggttgtgcagtttgatattgagggagcccccacctactcgctggggctgcgtaatctggacgtttccaaactgaagcgaaggcgtcgggagactaggcctcagagaaccatggctactgccaagggaatcgccataggcatcgacctgggcaccacctactcctgtgtgggggtgttccagcacggcaaggtggagatcatcgccaacgaccagggcaaccgcaccacccccagctacgtggccttcacagacaccgagcggctcattggggatgcggccaagaaccaggtagcaatgaatccccagaacactgtttttgatgctaaacgtctgatcggcaggaaatttaatgatcctgttgtacaagcagatatgaaactttggccttttcaagtgattaatgaaggaggcaagcccaaagtccttgtgtcctacaaaggggagaataaagctttctaccctgaggaaatctcttcgatggtattgactaagttgaaggagactgctgaggcctttttgggccaccctgtcaccaatgcagtgattaccgtgccagcctatttcaatgactctcaacgtcaggctactaaggatgcaggtgtgattgctggacttaatgtgctaagaatcatcaatgagcccacggctgctgccattgcctatggtttagataaaggaggtcaaggagaacgacatgtcctgatttttgatctgggtggaggcacatttgatgtgtcaattctgaccatagatgatgggatttttgaggtaaaggccactgctggggacactcacctgggtggggaggactttgacaacaggcttgtgagccacttcgtggaggagttcaagaggaaacacaaaaaggacatcagccagaacaagcgagccgtgaggcggctgcgcaccgcctgcgagagggccaagaggaccctgtcgtccagcacccaggccaacctagaaattgattcactttatgaaggcattgacttctatacatccatcaccagagctcgatttgaagagttgtgtgcagacctgtttaggggtaccctggagcctgtagaaaaagcgcttcgggatgccaagatggataaggctaaaatccatgacattgttttagtagggggctccacccgcatccccaaggtgcagcggctgcttcaggactacttcaatggacgtgatctcaacaagagcatcaaccctgatgaggccgtagcatatggggctgcggtacaagcagccatcctgatgggggacaagtctgagaaggtacaggacctgctgctgctggacgtggctcccctgtccctggggctggagacggctgggggcgtgatgactgccctgataaagcgcaactccaccatccccaccaagcagacacagattttcaccacctactctgacaaccaacccggggtgctgatccaggtgtatgagggcgagagggccatgacaaaggacaacaacctgctggggcggtttgacctgactggaatccctccagcacccaggggagttcctcagatcgaggtgacgtttgacattgatgccaatggtattctcaatgtcacagccatggacaagagcaccggcaaggtgaacaagatcaccatcaccaatgacaagggccgcctgagcaaggaggagattgagcgcatggttctggatgctgagaaatataaagctgaagatgaggtccagagggagaaaattgctgcaaagaatgccttagaatcctatgcttttaacatgaagagtgttgtgagtgatgaaggtttgaagggcaagattagtgagtctgataaaaataaaatattggataaatgcaacgagctcctttcgtggctggaggtcaatcaactggcagagaaagatgagtttgatcataagagaaaggaattggagcagatgtgtaaccctatcatcacaaaactctaccaaggaggatgcactgggcctgcctgcggaacagggtatgtgcctggaaggcctgccacaggccccacaattgaagaagtagattaattctttttagaactgaagcatcctaggatgcctctacatgtatttcattcccctcatcttcaaacatcattattattcttgaccagacctgaatctaagttaccatcccttggaaattctggagaaggagtctcatgcaccacctatcacactccctcacatcctgtttctgactttggaatggactcaggaaaactaggcccctctttaaaccgtgtgatgtatttgaatgtctgttatttccagccaccctaacattcttcttcctgtgtggatgcttatttgtcaatcagtaaatttgttcgtaaagaaaattacttctggtatttaggctgtgaatgtaccttgaaggggagagttcatggagagagcatgtgttctctgattgtgaggtcactgtgaatgattaaattggtaagggtaaagta

SEQ ID NO: 139802 - DNA, 2544 bp, Homo sapiens; identical to SEQ ID NO: 139800
  Payload ID: 7416
  Gene Symbol: HSPA1L
  Gene Name: heat shock 70kDa protein 1-like
  Uniprot ID: P34931
  ENST ID: ENST00000417601
  CDS Start-End: 191-2116

SEQ ID NO: 139803 - DNA, 2544 bp, Homo sapiens; identical to SEQ ID NO: 139801
  Payload ID: 7416
  Gene Symbol: HSPA1L
  Gene Name: heat shock 70kDa protein 1-like
  Uniprot ID: P34931
  ENST ID: ENST00000456772
  CDS Start-End: 191-2116

SEQ ID NO: 139804 - DNA, 2544 bp, Homo sapiens
  Payload ID: 7416
  Gene Symbol: HSPA1L
  Gene Name: heat shock 70kDa protein 1-like
  ENST ID: ENST00000426095
  CDS Start-End: 191-2116
gggccagtttggaaaaagattactgagttggagccgtctcaaatttgcagggagggacggggtggggggtggggggaccccggttgtgcagtttgatattgagggagcccccacctactcgctggggctgcgtaatctggacgtttccaaactgaagcgaaggcgtcgggagactaggcctcagagaaccatggctactgccaagggaatcgccataggcatcgacctgggcaccacctactcctgtgtgggggtgttccagcacggcaaggtggagatcatcgccaacgaccagggcaaccgcaccacccccagctacgtggccttcacagacaccgagcggctcattggggatgcggccaagaaccaggtagcaatgaatccccagaacactgtttttgatgctaaacgtctgatcggcaggaaatttaatgatcctgttgtacaagcagatatgaaactttggccttttcaagtgattaatgaaggaggcaagcccaaagtccttgtgtcctacaaaggggagaataaagctttctaccctgaggaaatctcttcgatggtattgactaagttgaaggagactgctgaggcctttttgggccaccctgtcaccaatgcagtgattaccgtgccagcctatttcaatgactctcaacgtcaggctactaaggatgcaggtgtgattgctggacttaatgtgctaagaatcatcaatgagcccacggctgctgccattgcctatggtttagataaaggaggtcaaggagaacgacatgtcctgatttttgatctgggtggaggcacatttgatgtgtcaattctgaccatagatgatgggatttttgaggtaaaggccactgctggggacactcacctgggtggggaggactttgacaacaggcttgtgagccacttcgtggaggagttcaagaggaaacacaaaaaggacatcagccagaacaagcgagccgtgaggcggctgcgcaccgcctgcgagagggccaagaggaccctgtcgtccagcacccaggccaacctagaaattgattcactttatgaaggcattgacttctatacatccatcaccagagctcgatttgaagagttgtgtgcagacctgtttaggggtaccctggagcctgtagaaaaagcgcttcgggatgccaagatggataaggctaaaatccatgacattgttttagtagggggctccacccgcatccccaaggtgcagcggctgcttcaggactacttcaatggacgtgatctcaacaagagcatcaaccctgatgaggccgtagcatatggggctgcggtacaagcagccatcctgatgggggacaagtctgagaaggtacaggacctgctgctgctggacgtggctcccctgtccctggggctggagacggctgggggcgtgatgactgccctgataaagcgcaactccaccatccccaccaagcagacacagattttcaccacctactctgacaaccaacccggggtgctgatccaggtgtatgagggcgagagggccatgacaaaggacaacaacctgctggggcggtttgacctgactggaatccctccagcacccaggggagttcctcagatcgaggtgacgtttgacattgatgccaatggtattctcaatgtcacagccatggacaagagcaccggcaaggtgaacaagatcaccatcaccaatgacaagggccgcctgagcaaggaggagattgagcgcatggttctggatgctgagaaatataaagctgaagatgaggtccagagggagaaaattgctgcaaagaatgccttagaatcctatgcttttaacatgaagagtgttgtgagtgatgaaggtttgaagggcaagattagtgagtctgataaaaataaaatattggataaatgcaacgagctcctttcgtggctggaggtcaatcaactggcagagaaagatgagtttgatcataagagaaaggaattgaagcagatgtgtaaccctatcatcacaaaactctaccaaggaggatgcactgggcctgcctgcggaacagggtatgtgcctggaaggcctgccacaggccccacaattgaagaagtagattaattctttttagaactgaagcatcctaggatgcctctacatgtatttcattcccctcatcttcaaacatcattattattcttgaccagacctgaatctaagttaccatcccttggaaattctggagaaggagtctcatgcaccacctatcacactccctcacatcctgtttctgactttggaatggactcaggaaaactaggcccctctttaaaccgtgtgatgtatttgaatgtctgttatttccagccaccctaacattcttcttcctgtgtggatgcttatttgtcaatcagtaaatttgttcgtaaagaaaattacttctggtatttaggctgtgaatgtaccttgaaggggagagttcatggagagagcatgtgttctctgattgtgaggtcactgtgaatgattaaattggtaagggtaaagta

SEQ ID NO: 139805 - DNA, 2767 bp, Homo sapiens
  Payload ID: 7417
  Gene Symbol: HSPA2
  Gene Name: heat shock 70kDa protein 2
  Uniprot ID: P54652
  ENST ID: ENST00000247207
  CDS Start-End: 383-2302
ccagcagcaggaggcgcgcgaggcaccacggcctggcggccgagagtcagggaggaacctcatttacataacggccgcccctctgtctcctggcgggggccggagtcccgcccctcgtccaacttgaaatctgttgggtcacgggccagtcactccgacctaggcaagcctgtggtggagctggaagagtttgtgagggcggtcccgggagcggattgggtctgggagttcccagaggcggctataagaaccgggaactgggcgcggggagctgagttgctggtagtgcccgtggtgcttggttcgaggtggccgttagttgactccgcggagttcatctccctggttttcccgtcctaacgtcgctcgcctttcagtcaggatgtctgcccgtggcccggctatcggcatcgacctgggcaccacctattcgtgcgtcggggtcttccaacatggcaaggtggagatcatcgccaacgaccagggcaatcgcaccacccccagctacgtggccttcacggacaccgagcgcctcatcggcgacgccgccaagaaccaggtggccatgaaccccaccaacaccatcttcgacgccaagaggctgattggacggaaattcgaggatgccacagtgcagtcggatatgaaacactggccgttccgggtggtgagcgagggaggcaagcccaaagtgcaagtagagtacaagggggagaccaagaccttcttcccagaggagatatcctccatggtcctcacgaagatgaaggagatcgcggaagcctacctggggggcaaggtgcacagcgcggtcataacggtcccggcctatttcaacgactcgcagcgccaggccaccaaggacgcaggcaccatcacggggctcaatgtgctgcgcatcatcaacgagcccacggcggcggccatcgcctacggcctggacaagaagggctgcgcgggcggcgagaagaacgtgctcatctttgacctgggcggtggcactttcgacgtgtccatcctgaccatcgaggatggcatcttcgaggtgaagtccacggccggcgacacccacctgggcggtgaggacttcgacaaccgcatggtgagccacctggcggaggagttcaagcgcaagcacaagaaggacattgggcccaacaagcgcgccgtgaggcggctgcgcaccgcttgcgagcgcgccaagcgcaccctgagctcgtccacgcaggcgagcatcgagatcgactcgctctacgagggcgtggacttctatacgtccatcacgcgcgcccgcttcgaggagctcaatgccgacctctttcgcgggaccctggagccggtggagaaggcgctgcgcgacgccaagctggacaagggccagatccaggagatcgtgctggtgggcggctccactcgtatccccaagatccagaagctgctgcaggatttcttcaacggcaaggagctgaacaagagcatcaaccccgacgaggcggtggcctatggcgccgcggtgcaggcggccatcctcatcggcgacaaatcagagaatgtgcaggacctgctgctactcgacgtgaccccgttgtcgctgggcatcgagacagctggcggtgtcatgaccccactcatcaagaggaacaccacgatccccaccaagcagacgcagaccttcaccacctactcggacaaccagagcagcgtactggtgcaggtatacgagggcgaacgggccatgaccaaggacaataacctgctgggcaagttcgacctgaccgggattccccctgcgcctcgcggggtcccccaaatcgaggttaccttcgacattgacgccaatggcatccttaacgttaccgccgccgacaagagcaccggtaaggaaaacaaaatcaccatcaccaatgacaaaggtcgtctgagcaaggacgacattgaccggatggtgcaggaggcggagcggtacaaatcggaagatgaggcgaatcgcgaccgagtcgcggccaaaaacgccctggagtcctatacctacaacatcaagcagacggtggaagacgagaaactgaggggcaagattagcgagcaggacaaaaacaagatcctcgacaagtgtcaggaggtgatcaactggctcgaccgaaaccagatggcagagaaagatgagtatgaacacaagcagaaagagctcgaaagagtttgcaaccccatcatcagcaaactttaccaaggtggtcctggcggcggcagcggcggcggcggttcaggagcctccgggggacccaccatcgaagaagtggactaagcttgcactcaagtcagcgtaaacctctttgcctttctctctctctctttttttttgtttgtttctttgaaatgtccttgtgccaagtacgagatctattgttggaagtctttggtatatgcaaatgaaaggagaggtgcaacaacttagtttaattataaaagttccaaagtttgttttttaaaaacattattcgaggtttctctttaatgcattttgcgtgtttgctgacttgagcatttttgattagttcgtgcatggagatttgtttgagatgagaaaccttaagtttgcacacctgttctgtagaagcttggaaacagtaaaatatataggagcttaaattgtttatttttatgtactactttaaaactaaactgaacattgcagtaatgttaaggacaggtatactttttgcaaacaaatgcataaatgcaaatgtaaagtaaagctgaaattgatctc

SEQ ID NO: 139806 - DNA, 5400 bp, Homo sapiens
  Payload ID: 7417
  Gene Symbol: HSPA2
  Gene Name: heat shock 70kDa protein 2
  Uniprot ID: P54652
  ENST ID: ENST00000394709
  CDS Start-End: 77-1996
ctctcttgcctgccgccatgtgcctttcgccttctgccgtgattgtgaggcctccccagccatatggaagttcaggatgtctgcccgtggcccggctatcggcatcgacctgggcaccacctattcgtgcgtcggggtcttccaacatggcaaggtggagatcatcgccaacgaccagggcaatcgcaccacccccagctacgtggccttcacggacaccgagcgcctcatcggcgacgccgccaagaaccaggtggccatgaaccccaccaacaccatcttcgacgccaagaggctgattggacggaaattcgaggatgccacagtgcagtcggatatgaaacactggccgttccgggtggtgagcgagggaggcaagcccaaagtgcaagtagagtacaagggggagaccaagaccttcttcccagaggagatatcctccatggtcctcacgaagatgaaggagatcgcggaagcctacctggggggcaaggtgcacagcgcggtcataacggtcccggcctatttcaacgactcgcagcgccaggccaccaaggacgcaggcaccatcacggggctcaatgtgctgcgcatcatcaacgagcccacggcggcggccatcgcctacggcctggacaagaagggctgcgcgggcggcgagaagaacgtgctcatctttgacctgggcggtggcactttcgacgtgtccatcctgaccatcgaggatggcatcttcgaggtgaagtccacggccggcgacacccacctgggcggtgaggacttcgacaaccgcatggtgagccacctggcggaggagttcaagcgcaagcacaagaaggacattgggcccaacaagcgcgccgtgaggcggctgcgcaccgcttgcgagcgcgccaagcgcaccctgagctcgtccacgcaggcgagcatcgagatcgactcgctctacgagggcgtggacttctatacgtccatcacgcgcgcccgcttcgaggagctcaatgccgacctctttcgcgggaccctggagccggtggagaaggcgctgcgcgacgccaagctggacaagggccagatccaggagatcgtgctggtgggcggctccactcgtatccccaagatccagaagctgctgcaggatttcttcaacggcaaggagctgaacaagagcatcaaccccgacgaggcggtggcctatggcgccgcggtgcaggcggccatcctcatcggcgacaaatcagagaatgtgcaggacctgctgctactcgacgtgaccccgttgtcgctgggcatcgagacagctggcggtgtcatgaccccactcatcaagaggaacaccacgatccccaccaagcagacgcagaccttcaccacctactcggacaaccagagcagcgtactggtgcaggtatacgagggcgaacgggccatgaccaaggacaataacctgctgggcaagttcgacctgaccgggattccccctgcgcctcgcggggtcccccaaatcgaggttaccttcgacattgacgccaatggcatccttaacgttaccgccgccgacaagagcaccggtaaggaaaacaaaatcaccatcaccaatgacaaaggtcgtctgagcaaggacgacattgaccggatggtgcaggaggcggagcggtacaaatcggaagatgaggcgaatcgcgaccgagtcgcggccaaaaacgccctggagtcctatacctacaacatcaagcagacggtggaagacgagaaactgaggggcaagattagcgagcaggacaaaaacaagatcctcgacaagtgtcaggaggtgatcaactggctcgaccgaaaccagatggcagagaaagatgagtatgaacacaagcagaaagagctcgaaagagtttgcaaccccatcatcagcaaactttaccaaggtggtcctggcggcggcagcggcggcggcggttcaggagcctccgggggacccaccatcgaagaagtggactaagcttgcactcaagtcagcgtaaacctctttgcctttctctctctctctttttttttgtttgtttctttgaaatgtccttgtgccaagtacgagatctattgttggaagtctttggtatatgcaaatgaaaggagaggtgcaacaacttagtttaattataaaagttccaaagtttgttttttaaaaacattattcgaggtttctctttaatgcattttgcgtgtttgctgacttgagcatttttgattagttcgtgcatggagatttgtttgagatgagaaaccttaagtttgcacacctgttctgtagaagcttggaaacagtaaaatatataggagcttaaattgtttatttttatgtactactttaaaactaaactgaacattgcagtaatgttaaggacaggtatactttttgcaaacaaatgcataaatgcaaatgtaaagtaaagctgaaattgatctcaaagttactgtcttggagttttcaattttccttcctttatattttacccatattcgtcttttaagatgttagtatgatgtgaaatttatctaaccaatcttgtttaattcccagatgagggtgctgccttgaattccaacaacttaaggggagaagaatctgggtaaacttcacccacccttaaatacagaaacctgacttggggtcttcctagtgtactcacactcctacaacttaagtgtccaaatgaaaattcacctgaatattccaggaaaatatgagctatattctggggttaaatgtaaaatgagcctttaacaaaagctgggcagaagttgtcttataattgccaaaggaaatatggaaacaaattaattttgtgacatacaggagcctgaaacaagagacagcaggcaagctttcaagtgacttaatagtgagtataaatttagtcaaacttgtttaattttctagtaaaacagctcaacttctgagcttatggcaaattctaataacatgtttcccgcagttagaattacttgggtagggaaacataattattattatttttttctggtttggggatcataacgtttttgcaatacttgccttaaatcactacgatagatttcttttttaaaaggcaaactgtactagatagtcttgtattttgttaatatacaacttgtccattttcctccatatccaatttgagattgttatagataagaatattgcaaccctttggtgatccactatcctggacttaatctttaaaattcacatccttcagagaaaggaattcatttttattttttagtgaaatgacatgactactcttttcttactctctttaaggagaacttgagagaaattcagtaaaaccaataggaaaatgcatagttaacctaatgtttttactgcacatagacgttttgatatctttccacatgatgcaggtttgcttcatgctgctcataagacaatagttatgaaagctttatcttcaatttagtagtggacccatctgtgtcattcagagagattaattttatgaataatggaatgagtaataattttaaaactagctaagaagttagcctaagaatactggcctttggtaatgaccctttcatacaagagttgactcttaagtacacataaggtgtttttttttttttcctttttagcaagcctcatttgggtaggggggaggaagataaatagccaacagtgaaattgcttcaacataaaaacctttttttttttttaaaggaaactgctttttatactctgaaaagctaaagataactccaatttatcagtgctggtgtcacattggtggaaatttttcagcaatgagcatttaagggtgtttcatggactacaggcataaatatgtgacaaactactatggtactacaaaatcaggttaattgtagctttagagtgacgtttactgtgagttttaccaagataatacccattctgttacccttttattagtcctttatttgttgaaagtgttcattccttgctctaacttcaaaatataatggagtccttctgtaaatgcagtttggtatgactcattttagacctcacttaagagattagtttctaaagtatcagaaaatgaccattggtagtttttgatcctacggcctgacctccggtagcttgctataatactaacatcaatctgggcagatacttcattttctattttgaaaagtaatttgtaaaactcaaattcttgagttttacattcttgagcattcttgagagtgtttcttatttaattctctcttttcaaatttaccaagatttgcatattaccaagataaagccaccaaagtagccattcactttccaggggtcagttgaaacttgtaacctgataactcctgggaactccttagcagatgttagatcagccatagtcaaataacagtggaaaaagtacttgatgttaggatggggctaaattacagtttaaggattctccgacaggcacttatctgaaattctttttttttttttttttttgagacggaatttcactcttgttgcccaggctggagtgcaatggcttgatctcggctcacttcaacctccgcctcctgggttcaagcgattctcctgcctcagcctaccgagtagctgggattacaggcatgcaccaccacacctggctaattttgtatttttagtagagatggggtttctccatgtttgtcaggctggtctggaactcccgacctcaggtgatccgcccgccttggcctccccaagtgctgggattacaggcgtgagccacgcgccagcccacttacctgaaattcttatctgaatgtttgattaacatagttgtccctgttttgagggaacaaatatagacacctgtcaaacgaagacataactagttgtttacagtatttgagatgtgtgaaatttcaaaacaaactcactttaaattttttatagtattgatttgatatgtataatgaaaatgcattaaaacttgtacattaggagatcttagtacaatttacaactgttaatttaacatgtatgtgtaatattatgttacccattcaatatgtaatggagacttaatgagtatttcttttttatgtataatcttaaacagtaatacaacctggctatctagatgaaatcagaaaatctatttttatgattttccaatagtggacctataacatattcttacttttaactgaatgtagtttataaaggttgtgttgtgaggcatgctcctcttgcttttgaacacgatttaaattgaagtttaaaaatatctcacatccgtatgtctcaactgttaagggaatatatatgtttggattcagaagcaggaatattcaattgtgtaatgtataaataggtgtgaataaacttctgaattagttacagaa

SEQ ID NO: 139807 - DNA, 4825 bp, Homo sapiens
  Payload ID: 7418
  Gene Symbol: HSPA4
  Gene Name: heat shock 70kDa protein 4
  Uniprot ID: P34932
  ENST ID: ENST00000304858
  CDS Start-End: 290-2812
ctttcgtagctctggtgctgcggctccgctctcgtcgcaacgagatctttcgagatcttctccgcccccgctaccggcgcctcctctgcggccactgagccggagccggcctgagcagcgctctcggttgcagtacccactggaaggacttaggcgctcgcgtggacaccgcaagcccctcagtagcctcggcccaagaggcctgctttccactcgctagccccgccgggggtccgtgtcctgtctcggtggccggacccgggcccgagcccgagcagtagccggcgccatgtcggtggtgggcatagacctgggcttccagagctgctacgtcgctgtggcccgcgccggcggcatcgagactatcgctaatgagtatagcgaccgctgcacgccggcttgcatttcttttggtcctaagaatcgttcaattggagcagcagctaaaagccaggtaatttctaatgcaaagaacacagtccaaggatttaaaagattccatggccgagcattctctgatccatttgtggaggcagaaaaatctaaccttgcatatgatattgtgcagttgcctacaggattaacaggtataaaggtgacatatatggaggaagagcgaaattttaccactgagcaagtgactgccatgcttttgtccaaactgaaggagacagccgaaagtgttcttaagaagcctgtagttgactgtgttgtttcggttccttgtttctatactgatgcagaaagacgatcagtgatggatgcaacacagattgctggtcttaattgcttgcgattaatgaatgaaaccactgcagttgctcttgcatatggaatctataagcaggatcttcctgccttagaagagaaaccaagaaatgtagtttttgtagacatgggccactctgcttatcaagtttctgtatgtgcatttaatagaggaaaactgaaagttctggccactgcatttgacacgacattgggaggtagaaaatttgatgaagtgttagtaaatcacttctgtgaagaatttgggaagaaatacaagctagacattaagtccaaaatccgtgcattattacgactctctcaggagtgtgagaaactcaagaaattgatgagtgcaaatgcttcagatctccctttgagcattgaatgttttatgaatgatgttgatgtatctggaactatgaatagaggcaaatttctggagatgtgcaatgatctcttagctagagtggagccaccacttcgtagtgttttggaacaaaccaagttaaagaaagaagatatttatgcagtggagatagttggtggtgctacacgaatccctgcggtaaaagagaagatcagcaaatttttcggtaaagaacttagtacaacattaaatgctgatgaagctgtcactcgaggctgtgcattgcagtgtgccatcttatcgcctgctttcaaagtcagagaattttctatcactgatgtagtaccatatccaatatctctgagatggaattctccagctgaagaagggtcaagtgactgtgaagtcttttccaaaaatcatgctgctcctttctctaaagttcttacattttatagaaaggaacctttcactcttgaggcctactacagctctcctcaggatttgccctatccagatcctgctatagctcagttttcagttcagaaagtcactcctcagtctgatggctccagttcaaaagtgaaagtcaaagttcgagtaaatgtccatggcattttcagtgtgtccagtgcatctttagtggaggttcacaagtctgaggaaaatgaggagccaatggaaacagatcagaatgcaaaggaggaagagaagatgcaagtggaccaggaggaaccacatgttgaagagcaacagcagcagacaccagcagaaaataaggcagagtctgaagaaatggagacctctcaagctggatccaaggataaaaagatggaccaaccaccccaagccaagaaggcaaaagtgaagaccagtactgtggacctgccaatcgagaatcagctattatggcagatagacagagagatgctcaacttgtacattgaaaatgagggtaagatgatcatgcaggataaactggagaaggagcggaatgatgctaagaacgcagtggaggaatatgtgtatgaaatgagagacaagcttagtggtgaatatgagaagtttgtgagtgaagatgatcgtaacagttttactttgaaactggaagatactgaaaattggttgtatgaggatggagaagaccagccaaagcaagtttatgttgataagttggctgaattaaaaaatctaggtcaacctattaagatacgtttccaggaatctgaagaacgaccaaaattatttgaagaactagggaaacagatccaacagtatatgaaaataatcagctctttcaaaaacaaggaggaccagtatgatcatttggatgctgctgacatgacaaaggtagaaaaaagcacaaatgaagcaatggagtggatgaataacaagctaaatctgcagaacaagcagagtttgaccatggatccagttgtcaagtcaaaagagattgaagctaaaattaaggagctgacaagtacttgtagccctataatttcaaagcccaaacccaaagtggaacctccaaaagaggaacaaaaaaatgcagagcagaatggaccagtggatggacaaggagacaacccaggcccccaggctgctgagcagggtacagacacagctgtgccttcggattcagacaagaagcttcctgaaatggacattgattgattccaacacttgtttctattaaaacagactattataaagctttaagttgtcaactttgttctaaatatcaactagcgcaagtgaatactgaagatttcttagtcagtttttaggggattttcggggaggggaaataggtaatgtatggagcattttcacttctaaatagttagatacagaaattaagtgcattgtatctttttcataatggtactatttagaagcccagttagtcttactgagcttatgcttcactcctttatgtttaaccatgtgtctacaagaataagtttgttttggaaagttgagctatagctacagctctagctatccagcagacttttcattatgacttacatggcaggagctctaattatgctttaaaaatctgttgtggagattgctttaaatgctccctgcctggtgtggggatggggtccccctctttgtgagggctggagcatggcacggcatggattaacacggcagaggaacaaaggtgtgctctgagcttcttcatatttcaccttcaccctcacctgtgttctcttccctctctcccaataaaagggctcccattataaatgccatgtacttctcttgggaaaatagacccccttgcctagagtaagttgttaactgagggctttaaacctggaggctcttcctgaaagtatgttcatgaataccccaagcatcaaggtctaaataattttcagaagattagaattgggtagatatactgttggatatagccatggtaaatttaactgaggaattaaatccttgttaattttggtgtaaagatttgtatcctggcctgtttattcaggtgggagatgttctgtataattttgaggtatagcttgaactcctagaacaagagttaaaagttctttttagctcattcacaatcacttgtgtgttaagtgttaatatctgtcatgaacctgccaatttgtacgtgttaagcagctgacagatgatgcaaaaaaaactaagatacactggattgtactggatgagtctgaaattagtgttaaagaagtgtggtgcctgatgttataacaacacctcattcttaactgtgtggccaatgtcaggtataccaaagcattcctctgactgctttttggggcagtgttgacaggagtgaggcattttggaaactccaagggaagcctgtgtttgaggccagagttggtacctgctttaagaaactgttacagggcttgttggtaatgttttgaatctttgtaaaaattgatattctgtataacagagtgcctctctgttacttttggcctatgttgttagaaataagatgctatcttgcatagttagaattaagcgtttgtccatctctagataacattgaaaagtttgagtgttacaggctctaaagtgcaatggagaacaattgcttaggaggaggaaggggaaagtatacttatgttggtgtgtaagcatgcatggaggcctcgaggcaccacaacaaggccaggttcttagcacatcctctgttctctacctgtcatgcttcaagagttccagctggcctgctgtgaagccagtagctattttaaaagtgctggctgcaggattaagccaaccctttacaactggcccagaccgtaatggccatttcttcttaaaaaaaaaaaaattttttttttttttttttttttttttttttttttttttggtgtgtgtgtgtgtgtgtgtggggaagggtgtgggtgctgggatgggggtgaatttcaagttgaaacacgatgatgtggtctgcttgctctctgcttagacaggctttaagaccaattggattttcatggaggccaggacagagagtggtaattgatggcttgtgtacagacaagcatttatccaggttgcgttatccaaactgatttgttaaagctccaggtcacgttcttacactaagaaaatcattcagtaaacatgagacaagtttaggaaaaactaataaaataaacctgtcttaaacttgaa

SEQ ID NO: 139808 - DNA, 2204 bp, Homo sapiens
  Payload ID: 7418
  Gene Symbol: HSPA4
  Gene Name: heat shock 70kDa protein 4
  ENST ID: ENST00000615899
  CDS Start-End: 11-1438
agccggcgccatgtcggtggtgggcatagacctgggcttccagagctgctacgtcgctgtggcccgcgccggcggcatcgagactatcgctaatgagtatagcgaccgctgcacgccggcttgcatttcttttggtcctaagaatcgttcaattggagcagcagctaaaagccaggtaatttctaatgcaaagaacacagtccaaggatttaaaagattccatggccgagcattctctgatccatttgtggaggcagaaaaatctaaccttgcatatgatattgtgcagttgcctacaggattaacaggtataaaggtgacatatatggaggaagagcgaaattttaccactgagcaagtgactgccatgcttttgtccaaactgaaggagacagccgaaagtgttcttaagaagcctgtagttgactgtgttgtttcggttccttgtttctatactgatgcagaaagacgatcagtgatggatgcaacacagattgctggtcttaattgcttgcgattaatgaatgaaaccactgcagttgctcttgcatatggaatctataagcaggatcttcctgccttagaagagaaaccaagaaatgtagtttttgtagacatgggccactctgcttatcaagtttctgtatgtgcatttaatagaggaaaactgaaagttctggccactgcatttgacacgacattgggaggtagaaaatttgatgaagtgttagtaaatcacttctgtgaagaatttgggaagaaatacaagctagacattaagtccaaaatccgtgcattattacgactctctcaggagtgtgagaaactcaagaaattgatgagtgcaaatgcttcagatctccctttgagcattgaatgttttatgaatgatgttgatgtatctggaactatgaatagaggcaaatttctggagatgtgcaatgatctcttagctagagtggagccaccacttcgtagtgttttggaacaaaccaagttaaagaaagaagatatttatgcagtggagatagttggtggtgctacacgaatccctgcggtaaaagagaagatcagcaaatttttcggtaaagaacttagtacaacattaaatgctgatgaagctgtcactcgaggctgtgcattgcagtgtgccatcttatcgcctgctttcaaagtcagagaattttctatcactgatgtagtaccatatccaatatctctgagatggaattctccagctgaagaagggtcaagtgactgtgaagtcttttccaaaaatcatgctgctcctttctctaaagttcttacattttatagaaaggaacctttcactcttgaggcctactacagctctcgttcttttgtctctcgtatgtccctagctcagttttcagttcagaaagtcctcctcagtctgatggctccagttcaaaagtgaaagtcaaagttcgagtaaatgtccatggcattttcagtgtgtccagtgcatctttagtggaggttcacaagtctgaggaaaatgaggagccaatggaaacagatcagaatgcaaaggaggaagagaagatgcaagtggaccaggaggaaccacatgttgaagagcaacagcagcagacaccagcagaaaataaggcagagtctgaagaaatggagacctctcaagctggatccaaggataaaaagatggaccaaccaccccaagccaagaaggcaaaagtgaagaccagtactgtggacctgccaatcgagaatcagctattatggcagatagacagagagatgctcaacttgtacattgaaaatgagggtaagatgatcatgcaggataaactggagaaggagcggaatgatgctaagaacgcagtggaggaatatgtgtatgaaatgagagacaagcttagtggtgaatatgagaagtttgtgagtgaagatgatcgtaacagttttactttgaaactggaagatactgaaaattggttgtatgaggatggagaagaccagccaaagcaagtttatgttgataagttggctgaattaaaaaatctaggtcaacctattaagatacgtttccaggaatctgaagaacgaccaaaattatttgaagaactagggaaacagatccaacagtatatgaaaataatcagctctttcaaaaacaaggaggaccagtatgatcatttggatgctgctgacatgacaaaggt

SEQ ID NO: 139809 - DNA, 728 bp, Homo sapiens
  Payload ID: 7418
  Gene Symbol: HSPA4
  Gene Name: heat shock 70kDa protein 4
  Uniprot ID: P34932
  ENST ID: ENST00000617819
  CDS Start-End: 282-728
gctctggtgctgcggctccgctctcgtcgcaacgagatctttcgagatcttctccgcccccgctaccggcgcctcctctgcggccactgagccggagccggcctgagcagcgctctcggttgcagtacccactggaaggacttaggcgctcgcgtggacaccgcaagcccctcagtagcctcggcccaagaggcctgctttccactcgctagccccgccgggggtccgtgtcctgtctcggtggccggacccgggcccgagcccgagcagtagccggcgccatgtcggtggtgggcatagacctgggcttccagagctgctacgtcgctgtggcccgcgccggcggcatcgagactatcgctaatgagtatagcgaccgctgcacgccggcttgcatttcttttggtcctaagaatcgttcaattggagcagcagctaaaagccaggtaatttctaatgcaaagaacacagtccaaggatttaaaagattccatggccgagcattctctgatccatttgtggaggcagaaaaatctaaccttgcatatgatattgtgcagttgcctacaggattaacaggtataaaggtgacatatatggaggaagagcaaaatggaccagtggatggacaaggagacaacccaggcccccaggctgctgagcagggtacagacacagctgtgccttcggattcagacaagaagcttcctgaaatggacattgattga

SEQ ID NO: 139810 - DNA, 2358 bp, Homo sapiens
  Payload ID: 7418
  Gene Symbol: HSPA4
  Gene Name: heat shock 70kDa protein 4
  ENST ID: ENST00000617074
  CDS Start-End: 124-2223
caccgcaagcccctcagtagcctcggcccaagaggcctgctttccactcgctagccccgccgggggtccgtgtcctgtctcggtggccggacccgggcccgagcccgagcagtagccggcgccatgtcggtggtgggcatagacctgggcttccagagctgctacgtcgctgtggcccgcgccggcggcatcgagactatcgctaatgagtatagcgaccgctgcacgccggcttgcatttcttttggtcctaagaatcgttcaattggagcagcagctaaaagccaggtaatttctaatgcaaagaacacagtccaaggatttaaaagattccatggccgagcattctctgatccatttgtggaggcagaaaaatctaaccttgcatatgatattgtgcagttgcctacaggattaacaggtataaaggtgacatatatggaggaagagcgaaattttaccactgagcaagtgactgccatgcttttgtccaaactgaaggagacagccgaaagtgttcttaagaagcctgtagttgactgtgttgtttcggttccttgtttctatactgatgcagaaagacgatcagtgatggatgcaacacagattgctggtcttaattgcttgcgattaatgaatgaaaccactgcagttgctcttgcatatggaatctataagcaggatcttcctgccttagaagagaaaccaagaaatgtagtttttgtagacatgggccactctgcttatcaagtttctgtatgtgcatttaatagaggaaaactgaaagttctggccactgcatttgacacgacattgggaggtagaaaatttgatgaagtgttagtaaatcacttctgtgaagaatttgggaagaaatacaagctagacattaagtccaaaatccgtgcattattacgactctctcaggagtgtgagaaactcaagaaattgatgagtgcaaatgcttcagatctccctttgagcattgaatgttttatgaatgatgttgatgtatctggaactatgaatagaggcaaatttctggagatgtgcaatgatctcttagctagagtggagccaccacttcgtagtgttttggaacaaaccaagttaaagaaagaagatatttatgcagtggagatagttggtggtgctacacgaatccctgcggtaaaagagaagatcagcaaatttttcggtaaagaacttagtacaacattaaatgctgatgaagctgtcactcgaggctgtgcattgcagtgtgccatcttatcgcctgctttcaaagtcagagaattttctatcactgatgtagtaccatatccaatatctctgagatggaattctccagctgaagaagggtcaagtgactgtgaagtcttttccaaaaatcatgctgctcctttctctaaagttcttacattttatagaaaggaacctttcactcttgaggcctactacagctctcctcaggatttgccctatccagatcctgctatagctcagttttcagttcagaaagtcactcctcagtctgatggctccagttcaaaagtgaaagtcaaagttcgagtaaatgtccatggcattttcagtgtgtccagtgcatctttagtggaggttcacaagtctgaggaaaatgaggagccaatggaaacagatcagaatgcaaaggaggaagagaagatgcaagtggaccaggaggaaccacatgttgaagagcaacagcagcagacaccagcagaaaataaggcagagtctgaagaaatggagacctctcaagctggatccaaggataaaaagatggaccaaccaccccaagaaggcaaaagtgaagaccagtactgtggacctgccaatcgagaatcagctatttggcagatagacagagagatgctcaacttgtacattgaaaatgagggtaagatgatcatgcaggataaactggagaaggagcggaatgatgctaagaacgcagtggaggaatatgtgtatgaaatgagagacaagcttagtggtgaatatgagaagtttgtgagtgaagatgatcgtaacagttttactttgaaactggaagatactgaaaattggttgtatgaggatggagaagaccagccaaagcaagtttatgttgataagttggctgaattaaaaaatctaggtcaacctattaagatacgtttccaggaatctgaagaacgaccaaattatttgaagaactagggaaacagatccaacagtatatgaaaataatcagctctttcaaaaacaaggaggaccagtatgatcatttggatgctgctgacatgacaaaggtagaaaaaagcacaaatgaagcaatggagtggatgaataaca

SEQ ID NO: 139811 - DNA, 10790 bp, Homo sapiens
  Payload ID: 7419
  Gene Symbol: HSPA4L
  Gene Name: heat shock 70kDa protein 4-like
  Uniprot ID: O95757
  ENST ID: ENST00000296464
  CDS Start-End: 412-2931
ttttccagatctttctcgaacccgcagcttcttgggcagccgttgcccgagtgctgacggaagcggccgaagtccgggcccggagctggctcgggcgcggagcggaggctcgcgcgcctcccgggcagccgagcgcgcaggcgcaggtcccagtaaccgccggttggaggcggccgaaccgcagtagggaaagacccaggctgcgggacgcggtgcaggctgcggcgctgacggcctctgctccttccgcgggtttccgactccctgccctagattttctgcttagcgacttggggtcccctctcgtttgcttctggtaggagtcgcaatcccagcagcaatagcccagaagaggacacggttcccgtaccgaagggttcagtaccagcagcccgaccatcacgcggcgggatgtctgtggttggcattgacctcggctttctcaactgctacattgctgtcgcgagaagtggcggcatcgagaccatcgccaatgagtacagcgacaggtgtaccccggcctgtatatcattgggatcaagaactcgagccattggaaatgcagcaaagagccagatagtcacgaacgtaagaaatacaattcatggcttcaaaaagcttcatgggcgatcatttgatgatcccattgtgcaaactgaaaggatcaggcttccctatgaactgcagaaaatgcctaatggaagtgcaggagttaaggtgcggtacttagaggaagagagaccttttgcaattgagcaagttactggaatgctgttagccaagcttaaagagacttcagaaaatgctttgaagaaaccagtggctgactgtgtgatttcaattcctagcttttttactgatgccgagagaagatctgtgatggctgcagcccaggttgcaggcttaaattgtttaaggttgatgaatgaaactactgcagttgcactggcgtatggaatttataaacaggatcttcccccattagatgagaaaccaagaaatgtagtatttattgatatgggacattctgcctatcaggtcttggtttgtgcttttaacaaaggaaaacttaaagtcttggctactacctttgatccatatttgggtggcaggaactttgatgaggctttagtagactacttctgtgatgagttcaagaccaaatataagataaatgtgaaagaaaactctcgggccttgttgcgtttatatcaggaatgtgaaaaactaaagaagctaatgagtgcaaatgcatcagatcttccattgaacattgagtgtttcatgaatgaccttgatgtttctagtaaaatgaacagggctcaatttgaacaactgtgtgcttcccttttggccagggttgaaccacctttaaaagcagtaatggaacaagctaacttacaacgtgaagacattagtagtatagaaattgtaggaggagcaacacgaattcctgcagtgaaagaacaaatcactaaattctttcttaaagacataagtaccacattaaatgctgatgaagctgttgcaagaggatgtgcgttacagtgtgcgattctctcaccagcatttaaagtgcgtgaattttccataacagaccttgttccctattcaatcacattaaggtggaagacctcttttgaagatggaagtggggaatgtgaagttttctgtaagaaccatcctgccccattctcaaaagtcattactttccacaagaaggaaccatttgaactagaagcattttatactaatttacatgaagtgccttatcctgatgcaagaattgggagcttcactattcagaatgtttttccacagtctgatggtgatagttccaaagtgaaggttaaagttcgtgttaacatccatggaatcttcagtgtggctagcgcatcagtaattgagaagcaaaatttggaaggcgatcacagtgatgctccaatggagacagaaacttcatttaaaaatgaaaacaaagataatatggataaaatgcaggttgatcaagaagaagggcatcaaaaatgtcatgctgaacacactccagaagaggaaattgatcatacaggagccaaaacaaagtcagctgtctcagacaaacaagaccgattaaatcagacacttaaaaaaggaaaagtcaaaagtattgatctaccgatccagagtagcctatgtagacaactaggccaagatcttctcaacagctacattgaaaatgaggggaagatgatcatgcaagataagttagagaaagaaagaaatgatgctaagaatgccgttgaagaatatgtatatgattttagagacaggctgggcactgtctatgaaaaattcatcactccagaagacttgagtaaactgtctgcagtattggaagacacagaaaattggctttatgaagacggagaggaccaacctaaacaagtttatgtggataagcttcaagaactaaagaaatacggccagcctattcaaatgaagtacatggagcatgaagagagaccaaaagccttaaatgacttgggaaaaaagatccaacttgtcatgaaagtgatagaagcttatagaaacaaggatgaaagatatgatcatctggatcctactgaaatggaaaaggttgaaaaatgtatcagtgatgccatgagttggctgaatagtaagatgaatgcacagaacaaactaagtctcactcaagatcctgtggtaaaagtttcagaaatagtagcaaagtcaaaggaactggataatttctgtaaccccatcatttacaagcccaaaccaaaagcagaagttcctgaagacaaaccaaaagctaatagtgaacacaatggcccaatggatggacagagtggaactgaaactaaatcagattcaacaaaagacagctcacagcatactaaatcctctggagagatggaagtggactaagtcttaattttaccttcacattaattcaaaccgtgcaagtaaccacggggtccatcttttacatctggtacacacaacagacgctcagttgttcttaaccacttttgtcatttgttttttggagtagttttgaaaagtgttttatattgagtgcacttctgttcatttccattgctgcttatatgcagtgttagccgaattagatttacaagacaatctaagctttccggataattttatatatcaaacatacaggatggatacatagttggcaacagtctaccttatttaaagcttctactgggataaacctcaattcctttattcaggaaaggatactttattgcattattgttgcagaagcatagatttaattgcatctttattttgaaaaacaaatgaaaattgatggggtttaaagctacagaggcactgacctttttctagttattgtattgctacaatttaaatattaaaacaaataagagctttctcaacaaattagtccatctcattgatgtaccacagaaatccaaagctttgctgtcatcacataaatgaattaaatcacatgtgaaagggaacacacccaattttatgttaaggtgaaaccagcagtttgcttcttttattagtaatgtggattgatgttttctcagagtaactcgttgtcttttcgcttgaaatttttgatcttgtcctgaagactagctgctgctaaaacaatgctagcctaaagatacaggagtctctgacaaaatgactttcatgttaaggggaaatgctgtttatctactcagacatgcatctgtgatgttcatagccttgtttcagttataatagttgtcttgtttttttcttaattgattttgttaataataccttaacacagggtaggaagaagtggcacagtgtattgcattatatacatttatcattgatttacctaatgttaccttgtagattaaacactattaagtggtaatacttgaaaaggagcacttataccataagtcttaggaaataatgtttgtaataaacttaactatgttacatatcaacaggcaaaaatatagaatgttacatagtgttgtgtgattaaattatagttcctgctgttaacattaccttttgaaaccttggctccagttttggtgcttcttatacaaattaaatgcgaaaagggactgtaaacttaagatgtattttaaggactttatctgtgcttcatcacccaacttgttcacattgttaatttctgtccagagacctgaaactgcttaagtatgggaacagactgaaatggtgtttcaacctgcaagagacagaagcatagacaagtatatgagcccttatgtccttaatgccaatcaactagattgacctaggttaaaatttcaaaaggctcattttctcccaaagctaaatctttatattaggaacaattaaatattgacttaagttgtaaaaattgagagtacaatatctttagggatagtcattatttctcacaactagttctctacgagagattttgtttctacaatgtagtcagcacttaatggagagtatggagtagtgcattttgcagggatttttattccgtcttttgaggggaagaatctcttttttgcattaaaaaatcatataaacttaatatatttttaaactctcctagtctttaaactttctcttaattctcttaaaatgaaataggtatatccaataggtgatgaaatacattttttacaaacatagatgctttttatttgtatgttgaatgtacagattcatttcaagaaaagcatgaagataatgaaagcaaatatgtaacaatacaagtagggactttagagcttctatttgggttaaaacatccactcacttggttaggagctatgcctcagaaacttcctgggagtaaatatgggaacaacttttctattaatacatctaaattttctagtatatcctgacattttccattcctgctctgaagtcacttttagttttgtgttttagtcagatagtaccactaatttttgtaattatataacacttcatttaataacttatatacatccaaatatatatactttttctacccaattattcaacttaaaagatttcaaaaacgatttagccttataatgtatttatttatttaattcattaatgaaagagagtgctctctttaatgcagctttgggtagacagtctaattcagtccaattttaatctgcattaaaatatgcaatgctagacaaagattttcaaaataaaaagctattatttcagaaattattttaaaagatgcatagtaaaacagtgttttcctatggtaagcaaataagaatgaagtttgtagggaatatttggaatgattaatataaattagtatactttggctctgtggaaaagtgtaaattgtggttttagaaaccaactcttgatagttgtactgtgattataaaaaacaattgttaaataatataatggaagtttgtgataattccttagcagtaatgtaaaattattaagttttggccaggcgctgtggctcacgcctgtaatcctagcactttgggaggccaaggcaggcagatcacctgaggtcaggagttcaagaccagcctggccaacatggtgaaaccctgtctctactaaaaatacaaaaaagtagccgggcgtggtggcatgtccctgtaatctcagctacccgggaggctcaggcaggagaatcgctggaacccaggaggcagaggctgccgttagctgagatcgtgctcctgcactccagcctgggcaacagaacaagactccgtctcaaaaaaaaaacaaaaattcttccaaaaaactagaaagagcacagcaaagaatttggctattgaaataacagataaacttgattttgaaaaggataacaaggctgggcacagtgactcacacctgtaatcctagcactttgagaggctaagaagggaggatcacttgaacccaggagttcaagaccagcctgagaaacatagtgagaccctgtctctaaaaaaataaaaacttagcaaggcatggtggtgcacacctgtagtcctagctactcaggaggctgaggtggaggatcacttaagcctgagaggtcaaggttgcaatgagccataatcataccactgcactccagcctgggcaacagagtgaggccctgtctcaaacacataaaaggcagtggcccacgcctgtaatcccagcactttgggaggccaaggcgggcagatcacgaggtcaggagatcaagaccatcctggctaacacggtgaaaccccgtctctactaaaaatacaaaaaattagctgggcatggtggcgggcgccggtagtcccagctactcaggaggctgaggcaggagaatggtgtgaacccaggaggcggaggttgcagtgagccgagatcgcgccactgcactccagcctgggcaacagagcaagactccatctcaaaaacaaaacaaaacaaaaacataaaaggaaaacaagacatttactaagaagagctaaaggaaagaattaaaggtttcttatgcttttttgggggggggtgtcaatttttagtatattaagagctaaaagaagtaaaggtttcttagactttttttgggagggaggcgtcaatttttagtatatttgtgattaattccatgatagaagtctttaaagagaattttggggctcaataatttaacataatgtcagtgttaaagcacttaatccaaattagcccatctttaactgttttgaaaaatctatatttattaaaggtagtagacatttgaatatagtaatcaaattaactgattttgttttcaccctaaatacatacaaccattcctccactttcataaatttgacaaataataagcctctcccattaggattttctgttttatagtaaatagttggtatttggtagtccacaattaaagtcattgcattaattttacaaattatagatttagaaatgattcttaagttattggtaaaatataactttctcagtttttaaaagtttacaaaatttttttttttgttttgagacagagtatggctttgttacccaggctggattgcaatggggtgatctaggctcactgcagcctccaccacctgagttcaagcgatttttctgcctcaacctctcctgagtagctgggactacaggtgcatgacaccacacccagctaatttttgtatttttatagagatggagttttgccatgttggccagcctggtcttgaactcttgaactcctgacctcaggtaatccacccacctcagactcccaaagtgctgggattacaggcgtgagccaccatacccggccaaaaatttttgcttttaaagttaatgttattttgtggttaaacttctaaagttttgaactgtaagcagaattttgttttgtgatattttattgtataaactgttaatgagaggcacagctaattgtacatatcaatatacatttaaaatctggtaacactggttaaatagcccttgatgacttttcatgtggcatgagagggatatgcttataaagcttaattctgatattatcctcttactacctacagtatgttttgcaaaaatcagtccacttagcaaactaatctttgtaaagcagtcagtttcagaagatactttttatcaaaaaagatggcaggtttaacattataccttttggtttttgcccaacatttgatttaatctaaagcaagaatataaaataattttaagaagcatataatttcttttgataaaaagtaacaaaaatttaatgcagatcaaagaccaaggcttgtaaccaaaacaagcaaaaagaaactttagctgtttaactatcacctctctaatttaaaatgcatgaaaattaatactttgtttttgttttttttttggaaacagtctcactctgtcacccaggctggagggcacaatctctgctcactgcaacctccacctcctgggctcaagcctcaagcaattctcctgcctcagcctcccaagtagctgggattacaggaacccaccaccacgcccagctaatttttgtatttttagtagatggggtttcatcatgttggccaggctggttttgaactcctgacttcaaatgatccacccacatccacctgccagagtgctgagattacaggcgtgagccaccgcacctggccaatgttcttttatatactcatgttttctaacaaaacagctttggatttataatgctgccagatgtcattacaattttttttctaaattcaaaggtaattattctaaacaataaaagggcacctggaattttcagaacattaaaaaactgaaaccacttagaagaaaagaagaaacctaaatgtctgtggaagtgatcagtattaagtgggtgatggctctttcatcttccttatccctaaagatacttccaacatattgttagagtaagtattaaaagaaaaagtaggtttgctgaaaaacattactaaatgacttggagctctccagtcaaagaaacaaagctaattgaaataatgtacatttggttcagtctgtcaggcaagtacaaatccataacaaaaaaaattaatagtatgctctttgctttggaatctctaatttacggtcatgccctaagtcacaggatgattattagggaaatgtcattgacacctgaaaattacctatcctgtaaaaagactggtgaaattcaacatgttttaaataatttaattgcattatagcatataaactataaatgaaaatgatctttgtctttcctttatcttgctttatcctcttatccaattctagactcttaaataatcactgtatttttctcaagtatttgttattttttattatcctttagatctttttgttcatggctctttaaaaatagttttactgataatccaatcacttggatagttaattttattactttttgtttcctttttaatatttattcttcccgttaagggttttttggctataaattcgtacttgataagctatgttatttctttgtgtaatttaatagtagcattctggagtagattctttttttgtattctggccttggaatactttaattccggaccaaaagaggtcaattttgtgagtattgcctattaagtaaacaacatccctcatttttaatccaaatatcaatttgacagaataacaagggtcagaaattcaaaatagctgttagacacctttgattctttgctgctctctggttatgtatgtgtgttgtgcatcttccttgttgttttagagtttcctaaattttttgcttctggggacttgagtatttttaaatgttcttaaaattatatgaatctacccagaatgtagatgtcaaaatgtaattagaggccccgtgcagtggctcacgcctgtaatcccagcactttgggaggccgaggcaggtggatcgcctgagctcaggagttcaagaccagcctgggcaacatggcaaaaccccgtctctactaaaaatacaaaaaattagctgggtgtggtggtgtgtgcctgtagtcccagctactcgggaggctgaggcaggagaatcgcttgaaccctggcgaaaccccatttctaaaatagaaaaatttagccgggtgtggtggtgtgtgcctatagtcccagctattcgggaggctgaggcaagagaattgcttgaacccgggaggtggaggtcgcagtgagctgagatcctgccactgcactccaacctgggggtaacagagcgagactctgtctcaaaaaaaaaaaaaagtgtaattagaaatggaaatctaggtaaaggaagctttaaaatgttgtattttttccctgaaataaacttttatgatttaatgtcttggaaaaagactcacatgaaaagtggcttttatatttggtaggataaagccattgtcctttaataccatagcaaatagaagcaatttttaatgaggttactgaattgtttagtattcctaatatggcatccaggtcatcttttcttttctccaaccattattaaaataacttgacactttgggaggccaagctgggcagatcacctgaggtcaggagtttgagaccagcctggccaacatggtgaaaccccatctctactaaaaaaaatacaaaaattagcggggccatggtgacgtgcacctgtaatcccagctactcgggaggctgaggtgggagaatagcttgaacctgggaggcagaggttgtggtgagccaagatcacgccactgcactccagcctgggtgacagagcaagactccatctcaagaaaaaaataaataaataataatttgtgtatgtgatgactgactctagtcattatggaaaataacttttggcagtttagttcctaatgttaacaattcctctttttaagagaggtactacatttgatttctcaatttctcagtttgttttcaatacaaacagcaaccactgaaatgcagaaaatggtaatcaagtgtgatgtttctataaaaataattgagattcacatgtaatagaccctttagctttaatgagcagacatgagaatggtttatgatcttaagttggtaacataggaatatgtatttgtcaattttagttcacaaacatatccataagaatgtttacacatggcagtatcaaagcatataaaatattttctatgtaagtaaattgcatctttatgctagtgaacaaagtagcaataaatgttcatttttggatggcagtacacattgttaacaatcgtgtaattataataaatatgtctacctactccttgaaccatgaa

SEQ ID NO: 139812 - DNA, 3020 bp, Homo sapiens
  Payload ID: 7419
  Gene Symbol: HSPA4L
  Gene Name: heat shock 70kDa protein 4-like
  Uniprot ID: O95757
  ENST ID: ENST00000508776
  CDS Start-End: 333-2852
atgggcccctcggggaggcgaggcctgcgggcgagcccttctgagggcagggggtgagggggcggcgcccgccagccaggacagcatcctgccgccgtgacaagcacgcctccggttgccaaaacaacccaaaaatgtgcctcaaaacacgttcgcaaagccccgggccggccggtcgcctgcctctcacctagcccgaccgcccgacgtcctactgccgagcgagggcgagcaagccaatgagtcgcaatcccagcagcaatagcccagaagaggacacggttcccgtaccgaagggttcagtaccagcagcccgaccatcacgcggcgggatgtctgtggttggcattgacctcggctttctcaactgctacattgctgtcgcgagaagtggcggcatcgagaccatcgccaatgagtacagcgacaggtgtaccccggcctgtatatcattgggatcaagaactcgagccattggaaatgcagcaaagagccagatagtcacgaacgtaagaaatacaattcatggcttcaaaaagcttcatgggcgatcatttgatgatcccattgtgcaaactgaaaggatcaggcttccctatgaactgcagaaaatgcctaatggaagtgcaggagttaaggtgcggtacttagaggaagagagaccttttgcaattgagcaagttactggaatgctgttagccaagcttaaagagacttcagaaaatgctttgaagaaaccagtggctgactgtgtgatttcaattcctagcttttttactgatgccgagagaagatctgtgatggctgcagcccaggttgcaggcttaaattgtttaaggttgatgaatgaaactactgcagttgcactggcgtatggaatttataaacaggatcttcccccattagatgagaaaccaagaaatgtagtatttattgatatgggacattctgcctatcaggtcttggtttgtgcttttaacaaaggaaaacttaaagtcttggctactacctttgatccatatttgggtggcaggaactttgatgaggctttagtagactacttctgtgatgagttcaagaccaaatataagataaatgtgaaagaaaactctcgggccttgttgcgtttatatcaggaatgtgaaaaactaaagaagctaatgagtgcaaatgcatcagatcttccattgaacattgagtgtttcatgaatgaccttgatgtttctagtaaaatgaacagggctcaatttgaacaactgtgtgcttcccttttggccagggttgaaccacctttaaaagcagtaatggaacaagctaacttacaacgtgaagacattagtagtatagaaattgtaggaggagcaacacgaattcctgcagtgaaagaacaaatcactaaattctttcttaaagacataagtaccacattaaatgctgatgaagctgttgcaagaggatgtgcgttacagtgtgcgattctctcaccagcatttaaagtgcgtgaattttccataacagaccttgttccctattcaatcacattaaggtggaagacctcttttgaagatggaagtggggaatgtgaagttttctgtaagaaccatcctgccccattctcaaaagtcattactttccacaagaaggaaccatttgaactagaagcattttatactaatttacatgaagtgccttatcctgatgcaagaattgggagcttcactattcagaatgtttttccacagtctgatggtgatagttccaaagtgaaggttaaagttcgtgttaacatccatggaatcttcagtgtggctagcgcatcagtaattgagaagcaaaatttggaaggcgatcacagtgatgctccaatggagacagaaacttcatttaaaaatgaaaacaaagataatatggataaaatgcaggttgatcaagaagaagggcatcaaaaatgtcatgctgaacacactccagaagaggaaattgatcatacaggagccaaaacaaagtcagctgtctcagacaaacaagaccgattaaatcagacacttaaaaaaggaaaagtcaaaagtattgatctaccgatccagagtagcctatgtagacaactaggccaagatcttctcaacagctacattgaaaatgaggggaagatgatcatgcaagataagttagagaaagaaagaaatgatgctaagaatgccgttgaagaatatgtatatgattttagagacaggctgggcactgtctatgaaaaattcatcactccagaagacttgagtaaactgtctgcagtattggaagacacagaaaattggctttatgaagacggagaggaccaacctaaacaagtttatgtggataagcttcaagaactaaagaaatacggccagcctattcaaatgaagtacatggagcatgaagagagaccaaaagccttaaatgacttgggaaaaaagatccaacttgtcatgaaagtgatagaagcttatagaaacaaggatgaaagatatgatcatctggatcctactgaaatggaaaaggttgaaaaatgtatcagtgatgccatgagttggctgaatagtaagatgaatgcacagaacaaactaagtctcactcaagatcctgtggtaaaagtttcagaaatagtagcaaagtcaaaggaactggataatttctgtaaccccatcatttacaagcccaaaccaaaagcagaagttcctgaagacaaaccaaaagctaatagtgaacacaatggcccaatggatggacagagtggaactgaaactaaatcagattcaacaaaagacagctcacagcatactaaatcctctggagagatggaagtggactaagtcttaattttaccttcacattaattcaaaccgtgcaagtaaccacggggtccatcttttacatctggtacacacaacagacgctcagttgttcttaaccacttttgtcatttgttttttggagtagttttgaaaagtgttttatattgagtgcacttctgttcattt

SEQ ID NO: 139813 - DNA, 2639 bp, Homo sapiens
  Payload ID: 7419
  Gene Symbol: HSPA4L
  Gene Name: heat shock 70kDa protein 4-like
  ENST ID: ENST00000505726
  CDS Start-End: 104-2545
aagtttgttggcaaggaatataatgaagtaattctgaaatatgaaaaactagttgctgcttataggctgctgttactggtaattttatgaggaaaccaactgtatgaaacctatattactttttatggaaagggcctgtatatcattgggatcaagaactcgagccattggaaatgcagcaaagagccagatagtcacgaacgtaagaaatacaattcatggcttcaaaaagcttcatgggcgatcatttgatgatcccattgtgcaaactgaaaggatcaggcttccctatgaactgcagaaaatgcctaatggaagtgcaggagttaaggtgcggtacttagaggaagagagaccttttgcaattgagcaagttactggaatgctgttagccaagcttaaagagacttcagaaaatgctttgaagaaaccagtggctgactgtgtgatttcaattcctagcttttttactgatgccgagagaagatctgtgatggctgcagcccaggttgcaggcttaaattgtttaaggttgatgaatgaaactactgcagttgcactggcgtatggaatttataaacaggatcttcccccattagatgagaaaccaagaaatgtagtatttattgatatgggacattctgcctatcaggtcttggtttgtgcttttaacaaaggaaaacttaaagtcttggctactacctttgatccatatttgggtggcaggaactttgatgaggctttagtagactacttctgtgatgagttcaagaccaaatataagataaatgtgaaagaaaactctcgggccttgttgcgtttatatcaggaatgtgaaaaactaaagaagctaatgagtgcaaatgcatcagatcttccattgaacattgagtgtttcatgaatgaccttgatgtttctagtaaaatgaacagggctcaatttgaacaactgtgtgcttcccttttggccagggttgaaccacctttaaaagcagtaatggaacaagctaacttacaacgtgaagacattagtagtatagaaattgtaggaggagcaacacgaattcctgcagtgaaagaacaaatcactaaattctttcttaaagacataagtaccacattaaatgctgatgaagctgttgcaagaggatgtgcgttacagtgtgcgattctctcaccagcatttaaagtgcgtgaattttccataacagaccttgttccctattcaatcacattaaggtggaagacctcttttgaagatggaagtggggaatgtgaagttttctgtaagaaccatcctgccccattctcaaaagtcattactttccacaagaaggaaccatttgaactagaagcattttatactaatttacatgaagtgccttatcctgatgcaagaattgggagcttcactattcagaatgtttttccacagtctgatggtgatagttccaaagtgaaggttaaagttcgtgttaacatccatggaatcttcagtgtggctagcgcatcagtaattgagaagcaaaatttggaaggcgatcacagtgatgctccaatggagacagaaacttcatttaaaaatgaaaacaaagataatatggataaaatgcaggttgatcaagaagaagggcatcaaaaatgtcatgctgaacacactccagaagaggaaattgatcatacaggagccaaaacaaagtcagctgtctcagacaaacaagaccgattaaatcagacacttaaaaaaggaaaagtcaaaagtattgatctaccgatccagagtagcctatgtagacaactaggccaagatcttctcaacagctacattgaaaatgaggggaagatgatcatgcaagataagttagagaaagaaagaaatgatgctaagaatgccgttgaagaatatgtatatgattttagagacaggctgggcactgtctatgaaaaattcatcactccagaagacttgagtaaactgtctgcagtattggaagacacagaaaattggctttatgaagacggagaggaccaacctaaacaagtttatgtggataagcttcaagaactaaagaaatacggccagcctattcaaatgaagtacatggagcatgaagagagaccaaaagccttaaatgacttgggaaaaaagatccaacttgtcatgaaagtgatagaagcttatagaaacaaggatgaaagatatgatcatctggatcctactgaaatggaaaaggttgaaaaatgtatcagtgatgccatgagttggctgaatagtaagatgaatgcacagaacaaactaagtctcactcaagatcctgtggtaaaagtttcagaaatagtagcaaagtcaaaggaactggataatttctgtaaccccatcatttacaagcccaaaccaaaagcagaagttcctgaagacaaaccaaaagctaatagtgaacacaatggcccaatggatggacagagtggaactgaaactaaatcagattcaacaaaagacagctcacagcatactaaatcctctggagagatggaagtggactaagtcttaattttaccttcacattaattcaaaccgtgcaagtaaccacggggtccatcttttacatctggtacacacaacagacgctcagttgttc

SEQ ID NO: 139814 - DNA, 1822 bp, Homo sapiens
  Payload ID: 7419
  Gene Symbol: HSPA4L
  Gene Name: heat shock 70kDa protein 4-like
  ENST ID: ENST00000508549
  CDS Start-End: 230-1822
agtagggaaagacccaggctgcgggacgcggtgcaggctgcggcgctgacggcctctgctccttccgcgggtttccgactccctgccctagattttctgcttagcgacttggggtcccctctcgtttgcttctggtaggagtcgcaatcccagcagcaatagcccagaagaggacacggttcccgtaccgaagggttcagtaccagcagcccgaccatcacgcggcgggatgtctgtggttggcattgacctcggctttctcaactgctacattgctgtcgcgagaagtggcggcatcgagaccatcgccaatgagtacagcgacaggtgtaccccggcctgtatatcattgggatcaagaactcgagccattggaaatgcagcaaagagccagatagtcacgaacgtaagaaatacaattcatggcttcaaaaagcttcatgggcgatcatttgatgatcccattgtgcaaactgaaaggatcaggcttccctatgaactgcagaaaatgcctaatggaagtgcaggagttaagattcctagcttttttactgatgccgagagaagatctgtgatggctgcagcccaggttgcaggcttaaattgtttaaggttgatgaatgaaactactgcagttgcactggcgtatggaatttataaacaggatcttcccccattagatgagaaaccaagaaatgtagtatttattgatatgggacattctgcctatcaggtcttggtttgtgcttttaacaaaggaaaacttaaagtcttggctactacctttgatccatatttgggtggcaggaactttgatgaggctttagtagactacttctgtgatgagttcaagaccaaatataagataaatgtgaaagaaaactctcgggccttgttgcgtttatatcaggaatgtgaaaaactaaagaagctaatgagtgcaaatgcatcagatcttccattgaacattgagtgtttcatgaatgaccttgatgtttctagtaaaatgaacagggctcaatttgaacaactgtgtgcttcccttttggccagggttgaaccacctttaaaagcagtaatggaacaagctaacttacaacgtgaagacattagtagtatagaaattgtaggaggagcaacacgaattcctgcagtgaaagaacaaatcactaaattctttcttaaagacataagtaccacattaaatgctgatgaagctgttgcaagaggatgtgcgttacagtgtgcgattctctcaccagcatttaaagtgcgtgaattttccataacagaccttgttccctattcaatcacattaaggtggaagacctcttttgaagatggaagtggggaatgtgaagttttctgtaagaaccatcctgccccattctcaaaagtcattactttccacaagaaggaaccatttgaactagaagcattttatactaatttacatgaagtgccttatcctgatgcaagaattgggagcttcactattcagaatgtttttccacagtctgatggtgatagttccaaagtgaaggttaaagttcgtgttaacatccatggaatcttcagtgtggctagcgcatcagtaattgagaagcaaaatttggaaggcgatcacagtgatgctccaatggagacagaaacttcatttaaaaatgaaaacaaagataatatggataaaatgcaggttgatcaagaagaagggcatcaaaaatgtcatgctgaacacactccagaagaggaaattgatcatacaggagccaaaacaaagtcagctgtctcagacaaacaagaccgattaaatcagacactt

SEQ ID NO: 139815 - DNA, 3908 bp, Homo sapiens
  Payload ID: 7420
  Gene Symbol: HSPA5
  Gene Name: heat shock 70kDa protein 5 (glucose-regulated protein, 78kDa)
  Uniprot ID: P11021
  ENST ID: ENST00000324460
  CDS Start-End: 205-2169
acagcacagacagattgacctattggggtgtttcgcgagtgtgagagggaagcgccgcggcctgtatttctagacctgcccttcgcctggttcgtggcgccttgtgaccccgggcccctgccgcctgcaagtcggaaattgcgctgtgctcctgtgctacggcctgtggctggactgcctgctgctgcccaactggctggcaagatgaagctctccctggtggccgcgatgctgctgctgctcagcgcggcgcgggccgaggaggaggacaagaaggaggacgtgggcacggtggtcggcatcgacctggggaccacctactcctgcgtcggcgtgttcaagaacggccgcgtggagatcatcgccaacgatcagggcaaccgcatcacgccgtcctatgtcgccttcactcctgaaggggaacgtctgattggcgatgccgccaagaaccagctcacctccaaccccgagaacacggtctttgacgccaagcggctcatcggccgcacgtggaatgacccgtctgtgcagcaggacatcaagttcttgccgttcaaggtggttgaaaagaaaactaaaccatacattcaagttgatattggaggtgggcaaacaaagacatttgctcctgaagaaatttctgccatggttctcactaaaatgaaagaaaccgctgaggcttatttgggaaagaaggttacccatgcagttgttactgtaccagcctattttaatgatgcccaacgccaagcaaccaaagacgctggaactattgctggcctaaatgttatgaggatcatcaacgagcctacggcagctgctattgcttatggcctggataagagggagggggagaagaacatcctggtgtttgacctgggtggcggaaccttcgatgtgtctcttctcaccattgacaatggtgtcttcgaagttgtggccactaatggagatactcatctgggtggagaagactttgaccagcgtgtcatggaacacttcatcaaactgtacaaaaagaagacgggcaaagatgtcaggaaagacaatagagctgtgcagaaactccggcgcgaggtagaaaaggccaaacgggccctgtcttctcagcatcaagcaagaattgaaattgagtccttctatgaaggagaagacttttctgagaccctgactcgggccaaatttgaagagctcaacatggatctgttccggtctactatgaagcccgtccagaaagtgttggaagattctgatttgaagaagtctgatattgatgaaattgttcttgttggtggctcgactcgaattccaaagattcagcaactggttaaagagttcttcaatggcaaggaaccatcccgtggcataaacccagatgaagctgtagcgtatggtgctgctgtccaggctggtgtgctctctggtgatcaagatacaggtgacctggtactgcttgatgtatgtccccttacacttggtattgaaactgtgggaggtgtcatgaccaaactgattccaaggaacacagtggtgcctaccaagaagtctcagatcttttctacagcttctgataatcaaccaactgttacaatcaaggtctatgaaggtgaaagacccctgacaaaagacaatcatcttctgggtacatttgatctgactggaattcctcctgctcctcgtggggtcccacagattgaagtcacctttgagatagatgtgaatggtattcttcgagtgacagctgaagacaagggtacagggaacaaaaataagatcacaatcaccaatgaccagaatcgcctgacacctgaagaaatcgaaaggatggttaatgatgctgagaagtttgctgaggaagacaaaaagctcaaggagcgcattgatactagaaatgagttggaaagctatgcctattctctaaagaatcagattggagataaagaaaagctgggaggtaaactttcctctgaagataaggagaccatggaaaaagctgtagaagaaaagattgaatggctggaaagccaccaagatgctgacattgaagacttcaaagctaagaagaaggaactggaagaaattgttcaaccaattatcagcaaactctatggaagtgcaggccctcccccaactggtgaagaggatacagcagaaaaagatgagttgtagacactgatctgctagtgctgtaatattgtaaatactggactcaggaacttttgttaggaaaaaattgaaagaacttaagtctcgaatgtaattggaatcttcacctcagagtggagttgaaactgctatagcctaagcggctgtttactgcttttcattagcagttgctcacatgtctttgggtgggggggagaagaagaattggccatcttaaaaagcgggtaaaaaacctgggttagggtgtgtgttcaccttcaaaatgttctatttaacaactgggtcatgtgcatctggtgtaggaagttttttctaccataagtgacaccaataaatgtttgttatttacactggtctaatgtttgtgagaagcttctaattagatcaattacttattttaggaaatttaagactagatactcgtgtgtggggtgaggggagggagtatttggtatgttgggataaggaaacacttctatttaatgcttccagggatttttttttttttttttaaccctcctgggcccaagtgatccttccacctcagtctcccagctaattgagaccacaggcttgttaccaccatgctcggcttttgcattaatctaagaaaaggggagagaagttaatccacatctttactcaggcaaggggcatttcacagtgcccaagagtggggttttcttgaacatacttggtttcctatttccccttatctttctaaaactgcctttctggtggctttttttaaaattattactaatgatgcttttatagctgcttggattctctgagaaatgatggggagtgagtgatcactggtattaactttatacacttggatttcatttgtaactttaggatgtaaaggtatattgtgaaccctagctgtgtcagaatctccatccctgaaatttctcattagtggtactggggtgggatcttggatggtgacattgaaactacactaaatcccctcactatgaatgggttgttaaaggcaatggtttgtgtcaaaactggtttaggattacttagattgtgttcctgaagaaaagagtccaggtaaatggtatgatcaataaaggacaggctggtgctaacataaaatccaatattgtaatcctagcactttgggaggccaaggcgggtggatcacaaggtcaagagatagagaccatctttgccaacatggtgaaactccatctctactgaaaatacaaaaattagctgggcgtggtagtgcaagctgaaggctgaggcaggagaatcactcgaacccgggaggcagaggttgcagtgagccgagatcacaccactgtactccagcccggcactccagcctggcgacaagagtgagactccacctcaaaaaaaaaaaaaagaatccaatactgcccaaggataggtattttatagatgggcaactggctgaaaggttaattctctagggctagtagaactggatcccaacaccaaactcttaattagacctaggcctcagctgcactgcccgaaaagcatttgggcagaccctgagcagaatactggtctcaggccaagcccaatacagccattaaagatgacctacagtgctgtgtaccctggggcaatagggttaaatggtagttagcaactagggctagtcttcccttacctcaaaggctctcactaccgtggaccacctagtctgtaactctttctgaggagctgttactgaatattaaaaagatagacttcaa

SEQ ID NO: 139816 - DNA, 2371 bp, Homo sapiens
  Payload ID: 7421
  Gene Symbol: HSPA6
  Gene Name: heat shock 70kDa protein 6 (HSP70B')
  Uniprot ID: P17066
  ENST ID: ENST00000309758
  CDS Start-End: 120-2051
agatccgagccgggctggctgcagagaaaccgcagggagagcctcactgctgagcgcccctcgacggcggagcggcagcagcctccgtggcctccagcatccgacaagaagcttcagccatgcaggccccacgggagctcgcggtgggcatcgacctgggcaccacctactcgtgcgtgggcgtgtttcagcagggccgcgtggagatcctggccaacgaccagggcaaccgcaccacgcccagctacgtggccttcaccgacaccgagcggctggtcggggacgcggccaagagccaggcggccctgaacccccacaacaccgtgttcgatgccaagcggctgatcgggcgcaagttcgcggacaccacggtgcagtcggacatgaagcactggcccttccgggtggtgagcgagggcggcaagcccaaggtgcgcgtatgctaccgcggggaggacaagacgttctaccccgaggagatctcgtccatggtgctgagcaagatgaaggagacggccgaggcgtacctgggccagcccgtgaagcacgcagtgatcaccgtgcccgcctatttcaatgactcgcagcgccaggccaccaaggacgcgggggccatcgcggggctcaacgtgttgcggatcatcaatgagcccacggcagctgccatcgcctatgggctggaccggcggggcgcgggagagcgcaacgtgctcatttttgacctgggtgggggcaccttcgatgtgtcggttctctccattgacgctggtgtctttgaggtgaaagccactgctggagatacccacctgggaggagaggacttcgacaaccggctcgtgaaccacttcatggaagaattccggcggaagcatgggaaggacctgagcgggaacaagcgtgccctgcgcaggctgcgcacagcctgtgagcgcgccaagcgcaccctgtcctccagcacccaggccaccctggagatagactccctgttcgagggcgtggacttctacacgtccatcactcgtgcccgctttgaggaactgtgctcagacctcttccgcagcaccctggagccggtggagaaggccctgcgggatgccaagctggacaaggcccagattcatgacgtcgtcctggtggggggctccacacgcatccccaaggtgcagaagttgctgcaggacttcttcaacggcaaggagctgaacaagagcatcaaccctgatgaggctgtggcctatggggctgctgtgcaggcggccgtgttgatgggggacaaatgtgagaaagtgcaggatctcctgctgctggatgtggctcccctgtctctggggctggagacagcaggtggggtgatgaccacgctgatccagaggaacgccactatccccaccaagcagacccagactttcaccacctactcggacaaccagcctggggtcttcatccaggtgtatgagggtgagagggccatgaccaaggacaacaacctgctggggcgttttgaactcagtggcatccctcctgccccacgtggagtcccccagatagaggtgacttttgacattgatgctaatggcatcctgagcgtgacagccactgacaggagcacaggtaaggctaacaagatcaccatcaccaatgacaagggccggctgagcaaggaggaggtggagaggatggttcatgaagccgagcagtacaaggctgaggatgaggcccagagggacagagtggctgccaaaaactcgctggaggcccatgtcttccatgtgaaaggttctttgcaagaggaaagccttagggacaagattcccgaagaggacaggcgcaaaatgcaagacaagtgtcgggaagtccttgcctggctggagcacaaccagctggcagagaaggaggagtatgagcatcagaagagggagctggagcaaatctgtcgccccatcttctccaggctctatggggggcctggtgtccctgggggcagcagttgtggcactcaagcccgccagggggaccccagcaccggccccatcattgaggaggttgattgaatggcccttcgtgataagtcagctgtgactgtcagggctatgctatgggccttctagactgtcttctatgatcctgcccttcagagatgaactttccctccaaagctagaactttcttcccaggataactgaagtcttttgactttttgcggggagggcggttcatcctcttctgcttcaaataaaaagtcattaatttattaaaacttgtgtggcactttaacattgctttcacctatattttgtgtactttgttacttgcatgtatgaattttgttatgtaaaatatagttatagacctaaataagcttttaaaactc

SEQ ID NO: 139817 - DNA, 2186 bp, Homo sapiens
  Payload ID: 7422
  Gene Symbol: HSPA8
  Gene Name: heat shock 70kDa protein 8
  Uniprot ID: P11142
  ENST ID: ENST00000227378
  CDS Start-End: 9-1949
cagcaaccatgtccaagggacctgcagttggtattgatcttggcaccacctactcttgtgtgggtgttttccagcacggaaaagtcgagataattgccaatgatcagggaaaccgaaccactccaagctatgtcgcctttacggacactgaacggttgatcggtgatgccgcaaagaatcaagttgcaatgaaccccaccaacacagtttttgatgccaaacgtctgattggacgcagatttgatgatgctgttgtccagtctgatatgaaacattggccctttatggtggtgaatgatgctggcaggcccaaggtccaagtagaatacaagggagagaccaaaagcttctatccagaggaggtgtcttctatggttctgacaaagatgaaggaaattgcagaagcctaccttgggaagactgttaccaatgctgtggtcacagtgccagcttactttaatgactctcagcgtcaggctaccaaagatgctggaactattgctggtctcaatgtacttagaattattaatgagccaactgctgctgctattgcttacggcttagacaaaaaggttggagcagaaagaaacgtgctcatctttgacctgggaggtggcacttttgatgtgtcaatcctcactattgaggatggaatctttgaggtcaagtctacagctggagacacccacttgggtggagaagattttgacaaccgaatggtcaaccattttattgctgagtttaagcgcaagcataagaaggacatcagtgagaacaagagagctgtaagacgcctccgtactgcttgtgaacgtgctaagcgtaccctctcttccagcacccaggccagtattgagatcgattctctctatgaaggaatcgacttctatacctccattacccgtgcccgatttgaagaactgaatgctgacctgttccgtggcaccctggacccagtagagaaagcccttcgagatgccaaactagacaagtcacagattcatgatattgtcctggttggtggttctactcgtatccccaagattcagaagcttctccaagacttcttcaatggaaaagaactgaataagagcatcaaccctgatgaagctgttgcttatggtgcagctgtccaggcagccatcttgtctggagacaagtctgagaatgttcaagatttgctgctcttggatgtcactcctctttcccttggtattgaaactgctggtggagtcatgactgtcctcatcaagcgtaataccaccattcctaccaagcagacacagaccttcactacctattctgacaaccagcctggtgtgcttattcaggtttatgaaggcgagcgtgccatgacaaaggataacaacctgcttggcaagtttgaactcacaggcatacctcctgcaccccgaggtgttcctcagattgaagtcacttttgacattgatgccaatggtatactcaatgtctctgctgtggacaagagtacgggaaaagagaacaagattactatcactaatgacaagggccgtttgagcaaggaagacattgaacgtatggtccaggaagctgagaagtacaaagctgaagatgagaagcagagggacaaggtgtcatccaagaattcacttgagtcctatgccttcaacatgaaagcaactgttgaagatgagaaacttcaaggcaagattaacgatgaggacaaacagaagattctggacaagtgtaatgaaattatcaactggcttgataagaatcagactgctgagaaggaagaatttgaacatcaacagaaagagctggagaaagtttgcaaccccatcatcaccaagctgtaccagagtgcaggaggcatgccaggaggaatgcctgggggatttcctggtggtggagctcctccctctggtggtgcttcctcagggcccaccattgaagaggttgattaagccaaccaagtgtagatgtagcattgttccacacatttaaaacatttgaaggacctaaattcgtagcaaattctgtggcagttttaaaaagttaagctgctatagtaagttactgggcattctcaatacttgaatatggaacatatgcacaggggaaggaaataacattgcactttataaacactgtattgtaagtggaaaatgcaatgtcttaaataaaactatttaaaattggca

SEQ ID NO: 139818 - DNA, 2004 bp, Homo sapiens
  Payload ID: 7422
  Gene Symbol: HSPA8
  Gene Name: heat shock 70kDa protein 8
  Uniprot ID: P11142
  ENST ID: ENST00000453788
  CDS Start-End: 278-1759
atcgtgaggcggagcgcggtggggtgggtgcggaagggggcgaggcccgaggagtggagccgggcttgtgattgggtcttgtaagggcagccgggcgtctattggccggggaagccgtaatggcaggcagcaggggcgggccccttctggaaggttctaagatagggtataagaggcagggtggcgggcggaaaccggtctcattgaactcgcctgcagctcttgggttttttgtggcttccttcgttattggagccaggcctacaccccagcaaccatgtccaagggacctgcagttggtattgatcttggcaccacctactcttgtgtgggtgttttccagcacggaaaagtcgagataattgccaatgatcagggaaaccgaaccactccaagctatgtcgcctttacggacactgaacggttgatcggtgatgccgcaaagaatcaagttgcaatgaaccccaccaacacagtttttgatgccaaacgtctgattggacgcagatttgatgatgctgttgtccagtctgatatgaaacattggccctttatggtggtgaatgatgctggcaggcccaaggtccaagtagaatacaagggagagaccaaaagcttctatccagaggaggtgtcttctatggttctgacaaagatgaaggaaattgcagaagcctaccttgggaagactgttaccaatgctgtggtcacagtgccagcttactttaatgactctcagcgtcaggctaccaaagatgctggaactattgctggtctcaatgtacttagaattattaatgagccaactgctgctgctattgcttacggcttagacaaaaaggttggagcagaaagaaacgtgctcatctttgacctgggaggtggcacttttgatgtgtcaatcctcactattgaggatggaatctttgaggtcaagtctacagctggagacacccacttgggtggagaagattttgacaaccgaatggtcaaccattttattgctgagtttaagcgcaagcataagaaggacatcagtgagaacaagagagctgtaagacgcctccgtactgcttgtgaacgtgctaagcgtaccctctcttccagcacccaggccagtattgagatcgattctctctatgaaggaatcgacttctatacctccattacccgtgcccgatttgaagaactgaatgctgacctgttccgtggcaccctggacccagtagagaaagcccttcgagatgccaaactagacaagtcacagattcatgatattgtcctggttggtggttctactcgtatccccaagattcagaagcttctccaagacttcttcaatggaaaagaactgaataagagcatcaaccctgatgaagctgttgcttatggtgcagctgtccaggcagccatcttgtctggagacaagtctgagaatgttcaagatttgctgctcttggatgtcactcctctttcccttggtattgaaactgctggtggagtcatgactgtcctcatcaagcgtaataccaccattcctaccaagcagacacagaccttcactacctattctgacaaccagcctggtgtgcttattcaggtttatgaaggcgagcgtgccatgacaaaggataacaacctgcttggcaagtttgaactcacaggcatgccaggaggaatgcctgggggatttcctggtggtggagctcctccctctggtggtgcttcctcagggcccaccattgaagaggttgattaagccaaccaagtgtagatgtagcattgttccacacatttaaaacatttgaaggacctaaattcgtagcaaattctgtggcagttttaaaaagttaagctgctatagtaagttactgggcattctcaatacttgaatatggaacatatgcacaggggaaggaaataacattgcactttataaacactgtattgtaagtggaaaatgcaatgtcttaaataaaactatttaaaattggcaccatacaa

SEQ ID NO: 139819 - DNA, 588 bp, Homo sapiens
  Payload ID: 7422
  Gene Symbol: HSPA8
  Gene Name: heat shock 70kDa protein 8
  ENST ID: ENST00000534567
  CDS Start-End: 38-588
agttctggacctcgcgcgtgcttagacaggagcaaccatgtccaagggacctgcagttggtattgatcttggcaccacctactcttgtgtgggtgttttccagcacggaaaagtcgagataattgccaatgatcagggaaaccgaaccactccaagctatgtcgcctttacggacactgaacggttgatcggtgatgccgcaaagaatcaagttgcaatgaaccccaccaacacagtttttgatgccaaacgtctgattggacgcagatttgatgatgctgttgtccagtctgatatgaaacattggccctttatggtggtgaatgatgctggcaggcccaaggtccaagtagaatacaagggagagaccaaaagcttctatccagaggaggtgtcttctatggttctgacaaagatgaaggaaattgcagaagcctaccttgggaagactgttaccaatgctgtggtcacagtgccagcttactttaatgactctcagcgtcaggctaccaaagatgctggaactattgctggtctcaatgtacttagaattattaatgagccaactgctgctgctattgcttacgg

SEQ ID NO: 139820 - DNA, 2463 bp, Homo sapiens
  Payload ID: 7422
  Gene Symbol: HSPA8
  Gene Name: heat shock 70kDa protein 8
  Uniprot ID: P11142
  ENST ID: ENST00000534624
  CDS Start-End: 278-2218
atcgtgaggcggagcgcggtggggtgggtgcggaagggggcgaggcccgaggagtggagccgggcttgtgattgggtcttgtaagggcagccgggcgtctattggccggggaagccgtaatggcaggcagcaggggcgggccccttctggaaggttctaagatagggtataagaggcagggtggcgggcggaaaccggtctcattgaactcgcctgcagctcttgggttttttgtggcttccttcgttattggagccaggcctacaccccagcaaccatgtccaagggacctgcagttggtattgatcttggcaccacctactcttgtgtgggtgttttccagcacggaaaagtcgagataattgccaatgatcagggaaaccgaaccactccaagctatgtcgcctttacggacactgaacggttgatcggtgatgccgcaaagaatcaagttgcaatgaaccccaccaacacagtttttgatgccaaacgtctgattggacgcagatttgatgatgctgttgtccagtctgatatgaaacattggccctttatggtggtgaatgatgctggcaggcccaaggtccaagtagaatacaagggagagaccaaaagcttctatccagaggaggtgtcttctatggttctgacaaagatgaaggaaattgcagaagcctaccttgggaagactgttaccaatgctgtggtcacagtgccagcttactttaatgactctcagcgtcaggctaccaaagatgctggaactattgctggtctcaatgtacttagaattattaatgagccaactgctgctgctattgcttacggcttagacaaaaaggttggagcagaaagaaacgtgctcatctttgacctgggaggtggcacttttgatgtgtcaatcctcactattgaggatggaatctttgaggtcaagtctacagctggagacacccacttgggtggagaagattttgacaaccgaatggtcaaccattttattgctgagtttaagcgcaagcataagaaggacatcagtgagaacaagagagctgtaagacgcctccgtactgcttgtgaacgtgctaagcgtaccctctcttccagcacccaggccagtattgagatcgattctctctatgaaggaatcgacttctatacctccattacccgtgcccgatttgaagaactgaatgctgacctgttccgtggcaccctggacccagtagagaaagcccttcgagatgccaaactagacaagtcacagattcatgatattgtcctggttggtggttctactcgtatccccaagattcagaagcttctccaagacttcttcaatggaaaagaactgaataagagcatcaaccctgatgaagctgttgcttatggtgcagctgtccaggcagccatcttgtctggagacaagtctgagaatgttcaagatttgctgctcttggatgtcactcctctttcccttggtattgaaactgctggtggagtcatgactgtcctcatcaagcgtaataccaccattcctaccaagcagacacagaccttcactacctattctgacaaccagcctggtgtgcttattcaggtttatgaaggcgagcgtgccatgacaaaggataacaacctgcttggcaagtttgaactcacaggcatacctcctgcaccccgaggtgttcctcagattgaagtcacttttgacattgatgccaatggtatactcaatgtctctgctgtggacaagagtacgggaaaagagaacaagattactatcactaatgacaagggccgtttgagcaaggaagacattgaacgtatggtccaggaagctgagaagtacaaagctgaagatgagaagcagagggacaaggtgtcatccaagaattcacttgagtcctatgccttcaacatgaaagcaactgttgaagatgagaaacttcaaggcaagattaacgatgaggacaaacagaagattctggacaagtgtaatgaaattatcaactggcttgataagaatcagactgctgagaaggaagaatttgaacatcaacagaaagagctggagaaagtttgcaaccccatcatcaccaagctgtaccagagtgcaggaggcatgccaggaggaatgcctgggggatttcctggtggtggagctcctccctctggtggtgcttcctcagggcccaccattgaagaggttgattaagccaaccaagtgtagatgtagcattgttccacacatttaaaacatttgaaggacctaaattcgtagcaaattctgtggcagttttaaaaagttaagctgctatagtaagttactgggcattctcaatacttgaatatggaacatatgcacaggggaaggaaataacattgcactttataaacactgtattgtaagtggaaaatgcaatgtcttaaataaaactatttaaaattggcaccatacaa

SEQ ID NO: 139821 - DNA, 1112 bp, Homo sapiens
  Payload ID: 7422
  Gene Symbol: HSPA8
  Gene Name: heat shock 70kDa protein 8
  ENST ID: ENST00000528292
  CDS Start-End: 176-1112
gcctgcagctcttgggttttttgtggcttccttcgttattggagccaggcctacaccccagcacggaaaagtcgagataattgccaatgatcagggaaaccgaaccactccaagctatgtcgcctttacggacactgaacggttgatcggtgatgccgcaaagaatcaagttgcaatgaaccccaccaacacagtttttgatgccaaacgtctgattggacgcagatttgatgatgctgttgtccagtctgatatgaaacattggccctttatggtggtgaatgatgctggcaggcccaaggtccaagtagaatacaagggagagaccaaaagcttctatccagaggaggtgtcttctatggttctgacaaagatgaaggaaattgcagaagcctaccttgggaagactgttaccaatgctgtggtcacagtgccagcttactttaatgactctcagcgtcaggctaccaaagatgctggaactattgctggtctcaatgtacttagaattattaatgagccaactgctgctgctattgcttacggcttagacaaaaaggttggagcagaaagaaacgtgctcatctttgacctgggaggtggcacttttgatgtgtcaatcctcactattgaggatggaatctttgaggtcaagtctacagctggagacacccacttgggtggagaagattttgacaaccgaatggtcaaccattttattgctgagtttaagcgcaagcataagaaggacatcagtgagaacaagagagctgtaagacgcctccgtactgcttgtgaacgtgctaagcgtaccctctcttccagcacccaggccagtattgagatcgattctctctatgaaggaatcgacttctatacctccattacccgtgcccgatttgaagaactgaatgctgacctgttccgtggcaccctggacccagtagagaaagcccttcgagatgccaaactagacaagtcacagattcatgatattgtcctggttggtggttctactcgtatccccaagattcagaagcttctccaagacttcttcaatggaaaagaactgaataagagcatcaaccctgatgaagctgttgcttatggtg

SEQ ID NO: 139822 - DNA, 1884 bp, Homo sapiens
  Payload ID: 7422
  Gene Symbol: HSPA8
  Gene Name: heat shock 70kDa protein 8
  ENST ID: ENST00000534319
  CDS Start-End: 416-1648
tacattttggtggggggggtgctccagctgttctttcaccagcattaatccatttgctggagtttgcatatatgtaagtataatagttaccaatctgtggtcttttccttattcctagactgttaccaatgctgtggtcacagtgccagcttactttaatgactctcagcgtcaggctaccaaagatgctggaactattgctggtctcaatgtacttagaattattaatgagccaactgctgctgctattgcttacggcttagacaaaaaggttggagcagaaagaaacgtgctcatctttgacctgggaggtggcacttttgatgtgtcaatcctcactattgaggatggaatctttgaggtcaagtctacagctggagacacccacttgggtggagaagattttgacaaccgaatggtcaaccattttattgctgagtttaagcgcaagcataagaaggacatcagtgagaacaagagagctgtaagacgcctccgtactgcttgtgaacgtgctaagcgtaccctctcttccagcacccaggccagtattgagatcgattctctctatgaaggaatcgacttctatacctccattacccgtgcccgatttgaagaactgaatgctgacctgttccgtggcaccctggacccagtagagaaagcccttcgagatgccaaactagacaagtcacagattcatgatattgtcctggttggtggttctactcgtatccccaagattcagaagcttctccaagacttcttcaatggaaaagaactgaataagagcatcaaccctgatgaagctgttgcttatggtgcagctgtccaggcagccatcttgtctggagacaagtctgagaatgttcaagatttgctgctcttggatgtcactcctctttcccttggtattgaaactgctggtggagtcatgactgtcctcatcaagcgtaataccaccattcctaccaagcagacacagaccttcactacctattctgacaaccagcctggtgtgcttattcaggtttatgaaggcgagcgtgccatgacaaaggataacaacctgcttggcaagtttgaactcacaggcatacctcctgcaccccgaggtgttcctcagattgaagtcacttttgacattgatgccaatggtatactcaatgtctctgctgtggacaagagtacgggaaaagagaacaagattactatcactaatgacaagggccgtttgagcaaggaagacattgaacgtatggtccaggaagctgagaagtacaaagctgaagatgagaagcagagggacaaggtgtcatccaagaattcacttgagtcctatgccttcaacatgaaagcaactgttgaagatgagaaacttcaaggcaagattaacgatgaggacaaacagaagattctggacaagtgtaatgaaattatcaactggcttgataagaatcagactgctgagaaggaagaatttgaacatcaacagaaagagctggagaaagtttgcaaccccatcatcaccaagctgtaccagagtgcaggaggcatgccaggaggaatgcctgggggatttcctggtggtggagctcctccctctggtggtgcttcctcagggcccaccattgaagaggttgattaagccaaccaagtgtagatgtagcattgttccacacatttaaaacatttgaaggacctaaattcgtagcaaattctgtggcagttttaaaaagttaagctgctatagtaagttactgggcattctcaatacttgaatatggaacatatgcacaggggaaggaaataacattgcactttataaacactgtattgtaagtggaaaatgcaatgtcttaaataaaactatttaaaattggc

SEQ ID NO: 139823 - DNA, 1924 bp, Homo sapiens
  Payload ID: 7422
  Gene Symbol: HSPA8
  Gene Name: heat shock 70kDa protein 8
  ENST ID: ENST00000526110
  CDS Start-End: 8-1891
agcaaccatgtccaagggacctgcagttggtattgatcttggcaccacctactcttgtgtgggtgttttccagcacggaaaagtcgagataattgccaatgatcagggaaaccgaaccactccaagctatgtcgcctttacggacactgaacggttgatcggtgatgccgcaaagaatcaagttgcaatgaaccccaccaacacagtttttgatgccaaacgtctgattggacgcagatttgatgatgctgttgtccagtctgatatgaaacattggccctttatggtggtgaatgatgctggcaggcccaaggtccaagtagaatacaagggagagaccaaaagcttctatccagaggaggtgtcttctatggttctgacaaagatgaaggaaattgcagaagcctaccttgggaaggctaccaaagatgctggaactattgctggtctcaatgtacttagaattattaatgagccaactgctgctgctattgcttacggcttagacaaaaaggttggagcagaaagaaacgtgctcatctttgacctgggaggtggcacttttgatgtgtcaatcctcactattgaggatggaatctttgaggtcaagtctacagctggagacacccacttgggtggagaagattttgacaaccgaatggtcaaccattttattgctgagtttaagcgcaagcataagaaggacatcagtgagaacaagagagctgtaagacgcctccgtactgcttgtgaacgtgctaagcgtaccctctcttccagcacccaggccagtattgagatcgattctctctatgaaggaatcgacttctatacctccattacccgtgcccgatttgaagaactgaatgctgacctgttccgtggcaccctggacccagtagagaaagcccttcgagatgccaaactagacaagtcacagattcatgatattgtcctggttggtggttctactcgtatccccaagattcagaagcttctccaagacttcttcaatggaaaagaactgaataagagcatcaaccctgatgaagctgttgcttatggtgcagctgtccaggcagccatcttgtctggagacaagtctgagaatgttcaagatttgctgctcttggatgtcactcctctttcccttggtattgaaactgctggtggagtcatgactgtcctcatcaagcgtaataccaccattcctaccaagcagacacagaccttcactacctattctgacaaccagcctggtgtgcttattcaggtttatgaaggcgagcgtgccatgacaaaggataacaacctgcttggcaagtttgaactcacaggcatacctcctgcaccccgaggtgttcctcagattgaagtcacttttgacattgatgccaatggtatactcaatgtctctgctgtggacaagagtacgggaaaagagaacaagattactatcactaatgacaagggccgtttgagcaaggaagacattgaacgtatggtccaggaagctgagaagtacaaagctgaagatgagaagcagagggacaaggtgtcatccaagaattcacttgagtcctatgccttcaacatgaaagcaactgttgaagatgagaaacttcaaggcaagattaacgatgaggacaaacagaagattctggacaagtgtaatgaaattatcaactggcttgataagaatcagactgctgagaaggaagaatttgaacatcaacagaaagagctggagaaagtttgcaaccccatcatcaccaagctgtaccagagtgcaggaggcatgccaggaggaatgcctgggggatttcctggtggtggagctcctccctctggtggtgcttcctcagggcccaccattgaagaggttgattaagccaaccaagtgtagatgtagcattgttccaca

SEQ ID NO: 139824 - DNA, 674 bp, Homo sapiens
  Payload ID: 7422
  Gene Symbol: HSPA8
  Gene Name: heat shock 70kDa protein 8
  ENST ID: ENST00000532182
  CDS Start-End: 160-674
gtgcagcctccacacaggcctgttgggcttgctgaggcttgggggttctgagaatctcgtcgaggcgagtgtgcggctccttctaccggcttaaagggcctcagttttcggtgggatggcagcggtatttggttgcagccggcaggacggaaatcaaccatgtccaagggacctgcagttggtattgatcttggcaccacctactcttgtgtgggtgttttccagcacggaaaagtcgagataattgccaatgatcagggaaaccgaaccactccaagctatgtcgcctttacggacactgaacggttgatcggtgatgccgcaaagaatcaagttgcaatgaaccccaccaacacagtttttgatgccaaacgtctgattggacgcagatttgatgatgctgttgtccagtctgatatgaaacattggccctttatggtggtgaatgatgctggcaggcccaaggtccaagtagaatacaagggagagaccaaaagcttctatccagaggaggtgtcttctatggttctgacaaagatgaaggaaattgcagaagcctaccttgggaagactgttaccaatgctgtggtcacagtgccagcttactttaatgactctcagcgtcaggctaccaaagatgctggaactattgctggtctcaatgtacttagaat

SEQ ID NO: 139825 - DNA, 536 bp, Homo sapiens
  Payload ID: 7422
  Gene Symbol: HSPA8
  Gene Name: heat shock 70kDa protein 8
  ENST ID: ENST00000524590
  CDS Start-End: 126-536
gtctgggagcgtgcagcctccacacaggcctgttgggcttgctgaggcttgggggttctgagaatctcgtcgaggcgagtgtgcggctccttctaccggcttaaagggcctcagttttcgcaaccatgtccaagggacctgcagttggtattgatcttggcaccacctactcttgtgtgggtgttttccagcacggaaaagtcgagataattgccaatgatcagggaaaccgaaccactccaagctatgtcgcctttacggacactgaacggttgatcggtgatgccgcaaagaatcaagttgcaatgaaccccaccaacacagtttttgatgccaaacgtctgattggacgcagatttgatgatgctgttgtccagtctgatatgaaacattggccctttatggtggtgaatgatgctggcaggcccaaggtccaagtagaatacaagggagagaccaaaagcttctatccagaggaggtgtcttctatggttctgacaaagatgaaggaaattgcagaagcctaccttgggaag

SEQ ID NO: 139826 - DNA, 648 bp, Homo sapiens
  Payload ID: 7422
  Gene Symbol: HSPA8
  Gene Name: heat shock 70kDa protein 8
  ENST ID: ENST00000530391
  CDS Start-End: 252-648
gggagacgcccggcggccgcgtggcgggggagggttgctgcatcggtttgcctggcgcgcggggaagtggagccagcgttttctttcacccagttccctgcttagtccagtcccaccgtggttcttcagagctgttcttggcgtgcttccagtatgggggtacattccggagtagttaaaagcccgttgactcccgggggcactggcacctggcgagggaggggaacagacagtgctcagttcgggcaaccatgtccaagggacctgcagttggtattgatcttggcaccacctactcttgtgtgggtgttttccagcacggaaaagtcgagataattgccaatgatcagggaaaccgaaccactccaagctatgtcgcctttacggacactgaacggttgatcggtgatgccgcaaagaatcaagttgcaatgaaccccaccaacacagtttttgatgccaaacgtctgattggacgcagatttgatgatgctgttgtccagtctgatatgaaacattggccctttatggtggtgaatgatgctggcaggcccaaggtccaagtagaatacaagggagagaccaaaagcttctatccagaggaggtgtcttctatggttctgacaaagatgaaggaaattgcagaag

SEQ ID NO: 139827 - DNA, 740 bp, Homo sapiens
  Payload ID: 7422
  Gene Symbol: HSPA8
  Gene Name: heat shock 70kDa protein 8
  ENST ID: ENST00000526686
  CDS Start-End: 289-740
actacctattctgacaaccagcctggtgtgcttattcaggtatgtttctgtacttctcttgtttggcttactgataacagataaagggaagtcttgactgactcgctatgatgatggattccaaaaccattcgtagtttccaccagaaagtcttatgttggccagttccttccttggatgtttgagcgaccattcttccttagcaggaccctagcactgtcacagacctggagtccattgtagtaatttgttttatttcctaccaaggtttatgaaggcgagcgtgccatgacaaaggataacaacctgcttggcaagtttgaactcacaggcatacctcctgcaccccgaggtgttcctcagattgaagtcacttttgacattgatgccaatggtatactcaatgtctctgctgtggacaagagtacgggaaaagagaacaagattactatcactaatgacaagggccgtttgagcaaggaagacattgaacgtatggtccaggaagctgagaagtacaaagctgaagatgagaagcagagggacaaggtgtcatccaagaattcacttgagtcctatgccttcaacatgaaagcaactgttgaagatgagaaacttcaaggcaagattaacgatgaggacaaacagaagattctggacaagtgtaatgaaattatcaactggcttgataagaatcagactgctgagaaggaagaatttgaacatcaacagaaagagct

SEQ ID NO: 139828 - DNA, 1048 bp, Homo sapiens
  Payload ID: 7422
  Gene Symbol: HSPA8
  Gene Name: heat shock 70kDa protein 8
  ENST ID: ENST00000525624
  CDS Start-End: 487-1048
accatttaaacctgtttattttataaacaacggggaaatgtagggcttgggctagttggggaaggactgagccaagaagccgaatctgttctagacggaggtgggaaggggcctaacggtcagggctcagagaagcggtttcgccttcttttccgcggagggatccagacacgaccgcgtcctgaggcggttctgaaaagccgggccccttaaacctctgcgtcgggggctgcctcccgacagttgccgtagggaaatgcaggtgctgggaggcctgccgagctaacccgccccaccccgcggcggcctggcggctccctccaatcccaatcctggggggccgtgagcgagcagccctagtggcaccctgaagccggaaccttcgccccagcccctcggggtcagcccttgtccaaagccacgctatgaaatacagattcgcgaaacccggggcacttagaggcccgtctggaacacgaagcaaccatgtccaagggacctgcagttggtattgatcttggcaccacctactcttgtgtgggtgttttccagcacggaaaagtcgagataattgccaatgatcagggaaaccgaaccactccaagctatgtcgcctttacggacactgaacggttgatcggtgatgccgcaaagaatcaagttgcaatgaaccccaccaacacagtttttgatgccaaacgtctgattggacgcagatttgatgatgctgttgtccagtctgatatgaaacattggccctttatggtggtgaatgatgctggcaggcccaaggtccaagtagaatacaagggagagaccaaaagcttctatccagaggaggtgtcttctatggttctgacaaagatgaaggaaattgcagaagcctaccttgggaagactgttaccaatgctgtggtcacagtgccagcttactttaatgactctcagcgtcaggctaccaaagatgctggaactattgctggtctcaatgtacttagaattattaatgagccaactgctgctgctattgcttacggcttagacaaaa

SEQ ID NO: 139829 - DNA, 963 bp, Homo sapiens
  Payload ID: 7422
  Gene Symbol: HSPA8
  Gene Name: heat shock 70kDa protein 8
  ENST ID: ENST00000524552
  CDS Start-End: 295-963
ctaaaggcaggcaggcccaaggtgactcgctgtgatgagtgattgttaaacattcgtagtttccaccaaaagcttggctaatgatggcaacaccttccttggatgtctgagcgagtgatagttaaaacaggagctatgtactgggttttcttttaacttcttttaacgttaactttttgtttgctagctgtccaggcagccatcttgtctggagacaagtctgagaatgttcaagatttgctgctcttggatgtcactcctctttcccttggtattgaaactgctggtggagtcatgactgtcctcatcaagcgtaataccaccattcctaccaagcagacacagaccttcactacctattctgacaaccagcctggtgtgcttattcaggtttatgaaggcgagcgtgccatgacaaaggataacaacctgcttggcaagtttgaactcacaggcatacctcctgcaccccgaggtgttcctcagattgaagtcacttttgacattgatgccaatggtatactcaatgtctctgctgtggacaagagtacgggaaaagagaacaagattactatcactaatgacaagggccgtttgagcaaggaagacattgaacgtatggtccaggaagctgagaagtacaaagctgaagatgagaagcagagggacaaggtgtcatccaagaattcacttgagtcctatgccttcaacatgaaagcaactgttgaagatgagaaacttcaaggcaagattaacgatgaggacaaacagaagattctggacaagtgtaatgaaattatcaactggcttgataagaatcagactgctgagaaggaagaatttgaacatcaacagaaagagctggagaaagtttgcaaccccatcatcaccaagctgtaccagagtgcaggaggcatgccaggaggaatgcctgggggatttcctggtggtggagctcctccc

SEQ ID NO: 139830 - DNA, 579 bp, Homo sapiens
  Payload ID: 7422
  Gene Symbol: HSPA8
  Gene Name: heat shock 70kDa protein 8
  ENST ID: ENST00000527387
  CDS Start-End: 46-579
gctgcggtgagtgcgttatcgtgaggcggagcgcggtgggcaaccatgtccaagggacctgcagttggtattgatcttggcaccacctactcttgtgtgggtgttttccagcacggaaaagtcgagataattgccaatgatcagggaaaccgaaccactccaagctatgtcgcctttacggacactgaacggttgatcggtgatgccgcaaagaatcaagttgcaatgaaccccaccaacacagtttttgatgccaaacgtctgattggacgcagatttgatgatgctgttgtccagtctgatatgaaacattggccctttatggtggtgaatgatgctggcaggcccaaggtccaagtagaatacaagggagagaccaaaagcttctatccagaggaggtgtcttctatggttctgacaaagatgaaggaaattgcagaagcctaccttgggaagactgttaccaatgctgtggtcacagtgccagcttactttaatgactctcagcgtcaggctaccaaagatgctggaactattgctggtctcaatgtacttagaattattaatgagccaactgct

SEQ ID NO: 139831 - DNA, 583 bp, Homo sapiens
  Payload ID: 7422
  Gene Symbol: HSPA8
  Gene Name: heat shock 70kDa protein 8
  ENST ID: ENST00000525463
  CDS Start-End: 79-583
ctcattgaactcgcctgcagctcttgggttttttgtggcttccttcgttattggagccaggcctacaccccagcaaccatgtccaagggacctgcagttggtattgatcttggcaccacctactcttgtgtgggtgttttccagcacggaaaagtcgagataattgccaatgatcagggaaaccgaaccactccaagctatgtcgcctttacggacactgaacggttgatcggtgatgccgcaaagaatcaagttgcaatgaaccccaccaacacagtttttgagaccaaaagcttctatccagaggaggtgtcttctatggttctgacaaagatgaaggaaattgcagaagcctaccttgggaagactgttaccaatgctgtggtcacagtgccagcttactttaatgactctcagcgtcaggctaccaaagatgctggaactattgctggtctcaatgtacttagaattattaatgagccaactgctgctgctattgcttacggcttagacaaaaaggttggagcagaaagaaacgtgctcatctttgacctgggaggtggcacttttgatgtgtcaatcc

SEQ ID NO: 139832 - DNA, 2306 bp, Homo sapiens
  Payload ID: 7422
  Gene Symbol: HSPA8
  Gene Name: heat shock 70kDa protein 8
  Uniprot ID: P11142
  ENST ID: ENST00000532636
  CDS Start-End: 121-2061
ggtttgcctggcgcgcggggaagtggagccagcgttttctttcacccagttccctgcttagtccagtcccaccgtggttcttcagagctgttcttggcgtgcttccagtatggggcaaccatgtccaagggacctgcagttggtattgatcttggcaccacctactcttgtgtgggtgttttccagcacggaaaagtcgagataattgccaatgatcagggaaaccgaaccactccaagctatgtcgcctttacggacactgaacggttgatcggtgatgccgcaaagaatcaagttgcaatgaaccccaccaacacagtttttgatgccaaacgtctgattggacgcagatttgatgatgctgttgtccagtctgatatgaaacattggccctttatggtggtgaatgatgctggcaggcccaaggtccaagtagaatacaagggagagaccaaaagcttctatccagaggaggtgtcttctatggttctgacaaagatgaaggaaattgcagaagcctaccttgggaagactgttaccaatgctgtggtcacagtgccagcttactttaatgactctcagcgtcaggctaccaaagatgctggaactattgctggtctcaatgtacttagaattattaatgagccaactgctgctgctattgcttacggcttagacaaaaaggttggagcagaaagaaacgtgctcatctttgacctgggaggtggcacttttgatgtgtcaatcctcactattgaggatggaatctttgaggtcaagtctacagctggagacacccacttgggtggagaagattttgacaaccgaatggtcaaccattttattgctgagtttaagcgcaagcataagaaggacatcagtgagaacaagagagctgtaagacgcctccgtactgcttgtgaacgtgctaagcgtaccctctcttccagcacccaggccagtattgagatcgattctctctatgaaggaatcgacttctatacctccattacccgtgcccgatttgaagaactgaatgctgacctgttccgtggcaccctggacccagtagagaaagcccttcgagatgccaaactagacaagtcacagattcatgatattgtcctggttggtggttctactcgtatccccaagattcagaagcttctccaagacttcttcaatggaaaagaactgaataagagcatcaaccctgatgaagctgttgcttatggtgcagctgtccaggcagccatcttgtctggagacaagtctgagaatgttcaagatttgctgctcttggatgtcactcctctttcccttggtattgaaactgctggtggagtcatgactgtcctcatcaagcgtaataccaccattcctaccaagcagacacagaccttcactacctattctgacaaccagcctggtgtgcttattcaggtttatgaaggcgagcgtgccatgacaaaggataacaacctgcttggcaagtttgaactcacaggcatacctcctgcaccccgaggtgttcctcagattgaagtcacttttgacattgatgccaatggtatactcaatgtctctgctgtggacaagagtacgggaaaagagaacaagattactatcactaatgacaagggccgtttgagcaaggaagacattgaacgtatggtccaggaagctgagaagtacaaagctgaagatgagaagcagagggacaaggtgtcatccaagaattcacttgagtcctatgccttcaacatgaaagcaactgttgaagatgagaaacttcaaggcaagattaacgatgaggacaaacagaagattctggacaagtgtaatgaaattatcaactggcttgataagaatcagactgctgagaaggaagaatttgaacatcaacagaaagagctggagaaagtttgcaaccccatcatcaccaagctgtaccagagtgcaggaggcatgccaggaggaatgcctgggggatttcctggtggtggagctcctccctctggtggtgcttcctcagggcccaccattgaagaggttgattaagccaaccaagtgtagatgtagcattgttccacacatttaaaacatttgaaggacctaaattcgtagcaaattctgtggcagttttaaaaagttaagctgctatagtaagttactgggcattctcaatacttgaatatggaacatatgcacaggggaaggaaataacattgcactttataaacactgtattgtaagtggaaaatgcaatgtcttaaataaaactatttaaaattggcaccatacaa

SEQ ID NO: 139833 - DNA, 1826 bp, Homo sapiens
  Payload ID: 7422
  Gene Symbol: HSPA8
  Gene Name: heat shock 70kDa protein 8
  ENST ID: ENST00000533540
  CDS Start-End: 79-1581
ctcattgaactcgcctgcagctcttgggttttttgtggcttccttcgttattggagccaggcctacaccccagcaaccatgtccaagggacctgcagttggtattgatcttggcaccacctactcttgtgtgggtgttttccagcacggaaaagtcgagataattgccaatgatcagggaaaccgaaccactccaagctatgtcgcctttacggacactgaacggttgatcggtgatgccgcaaagaatcaagttgcaatgaaccccaccaacacagtttttgatgccaaacgtctgattggacgcagatttgatgatgctgttgtccagtctgatatgaaacattggccctttatggtggtgaatgatgctggcaggcccaagcataagaaggacatcagtgagaacaagagagctgtaagacgcctccgtactgcttgtgaacgtgctaagcgtaccctctcttccagcacccaggccagtattgagatcgattctctctatgaaggaatcgacttctatacctccattacccgtgcccgatttgaagaactgaatgctgacctgttccgtggcaccctggacccagtagagaaagcccttcgagatgccaaactagacaagtcacagattcatgatattgtcctggttggtggttctactcgtatccccaagattcagaagcttctccaagacttcttcaatggaaaagaactgaataagagcatcaaccctgatgaagctgttgcttatggtgcagctgtccaggcagccatcttgtctggagacaagtctgagaatgttcaagatttgctgctcttggatgtcactcctctttcccttggtattgaaactgctggtggagtcatgactgtcctcatcaagcgtaataccaccattcctaccaagcagacacagaccttcactacctattctgacaaccagcctggtgtgcttattcaggtttatgaaggcgagcgtgccatgacaaaggataacaacctgcttggcaagtttgaactcacaggcatacctcctgcaccccgaggtgttcctcagattgaagtcacttttgacattgatgccaatggtatactcaatgtctctgctgtggacaagagtacgggaaaagagaacaagattactatcactaatgacaagggccgtttgagcaaggaagacattgaacgtatggtccaggaagctgagaagtacaaagctgaagatgagaagcagagggacaaggtgtcatccaagaattcacttgagtcctatgccttcaacatgaaagcaactgttgaagatgagaaacttcaaggcaagattaacgatgaggacaaacagaagattctggacaagtgtaatgaaattatcaactggcttgataagaatcagactgctgagaaggaagaatttgaacatcaacagaaagagctggagaaagtttgcaaccccatcatcaccaagctgtaccagagtgcaggaggcatgccaggaggaatgcctgggggatttcctggtggtggagctcctccctctggtggtgcttcctcagggcccaccattgaagaggttgattaagccaaccaagtgtagatgtagcattgttccacacatttaaaacatttgaaggacctaaattcgtagcaaattctgtggcagttttaaaaagttaagctgctatagtaagttactgggcattctcaatacttgaatatggaacatatgcacaggggaaggaaataacattgcactttataaacactgtattgtaagtggaaaatgcaatgtcttaaataaaactatttaaaattggcaccatacaa

SEQ ID NO: 139834 - DNA, 3321 bp, Homo sapiens
  Payload ID: 7423
  Gene Symbol: HSPA9
  Gene Name: heat shock 70kDa protein 9 (mortalin)
  Uniprot ID: P38646
  ENST ID: ENST00000297185
  CDS Start-End: 127-2166
gtgaccaacccccgcccctcaccccacgtggttggaggtttccagaagcgctgccgccaccgcatcgcgcagctctttgccgtcggagcgcttgtttgctgcctcgtactcctccatttatccgccatgataagtgccagccgagctgcagcagcccgtctcgtgggcgccgcagcctcccggggccctacggccgcccgccaccaggatagctggaatggccttagtcatgaggcttttagacttgtttcaaggcgggattatgcatcagaagcaatcaagggagcagttgttggtattgatttgggtactaccaactcctgcgtggcagttatggaaggtaaacaagcaaaggtgctggagaatgccgaaggtgccagaaccaccccttcagttgtggcctttacagcagatggtgagcgacttgttggaatgccggccaagcgacaggctgtcaccaacccaaacaatacattttatgctaccaagcgtctcattggccggcgatatgatgatcctgaagtacagaaagacattaaaaatgttccctttaaaattgtccgtgcctccaatggtgatgcctgggttgaggctcatgggaaattgtattctccgagtcagattggagcatttgtgttgatgaagatgaaagagactgcagaaaattacttggggcacacagcaaaaaatgctgtgatcacagtcccagcttatttcaatgactcgcagagacaggccactaaagatgctggccagatatctggactgaatgtgcttcgggtgattaatgagcccacagctgctgctcttgcctatggtctagacaaatcagaagacaaagtcattgctgtatatgatttaggtggtggaacttttgatatttctatcctggaaattcagaaaggagtatttgaggtgaaatccacaaatggggataccttcttaggtggggaagactttgaccaggccttgctacggcacattgtgaaggagttcaagagagagacaggggttgatttgactaaagacaacatggcacttcagagggtacgggaagctgctgaaaaggctaaatgtgaactctcctcatctgtgcagactgacatcaatttgccctatcttacaatggattcttctggacccaagcatttgaatatgaagttgacccgtgctcaatttgaagggattgtcactgatctaatcagaaggactatcgctccatgccaaaaagctatgcaagatgcagaagtcagcaagagtgacataggagaagtgattcttgtgggtggcatgactaggatgcccaaggttcagcagactgtacaggatctttttggcagagccccaagtaaagctgtcaatcctgatgaggctgtggccattggagctgccattcagggaggtgtgttggccggcgatgtcacggatgtgctgctccttgatgtcactcccctgtctctgggtattgaaactctaggaggtgtctttaccaaacttattaataggaataccactattccaaccaagaagagccaggtattctctactgccgctgatggtcaaacgcaagtggaaattaaagtgtgtcagggtgaaagagagatggctggagacaacaaactccttggacagtttactttgattggaattccaccagcccctcgtggagttcctcagattgaagttacatttgacattgatgccaatgggatagtacatgtttctgctaaagataaaggcacaggacgtgagcagcagattgtaatccagtcttctggtggattaagcaaagatgatattgaaaatatggttaaaaatgcagagaaatatgctgaagaagaccggcgaaagaaggaacgagttgaagcagttaatatggctgaaggaatcattcacgacacagaaaccaagatggaagaattcaaggaccaattacctgctgatgagtgcaacaagctgaaagaagagatttccaaaatgagggagctcctggctagaaaagacagcgaaacaggagaaaatattagacaggcagcatcctctcttcagcaggcatcactgaagctgttcgaaatggcatacaaaaagatggcatctgagcgagaaggctctggaagttctggcactggggaacaaaaggaagatcaaaaggaggaaaaacagtaataatagcagaaattttgaagccagaaggacaacatatgaagcttaggagtgaagagacttcctgagcagaaatgggcgaacttcagtctttttactgtgtttttgcagtattctatatataatttccttaatttgtaaatttagtgaccattagctagtgatcatttaatggacagtgattctaacagtataaagttcacaatattctatgtccctagcctgtcatttttcagctgcatgtaaaaggaggtaggatgaattgatcattataaagatttaactattttatgctgaagtgaccatattttcaaggggtgaaaccatctcgcacacagcaatgaaggtagtcatccatagacttgaaatgagaccacatatggggatgagatccttctagttagcctagtactgctgtactggcctgtatgtacatggggtccttcaactgaggccttgcaagtcaagctggctgtgccatgtttgtagatggggcagaggaatctagaacaatgggaaacttagctatttatattaggtacagctattaaaacaaggtaggaatgaggctagacctttaacttccctaaggcatacttttctagctaccttctgccctgtgtctggcacctacatccttgatgattgttctcttacccattctggaatttttttttttttaaataaatacagaaagcatcttgatctcttgtttgtgaggggtgatgccctgagatttagcttcaagaatatgccatggctcatgcttcccatatttcccaaagagggaaatacaggatttgctaacactggttaaaaatgcaaattcaagatttggaagggctgttataatgaaataatgagcagtatcagcatgtgcaaatcttgtttgaaggattttattttctccccttagacctttggtacatttagaatcttgaaagtttctagatctctaacatgaaagtttctagatctctaacatgaaagtttttagatctctaacatgaaaaccaaggtggctattttcaggttgctttcagctccaagtagaaataaccagaattggcttacattaaagaaactgcatctagaaataagtcctaagatactatttctatggctcaaaaataaaaggaacccagatttctttcccta

SEQ ID NO: 139835 - DNA, 518 bp, Homo sapiens
  Payload ID: 7423
  Gene Symbol: HSPA9
  Gene Name: heat shock 70kDa protein 9 (mortalin)
  ENST ID: ENST00000505110
  CDS Start-End: 84-200
agaagcgctgccgccaccgcatcgcgcagctctttgccgtcggagcgcttgtttgctgcctcgtactcctccatttatccgccatgataagtgccagccgagctgcagcagcccgtctcgtgggcgccgcagcctcccggggccctacggccgcccgccaccagatcagaagcaatcaagggagcagttgttggtattgatttgggtactaccaactcctgcgtggcagttatggaaggtaaacaagcaaaggtgctggagaatgccgaaggtgccagaaccaccccttcagttgtggcctttacagcagatggtgagcgacttgttggaatgccggccaagcgacaggctgtcaccaacccaaacaatacattttatgctaccaagcgtctcattggccggcgatatgatgatcctgaagtacagaaagacattaaaaatgttccctttaaaattgtccgtgcctccaatggtgatgcctgggttgaggctcatgggaaattgtattctccgagtca

SEQ ID NO: 139836 - DNA, 887 bp, Homo sapiens
  Payload ID: 7423
  Gene Symbol: HSPA9
  Gene Name: heat shock 70kDa protein 9 (mortalin)
  ENST ID: ENST00000504902
  CDS Start-End: 1-301
cgtactcctccatttatccgccatgataagtgccagccgagctgcagcagcccgtctcgtgggcgccgcagcctcccggggccctacggccgcccgccaccaggatagctggaatggccttagtcatgaggcttttagacttgtttcaaggcgggattatgcatcagaagcaatcaagggagcagttgttggtattgatttgggtactaccaactcctgcgtggcagttatggaaggtgctggagaatgccgaaggtgccagaaccaccccttcagttgtggcctttacagcagatggtgagcgacttgttggaatgccggccaagcgacaggctgtcaccaacccaaacaatacattttatgctaccaagcgtctcattggccggcgatatgatgatcctgaagtacagaaagacattaaaaatgttccctttaaaattgtccgtgcctccaatggtgatgcctgggttgaggctcatgggaaattgtattctccgagtcagattggagcatttgtgttgatgaagatgaaagagactgcagaaaattacttggggcacacagcaaaaaatgctgtgatcacagtcccagcttatttcaatgactcgcagagacaggccactaaagatgctggccagatatctggactgaatgtgcttcgggtgattaatgagcccacagctgctgctcttgcctatggtctagacaaatcagaagacaaagtcattgctgtatatgatttaggtggtggaacttttgatatttctatcctggaaattcagaaaggagtatttgaggtgaaatccacaaatggggataccttcttaggtggggaagactttgaccaggccttgctacggcacattgtgaaggagttcaagagagag

SEQ ID NO: 139837 - DNA, 482 bp, Homo sapiens
  Payload ID: 7423
  Gene Symbol: HSPA9
  Gene Name: heat shock 70kDa protein 9 (mortalin)
  ENST ID: ENST00000512328
  CDS Start-End: 1-307
aacgcaagtggaaattaaagtgtgtcagggtgaaagagagatggctggagacaacaaactccttggacagtttactttgattggaattccaccagcccctcgtggagttcctcagattgaagttacatttgacattgatgccaatgggatagtacatgtttctgctaaagataaaggcacaggacgtgagcagcagattgtaatccagtcttctggtggattaagcaaagatgatattgaaaatatggttaaaaatgcagagaaatatgctgaagaagaccggcgaaagaagagatttccaaaatgagggagctcctggctagaaaagacagcgaaacaggagaaaatattagacaggcagcatcctctcttcagcaggcatcactgaagctgttcgaaatggcatacaaaaagatggcatctgagcgagaaggctctggaagttctggcactggggaacaaaaggaagatcaaaaggagga

SEQ ID NO: 139838 - DNA, 551 bp, Homo sapiens
  Payload ID: 7423
  Gene Symbol: HSPA9
  Gene Name: heat shock 70kDa protein 9 (mortalin)
  ENST ID: ENST00000507886
  CDS Start-End: 366-551
atttcaaaattaccaggtagtggtcctcatggcctgttctgtggctgaatggaaaggtttggccttgggggtgagggatgcagtctattgggaaagccactattttcagttttatttttggctcctctacagaatacagagtgtgtaaggatcccgttgatacggtgaaataaaataagaaagctctgagtcggaactccagttttcgtgcttagcaacattttctcaaaatctgtggtgatagctggaatggccttagtcatgaggcttttagacttgtttcaaggcgggattatgcatcagaagcaatcaagggagcagttgttggtattgatttgggtactaccaactcctgcgtggcagttatggaaggtaaacaagcaaaggtgctggagaatgccgaaggtgccagaaccaccccttcagttgtggcctttacagcagatggtgagcgacttgttggaatgccggccaagcgacaggctgtcaccaacccaaacaatacattttatgctaccaagcgtctcattggccggcgatatgatgatcct

SEQ ID NO: 139839 - DNA, 663 bp, Homo sapiens
  Payload ID: 7423
  Gene Symbol: HSPA9
  Gene Name: heat shock 70kDa protein 9 (mortalin)
  ENST ID: ENST00000507115
  CDS Start-End: 86-214
ccagaagcgctgccgccaccgcatcgcgcagctctttgccgtcggagcgcttgtttgctgcctcgtactcctccatttatccgccatgataagtgccagccgagctgcagcagcccgtctcgtgggcgccgcagcctcccggggccctacggccgcccgccaccaggatacacactggttggtgactgagtcagttttttcttttttaggatagctggaatggccttagtcatgaggcttttagacttgtttcaaggcgggattatgcatcagaagcaatcaagggagcagttgttggtattgatttgggtactaccaactcctgcgtggcagttatggaaggtaaacaagcaaaggtgctggagaatgccgaaggtgccagaaccaccccttcagttgtggcctttacagcagatggtgagcgacttgttggaatgccggccaagcgacaggctgtcaccaacccaaacaatacattttatgctaccaagcgtctcattggccggcgatatgatgatcctgaagtacagaaagacattaaaaatgttccctttaaaattgtccgtgcctccaatggtgatgcctgggttgaggctcatgggaaattgtattctccgagtcagattggagcatttgtgttgatgaagatgaaagagactgcag

SEQ ID NO: 139840 - DNA, 584 bp, Homo sapiens
  Payload ID: 7423
  Gene Symbol: HSPA9
  Gene Name: heat shock 70kDa protein 9 (mortalin)
  ENST ID: ENST00000504810
  CDS Start-End: 300-584
ccgcgcgccctttagggtttgaattctccagtataggtcaggcgggaaggaaggtaacgggccttccatagttagcgctgccgggtcaagattttgcccaaggttttgcctccggcttgggccctgctgagtcacacccctcgcgatctagagtgtcatttcaaaattaccaggatagctggaatggccttagtcatgaggcttttagacttgtttcaaggcgggattatgcatcagaagcaatcaagggagcagttgttggtattgatttgggtactaccaactcctgcgtggcagttatggaaggtaaacaagcaaaggtgctggagaatgccgaaggtgccagaaccaccccttcagttgtggcctttacagcagatggtgagcgacttgttggaatgccggccaagcgacaggctgtcaccaacccaaacaatacattttatgctaccaagcgtctcattggccggcgatatgatgatcctgaagtacagaaagacattaaaaatgttccctttaaaattgtccgtgcctccaatggtgatgcctgggttgaggctcatgggaaattgtattctccgagt

SEQ ID NO: 139841 - DNA, 780 bp, Homo sapiens
  Payload ID: 7423
  Gene Symbol: HSPA9
  Gene Name: heat shock 70kDa protein 9 (mortalin)
  ENST ID: ENST00000523929
  CDS Start-End: 1-491
ttgatttgactaaagacaacatggcacttcagagggtacgggaagctgctgaaaaggctaaatgtgaactctcctcatctgtgcagactgacatcaatttgccctatcttacaatggattcttctggacccaagcatttgaatatgaagttgacccgtgctcaatttgaagggattgtcactgatctaatcagaaggactatcgctccatgccaaaaagctatgcaagatgcagaagtcagcaagagtgacataggagaagtgattcttgtgggtggcatgactaggatgcccaaggaaatatgcaaaaaaaaaaaaaatgaacctggaaaaaaaaggtcctggaccaggtggatgcctcatatattaagaaatccccgaggccgggtacagtggcttacgcctgtaatcccagcactttgggaggccaaggcgggcggatcacgaggttcagcagactgtacaggatctttttggcagagccccaagtaaagctgtcaatcctgatgaggctgtggccattggagctgccattcagggaggtgtgttggccggcgatgtcacggatgtgctgctccttgatgtcactcccctgtctctgggtattgaaactctaggaggtgtctttaccaaacttattaataggaataccactattccaaccaagaagagccaggtattctctactgccgctgatggtcaaacgcaagtggaaattaaagtgtgtcagggtgaaagagagatggctggagacaacaaactccttggacagtttactttg

SEQ ID NO: 139842 - DNA, 8784 bp, Homo sapiens
  Payload ID: 7424
  Gene Symbol: HSBP1
  Gene Name: heat shock factor binding protein 1
  Uniprot ID: O75506
  ENST ID: ENST00000433866
  CDS Start-End: 235-465
gggaggggctatgcgaaagaaggcggggagagtggggtggggccgctccttggaacggaagcgcgcggcctcgaggcccttccggtgcgggagaaactactactcccataatgccccgcggtcccgcgagctgccagtctcgtcgcgagaagcagcggcccggggcgactgagcggacaaacggaagtgtaggttacggtctgagacatcaccgccaagctgggcatcggggagatggccgagactgaccccaagaccgtgcaggacctcacctcggtggtgcagacactcctgcagcagatgcaagataaatttcagaccatgtctgaccagatcattgggagaattgatgatatgagtagtcgcattgatgatctggaaaagaatatcgcggacctcatgacacaggctggggtggaagaactggaaagtgaaaacaagatacctgccacgcaaaagagttgaaggttgctaataatttatactggaatctggcatttttccaagccaagagaagatcgaatggctttttgcagctaactactatgtgtagacaggttttatattataaagtatgcattcttatcacctagtatatagttagtttgtagagtgatttccccccagtttcttgaacatggtatcttcacatcttggaccttggtcagttgtgctattcattattaaacactaaaactttggcggttcttgcataacattgtcagattttttagtgtatttctgtgaagtcattttttttcttgtcattccttttgtagtagttgctgtttggataaaagttgatgtgtgattttttattaaacaaatagtaaacccttcaattatagttagtcttggtgaagtaagatgtttgtagactttagagttctttaattcttggcacaacgtgactgttgagctaacaccaaatagtgtgttggcaatacttttcaaatggctgaaaacacctaaaaattgttcattcagaaatatctgtcactgctctgttgccaaaactcagaatagaacttagacgtatgtctgagtccctgagatcacatgctaaagtcgatgaaaagtaaccactgccactgtcttgtgtcagaacttttacagtacagaaaataacagaatagccttctgtaatgaggcgtttgttagagttttgcatgagattctaatacttcagtaggaccctacctacgtggttcatctacaatggttaccataaaaaatctggcaggattttaaaactcaatcagtctttcctttgagctagtgacttgaaaagaaagagagaaggaaaagagaccatattaagtccatgccagttgcttggctagaatatgatcaacgacttgtagtagactcaagtttttaaaaaacactattttacttaaactgtttcttatctaaattcttgcagagtgtcaatgttatcattgattatagaagacagggataatacctttatctctggccactcaaaaatgcagtgccaggagtgctaaacctagaggccaatactgatgacctggaaggtgatccatatgattgtcaccacaaagtgcttttacacaaaaacttgaaaatttgaaaaacatgatttttttaagtttctcatctcaccagtcttggtgtttatattgcaaatctatcaaagtaagaaataatttgtgctgtatacaaattacatggggaacataaaggagtgagatccttctgtgataaaatgaattcaccactctggttacccaactacagaacctcctttgatcaggccagtaggttgtgatgcaggctggagcccccgaatgccccacacacactgcagcattgaccagaccatccgaaacctgcgtccctggtgatgttctcaagcctcggaagtggcaaatggaaatgatatggccggttgcggttgtaggagagttgtgacttaggcaggagtcgacctcctcaagtaatggaacgatttcaaaggcaggctgccctgaccaaaaatatctgccatgaataaaggtgcctgaaatcctgctatgaagcttcctttgtgtcaaaaatctgtttggttttcagatggaaatgcagaaatcacattagagtatcaactaaaacctctggacggattaagtacaagtagcccaaggcaaagcaggagagggggtgttgggggaggttgcctgctggaaggggaagctgaggagcgggaggagggcttgccaagactggcattgcaggagacttgtctcaggtgtgttcccagaactcttgcccctggagatgctgcaggaaggaaggggttatggtcacttgggtttagacgacattctgtgaacctcatgaagaaattagcatattaaagactctgaaagtagagcagagaactcagctttaacctgctcacctgctagttttcgaggtctcgctctgttgcccaggctggagtgcagtggcacagtcatagctcacttggagcctgaagctcctgggctcaggcagtcctcctgcctcagcctcccaagtagctaatattacaggttcgtgccaccgcacctgggtcttgctgtgttgcccaggctggtctagaactcctaggctcaagcagtcctgtctcagcctcccaaagtgctgggattacaggctggagccaccatgcctgtccaagggtcttttttatactatatgaagtattccttctccagctattcttgttcgtttaccagccagtgaagattctcttgagggctgaacaatacagatgagtatgggggccctcgcaccaaggaaaacagcgttacatttaattaagtgccctgtctcaaaccccaaggccccacagcttcttcatttggcccctagttcatcctgctttcctttgagccacaggattttaaaatatttcaatcttattttcatatcaattttttctttgtttcactacaagtacagtcattgtttaaccctatcaggactaacacaatatttcacgtaactaagagttaatttgcccttgtgagtccttggaatttaagccccacacacacacacttagagcactgttgctatgggaacatagagtcctccaaacaaaagtgaactttttcaacatgctgtttgtaaatggaagccttcccaagcagacactgtgttcctcttttattttgtattttgcacattatatattttgattagattaaaatggaggaatttgcaggatgtgttgtcatatctagccctgaaagttaactggttacagttaccaaatgttcacagctagcgccattgaaagcattgactgtaaaccgctgtactgtgctaagccttttgtttgcactgtttggcttaatcctcacaacaacactgagaggttttcatttgatgagtcatatttaaagaaaaggaacccaagacggggagtcaggggcacaaggtcacagctggtaatgatgaccctggaatgtcctcacagctgcacacctgcaccgctcacaaacacagctgaccgtctcacagctgcacacctgcaccgctcacgagcacagctgaccgtctcacagctgcacacctgcactgctcacgaacacagctgatcgtctgcctcttcgtgtgagctgagctccgaatctcagctgtccaggctgtctggaaatcatcagccccactggctggatctcaaaatttactttcaaaaggctgatggagtgttttcaattaaacatgacctaaaattaagtaataaacacactggatgtgagtttttatttggaatttaaactattcagagctggtagaaaatgtgtgctcctggatcagtgccttttttctcctaaatcagttgagaacaacaacagaaacaaatgacattcctcaaacatttgcccagagcacaaccacggggaatatgaaccacaggttttcacattggttttccatgcctatacctgtcctgtctcccacaaaaattattgcttgaggcccaacccgggggataaaaagacacccccccgccactccgtgacctattagcttaccatcctattggatttcactgttttttgttttgtggtgttttttttttattgcaacgaagacttttaaatggactcatgaagaagccatcacctggaatcttaatcttgcattaattttaagtgtctgattttagctgcagccacttgagaacttttcaatgaatgaaaatgagggaggggagatgcaagtcactgcccaaaaacaaaaccagaggaattgtgattgaacattgcacttatcaaccctacaaattaatatggaaataggaaaagggtttgtttcaacaagtcaggatgacagtattttaaaaaagaaaaaaaggccagcctgggcaatatactgagactccatctctacaaaaaagtagaaaaattagcccagagtgtggtggcacacatctgtgctcccagctactcaggaggctgaggtgggaggatcatttgagcccaggaagtcgaggttgcagtgagctgtgatcggacgactccactccagccggggtgacagagcaagaccctgtctcaaaaaaaaaaaaaaagggcggatcctaacgcttggtcctcacacctgaggctctcactaagaggtggctggaagctcctcagaccgctgcctagggttcgagtgatcctgaaagctgtacaacatcagcctctgtgggatccctgagaatgatgaaatgtaatatgtggctgtctcatcaacagagcttcattttaccaaagcatatgtagacaccacatacatgaactacatacctatcgtgtagatgctgccctgcctcataagaacactcttgactgtcctgcttcacaataataatcttcgcaataatgatctaataatggtcaaattctgtgtctctaccgtagaaaacagaatttgaccatttagtcacgttggtcttgcaaaatgtccaccttccaaaagagaacagtattgcttcccaataattaagaatagtctggattcaggatccagcagcttagaagcgtttagctaccaatagcaaaaatcagcccttttaacaatggtgggatgtattatttcacatggcaagaagtcccaagggagggcagctctggggcgagtaaattctgcacctcagtaaaactaagagcaagacccggccgggcgcagtggctcatgcctgtaatcccagcactttgggaggccgaggtgggtggatcacctgaggtcaggagttctaaaccagcctggccaacatggcgaaacccccgtctctactaaaaatacaaaaattagccaggcgtggtggtgggcgcttgtaatcccagttgctcgggaggctgagggaggaggatcgcttgaactcaggaggtggaagttgcagtgagccgagatcgtgccactgcactccagcctgggtaacagagcgagactccatctcaaaaaataaaaaacaaaaaaataaataaaaaataaaaagacccaaccccagatttgttccacctgggtgcatccggtcagagaatgcctttcttcttcccttttgtctcctaagagtgaagaaaatgtttctttgaaggtgtttccaccccactcctgtgcctaaaatgatcctggcaaacaggacccgcatgataggttgagccatgtggttcttgtttttttgttgtcacaactcaggttgggggtgttactggcatcaagagtgtagaaaccagggatgctgcgtcaacaccctaccatgcacaggacaaccctcaccccaaagagtggcacagccccaagtgtcaacagtgctgaggttgaggaatcccagcttaacccattcatgagaccacctgagcctggtgtaacggttctgctgatagtttccggaccctcagaggtggagacataagagaacaataccagggttccatcagaaaggaaatcagaatggctatcgggtggacaacctacagtgtttgctacagaccttctagatgtaacttctagattataaacactggtaacactggagatggttaaatcggaattagctgactgtcaaccttggtggcacattagaatcacctggggagcagttcaaaggcccaaaactgggcagcaccacagaaccctcacatcagaatccccatgggtgggcccagacagcagtgttcatcttagactccagtgtgcagtcgaggtcgagaactgcattcaagaaggcctgtctactgcgaaccgtccgatgatgtaattcaccaagttccatgggattccgccacgcccgtgtcaacccagctgacacgtccaacttggacaatcagggctttgacccccgttacctggcattcaattcaatccatgtgtcacgcatgccccaacaatttgtgtcccaactgtttgaatcaaaggatttctgattccctgatgggtgatgactcagtaaccggattcagcttcagatctgcctgacatttttcctgcctgtcctgggccaggtatggcgctagctgctttcacctgtatcatctcattcactgctcagaggctctcgaaagctgttgacattatcaaaaagttttccagctggaattcatctccctctaatcagccttcaaaacctccatttgtaaaccattgctgtagttttattacctcttaccttggtctttacaagttgctgtcaaaacccagtaagtgtttacagaaagaaactttacatattaaatatcttaaaggtcttttatgcagaatatgcagttaattttgatgggctatggataatcatcagaagagccatttctggaaatgtaaataatatggctgtttcttttaacagtgcattctcctgaaaacataagaccatttgactgattctgctccagaatcttattgaggcaaaggactggaccgaattattcatggaacagaagcctaggactggtaagtccaggaaatgctgcaaaacaatgccctcaaaagaaatcagcctttccctttgataggtatctctcctgcaagccaggctcaggtgcgcctcaattagaacctgtgttcgctggggccataattaagaatcttaaagggaaagaatgttttgaaagccatctgtcaaaagtacgcagtcttgcttgtagaattttagaggttcatggttaccgtgggtcggcactgggtctgtgagccctcatccccagggctcggtttcctatcagaatccttgtctggaaggttgattatatcagatgcgcattttgccagcatcctcagaaggagatgcgaggaagattcttttcctgggccactctcattttctcaaacttggacaagtcttaacaataatctgtgacccaactttgtcttccccatgatgaaaaacagaccccatagaaactctctggcacaaaaactctggaatcactgaccccagacattgttccctgccatccactctgccagacatttcttggatttattcaagctgacttgtattccagaacaattgtggacaagatttgctagtaatgcttccaacaagttaccgtttagcaagttcagaacttgaagaatcccttttatcctaacgctgactaataaactggtgagaactgtttgaaatacccataagtcaatggaggtcgtaatttgcttttatgctgtattaaacaccactgagatgttaaggtctttcttgggaaccaccgtgatgttctcttctggactcttcgtaaccccttcagcagacgaccctgtatctggtcttggttctgaaaggtttgcagcggcacctaagtcactgaagttctggcagaattcattctcctgctctctactgggacttgttttccataattggtctgagaacaacagatttttttcttttttgcctcggatttcaacaaaacatacatggaaagaatattttcttccttggagacatttcccatagggcagtggttcttaaaatacgttcctgaaccggcagcatcagaatcccctgggaacgtgctggaaatgtagatccccaggccctacctagccctactgaatcagagaccctgggagggaggtccagcagcctgggttttaacacatcctccaggcgattctgagagtgagagagccagggccttcgggcatcaaccttggggcgagggtgttgggttgcccaacaccctttagtctaatggctttagggtcaaatatgtctaaaccaagaagccccatggggcactgattagcatgcaggtccccaggccccctttttgtagatcctgattcagaatatctgggacgggggctggagattcatatttttaataaattccctcatttattatttttgtgtcttatttcccatacacaaaaacactgcgtagagaaatgggagtgtgggcgatgctcccatgctgggagtctcaggcctgggctagtcctaaaataattgaaaaggaattgattcttaattacccagaacgtccacgctctaggacctagtgtgacctcttctgccttctgaaccgaggagtccacccctaagcccgaggaactgagcgtgaagagccctgacgccatgaagacttgaatcactttaaagcaatttgcttcttattaaaatgtacttcagtaaaaaatcatttcaactcttaagccacaaaaggatatccaatcatttaaagcttcctgagtgtttcggttgattaaaaagcttttaaagagcatagtaaatattttaccagaaggataagttattcagtatggagattatttattaaaaactagtaatttatt

SEQ ID NO: 139843 - DNA, 889 bp, Homo sapiens
  Payload ID: 7424
  Gene Symbol: HSBP1
  Gene Name: heat shock factor binding protein 1
  ENST ID: ENST00000567382
  CDS Start-End: 16-216
ctgggcatcggggagatggccgagactgaccccaagaccgtgcaggacctcacctcggtggtaagggacggctgtgagggccggaggccgcggccttcccgggcggcgccgggccaagccctgctggacagaggcgcgcccaccgcggccgcgcgtggcgtctgccgaggccccgtttctggaagcgtctctggccgaggctcccggccaccttgacccccggggcgctcggtgcgggccagtctccccgcgggcgcccccaagcccgaccccttccagtagccccattcatctgtcgcgaacgccctccgggtccctcccgcctacctctgacaccctccccgcccttcaactcctcacacacccccgggtgccccagcccggcagaaacaacctaaagaccctgagctttgagtcgcagcggcctccccagcccagcagtctaattggacaggttggaaaacggaagcccagagaaggaagatcttgctgaaggccgcacagctgtccagaggcagaaatggggctggaaccccgggaccagggcttgcgtcctgatcccaggaagttgtctcaggatcgatgtggaccgtgtttgtttgtttcggtttttcttaggtgcagacactcctgcagcagatgcaagataaatttcagaccatgtctgaccagatcattgggagaattgatgatatgagtagtcgcattgatgatctggaaaagaatatcgcggacctcatgacacaggctggggtggaagaactggaaagtgaaaacaagatacctgccacgcaaaagagttgaaggttgctaataatttatactggaatctggcatttttccaagccaagagaagatcgaatggctttttgcagctaactactatgtg

SEQ ID NO: 139844 - DNA, 1020 bp, Homo sapiens
  Payload ID: 7424
  Gene Symbol: HSBP1
  Gene Name: heat shock factor binding protein 1
  Uniprot ID: O75506
  ENST ID: ENST00000570259
  CDS Start-End: 89-319
gagaagcagcggcccggggcgactgagcggacaaacggaagtgtaggttacggtctgagacatcaccgccaagctgggcatcggggagatggccgagactgaccccaagaccgtgcaggacctcacctcggtggtgcagacactcctgcagcagatgcaagataaatttcagaccatgtctgaccagatcattgggagaattgatgatatgagtagtcgcattgatgatctggaaaagaatatcgcggacctcatgacacaggctggggtggaagaactggaaagtgaaaacaagatacctgccacgcaaaagagttgaagtgcattctcctgaaaacataagaccatttgactgattctgctccagaatcttattgaggcaaaggactggaccgaattattcatggaacagaagcctaggactggtaagtccaggaaatgctgcaaaacaatgccctcaaaagaaatcagcctttccctttgataggtatctctcctgcaagccaggctcaggtgcgcctcaattagaacctgtgttcgctggggccataattaagaatcttaaagggaaagaatgttttgaaagccatctgtcaaaagtacgcagtcttgcttgtagaattttagaggttcatggttaccgtgggtcggcactgggtctgtgagccctcatccccagggctcggtttcctatcagaatccttgtctggaaggttgattatatcagatgcgcattttgccagcatcctcagaaggagatgcgaggaagattcttttcctgggccactctcattttctcaaacttggacaagtcttaacaataatctgtgacccaactttgtcttccccatgatgaaaaacagaccccatagaaactctctggcacaaaaactctggaatcactgaccccagacattgttccctgccatccactctgccagacatttcttggatttattcaagctgacttgtattccagaacaattgtggacaagatttgctagtaatgcttccaacaag

SEQ ID NO: 139845 - DNA, 771 bp, Homo sapiens
  Payload ID: 7425
  Gene Symbol: HSBP1L1
  Gene Name: heat shock factor binding protein 1-like 1
  Uniprot ID: C9JCN9
  ENST ID: ENST00000451882
  CDS Start-End: 176-400
aggtgcagcgcccgcctctccgctccggccccgcctccgccctggaacgcagcgcgctccgcccgaggcctcccggcggcccatacgggaatcgcggagcttagctgtcgccacctcgcgccgggtccgcgcggcccacgggaccccccactgacgcccccggccagcggtccacatggacgtgcggggccctgaagcccccggcgggcgcgcgctgcgggacgcggcagaaaatctatttcaggaacttcaggaacattttcaagctctgacggcaacattaaacctcagaatggaagaaatgggaaatcgcattgaggacttacagaagaatgtcaaggacttaatggtgcaagctggcattgaaaattctattaaagaacaaatgctgaagacctaactgcagcatgtctgtatttggagatggggcctctacagaagtcattaaggttacatcggtcctgagggtggggccctcatccaacaggattcgtctttctgagaagagacgcaaggggctcgcctgctctcccctccgtgcctgcaccagagaaggaggccatcggcaagccaaggagagccctccccagaaatcacacggaccagcaccttgatctgggacttccagaaaacagaactgtgaaaagacaagtttctgttgtttaaaccacccaatctgaagtattttgttatggcagtcctgggcagactaatacaatatgcaacacatttacaataaatatacaataaacttacaaatgtggaatgtaa

SEQ ID NO: 139846 - DNA, 800 bp, Homo sapiens
  Payload ID: 7425
  Gene Symbol: HSBP1L1
  Gene Name: heat shock factor binding protein 1-like 1
  ENST ID: ENST00000589516
  CDS Start-End: 107-244
ctcccggcggcccatacgggaatcgcggagcttagctgtcgccacctcgcgccgggtccgcgcggcccacgggaccccccactgacgcccccggccagcggtccacatggacgtgcggggccctgaagcccccggcgggcgcgcgctgcgggacgcggcagaaaatctatttcaggaacttcaggaacattttcaagctctgacggcaacattaaacctcagaaatatccttttctacctttaacaaatgctgtgattctttcggactggtagattatcatggagtatctttttgttgtctggtagtagtagttgcatgtgccatgggaggcggagtctctgaggacatcctggctgtgcctcggcggctctggactccagctctacgcagagcgccttaacactgtactggaagaaatgggaaatcgcattgaggacttacagaagaatgtcaaggacttaatggtgcaagctggcattgaaaattctattaaagaacaaatgctgaagacctaactgcagcatgtctgtatttggagatggggcctctacagaagtcattaaggttacatcggtcctgagggtggggccctcatccaacaggattcgtctttctgagaagagacgcaaggggctcgcctgctctcccctccgtgcctgcaccagagaaggaggccatcggcaagccaaggagagccctccccagaaatcacacggaccagcaccttgatctgggacttccagaaaacagaactgtgaaaagacaagtttctgttgtttaaaccacccaatctgaagta

SEQ ID NO: 139847 - DNA, 3986 bp, Homo sapiens
  Payload ID: 7426
  Gene Symbol: HSPA13
  Gene Name: heat shock protein 70kDa family, member 13
  Uniprot ID: P48723
  ENST ID: ENST00000285667
  CDS Start-End: 69-1484
gccgggaggagtgggggcggtgcctcacgtctggtacagtcatcacaagcctgttcggcgggactgtgatggccagagagatgacgatcttaggatcggctgttttgactctcctgttggccggctatttggcacaacagtatttaccattgcctactcctaaagtgattggtattgatcttggcaccacctattgttctgttggggtgttttttcctggcacaggaaaagtaaaggtgattccagatgaaaatgggcatatcagcatacccagcatggtgtcttttactgacaatgatgtatatgtgggatatgaaagcgtagagctggcagattcaaatcctcaaaacacaatatatgatgccaaaagattcataggcaagatttttaccgcagaagagttggaggctgaaattggcagatacccatttaaggttttaaacaaaaatggaatggttgagttttctgtgacaagtaatgagaccatcacagtgtccccagaatatgttggctctcgactattgttgaagttaaaggaaatggcagaggcatatcttggaatgccagttgccaatgctgtcatttctgtaccagcagaatttgatctaaaacagagaaattcaacaattgaagctgctaaccttgcaggactgaagattttgagggtaataaatgaacccacagcagcagctatggcctatggtctccacaaggctgacgtcttccacgtcttggtgatagacttgggcggaggaactctagatgtgtctttactgaataaacaaggagggatgtttctaacccgagcaatgtctggaaacaataaacttggaggacaggacttcaatcagagattgcttcagtacttatataaacagatctatcaaacatatggcttcgtgccctctaggaaagaggaaatccacagattgagacaagctgtggaaatggtcaaattaaatctgactcttcatcaatctgctcagttgtcagtattactaacggtggaggagcaggacaggaaggaacctcacagtagtgacactgaactgccaaaagacaaactttcctcagcagatgaccatcgcgtgaacagtgggtttggacgtggcctttctgataagaaaagtggagaaagtcaggttttatttgaaacagaaatatcacggaaactctttgatacccttaatgaagacctctttcagaaaatactggtacccattcagcaagtattgaaagaaggccacctggaaaagactgagattgatgaggtggttttagttgggggctccactcgtattcctcggatccgtcaagtcattcaagagttctttggaaaagatcccaacacatctgtagaccctgacctagcagtagtaacgggagtggctatccaagcagggattgatggaggctcttggcctctccaagtcagtgctttagaaattcccaataagcatttacaaaaaaccaacttcaactgaattctgcagaaataatggttatttgtgaacttgtctgatgatctcttcccatttatcagattaccttttccacaaaagaaagtctctaaaatatcacagatttacctagagggcaacatttagatacaggaaaattttacatagtgttttgtcttaggattagacgtgaccagattgatcctgtttgattttggagagatcctattctaacaaatactctaaaatgataaaattgaggtacaactctcttaaaagagtatggataactatattttctggattctggaggttgataaccatatgcacttaacattatattctataaacattaagtagtgccagttatgagattcccagttcttactaaattgtattagcaggagctggtaattacttgtattatcacatgtaactaataatttgaactatacttgaaggaccgtgttgatgtcaggtatttacagtggttggaagatagcagtattattagcataagctgcatacgtaatattcagtaactgccatattatataacaaatttacattcacaaattcagtatcctgttaagtgtcatattcttgtaatctgcattctccaggagttttatgtgtttaatagatgaatttattttatttctaaaggtattcaaatgtttcagcaccatataatagaaatacccaattatattctagttcctttatgtcctgtacatcattctctgcttggatttccattattctgtttggttagagaataaaattggtaattgcatttgaagaatgtgttaatgtcataataaagccatgattgctatcttatttttgttatccgagacctttgcaaacattggcaaatagcatcaattacctactgtatttgtttctttgtttatattttcagtaagccctggggaatatagcatggaattgagctactaaatggttttggttccgttttacggagatttttcctcatatttagttttgaatgaggaaaatgtgctcaattataaaagctgtgttattgttttctattattatttttaaataatcacacttggactcttttcaaacattaggttagtttgtaatgaaagcaaaaaatttgtgaatactggaagtaacgtggaaatctaatgtggaagccattgtggcaaggtttctacaaatcggcatttggagcagagttgtttgtttttgttgtttgtttcctttaagaaaaaccacagggaccaagaaagaaaatataacagtttgatttctgtcatacccattgtatttgaagatatatggatacagattatatatatatatacatattttccttaatagaggaatgcttcatattattcaaaaattatatcctgatcacctttttttgttttttattgtaaagtatctctgctttatccattgctgaattcgataggatgttgaaatgctggtcaccaaaaaaggaaactgagcaaattcatttcaacaacatcaaaacttcagcttctcatagtaaaaagctgaatgttactaatatttttcatatctaaaaaaaaattcttagcaatgaaattgctgttaaaacacaaatttcaatcaaatacttttgtgtatagaaaatatgtatagtaggtagatagaaaagtataaaatgtttgttgaagtatcttattttagaatgaatggagaaatgccaaagatgaatccttcactgcattatgaaaatatttcacatgttctcttggactttatataaatctgtaatagattttagaattgaaaaattctttgtgaaggtcttctaaaagtgttccaatttatctcaaaatctccatatataggatcagcttaaaacataaagaaaaccttgaatttctcaaatgtttgagatgttcaagacagtctcttaatccgttaatgcttttggaaacaattgacaaaatagggcaggcagctcatctcatgtcctgaagttggaatttaaataattcctatttgcaaattagaatgacagtgttggaatttggaggcagtagttgagcatattctctagtatatagctacacctttaataaaatgaaggaatgtcttcaatcatattttagtgggctatttataaatagtcttgaagtcaatttagtttatttatttaaaagataatgcatcctgaaagggatcatttatgaataacaatctgaagtcttttcataaaaaaaattaataaactttagttgtacatttagccagtgttatttgaagtatgtaacttttaaaatattaagtgtcttgtatgattagaatatgtgaatgagtaacttattttgtatcaggaatgttttggtactgtgttttcactcaaaccactgacttaacagatactgctgtgtataacatgtactaaatattacagttattgtgcataacagattgttcctcttatatttgtgtgtatacaggcaattcatgttttaatgtaaataaataccattttgcagtttgttttttaaa

SEQ ID NO: 139848 - DNA, 3379 bp, Homo sapiens
  Payload ID: 7427
  Gene Symbol: HSP90AA1
  Gene Name: heat shock protein 90kDa alpha (cytosolic), class A member 1
  Uniprot ID: P07900
  ENST ID: ENST00000216281
  CDS Start-End: 207-2405
gtgccgcggcaacggcgcatgcgtaggcgcgcggccgcggcggcggctggggagggttcttccggaaggttcgggaggcttctggaaaaagcgccgcgcgctgggcgggcccgtcgctatataaggcaggcgcgggggtggcgcgtcagttgcttcagcgtcccggtgtggctgtgccgttggtcctgtgcggtcacttagccaagatgcctgaggaaacccagacccaagaccaaccgatggaggaggaggaggttgagacgttcgcctttcaggcagaaattgcccagttgatgtcattgatcatcaatactttctactcgaacaaagagatctttctgagagagctcatttcaaattcatcagatgcattggacaaaatccggtatgaaagcttgacagatcccagtaaattagactctgggaaagagctgcatattaaccttataccgaacaaacaagatcgaactctcactattgtggatactggaattggaatgaccaaggctgacttgatcaataaccttggtactatcgccaagtctgggaccaaagcgttcatggaagctttgcaggctggtgcagatatctctatgattggccagttcggtgttggtttttattctgcttatttggttgctgagaaagtaactgtgatcaccaaacataacgatgatgagcagtacgcttgggagtcctcagcagggggatcattcacagtgaggacagacacaggtgaacctatgggtcgtggaacaaaagttatcctacacctgaaagaagaccaaactgagtacttggaggaacgaagaataaaggagattgtgaagaaacattctcagtttattggatatcccattactctttttgtggagaaggaacgtgataaagaagtaagcgatgatgaggctgaagaaaaggaagacaaagaagaagaaaaagaaaaagaagagaaagagtcggaagacaaacctgaaattgaagatgttggttctgatgaggaagaagaaaagaaggatggtgacaagaagaagaagaagaagattaaggaaaagtacatcgatcaagaagagctcaacaaaacaaagcccatctggaccagaaatcccgacgatattactaatgaggagtacggagaattctataagagcttgaccaatgactgggaagatcacttggcagtgaagcatttttcagttgaaggacagttggaattcagagcccttctatttgtcccacgacgtgctccttttgatctgtttgaaaacagaaagaaaaagaacaacatcaaattgtatgtacgcagagttttcatcatggataactgtgaggagctaatccctgaatatctgaacttcattagaggggtggtagactcggaggatctccctctaaacatatcccgtgagatgttgcaacaaagcaaaattttgaaagttatcaggaagaatttggtcaaaaaatgcttagaactctttactgaactggcggaagataaagagaactacaagaaattctatgagcagttctctaaaaacataaagcttggaatacacgaagactctcaaaatcggaagaagctttcagagctgttaaggtactacacatctgcctctggtgatgagatggtttctctcaaggactactgcaccagaatgaaggagaaccagaaacatatctattatatcacaggtgagaccaaggaccaggtagctaactcagcctttgtggaacgtcttcggaaacatggcttagaagtgatctatatgattgagcccattgatgagtactgtgtccaacagctgaaggaatttgaggggaagactttagtgtcagtcaccaaagaaggcctggaacttccagaggatgaagaagagaaaaagaagcaggaagagaaaaaaacaaagtttgagaacctctgcaaaatcatgaaagacatattggagaaaaaagttgaaaaggtggttgtgtcaaaccgattggtgacatctccatgctgtattgtcacaagcacatatggctggacagcaaacatggagagaatcatgaaagctcaagccctaagagacaactcaacaatgggttacatggcagcaaagaaacacctggagataaaccctgaccattccattattgagaccttaaggcaaaaggcagaggctgataagaacgacaagtctgtgaaggatctggtcatcttgctttatgaaactgcgctcctgtcttctggcttcagtctggaagatccccagacacatgctaacaggatctacaggatgatcaaacttggtctgggtattgatgaagatgaccctactgctgatgataccagtgctgctgtaactgaagaaatgccaccccttgaaggagatgacgacacatcacgcatggaagaagtagactaatctctggctgagggatgacttacctgttcagtactctacaattcctctgataatatattttcaaggatgtttttctttatttttgttaatattaaaaagtctgtatggcatgacaactactttaaggggaagataagatttctgtctactaagtgatgctgtgataccttaggcactaaagcagagctagtaatgctttttgagtttcatgttggtttattttcacagattggggtaacgtgcactgtaagacgtatgtaacatgatgttaactttgtggtctaaagtgtttagctgtcaagccggatgcctaagtagaccaaatcttgttattgaagtgttctgagctgtatcttgatgtttagaaaagtattcgttacatcttgtaggatctactttttgaacttttcattccctgtagttgacaattctgcatgtactagtcctctagaaataggttaaactgaagcaacttgatggaaggatctctccacagggcttgttttccaaagaaaagtattgtttggaggagcaaagttaaaagcctacctaagcatatcgtaaagctgttcaaaaataactcagacccagtcttgtggatggaaatgtagtgctcgagtcacattctgcttaaagttgtaacaaatacagatgagttaaaagatattgtgtgacagtgtcttatttagggggaaaggggagtatctggatgacagttagtgccaaaatgtaaaacatgaggcgctagcaggagatggttaaacactagctgctccaagggttgacatggtcttcccagcatgtactcagcaggtgtggggtggagcacacgtaggcacagaaaacaggaatgcagacaacatgcatcccctgcgtccatgagttacatgtgttctcttagtgtccacgttgttttgatgttattcatggaataccttctgtgttaaatacagtcacttaattccttggcctta

SEQ ID NO: 139849 - DNA, 3510 bp, Homo sapiens
  Payload ID: 7427
  Gene Symbol: HSP90AA1
  Gene Name: heat shock protein 90kDa alpha (cytosolic), class A member 1
  Uniprot ID: P07900
  ENST ID: ENST00000334701
  CDS Start-End: 283-2847
gggtgtggcctccgggcggcatggctgcttcccaggtgatgccggcttcagctagtggggtctagttgaccgttccgcagccgccagggccagcggaaagccggtcagggggaaccgcggcggggctggtgtcatgagcctgaggtgaacttgagggtgcctcctcagcggtctcccgccctgccctgaggggcgccgggaccccaaagagcggaggaagagcgccaccccgacggccaccgcttcggagccagcacgcggggtaccctacggggagcgcggatgcccccgtgttcgggcggggacggctccacccctcctgggccctcccttcgggacagggactgtcccgcccagagtgctgaatacccgcgcgaccgtctggatccccgcccaggaagcccctctgaagcctcctcgccgccgtttctgagaagcagggcacctgttaactggtaccaagaaaaggcccaagtgtttctctggcatctgatggtgtctggatccaccactctactctgtctctggaaacagcccttccacgtctctgcattccctgtcaccgcgtcactggccttcagacagagccaaggtgcagggcaacacctctacaaggatctgcagccatttatattgcttaggctactgatgcctgaggaaacccagacccaagaccaaccgatggaggaggaggaggttgagacgttcgcctttcaggcagaaattgcccagttgatgtcattgatcatcaatactttctactcgaacaaagagatctttctgagagagctcatttcaaattcatcagatgcattggacaaaatccggtatgaaagcttgacagatcccagtaaattagactctgggaaagagctgcatattaaccttataccgaacaaacaagatcgaactctcactattgtggatactggaattggaatgaccaaggctgacttgatcaataaccttggtactatcgccaagtctgggaccaaagcgttcatggaagctttgcaggctggtgcagatatctctatgattggccagttcggtgttggtttttattctgcttatttggttgctgagaaagtaactgtgatcaccaaacataacgatgatgagcagtacgcttgggagtcctcagcagggggatcattcacagtgaggacagacacaggtgaacctatgggtcgtggaacaaaagttatcctacacctgaaagaagaccaaactgagtacttggaggaacgaagaataaaggagattgtgaagaaacattctcagtttattggatatcccattactctttttgtggagaaggaacgtgataaagaagtaagcgatgatgaggctgaagaaaaggaagacaaagaagaagaaaaagaaaaagaagagaaagagtcggaagacaaacctgaaattgaagatgttggttctgatgaggaagaagaaaagaaggatggtgacaagaagaagaagaagaagattaaggaaaagtacatcgatcaagaagagctcaacaaaacaaagcccatctggaccagaaatcccgacgatattactaatgaggagtacggagaattctataagagcttgaccaatgactgggaagatcacttggcagtgaagcatttttcagttgaaggacagttggaattcagagcccttctatttgtcccacgacgtgctccttttgatctgtttgaaaacagaaagaaaaagaacaacatcaaattgtatgtacgcagagttttcatcatggataactgtgaggagctaatccctgaatatctgaacttcattagaggggtggtagactcggaggatctccctctaaacatatcccgtgagatgttgcaacaaagcaaaattttgaaagttatcaggaagaatttggtcaaaaaatgcttagaactctttactgaactggcggaagataaagagaactacaagaaattctatgagcagttctctaaaaacataaagcttggaatacacgaagactctcaaaatcggaagaagctttcagagctgttaaggtactacacatctgcctctggtgatgagatggtttctctcaaggactactgcaccagaatgaaggagaaccagaaacatatctattatatcacaggtgagaccaaggaccaggtagctaactcagcctttgtggaacgtcttcggaaacatggcttagaagtgatctatatgattgagcccattgatgagtactgtgtccaacagctgaaggaatttgaggggaagactttagtgtcagtcaccaaagaaggcctggaacttccagaggatgaagaagagaaaaagaagcaggaagagaaaaaaacaaagtttgagaacctctgcaaaatcatgaaagacatattggagaaaaaagttgaaaaggtggttgtgtcaaaccgattggtgacatctccatgctgtattgtcacaagcacatatggctggacagcaaacatggagagaatcatgaaagctcaagccctaagagacaactcaacaatgggttacatggcagcaaagaaacacctggagataaaccctgaccattccattattgagaccttaaggcaaaaggcagaggctgataagaacgacaagtctgtgaaggatctggtcatcttgctttatgaaactgcgctcctgtcttctggcttcagtctggaagatccccagacacatgctaacaggatctacaggatgatcaaacttggtctgggtattgatgaagatgaccctactgctgatgataccagtgctgctgtaactgaagaaatgccaccccttgaaggagatgacgacacatcacgcatggaagaagtagactaatctctggctgagggatgacttacctgttcagtactctacaattcctctgataatatattttcaaggatgtttttctttatttttgttaatattaaaaagtctgtatggcatgacaactactttaaggggaagataagatttctgtctactaagtgatgctgtgataccttaggcactaaagcagagctagtaatgctttttgagtttcatgttggtttattttcacagattggggtaacgtgcactgtaagacgtatgtaacatgatgttaactttgtggtctaaagtgtttagctgtcaagccggatgcctaagtagaccaaatcttgttattgaagtgttctgagctgtatcttgatgtttagaaaagtattcgttacatcttgtaggatctactttttgaacttttcattccctgtagttgacaattctgcatgtactagtcctctagaaataggttaaactgaagcaacttgatggaaggatctctccacagggcttgttttccaaagaaaagtattgtttggaggagcaaagttaaaagcctacctaagcatatcgtaaagctgttcaaaaataactcagacccagtcttgtggatggaaatgtagtgctcgagtcacattctgcttaaagttgtaacaaatacagatgagttaaaag

SEQ ID NO: 139850 - DNA, 581 bp, Homo sapiens
  Payload ID: 7427
  Gene Symbol: HSP90AA1
  Gene Name: heat shock protein 90kDa alpha (cytosolic), class A member 1
  ENST ID: ENST00000553585
  CDS Start-End: 60-581
agttgcttcagcgtcccggtgtggctgtgccgttggtcctgtgcggtcacttagccaagatgcctgaggaaacccagacccaagaccaaccgatggaggaggaggaggttgagacgttcgcctttcaggcagaaattgcccagttgatgtcattgatcatcaatactttctactcgaacaaagagatctttctgagagagctcatttcaaattcatcagatgcattggacaaaatccggtatgaaagcttgacagatcccagtaaattagactctgggaaagagctgcatattaaccttataccgaacaaacaagatcgaactctcactattgtggatactggaattggaatgaccaaggctgacttgatcaataaccttggtgaacctatgggtcgtggaacaaaagttatcctacacctgaaagaagaccaaactgagtacttggaggaacgaagaataaaggagattgtgaagaaacattctcagtttattggatatcccattactctttttgtggagaaggaacgtgataaagaagtaagcgatgatgaggctgaagaaaaggaagacaaagaagaa

SEQ ID NO: 139851 - DNA, 1710 bp, Homo sapiens
  Payload ID: 7427
  Gene Symbol: HSP90AA1
  Gene Name: heat shock protein 90kDa alpha (cytosolic), class A member 1
  ENST ID: ENST00000554401
  CDS Start-End: 1-157
ggttgagacgttcgcctttcaggcagaaattgcccagttgatgtcattgatcatcaatactttctactcgaacaaagagatctttctgagagagctcatttcaaattcatcagatgtgaacctatgggtcgtggaacaaaagttatcctacacctgaaagaagaccaaactgagtacttggaggaacgaagaataaaggagattgtgaagaaacattctcagtttattggatatcccattactctttttgtggagaaggaacgtgataaagaagtaagcgatgatgaggctgaagaaaaggaagacaaagaagaagaaaaagaaaaagaagagaaagagtcggaagacaaacctgaaattgaagatgttggttctgatgaggaagaagaaaagaaggatggtgacaagaagaagaagaagaagattaaggaaaagtacatcgatcaagaagagctcaacaaaacaaagcccatctggaccagaaatcccgacgatattactaatgaggagtacggagaattctataagagcttgaccaatgactgggaagatcacttggcagtgaagcatttttcagttgaaggacagttggaattcagagcccttctatttgtcccacgacgtgctccttttgatctgtttgaaaacagaaagaaaaagaacaacatcaaattgtatgtacgcagagttttcatcatggataactgtgaggagctaatccctgaatatctgaacttcattagaggggtggtagactcggaggatctccctctaaacatatcccgtgagatgttgcaacaaagcaaaattttgaaagttatcaggaagaatttggtcaaaaaatgcttagaactctttactgaactggcggaagataaagagaactacaagaaattctatgagcagttctctaaaaacataaagcttggaatacacgaagactctcaaaatcggaagaagctttcagagctgttaaggtactacacatctgcctctggtgatgagatggtttctctcaaggactactgcaccagaatgaaggagaaccagaaacatatctattatatcacaggtgagaccaaggaccaggtagctaactcagcctttgtggaacgtcttcggaaacatggcttagaagtgatctatatgattgagcccattgatgagtactgtgtccaacagctgaaggaatttgaggggaagactttagtgtcagtcaccaaagaaggcctggaacttccagaggatgaagaagagaaaaagaagcaggaagagaaaaaaacaaagtttgagaacctctgcaaaatcatgaaagacatattggagaaaaaagttgaaaaggtatgtgaatacagcatttcctgatcattgatacttctaaggtgctttcaagcttagtcatacatagcccattttcgcatgttttcaacttaaaacagaaaactatgttgtgtgtggctgggcgcggtggctcacgcctgcaatcccagcactttgggaggctgaggcagcggatcacaaggtcaggagatcgagaccatcctggctaacacggtgaaactcagtctctactaaaaatagaaaaaaataaaccaggcgtggtggcacggcctgtaatcctagccacttgggaggctgaggcaggagaatcgcctgaacccaggaggcggaggttgcagtgagccaagatcgcaccactgcactccagcc

SEQ ID NO: 139852 - DNA, 584 bp, Homo sapiens
  Payload ID: 7427
  Gene Symbol: HSP90AA1
  Gene Name: heat shock protein 90kDa alpha (cytosolic), class A member 1
  ENST ID: ENST00000557234
  CDS Start-End: 62-304
gcgccaccccgacggccaccgcttcggagccagcacgcggggtaccctacggggagcgcggatgcccccgtgttcgggcggggacggctccacccctcctgggccctcccttcgggacagggactgtcccgcccagagtgctgaatacccgcgcgaccgtctggatccccgcccaggaagcccctctgaagcctcctcgccgccgtttctgagaagatgcctgaggaaacccagacccaagaccaaccgatggaggaggaggaggttgagacgttcgcctttcaggcagaaattgcccagttgatgtcattgatcatcaatactttctactcgaacaaagagatctttctgagagagctcatttcaaattcatcagatgcattggacaaaatccggtatgaaagcttgacagatcccagtaaattagactctgggaaagagctgcatattaaccttataccgaacaaacaagatcgaactctcactattgtggatactggaattggaatgaccaaggctgacttgatcaataaccttggtactatcgccaagtctgggaccaaagcgttcatggaagctttgca

SEQ ID NO: 139853 - DNA, 595 bp, Homo sapiens
  Payload ID: 7427
  Gene Symbol: HSP90AA1
  Gene Name: heat shock protein 90kDa alpha (cytosolic), class A member 1
  ENST ID: ENST00000558600
  CDS Start-End: 296-595
aggctcctcccccgggtgtggcctccgggcggcatggctgcttcccaggtgatgccggcttcagctagtggggtctagttgaccgttccgcagccgccagggccagcggaaagccggtcagggggaaccgcggcggggctggtgtcatgagcctgaggtgaacttgagggtgcctcctcagcggtctcccgccctgccctgaggggcgccgggaccccaaagagcggaggaagagcgccaccccgacggccaccgcttcggagccagcacgcggggtaccctacggggagcgcggatgcccccgtgttcgggcggggacggctccacccctcctgggccctcccttcgggacagggactgtcccgcccagagtgctgaatacccgcgcgaccgtctggatccccgcccaggaagcccctctgaagcctcctcgccgccgtttctgagaagggcacctgttaactggtaccaagaaaaggcccaagtgtttctctggcatctgatggtgtctggatccaccactctactctgtctctggaaacagcccttccacgtctctgcattccctgtcaccgcgtcactggccttcagacag

SEQ ID NO: 139854 - DNA, 2582 bp, Homo sapiens
  Payload ID: 7428
  Gene Symbol: HSP90AB1
  Gene Name: heat shock protein 90kDa alpha (cytosolic), class B member 1
  Uniprot ID: P08238
  ENST ID: ENST00000353801
  CDS Start-End: 123-2297
ggcacgcagtagctctctcgagtcactccggcgcagtgttgggactgtctgggtatcggaaagcaagcctacgttgctcactattacgtataatccttttcttttcaagatttttattttagatgcctgaggaagtgcaccatggagaggaggaggtggagacttttgcctttcaggcagaaattgcccaactcatgtccctcatcatcaataccttctattccaacaaggagattttccttcgggagttgatctctaatgcttctgatgccttggacaagattcgctatgagagcctgacagacccttcgaagttggacagtggtaaagagctgaaaattgacatcatccccaaccctcaggaacgtaccctgactttggtagacacaggcattggcatgaccaaagctgatctcataaataatttgggaaccattgccaagtctggtactaaagcattcatggaggctcttcaggctggtgcagacatctccatgattgggcagtttggtgttggcttttattctgcctacttggtggcagagaaagtggttgtgatcacaaagcacaacgatgatgaacagtatgcttgggagtcttctgctggaggttccttcactgtgcgtgctgaccatggtgagcccattggcaggggtaccaaagtgatcctccatcttaaagaagatcagacagagtacctagaagagaggcgggtcaaagaagtagtgaagaagcattctcagttcataggctatcccatcaccctttatttggagaaggaacgagagaaggaaattagtgatgatgaggcagaggaagagaaaggtgagaaagaagaggaagataaagatgatgaagaaaaacccaagatcgaagatgtgggttcagatgaggaggatgacagcggtaaggataagaagaagaaaactaagaagatcaaagagaaatacattgatcaggaagaactaaacaagaccaagcctatttggaccagaaaccctgatgacatcacccaagaggagtatggagaattctacaagagcctcactaatgactgggaagaccacttggcagtcaagcacttttctgtagaaggtcagttggaattcagggcattgctatttattcctcgtcgggctccctttgacctttttgagaacaagaagaaaaagaacaacatcaaactctatgtccgccgtgtgttcatcatggacagctgtgatgagttgataccagagtatctcaattttatccgtggtgtggttgactctgaggatctgcccctgaacatctcccgagaaatgctccagcagagcaaaatcttgaaagtcattcgcaaaaacattgttaagaagtgccttgagctcttctctgagctggcagaagacaaggagaattacaagaaattctatgaggcattctctaaaaatctcaagcttggaatccacgaagactccactaaccgccgccgcctgtctgagctgctgcgctatcatacctcccagtctggagatgagatgacatctctgtcagagtatgtttctcgcatgaaggagacacagaagtccatctattacatcactggtgagagcaaagagcaggtggccaactcagcttttgtggagcgagtgcggaaacggggcttcgaggtggtatatatgaccgagcccattgacgagtactgtgtgcagcagctcaaggaatttgatgggaagagcctggtctcagttaccaaggagggtctggagctgcctgaggatgaggaggagaagaagaagatggaagagagcaaggcaaagtttgagaacctctgcaagctcatgaaagaaatcttagataagaaggttgagaaggtgacaatctccaatagacttgtgtcttcaccttgctgcattgtgaccagcacctacggctggacagccaatatggagcggatcatgaaagcccaggcacttcgggacaactccaccatgggctatatgatggccaaaaagcacctggagatcaaccctgaccaccccattgtggagacgctgcggcagaaggctgaggccgacaagaatgataaggcagttaaggacctggtggtgctgctgtttgaaaccgccctgctatcttctggcttttcccttgaggatccccagacccactccaaccgcatctatcgcatgatcaagctaggtctaggtattgatgaagatgaagtggcagcagaggaacccaatgctgcagttcctgatgagatcccccctctcgagggcgatgaggatgcgtctcgcatggaagaagtcgattaggttaggagttcatagttggaaaacttgtgcccttgtatagtgtccccatgggctcccactgcagcctcgagtgcccctgtcccacctggctccccctgctggtgtctagtgtttttttccctctcctgtccttgtgttgaaggcagtaaactaagggtgtcaagccccattccctctctactcttgacagcaggattggatgttgtgtattgtggtttattttattttcttcattttgttctgaaattaaagtatgcaaaataaagaatatgccgtttttataca

SEQ ID NO: 139855 - DNA, 2674 bp, Homo sapiens
  Payload ID: 7428
  Gene Symbol: HSP90AB1
  Gene Name: heat shock protein 90kDa alpha (cytosolic), class B member 1
  Uniprot ID: P08238
  ENST ID: ENST00000371554
  CDS Start-End: 215-2389
gtgcccggatgctggggcgagggagggtgcactgcggcgccccctcctcgcgtggtcctggccgacgcatgtccggcagtgacgagtgtcggcctggtggctacggccaccatctttcttgggtttggtcctgttctgtaattttgtgctgtgaaagggtcgtggtggagcttttggcttaagaattctttgtccggatttaattgctcctccgatgcctgaggaagtgcaccatggagaggaggaggtggagacttttgcctttcaggcagaaattgcccaactcatgtccctcatcatcaataccttctattccaacaaggagattttccttcgggagttgatctctaatgcttctgatgccttggacaagattcgctatgagagcctgacagacccttcgaagttggacagtggtaaagagctgaaaattgacatcatccccaaccctcaggaacgtaccctgactttggtagacacaggcattggcatgaccaaagctgatctcataaataatttgggaaccattgccaagtctggtactaaagcattcatggaggctcttcaggctggtgcagacatctccatgattgggcagtttggtgttggcttttattctgcctacttggtggcagagaaagtggttgtgatcacaaagcacaacgatgatgaacagtatgcttgggagtcttctgctggaggttccttcactgtgcgtgctgaccatggtgagcccattggcaggggtaccaaagtgatcctccatcttaaagaagatcagacagagtacctagaagagaggcgggtcaaagaagtagtgaagaagcattctcagttcataggctatcccatcaccctttatttggagaaggaacgagagaaggaaattagtgatgatgaggcagaggaagagaaaggtgagaaagaagaggaagataaagatgatgaagaaaaacccaagatcgaagatgtgggttcagatgaggaggatgacagcggtaaggataagaagaagaaaactaagaagatcaaagagaaatacattgatcaggaagaactaaacaagaccaagcctatttggaccagaaaccctgatgacatcacccaagaggagtatggagaattctacaagagcctcactaatgactgggaagaccacttggcagtcaagcacttttctgtagaaggtcagttggaattcagggcattgctatttattcctcgtcgggctccctttgacctttttgagaacaagaagaaaaagaacaacatcaaactctatgtccgccgtgtgttcatcatggacagctgtgatgagttgataccagagtatctcaattttatccgtggtgtggttgactctgaggatctgcccctgaacatctcccgagaaatgctccagcagagcaaaatcttgaaagtcattcgcaaaaacattgttaagaagtgccttgagctcttctctgagctggcagaagacaaggagaattacaagaaattctatgaggcattctctaaaaatctcaagcttggaatccacgaagactccactaaccgccgccgcctgtctgagctgctgcgctatcatacctcccagtctggagatgagatgacatctctgtcagagtatgtttctcgcatgaaggagacacagaagtccatctattacatcactggtgagagcaaagagcaggtggccaactcagcttttgtggagcgagtgcggaaacggggcttcgaggtggtatatatgaccgagcccattgacgagtactgtgtgcagcagctcaaggaatttgatgggaagagcctggtctcagttaccaaggagggtctggagctgcctgaggatgaggaggagaagaagaagatggaagagagcaaggcaaagtttgagaacctctgcaagctcatgaaagaaatcttagataagaaggttgagaaggtgacaatctccaatagacttgtgtcttcaccttgctgcattgtgaccagcacctacggctggacagccaatatggagcggatcatgaaagcccaggcacttcgggacaactccaccatgggctatatgatggccaaaaagcacctggagatcaaccctgaccaccccattgtggagacgctgcggcagaaggctgaggccgacaagaatgataaggcagttaaggacctggtggtgctgctgtttgaaaccgccctgctatcttctggcttttcccttgaggatccccagacccactccaaccgcatctatcgcatgatcaagctaggtctaggtattgatgaagatgaagtggcagcagaggaacccaatgctgcagttcctgatgagatcccccctctcgagggcgatgaggatgcgtctcgcatggaagaagtcgattaggttaggagttcatagttggaaaacttgtgcccttgtatagtgtccccatgggctcccactgcagcctcgagtgcccctgtcccacctggctccccctgctggtgtctagtgtttttttccctctcctgtccttgtgttgaaggcagtaaactaagggtgtcaagccccattccctctctactcttgacagcaggattggatgttgtgtattgtggtttattttattttcttcattttgttctgaaattaaagtatgcaaaataaagaatatgccgtttttataca

SEQ ID NO: 139856 - DNA, 2572 bp, Homo sapiens
  Payload ID: 7428
  Gene Symbol: HSP90AB1
  Gene Name: heat shock protein 90kDa alpha (cytosolic), class B member 1
  Uniprot ID: P08238
  ENST ID: ENST00000371646
  CDS Start-End: 110-2284
ggcacgcagtagctctctcgagtcactccggcgcagtgttgggactgtctgggtatcggaaagcaagcctacgttgctcactattacgtataatccttttcttttcaagatgcctgaggaagtgcaccatggagaggaggaggtggagacttttgcctttcaggcagaaattgcccaactcatgtccctcatcatcaataccttctattccaacaaggagattttccttcgggagttgatctctaatgcttctgatgccttggacaagattcgctatgagagcctgacagacccttcgaagttggacagtggtaaagagctgaaaattgacatcatccccaaccctcaggaacgtaccctgactttggtagacacaggcattggcatgaccaaagctgatctcataaataatttgggaaccattgccaagtctggtactaaagcattcatggaggctcttcaggctggtgcagacatctccatgattgggcagtttggtgttggcttttattctgcctacttggtggcagagaaagtggttgtgatcacaaagcacaacgatgatgaacagtatgcttgggagtcttctgctggaggttccttcactgtgcgtgctgaccatggtgagcccattggcaggggtaccaaagtgatcctccatcttaaagaagatcagacagagtacctagaagagaggcgggtcaaagaagtagtgaagaagcattctcagttcataggctatcccatcaccctttatttggagaaggaacgagagaaggaaattagtgatgatgaggcagaggaagagaaaggtgagaaagaagaggaagataaagatgatgaagaaaaacccaagatcgaagatgtgggttcagatgaggaggatgacagcggtaaggataagaagaagaaaactaagaagatcaaagagaaatacattgatcaggaagaactaaacaagaccaagcctatttggaccagaaaccctgatgacatcacccaagaggagtatggagaattctacaagagcctcactaatgactgggaagaccacttggcagtcaagcacttttctgtagaaggtcagttggaattcagggcattgctatttattcctcgtcgggctccctttgacctttttgagaacaagaagaaaaagaacaacatcaaactctatgtccgccgtgtgttcatcatggacagctgtgatgagttgataccagagtatctcaattttatccgtggtgtggttgactctgaggatctgcccctgaacatctcccgagaaatgctccagcagagcaaaatcttgaaagtcattcgcaaaaacattgttaagaagtgccttgagctcttctctgagctggcagaagacaaggagaattacaagaaattctatgaggcattctctaaaaatctcaagcttggaatccacgaagactccactaaccgccgccgcctgtctgagctgctgcgctatcatacctcccagtctggagatgagatgacatctctgtcagagtatgtttctcgcatgaaggagacacagaagtccatctattacatcactggtgagagcaaagagcaggtggccaactcagcttttgtggagcgagtgcggaaacggggcttcgaggtggtatatatgaccgagcccattgacgagtactgtgtgcagcagctcaaggaatttgatgggaagagcctggtctcagttaccaaggagggtctggagctgcctgaggatgaggaggagaagaagaagatggaagagagcaaggcaaagtttgagaacctctgcaagctcatgaaagaaatcttagataagaaggttgagaaggtgacaatctccaatagacttgtgtcttcaccttgctgcattgtgaccagcacctacggctggacagccaatatggagcggatcatgaaagcccaggcacttcgggacaactccaccatgggctatatgatggccaaaaagcacctggagatcaaccctgaccaccccattgtggagacgctgcggcagaaggctgaggccgacaagaatgataaggcagttaaggacctggtggtgctgctgtttgaaaccgccctgctatcttctggcttttcccttgaggatccccagacccactccaaccgcatctatcgcatgatcaagctaggtctaggtattgatgaagatgaagtggcagcagaggaacccaatgctgcagttcctgatgagatcccccctctcgagggcgatgaggatgcgtctcgcatggaagaagtcgattaggttaggagttcatagttggaaaacttgtgcccttgtatagtgtccccatgggctcccactgcagcctcgagtgcccctgtcccacctggctccccctgctggtgtctagtgtttttttccctctcctgtccttgtgttgaaggcagtaaactaagggtgtcaagccccattccctctctactcttgacagcaggattggatgttgtgtattgtggtttattttattttcttcattttgttctgaaattaaagtatgcaaaataaagaatatgccgtttttatacagtt

SEQ ID NO: 139857 - DNA, 2644 bp, Homo sapiens
  Payload ID: 7428
  Gene Symbol: HSP90AB1
  Gene Name: heat shock protein 90kDa alpha (cytosolic), class B member 1
  Uniprot ID: P08238
  ENST ID: ENST00000620073
  CDS Start-End: 180-2354
agaggggggtcccccccgcaggtactccactctcagtctgcaaaagtgtacgcccgcagagccgccccaggtgcctgggtgttgtgtgattgacgcggggaaggaggggtcagccgatccctccccaaccctccatcccatccctgaggattgggctggtacccgcgtctctcggacagatgcctgaggaagtgcaccatggagaggaggaggtggagacttttgcctttcaggcagaaattgcccaactcatgtccctcatcatcaataccttctattccaacaaggagattttccttcgggagttgatctctaatgcttctgatgccttggacaagattcgctatgagagcctgacagacccttcgaagttggacagtggtaaagagctgaaaattgacatcatccccaaccctcaggaacgtaccctgactttggtagacacaggcattggcatgaccaaagctgatctcataaataatttgggaaccattgccaagtctggtactaaagcattcatggaggctcttcaggctggtgcagacatctccatgattgggcagtttggtgttggcttttattctgcctacttggtggcagagaaagtggttgtgatcacaaagcacaacgatgatgaacagtatgcttgggagtcttctgctggaggttccttcactgtgcgtgctgaccatggtgagcccattggcaggggtaccaaagtgatcctccatcttaaagaagatcagacagagtacctagaagagaggcgggtcaaagaagtagtgaagaagcattctcagttcataggctatcccatcaccctttatttggagaaggaacgagagaaggaaattagtgatgatgaggcagaggaagagaaaggtgagaaagaagaggaagataaagatgatgaagaaaaacccaagatcgaagatgtgggttcagatgaggaggatgacagcggtaaggataagaagaagaaaactaagaagatcaaagagaaatacattgatcaggaagaactaaacaagaccaagcctatttggaccagaaaccctgatgacatcacccaagaggagtatggagaattctacaagagcctcactaatgactgggaagaccacttggcagtcaagcacttttctgtagaaggtcagttggaattcagggcattgctatttattcctcgtcgggctccctttgacctttttgagaacaagaagaaaaagaacaacatcaaactctatgtccgccgtgtgttcatcatggacagctgtgatgagttgataccagagtatctcaattttatccgtggtgtggttgactctgaggatctgcccctgaacatctcccgagaaatgctccagcagagcaaaatcttgaaagtcattcgcaaaaacattgttaagaagtgccttgagctcttctctgagctggcagaagacaaggagaattacaagaaattctatgaggcattctctaaaaatctcaagcttggaatccacgaagactccactaaccgccgccgcctgtctgagctgctgcgctatcatacctcccagtctggagatgagatgacatctctgtcagagtatgtttctcgcatgaaggagacacagaagtccatctattacatcactggtgagagcaaagagcaggtggccaactcagcttttgtggagcgagtgcggaaacggggcttcgaggtggtatatatgaccgagcccattgacgagtactgtgtgcagcagctcaaggaatttgatgggaagagcctggtctcagttaccaaggagggtctggagctgcctgaggatgaggaggagaagaagaagatggaagagagcaaggcaaagtttgagaacctctgcaagctcatgaaagaaatcttagataagaaggttgagaaggtgacaatctccaatagacttgtgtcttcaccttgctgcattgtgaccagcacctacggctggacagccaatatggagcggatcatgaaagcccaggcacttcgggacaactccaccatgggctatatgatggccaaaaagcacctggagatcaaccctgaccaccccattgtggagacgctgcggcagaaggctgaggccgacaagaatgataaggcagttaaggacctggtggtgctgctgtttgaaaccgccctgctatcttctggcttttcccttgaggatccccagacccactccaaccgcatctatcgcatgatcaagctaggtctaggtattgatgaagatgaagtggcagcagaggaacccaatgctgcagttcctgatgagatcccccctctcgagggcgatgaggatgcgtctcgcatggaagaagtcgattaggttaggagttcatagttggaaaacttgtgcccttgtatagtgtccccatgggctcccactgcagcctcgagtgcccctgtcccacctggctccccctgctggtgtctagtgtttttttccctctcctgtccttgtgttgaaggcagtaaactaagggtgtcaagccccattccctctctactcttgacagcaggattggatgttgtgtattgtggtttattttattttcttcattttgttctgaaattaaagtatgcaaaataaagaatatgccgtttttatacagttct

SEQ ID NO: 139858 - DNA, 2858 bp, Homo sapiens
  Payload ID: 7429
  Gene Symbol: HSP90B1
  Gene Name: heat shock protein 90kDa beta (Grp94), member 1
  Uniprot ID: P14625
  ENST ID: ENST00000299767
  CDS Start-End: 183-2594
gattggtgggttcatgtttcccgtcccccgcccgcgggaagtgggggtgaaaagcggcccgacctgcttgcggtgtagtgggcggaccgcgcggctggaggtgtgaggatccgaacccaggggtggggggtggaggcggctcctgcgatcgaaggggacttgagactcaccggccgcacgccatgagggccctgtgggtgctgggcctctgctgcgtcctgctgaccttcgggtcggtcagagctgacgatgaagttgatgtggatggtacagtagaagaggatctgggtaaaagtagagaaggatcaaggacggatgatgaagtagtacagagagaggaagaagctattcagttggatggattaaatgcatcacaaataagagaacttagagagaagtcggaaaagtttgccttccaagccgaagttaacagaatgatgaaacttatcatcaattcattgtataaaaataaagagattttcctgagagaactgatttcaaatgcttctgatgctttagataagataaggctaatatcactgactgatgaaaatgctctttctggaaatgaggaactaacagtcaaaattaagtgtgataaggagaagaacctgctgcatgtcacagacaccggtgtaggaatgaccagagaagagttggttaaaaaccttggtaccatagccaaatctgggacaagcgagtttttaaacaaaatgactgaagcacaggaagatggccagtcaacttctgaattgattggccagtttggtgtcggtttctattccgccttccttgtagcagataaggttattgtcacttcaaaacacaacaacgatacccagcacatctgggagtctgactccaatgaattttctgtaattgctgacccaagaggaaacactctaggacggggaacgacaattacccttgtcttaaaagaagaagcatctgattaccttgaattggatacaattaaaaatctcgtcaaaaaatattcacagttcataaactttcctatttatgtatggagcagcaagactgaaactgttgaggagcccatggaggaagaagaagcagccaaagaagagaaagaagaatctgatgatgaagctgcagtagaggaagaagaagaagaaaagaaaccaaagactaaaaaagttgaaaaaactgtctgggactgggaacttatgaatgatatcaaaccaatatggcagagaccatcaaaagaagtagaagaagatgaatacaaagctttctacaaatcattttcaaaggaaagtgatgaccccatggcttatattcactttactgctgaaggggaagttaccttcaaatcaattttatttgtacccacatctgctccacgtggtctgtttgacgaatatggatctaaaaagagcgattacattaagctctatgtgcgccgtgtattcatcacagacgacttccatgatatgatgcctaaatacctcaattttgtcaagggtgtggtggactcagatgatctccccttgaatgtttcccgcgagactcttcagcaacataaactgcttaaggtgattaggaagaagcttgttcgtaaaacgctggacatgatcaagaagattgctgatgataaatacaatgatactttttggaaagaatttggtaccaacatcaagcttggtgtgattgaagaccactcgaatcgaacacgtcttgctaaacttcttaggttccagtcttctcatcatccaactgacattactagcctagaccagtatgtggaaagaatgaaggaaaaacaagacaaaatctacttcatggctgggtccagcagaaaagaggctgaatcttctccatttgttgagcgacttctgaaaaagggctatgaagttatttacctcacagaacctgtggatgaatactgtattcaggcccttcccgaatttgatgggaagaggttccagaatgttgccaaggaaggagtgaagttcgatgaaagtgagaaaactaaggagagtcgtgaagcagttgagaaagaatttgagcctctgctgaattggatgaaagataaagcccttaaggacaagattgaaaaggctgtggtgtctcagcgcctgacagaatctccgtgtgctttggtggccagccagtacggatggtctggcaacatggagagaatcatgaaagcacaagcgtaccaaacgggcaaggacatctctacaaattactatgcgagtcagaagaaaacatttgaaattaatcccagacacccgctgatcagagacatgcttcgacgaattaaggaagatgaagatgataaaacagttttggatcttgctgtggttttgtttgaaacagcaacgcttcggtcagggtatcttttaccagacactaaagcatatggagatagaatagaaagaatgcttcgcctcagtttgaacattgaccctgatgcaaaggtggaagaagagcccgaagaagaacctgaagagacagcagaagacacaacagaagacacagagcaagacgaagatgaagaaatggatgtgggaacagatgaagaagaagaaacagcaaaggaatctacagctgaaaaagatgaattgtaaattatactctcaccatttggatcctgtgtggagagggaatgtgaaatttacatcatttctttttgggagagacttgttttggatgccccctaatccccttctcccctgcactgtaaaatgtgggattatgggtcacaggaaaaagtgggttttttagttgaattttttttaacattcctcatgaatgtaaatttgtactatttaactgactattcttgatgtaaaatcttgtcatgtgtataaaaataaaaaagatcccaaata

SEQ ID NO: 139859 - DNA, 590 bp, Homo sapiens
  Payload ID: 7429
  Gene Symbol: HSP90B1
  Gene Name: heat shock protein 90kDa beta (Grp94), member 1
  ENST ID: ENST00000540297
  CDS Start-End: 107-268
agtgggcggaccgcgcggctggaggtgtgaggatccgaacccaggggtggggggtggaggcggctcctgcgatcgaaggggacttgagactcaccggccgcacgccatgagggccctgtgggtgctgggcctctgctgcgtcctgctgaccttcgggtcggtcagagctgacgatgaagttgatgtggatggtacagtagaagaggatctgggtaaaagtagagaaggatcaaggacggatgatgaagtagtacagaggtccagataaagtctaacaccctgtatttaaatacccgagaggaagaagctattcagttggatggattaaatgcatcacaaataagagaacttagagagaagtcggaaaagtttgccttccaagccgaagttaacagaatgatgaaacttatcatcaattcattgtataaaaataaagagattttcctgagagaactgatttcaaatgcttctgatgctttagataagataaggctaatatcactgactgatgaaaatgctctttctggaaatgaggaactaacagtcaaaattaagtgtgataaggagaagaacctgctgcatgtcacaga

SEQ ID NO: 139860 - DNA, 581 bp, Homo sapiens
  Payload ID: 7429
  Gene Symbol: HSP90B1
  Gene Name: heat shock protein 90kDa beta (Grp94), member 1
  ENST ID: ENST00000549334
  CDS Start-End: 436-581
attcattggacgttttcccttagaggccaaggccgcccaggcaaaggggcggtcccacgtgtgaggggcccgcggagccatttgattggagaaaagctgcaaaccctgaccaatcggaaggagccacgcttcgggcatcggtcaccgcacctggacagctccgattggtggacttccgccccccctcacgaatcctcattgggtgccgtgggtgcgtggtgcggcgcgattgggtcggtcagagctgacgatgaagttgatgtggatggtacagtagaagaggatctgggtaaaagtagagaaggatcaaggacggatgatgaagtagtacagagagaggaagaagctattcagttggatggattaaatgcatcacaaataagagaacttagagagaagtcggaaaagtttgccttccaagccgaagttaacagaatgatgaaacttatcatcaattcattgtataaaaataaagagattttcctgagagaactgatttcaaatgcttctgatgctttagataagataaggctaatatcactgactgatgaaaatgctctttctggaaatgaggaactaac

SEQ ID NO: 139861 - DNA, 694 bp, Homo sapiens
  Payload ID: 7429
  Gene Symbol: HSP90B1
  Gene Name: heat shock protein 90kDa beta (Grp94), member 1
  ENST ID: ENST00000550595
  CDS Start-End: 1-443
gccagtacggatggtctggcaacatggagagaatcatgaaagcacaagcgtaccaaacgggcaaggacatctctacaaattactatgcgagtcagaagaaaacatttgaaattaatcccagacacccgctgatcagagacatgcttcgacgaattaaggaagatgaagatgataaaacagttttggatcttgctgtggttttgtttgaaacagcaacgcttcggtcagggtatcttttaccagacactaaagcatatggagatagaatagaaagaatgcttcgcctcagtttgaacattgaccctgatgcaaaggtggaagaagagcccgaagaagaacctgaagagacagcagaagacacaacagaagacacagagcaagacgaagatgaagaaatggatgtgggaacagatgaagaagaagaaacagcaaagatgagctgagctggacaactaaaagcacctgtagcagttctccccaacacagcactgagcacaagtctaggcagtcatcatggtctcctctgctcgactctgcccagaccttccagttctccgaccgaaagacttgtgatccagttttgctacaaagaacaaagtggttgacaacagtgacagtaattgctggagcaaaaccaaaagacataggtaaagaacatataaatgttaataaagcacactgctttcaacacaca

SEQ ID NO: 139862 - DNA, 1338 bp, Homo sapiens
  Payload ID: 7429
  Gene Symbol: HSP90B1
  Gene Name: heat shock protein 90kDa beta (Grp94), member 1
  ENST ID: ENST00000614327
  CDS Start-End: 79-1026
gaggatccgaacccaggggtggggggtggaggcggctcctgcgatcgaaggggacttgagactcaccggccgcacgccatgagggccctgtgggtgctgggcctctgctgcgtcctgctgaccttcgggtcggtcagagctgacgatgaagttgatgtggatggtacagtagaagaggatctgggtaaaagtagagaaggatcaaggacggatgatgaagtagtacagagagaggaagaagctattcagttggatggattaaatgcatcacaaataagagaacttagagagaagtcggaaaagtttgccttccaagccgaagttaacagaatgatgaaacttatcatcaattcattgtataaaaataaagagattttcctgagagaactgatttcaaatgcttctgatgctttagataagataaggctaatatcactgactgatgaaaatgctctttctggaaatgaggaactaacagtcaaaattaagtgtgataaggagaagaacctgctgcatgtcacagacaccggtgtaggaatgaccagagaagagttggttaaaaaccttggtaccatagccaaatctgggacaagcgagtttttaaacaaaatgactgaagcacaggaagatggccagtcaacttctgaattgattggccagtttggtgtcggtttctattccgccttccttgtagcagataaggttattgtcacttcaaaacacaacaacgatacccagcacatctgggagtctgactccaatgaattttctgtaattgctgacccaagaggaaacactctaggacggggaacgacaattacccttgtcttaaaagaagaagcatctgattaccttgaattggatacaattaaaaatctcgtcaaaaaatattcacagttcataaactttcctatttatgtatggagcagcaagactgaaactgttgaggagcccatggaggaagaagaagcagccaaagaagagaaagaagaatctgatgatgaagctgcagcaagacgaagatgaagaaatggatgtgggaacagatgaagaagaagaaacagcaaaggaatctacagctgaaaaagatgaattgtaaattatactctcaccatttggatcctgtgtggagagggaatgtgaaatttacatcatttctttttgggagagacttgttttggatgccccctaatccccttctcccctgcactgtaaaatgtgggattatgggtcacaggaaaaagtgggttttttagttgaattttttttaacattcctcatgaatgtaaatttgtactatttaactgactattcttgatgtaaaatcttgtcatgtgt

SEQ ID NO: 139863 - DNA, 915 bp, Homo sapiens
  Payload ID: 7430
  Gene Symbol: HSPB11
  Gene Name: heat shock protein family B (small), member 11
  Uniprot ID: Q9Y547
  ENST ID: ENST00000194214
  CDS Start-End: 391-825
gggtaggagcgagcgcgcccgggaactcggtggagcgagcgcgcccgggaactcggtggaggccgcggtggcggggtggggcggggctgagggcagggcggggcctgtgggagtcgtggcgcaaagagctcggggtaggagcgcgcgcccggaaactcagcggtggccgcggcgaaggggcggggctgagggtgggacggggcttgtgggaggcgtggcgcgaagatttcagagttggagcgcgcgcgaccccggactccacggaggccgcggcgagcaggcggagctgcgggtcgggacgctctgcgtggggcggggcgcaagggaggtttcgagcccggaaggtccggcgcccagagctaacgggagtcccaggttaaacactttaagatgagaaaaattgatctctgtctgagctctgaagggtccgaagtgattttagctacatcaagtgatgaaaaacacccacctgaaaatatcattgatgggaatccagaaacgttttggaccaccacaggaatgtttccccaggaattcattatttgtttccacaaacatgtaaggattgaaaggcttgtaatccaaagttactttgtacagaccttgaagattgaaaaaagcacgtctaaagagccagttgattttgagcaatggattgaaaaagatttggtacacacagaggggcagcttcaaaatgaagaaattgtggcacatgatggctccgctacttacttgagattcattattgtatcagcctttgatcattttgcatctgtgcatagcgtttctgcagaaggaacagtagtctcaaatctttcctcataatgataacaaaatgctcttgcatgattttttaacaatatatttaaacaggaagttgtcactgatatactttattaaaaggatttttatcaa

SEQ ID NO: 139864 - DNA, 765 bp, Homo sapiens
  Payload ID: 7430
  Gene Symbol: HSPB11
  Gene Name: heat shock protein family B (small), member 11
  ENST ID: ENST00000371376
  CDS Start-End: 19-243
caggttaaacactttaagatgagaaaaattgatctctgtctgagctctgaagggtccgaagtgattttagctacatcaagtgatgaaaaacacccacctgaaaatatcattgatgggaatccagaaacgttttggaccaccacaggaatgtttccccaggaattcattatttgtttccacaaacatgtaaggattgaaaggcttgtaatccaaagttactttggtaagcaaatcttacattaattttttttttttttttttggtgctccaggtaaggctaatattttagttttcattatcctttcattttttccacaggcagaaggcatatatgtaaacttttggcaaaacactagtttttctttatagcatggaatccagttttattgctggggtgaaaggatggggattatgaggtaaatgccttgagctcagttggcctctctcaaactgcaaattcgaaacccttccaaagcacataataatttccatgcaatttactatgtaaaagtctttggcaaaaggccctattaggaacataagactccagcttgctagaacactattccatgacatctttattctagattcatttgtcctggagttatttgtcaaattcttgttgaaaatctgataactctgattatttacattggatagttgagattcttctattactagtggcattttctcaggaatttagggggataatctcccttgggacatcattctaatcctatttatttaaagataaaatgtatcaga

SEQ ID NO: 139865 - DNA, 760 bp, Homo sapiens
  Payload ID: 7430
  Gene Symbol: HSPB11
  Gene Name: heat shock protein family B (small), member 11
  ENST ID: ENST00000371377
  CDS Start-End: 72-410
gcaagggaggtttcgagcccggaaggtccggcgcccagagctaacgggagtcccaggttaaacactttaagatgagaaaaattgatctctgtctgagctctgaagggtccgaagtgattttagctacatcaagtgatgaaaaacacccacctgaaaatatcattgatgggaatccagaaacgttttggaccaccacaggaatgtttccccaggaattcattatttgtttccacaaacatgtaaggattgaaaggcttgtaatccaaagttactttgtacagaccttgaagattgaaaaaagcacgtctaaagagccagttgattttgagcaatggattgaaaaagatttggtacacacagaggggcagcttcaaaatgaagaaattgtggtaagtgaatatactttatagaattaaaaattaacctgcacaatgtatttagactttaacctatctccatagtcatagttaataaatttcctcatgatattataggtttgtacctaaatcaaccggtagagaaagttattctcaataataatataagctaaatgtacattcataaattaggttcttacctttcatagagagtgacggcaagataaaacaattcatttattttttgttttatttttctcattcatttactttgaagtatttatttggtttgctttctttcatttgattctgtaggcattttagaataggaatgaaaaaagggtcgcgatgccaaaattgaatgttaatttaagcatgaaagg

SEQ ID NO: 139866 - DNA, 894 bp, Homo sapiens
  Payload ID: 7430
  Gene Symbol: HSPB11
  Gene Name: heat shock protein family B (small), member 11
  ENST ID: ENST00000371378
  CDS Start-End: 34-678
agctaacgggagtcccaggttaaacactttaagatgagaaaaattgatctctgtctgagctctgaagggtccgaagtgattttagctacatcaagtgatgaaaaacacccacctgaaaatatcattgatgggaatccagaaacgttttggaccaccacaggaatgtttccccaggaattcattatttgtttccacaaacatgtaaggattgaaaggcttgtaatccaaagttactttgtacagaccttgaagattgaaaaaagcacgtctaaagagccagttgattttgagcaatggattgaaaaagatttggtacacacagaggggcagcttcaaaatgaagaaattgtggccggagtgggatggcgctatcttggctcactgcaacctccgtctcccgggttcaagcgattctcctgcctcagcctccctaggagctgggattacaggcacctgccaccacacccagctaatttttttgcatttttagtaaagatggggttttgccatgttggccaggctggtctcgaactccagacctcaggtgatctgcccacctcagcctcccaaagtgctgggattacaggtgtgagccactgcgcccggcccggaaaagcaaattttaaatggagaagagtaggaaaggcatttcaaaagccaccttggtataccagataagagatgtgaaggtgagtagtcattcataatgatgaatttggggaaagatgaataaaaaagtctgagtagagcaaaaagtgaaactaaaactgaacattacggctagatcacaggctttcaggtattttcttgtaacactggaaccatttaaggtttttgagaaggaatgtgaattatagcaattgtgttcatgttcaataaaatgaaatgctgagc

SEQ ID NO: 139867 - DNA, 1458 bp, Homo sapiens
  Payload ID: 7431
  Gene Symbol: HSPB6
  Gene Name: heat shock protein, alpha-crystallin-related, B6
  Uniprot ID: O14558
  ENST ID: ENST00000004982
  CDS Start-End: 22-504
actgcaacgcggaggagcaggatggagatccctgtgcctgtgcagccgtcttggctgcgccgcgcctcggccccgttgcccggactttcggcgcccggacgcctctttgaccagcgcttcggcgaggggctgctggaggccgagctggctgcgctctgccccaccacgctcgccccctactacctgcgcgcacccagcgtggcgctgcccgtcgcccaggtgccgacggaccccggccacttttcggtgctgctagacgtgaagcacttctcgccggaggaaattgctgtcaaggtggtgggcgaacacgtggaggtgcacgcgcgccacgaggagcgcccggatgagcacggattcgtcgcgcgcgagttccaccgtcgctaccgcctgccgcctggcgtggatccggctgccgtgacgtccgcgctgtcccccgagggcgtcctgtccatccaggccgcaccagcgtcggcccaggccccaccgccagccgcagccaagtaggagggggctgggccgcgcccgcaccccgggagcctcctcaggctccctctattaaagccgatctgactccgcccagccagatgtcccgagtgcgccaaggactgtcctctcacccactcctggattctgccctgacctccatcctggacactgccttgataacatagacccttccactgacaccctcgctctcacaccccctccagctttccgaccccacaccgacaactccccggcttccagaccctaccagcactaccctaaccctcagccgacagtctcagccccaccgacccactttcttggcatatagccccacttaagacccctcctctacttccttctgagtcctctacaaagacatccgggtactacatttccatcccttccctattttgacaccaaattatggtgtagacagccctcccccaaccccaggccagtcaggcacaatccccccaccccccaaacgtcctggactgcacagacctcccactccagaccatccaggcctggttcccaagacccgatccttcccctgcaaccagacagtctacaactgccccctccagcccattttctgccgtgaaaccccagccagccacaccagactctggaaccctttttcgactgccccaactcttggacaccaggccaactagaacacccaacaccaaactgtacagactctcccaccccaacctccccagactctgcacggatgtcctaggccccctccccaactctaaccagaccccatccccctaagtccctttgtcttgacccccaagtcttcaaccagatatcctcggcaacccacctcccaccctcctcctcttctccttcaagacccaactgagcacccgctctgattccccacagcctttctccctgccaccactcccttagtctttcccaggcttactctcccaataaatgtgctagagctctgcc

SEQ ID NO: 139868 - DNA, 711 bp, Homo sapiens
  Payload ID: 7431
  Gene Symbol: HSPB6
  Gene Name: heat shock protein, alpha-crystallin-related, B6
  ENST ID: ENST00000587965
  CDS Start-End: 2-415
gatggagatccctgtgcctgtgcagccgtcttggctgcgccgcgcctcggccccgttgcccggactttcggcgcccggacgcctctttgaccagcgcttcggcgaggggctgctggaggccgagctggctgcgctctgccccaccacgctcgccccctactacctgcgcgcacccagcgtggcgctgcccgtcgcccaggtgccgacggaccccggccacttttcggtgctgctagacgtgaagcacttctcgccggaggaaattgctgtcaaggtggtgggcgaacacgtggaggtgcacgcgcgccacgaggagcgcccggtgagccgcggcgtggggcggggctggagcgggtacgctcgccgccgggccggaggggcggggccgctcaagcctccctcccctccaggatgagcacggattcgtcgcgcgcgagttccaccgtcgctaccgcctgccgcctggcgtggatccggctgccgtgacgtccgcgctgtcccccgagggcgtcctgtccatccaggccgcaccagcgtcggcccaggccccaccgccagccgcagccaagtaggagggggctgggccgcgcccgcaccccgggagcctcctcaggctccctctattaaagccgatctgactccgcccagccagatgtcccgagtgcgccaaggactgtcctctcacccactcctggattctgccctgacctc

SEQ ID NO: 139869 - DNA, 1634 bp, Homo sapiens
  Payload ID: 7431
  Gene Symbol: HSPB6
  Gene Name: heat shock protein, alpha-crystallin-related, B6
  Uniprot ID: O14558
  ENST ID: ENST00000592984
  CDS Start-End: 198-680
gaccaatgaaagagaggaaacagaagtacccggagggaggtgtttcaggattggctgggacgactgcctgcccgacagggcgtgtttgattggagaacctgccgagtgtagcagtaattggcaagaccgtgcaccaatgggaaggatctgaggctgggcttgcggttaggaggggcactgcaacgcggaggagcaggatggagatccctgtgcctgtgcagccgtcttggctgcgccgcgcctcggccccgttgcccggactttcggcgcccggacgcctctttgaccagcgcttcggcgaggggctgctggaggccgagctggctgcgctctgccccaccacgctcgccccctactacctgcgcgcacccagcgtggcgctgcccgtcgcccaggtgccgacggaccccggccacttttcggtgctgctagacgtgaagcacttctcgccggaggaaattgctgtcaaggtggtgggcgaacacgtggaggtgcacgcgcgccacgaggagcgcccggatgagcacggattcgtcgcgcgcgagttccaccgtcgctaccgcctgccgcctggcgtggatccggctgccgtgacgtccgcgctgtcccccgagggcgtcctgtccatccaggccgcaccagcgtcggcccaggccccaccgccagccgcagccaagtaggagggggctgggccgcgcccgcaccccgggagcctcctcaggctccctctattaaagccgatctgactccgcccagccagatgtcccgagtgcgccaaggactgtcctctcacccactcctggattctgccctgacctccatcctggacactgccttgataacatagacccttccactgacaccctcgctctcacaccccctccagctttccgaccccacaccgacaactccccggcttccagaccctaccagcactaccctaaccctcagccgacagtctcagccccaccgacccactttcttggcatatagccccacttaagacccctcctctacttccttctgagtcctctacaaagacatccgggtactacatttccatcccttccctattttgacaccaaattatggtgtagacagccctcccccaaccccaggccagtcaggcacaatccccccaccccccaaacgtcctggactgcacagacctcccactccagaccatccaggcctggttcccaagacccgatccttcccctgcaaccagacagtctacaactgccccctccagcccattttctgccgtgaaaccccagccagccacaccagactctggaaccctttttcgactgccccaactcttggacaccaggccaactagaacacccaacaccaaactgtacagactctcccaccccaacctccccagactctgcacggatgtcctaggccccctccccaactctaaccagaccccatccccctaagtccctttgtcttgacccccaagtcttcaaccagatatcctcggcaacccacctcccaccctcctcctcttctccttcaagacccaactgagcacccgctctgattccccacagcctttctccctgccaccactcccttagtctttcccaggcttactctcccaataaatgtgctagagctctgcc

SEQ ID NO: 139870 - DNA, 1922 bp, Homo sapiens
  Payload ID: 7432
  Gene Symbol: HSPB9
  Gene Name: heat shock protein, alpha-crystallin-related, B9
  Uniprot ID: Q9BQS6
  ENST ID: ENST00000565659
  CDS Start-End: 1421-1900
ctcactgcctccagcttccagacttttctgtcctgtctcttggcccctgacagccaagtgaggcctgagtgaaggccccacattgacccctcttcacttgtaatctcttttaatggagtccgggagagtcacgatggctgtcctcttggggacaaggagtcttggggagaatcgtggggtctgcctctttcacgcgcctgtctcccacttaaccccctcccccaactcccgcacaggccctgccccacgcggctccggacacggaattgcagctgcggtagagatgagatgtagcaacagttctgcagtagtgtggtggtgacttgggtgtgttctcctcctgacattcacctgcacctttttctgcgcttttcagtatgtatgtatttaatagtatcactcaacaaaaaggagtttatcaggccgggtggctggctcacgcgggaggagagcttgagccctgcaggagttcgagaccaggctgggcaacattgggagaccccccccaccaatctctacaaaaaaataaaaaataaagtttataggctgggcgaggtggctcacgcctgtaatctcagcactttgggaggccgagatgggaggatcgcttgagcccaggagttcgagattaacctgggcaacataatgataccctgtctcttaaaaaaaaaaaattatcaaataacagcaccagaggcatagctgtggttatgatggtcaccaagaaggctactgacgtggagggtgaggcggaggagggctaggtctttctctgtgcactgggagccactctcctgaagccccaactgcgtcttcatctttgtggccccagagcccagaccacagcctgcagcacaggacgccccgggaagaattaatgcagccggagagaccagtccacctcctcgtgtcgcgtgtccgcgtggggttgtgggtggtcagggagaggtagggtggatgacccaggaaggccgccctcccctggctctgtctaggaacaatccttgccccaggcctggtccttagaaggcaagacagcccccttccagctgggggatcaatctgctgttggctgcgccagggtgcggctccctcgggtctggcctggtcgtggatccagttccttcacagctgcggcctccccgggtccattaacgaaggtggggaagggcggagaaagggtcggagtctgggaggagagcagctgcgggcgcgccagggcgctgacagtctggctcttggaggtaagatgggcgtggctgatcccgaactccgcctgcgtttgcagaagcgaagggaaccgagcgagcggagctgagctcgggtaggccgcgcgaggtccctcctctccgggcgtccgtgcgcctagctctgcgctgggagcctcgcgccctttgacagcagttagttgctgactcggatgcagagagtcggtaacaccttctccaacgagagccgggtggcatcccggtgtcccagcgtgggccttgctgaacggaaccgggtggccacaatgccggtgcggctgctcagggacagtccagcggctcaggaggacaatgaccatgccagagacggtttccaaatgaagctggatgcccacggcttcgccccggaggaactggtggtgcaggtggatggccaatggctgatggtgaccggacagcagcaactggacgtcagggacccggaaagggtcagttaccgcatgtcacagaaggtgcaccggaaaatgctcccgtccaacctgagtcctaccgccatgacctgctgcctgaccccctccgggcagctgtgggtcagaggccagtgtgtggcgctggccctccctgaagcccaaacaggaccgtccccgagactcgggagcctcggctctaaggcttccaacctgacccggtaaacaaacgacgcgatgtgcagca

SEQ ID NO: 139871 - DNA, 2105 bp, Homo sapiens
  Payload ID: 7433
  Gene Symbol: HSF1
  Gene Name: heat shock transcription factor 1
  ENST ID: ENST00000400780
  CDS Start-End: 168-1655
gcgggagcgcgcccgttgcaagatggcggcggccatgctgggccccggggctgtgtgtgcgcagcgggcggcggcgcggcccggaaggctggcgcggcgacggcgttagcccggccctcggcccctctttgcggccgctccctccgcctattccctccttgctcgagatggatctgcccgtgggccccggcgcggcggggcccagcaacgtcccggccttcctgaccaagctgtggaccctcgtgagcgacccggacaccgacgcgctcatctgctggagcccgagcgggaacagcttccacgtgttcgaccagggccagtttgccaaggaggtgctgcccaagtacttcaagcacaacaacatggccagcttcgtgcggcagctcaacatgtatggcttccggaaagtggtccacatcgagcagggcggcctggtcaagccagagagagacgacacggagttccagcacccatgcttcctgcgtggccaggagcagctccttgagaacatcaagaggaaagtgaccagtgtgtccaccctgaagagtgaagacataaagatccgccaggacagcgtcaccaagctgctgacggacgtgcagctgatgaaggggaagcaggagtgcatggactccaagctcctggccatgaagcatgagaatgaggctctgtggcgggaggtggccagccttcggcagaagcatgcccagcaacagaaagtcgtcaacaagctcattcagttcctgatctcactggtgcagtcaaaccggatcctgggggtgaagagaaagatccccctgatgctgaacgacagtggctcagcacattccatgcccaagtatagccggcagttctccctggagcacgtccacggctcgggcccctactcggccccctccccagcctacagcagctccagcctctacgcccctgatgctgtggccagctctggacccatcatctccgacatcaccgagctggctcctgccagccccatggcctcccccggcgggagcatagacgagaggcccctatccagcagccccctggtgcgtgtcaaggaggagccccccagcccgcctcagagcccccgggtagaggaggcgagtcccgggcgcccatcttccgtggacaccctcttgtccccgaccgccctcattgactccatcctgcgggagagtgaacctgcccccgcctccgtcacagccctcacggacgccaggggccacacggacaccgagggccggcctccctcccccccgcccacctccacccctgaaaagtgcctcagcgtagcctgcctggacaatttggctcgcactccacagatgtctagggtcgcccgcctcttcccctgcccctcttcctctccgcatggccaagtccagccagggaatgagctcagtgaccacttggatgctatggactccaacctggataacctgcagaccatgctgagcagccacggcttcagcgtggacaccagtgccctgctggacatccaagagctcctgtctccccaggagccccccaggcctcccgaggcagagaacagcagcccggattcagctggtgcactacacagcgcagccgctgttcctgctggaccccggctccgtggacaccgggagcaacgacctgccggtgctgtttgagctgggagagggctcctacttctccgaaggggacggcttcgccgaggaccccaccatctccctgctgacaggctcggagcctcccaaagccaaggaccccactgtctcctagaggccccggaggagctgggccagccgcccacccccacccccagtgcagggctggtcttggggaggcagggcagcctcgcggtcttgggcactggtgggtcggccgccatagccccagtaggacaaacgggctcgggtctgggcagcacctctggtcaggagggtcaccctggcctgccagtctgccttcccccaaccccgtgtcctgtggtttggttggggcttcacagccacacctggactgaccctgcaggttgttcatagtcagaattgtattttggatttttacacaactgtcccgttccccgctccacagagatacacagatatatacacaca

SEQ ID NO: 139872 - DNA, 2142 bp, Homo sapiens
  Payload ID: 7433
  Gene Symbol: HSF1
  Gene Name: heat shock transcription factor 1
  Uniprot ID: Q00613
  ENST ID: ENST00000528838
  CDS Start-End: 161-1750
cgcgcccgttgcaagatggcggcggccatgctgggccccggggctgtgtgtgcgcagcgggcggcggcgcggcccggaaggctggcgcggcgacggcgttagcccggccctcggcccctctttgcggccgctccctccgcctattccctccttgctcgagatggatctgcccgtgggccccggcgcggcggggcccagcaacgtcccggccttcctgaccaagctgtggaccctcgtgagcgacccggacaccgacgcgctcatctgctggagcccgagcgggaacagcttccacgtgttcgaccagggccagtttgccaaggaggtgctgcccaagtacttcaagcacaacaacatggccagcttcgtgcggcagctcaacatgtatggcttccggaaagtggtccacatcgagcagggcggcctggtcaagccagagagagacgacacggagttccagcacccatgcttcctgcgtggccaggagcagctccttgagaacatcaagaggaaagtgaccagtgtgtccaccctgaagagtgaagacataaagatccgccaggacagcgtcaccaagctgctgacggacgtgcagctgatgaaggggaagcaggagtgcatggactccaagctcctggccatgaagcatgagaatgaggctctgtggcgggaggtggccagccttcggcagaagcatgcccagcaacagaaagtcgtcaacaagctcattcagttcctgatctcactggtgcagtcaaaccggatcctgggggtgaagagaaagatccccctgatgctgaacgacagtggctcagcacattccatgcccaagtatagccggcagttctccctggagcacgtccacggctcgggcccctactcggccccctccccagcctacagcagctccagcctctacgcccctgatgctgtggccagctctggacccatcatctccgacatcaccgagctggctcctgccagccccatggcctcccccggcgggagcatagacgagaggcccctatccagcagccccctggtgcgtgtcaaggaggagccccccagcccgcctcagagcccccgggtagaggaggcgagtcccgggcgcccatcttccgtggacaccctcttgtccccgaccgccctcattgactccatcctgcgggagagtgaacctgcccccgcctccgtcacagccctcacggacgccaggggccacacggacaccgagggccggcctccctcccccccgcccacctccacccctgaaaagtgcctcagcgtagcctgcctggacaagaatgagctcagtgaccacttggatgctatggactccaacctggataacctgcagaccatgctgagcagccacggcttcagcgtggacaccagtgccctgctggacctgttcagcccctcggtgaccgtgcccgacatgagcctgcctgaccttgacagcagcctggccagtatccaagagctcctgtctccccaggagccccccaggcctcccgaggcagagaacagcagcccggattcagggaagcagctggtgcactacacagcgcagccgctgttcctgctggaccccggctccgtggacaccgggagcaacgacctgccggtgctgtttgagctgggagagggctcctacttctccgaaggggacggcttcgccgaggaccccaccatctccctgctgacaggctcggagcctcccaaagccaaggaccccactgtctcctagaggccccggaggagctgggccagccgcccacccccacccccagtgcagggctggtcttggggaggcagggcagcctcgcggtcttgggcactggtgggtcggccgccatagccccagtaggacaaacgggctcgggtctgggcagcacctctggtcaggagggtcaccctggcctgccagtctgccttcccccaaccccgtgtcctgtggtttggttggggcttcacagccacacctggactgaccctgcaggttgttcatagtcagaattgtattttggatttttacacaactgtcccgttccccgctccacagagatacacagatatatacacacagtggatggacggacaagacaggcagagatctataaacagacaggctctatgcta

SEQ ID NO: 139873 - DNA, 561 bp, Homo sapiens
  Payload ID: 7433
  Gene Symbol: HSF1
  Gene Name: heat shock transcription factor 1
  ENST ID: ENST00000533240
  CDS Start-End: 146-561
agaatctgctgttcacatcccggctgtgacgtcgtgtccggtgaggggcagagccaccgcctgcggctgcgggaacagcttccacgtgttcgaccagggccagtttgccaaggaggtgctgcccaagtacttcaagcacaacaacatggccagcttcgtgcggcagctcaacatgtatggcttccggaaagtggtccacatcgagcagggcggcctggtcaagccagagagagacgacacggagttccagcacccatgcttcctgcgtggccaggagcagctccttgagaacatcaagaggaaagtgaccagtgtgtccaccctgaagagtgaagacataaagatccgccaggacagcgtcaccaagctgctgacggacgtgcagctgatgaaggggaagcaggagtgcatggactccaagctcctggccatgaagcatgagaatgaggctctgtggcgggaggtggccagccttcggcagaagcatgcccagcaacagaaagtcgtcaacaagctcattcagttcctgatctcactggtgcagtcaaaccggatcctggg

SEQ ID NO: 139874 - DNA, 552 bp, Homo sapiens
  Payload ID: 7433
  Gene Symbol: HSF1
  Gene Name: heat shock transcription factor 1
  ENST ID: ENST00000530661
  CDS Start-End: 1-144
atcatctccgacatcaccgagctggctcctgccagccccatggcctcccccggcgggagcatagacgagagccctcacggacgccaggggccacacggacaccgagggccggcctccctcccccccgcccacctccacccctgaaaagtgcctcagcgtagcctgcctggacaatttggctcgcactccacagatgtctagggtcgcccgcctcttcccctgcccctcttcctctccgcatggccaagtccagccagggaatgagctcagtgaccacttggatgctatggactccaacctggataacctgcagaccatgctgagcagccacggcttcagcgtggacaccagtgccctgctggacctgttcagcccctcggtgaccgtgcccgacatgagcctgcctgaccttgacagcagcctggccagtatccaagagctcctgtctccccaggagccccccaggcctcccgaggcagagaacagcagcccggattcagggaagcagctggtgcactacacagcgcagccgctgttcctgctggaccccgg

SEQ ID NO: 139875 - DNA, 775 bp, Homo sapiens
  Payload ID: 7433
  Gene Symbol: HSF1
  Gene Name: heat shock transcription factor 1
  ENST ID: ENST00000528988
  CDS Start-End: 154-348
gttgcaagatggcggcggccatgctgggccccggggctgtgtgtgcgcagcgggcggcggcgcggcccggaaggctggcgcggcgacggcgttagcccggccctcggcccctctttgcggccgctccctccgcctattccctccttgctcgagatggatctgcccgtgggccccggcgcggcggggcccagcaacgtcccggccttcctgaccaagctgtggaccctcgtgagcgacccggacaccgacgcgctcatctgctggagcccgttgcctggcagcaggcttgtttacatggtccgaccctgcaagaccggacagctccggtttgcagaagtaaatcagtgattgtctggagttggagatcagaatctgctgttcacatcccggctgtgacgtcgtgtccgaccgagtcttgctctgtcacccaggttggagtgcagtggtgcgatctcggctcactgcgacctccacctcccgggttcaagcaattctgcctcagcctcccgagtagccaggactacagagcgggaacagcttccacgtgttcgaccagggccagtttgccaaggaggtgctgcccaagtacttcaagcacaacaacatggccagcttcgtgcggcagctcaacatgtatggcttccggaaagtggtccacatcgagcagggcggcctggtcaagccagagagagacgacacggagttccagcacccatgcttcctgcgtggccaggagcagctccttgagaacatcaagaggaaagtgaccagtgtg

SEQ ID NO: 139876 - DNA, 684 bp, Homo sapiens
  Payload ID: 7433
  Gene Symbol: HSF1
  Gene Name: heat shock transcription factor 1
  ENST ID: ENST00000534314
  CDS Start-End: 1-275
gcttccggaaagtggtccacatcgagcagggcggcctggtcaagccagagagagacgacacggagttccagcacccatgcttcctgcgtggccaggagcagctccttgagaacatcaagaggaaagtgaccagtgtgtccaccctgaagagtgaagacataaagatccgccaggacagcgtcaccaagctgctgacggacgtgcagctgatgaaggggaagcaggagtgcatggactccaagctcctggccatgaagcactcattcagttcctgatctcactggtgcagtcaaaccggatcctgggggtgaagagaaagatccccctgatgctgaacgacagtggctcagcacattccatgcccaagtatagccggcagttctccctggagcacgtccacggctcgggcccctactcggccccctccccagcctacagcagctccagcctctacgcccctgatgctgtggccagctctggacccatcatctccgacatcaccgagctggctcctgccagccccatggcctcccccggcgggagcatagacgagaggcccctatccagcagccccctggtgcgtgtcaaggaggagccccccagcccgcctcagagcccccgggtagaggaggcgagtcccgggcgcccatcttccgtggacaccctcttgtccccgaccgccct

SEQ ID NO: 139877 - DNA, 2549 bp, Homo sapiens
  Payload ID: 7434
  Gene Symbol: HSF2
  Gene Name: heat shock transcription factor 2
  Uniprot ID: Q03933
  ENST ID: ENST00000368455
  CDS Start-End: 193-1803
cggagacttgtccgtcacgtgcggccgcccggcctctcggccttgccgcgcgcctggcggggttgggggggcggggaccaagatctgctgcgcctgcgttgtgggcgttctcggggagctgctgccgtagctgccgccgccgctaccaccgcgttcgggtgtagaatttggaatccctgcgccgcgttaacaatgaagcagagttcgaacgtgccggctttcctcagcaagctgtggacgcttgtggaggaaacccacactaacgagttcatcacctggagccagaatggccaaagttttctggtcttggatgagcaacgatttgcaaaagaaattcttcccaaatatttcaagcacaataatatggcaagctttgtgaggcaactgaatatgtatggtttccgtaaagtagtacatatcgactctggaattgtaaagcaagaaagagatggtcctgtagaatttcagcatccttacttcaaacaaggacaggatgacttgttggagaacattaaaaggaaggtttcatcttcaaaaccagaagaaaataaaattcgtcaggaagatttaacaaaaattataagtagtgctcagaaggttcagataaaacaggaaactattgagtccaggctttctgaattaaaaagtgagaatgagtccctttggaaggaggtgtcagaattacgagcaaagcatgcacaacagcaacaagttattcgaaagattgtccagtttattgttacattggttcaaaataaccaacttgtgagtttaaaacgtaaaaggcctctacttctaaacactaatggagcccaaaagaagaacctgtttcagcacatagtcaaagaaccaactgataatcatcatcataaagttccacacagtaggactgaaggtttaaagccaagggagaggatttcagatgacatcattatttatgatgttactgatgataatgcagatgaagaaaatatcccagttattccagaaactaatgaggatgttatatctgatccctccaactgtagccagtaccctgatattgtcatcgttgaagatgacaatgaagatgagtatgcacctgtcattcagagtggagagcagaatgaaccagccagagaatccctaagttcaggcagtgatggcagcagccctctcatgtctagtgctgtccagctaaatggctcatccagtctgacctcagaagatccagtgaccatgatggattccattttgaatgataacatcaatcttttgggaaaggttgagctgttggattatcttgacagtattgactgcagtttagaggacttccaggccatgctatcaggaagacaatttagcatagacccagatctcctggttgatcttttcactagttctgtgcagatgaatcccacagattacatcaataatacaaaatctgagaataaaggattagaaactaccaagaacaatgtagttcagccagtttcggaagagggaagaaaatctaaatccaaaccagataagcagcttatccagtataccgcctttccacttcttgcattcctcgatgggaaccctgcttcttctgttgaacaggcgagtacaacagcatcatcagaagttttgtcctctgtagataaacccatagaagttgatgagcttctggatagcagcctagacccagaaccaacccaaagtaagcttgttcgcctggagccattgactgaagctgaagctagtgaagctacactgttttatttatgtgaacttgctcctgcacctctggatagtgatatgccacttttagatagctaaatccccaggaagtggactttacatgtatatattcatcaaaatgatgaactatttattttaaagtatcatttggtactttttttgtaaattgctttgttttgtttaatcagatactgtggaataaaagcaccttttgcttttctcactaaccacacactcttgcagagctttcaggtgttactcagctgcatagttacgcagatgtaatgcacattattggcgtatctttaagttggattcaaatggccatttttctccaattttggtaaattggatatcttttttttacaaatacgaccattaacctcagttaaatttttgtttgttttcctgtttgatgctgtctatttgcattgagtgtaagtcatttgaactaatggtataactcctaaagctttctctgctccagttatttttattaaatatttttcacttggcttatttttaaaactgggaacataaagtgcctgtatcttgtaaaacttcatttgtttcttttggttcagagaagttcatttatgttcaaagacgtttattcatgttcaacaggaaagacaaagtgtacgtgaatgctcgctgtctgatagggttccagctccatatatatagaaagatcgggggtgggatgggatggagtgagccccatccagttagttggactagttttaaataaaggttttccggtttgtgtttttttgaaccatactgtttagtaaaataaatacaatgaatgttgagtactagtg

SEQ ID NO: 139878 - DNA, 2643 bp, Homo sapiens
  Payload ID: 7434
  Gene Symbol: HSF2
  Gene Name: heat shock transcription factor 2
  Uniprot ID: Q03933
  ENST ID: ENST00000452194
  CDS Start-End: 188-1744
acttgtccgtcacgtgcggccgcccggcctctcggccttgccgcgcgcctggcggggttgggggggcggggaccaagatctgctgcgcctgcgttgtgggcgttctcggggagctgctgccgtagctgccgccgccgctaccaccgcgttcgggtgtagaatttggaatccctgcgccgcgttaacaatgaagcagagttcgaacgtgccggctttcctcagcaagctgtggacgcttgtggaggaaacccacactaacgagttcatcacctggagccagaatggccaaagttttctggtcttggatgagcaacgatttgcaaaagaaattcttcccaaatatttcaagcacaataatatggcaagctttgtgaggcaactgaatatgtatggtttccgtaaagtagtacatatcgactctggaattgtaaagcaagaaagagatggtcctgtagaatttcagcatccttacttcaaacaaggacaggatgacttgttggagaacattaaaaggaaggtttcatcttcaaaaccagaagaaaataaaattcgtcaggaagatttaacaaaaattataagtagtgctcagaaggttcagataaaacaggaaactattgagtccaggctttctgaattaaaaagtgagaatgagtccctttggaaggaggtgtcagaattacgagcaaagcatgcacaacagcaacaagttattcgaaagattgtccagtttattgttacattggttcaaaataaccaacttgtgagtttaaaacgtaaaaggcctctacttctaaacactaatggagcccaaaagaagaacctgtttcagcacatagtcaaagaaccaactgataatcatcatcataaagttccacacagtaggactgaaggtttaaagccaagggagaggatttcagatgacatcattatttatgatgttactgatgataatgcagatgaagaaaatatcccagttattccagaaactaatgaggatgttatatctgatccctccaactgtagccagtaccctgatattgtcatcgttgaagatgacaatgaagatgagtatgcacctgtcattcagagtggagagcagaatgaaccagccagagaatccctaagttcaggcagtgatggcagcagccctctcatgtctagtgctgtccagctaaatggctcatccagtctgacctcagaagatccagtgaccatgatggattccattttgaatgataacatcaatcttttgggaaaggttgagctgttggattatcttgacagtattgactgcagtttagaggacttccaggccatgctatcaggaagacaatttagcatagacccagatctcctggttgattctgagaataaaggattagaaactaccaagaacaatgtagttcagccagtttcggaagagggaagaaaatctaaatccaaaccagataagcagcttatccagtataccgcctttccacttcttgcattcctcgatgggaaccctgcttcttctgttgaacaggcgagtacaacagcatcatcagaagttttgtcctctgtagataaacccatagaagttgatgagcttctggatagcagcctagacccagaaccaacccaaagtaagcttgttcgcctggagccattgactgaagctgaagctagtgaagctacactgttttatttatgtgaacttgctcctgcacctctggatagtgatatgccacttttagatagctaaatccccaggaagtggactttacatgtatatattcatcaaaatgatgaactatttattttaaagtatcatttggtactttttttgtaaattgctttgttttgtttaatcagatactgtggaataaaagcaccttttgcttttctcactaaccacacactcttgcagagctttcaggtgttactcagctgcatagttacgcagatgtaatgcacattattggcgtatctttaagttggattcaaatggccatttttctccaattttggtaaattggatatcttttttttacaaatacgaccattaacctcagttaaatttttgtttgttttcctgtttgatgctgtctatttgcattgagtgtaagtcatttgaactaatggtataactcctaaagctttctctgctccagttatttttattaaatatttttcacttggcttatttttaaaactgggaacataaagtgcctgtatcttgtaaaacttcatttgtttcttttggttcagagaagttcatttatgttcaaagacgtttattcatgttcaacaggaaagacaaagtgtacgtgaatgctcgctgtctgatagggttccagctccatatatatagaaagatcgggggtgggatgggatggagtgagccccatccagttagttggactagttttaaataaaggttttccggtttgtgtttttttgaaccatactgtttagtaaaataaatacaatgaatgttgagtactagtgtctgttatgtgtcttctttagaggtgacactcacatgaaacaattttttcttctcataggaagcagtagctttaaactgtctgtggttcattattctcaatatgaatcataccaagatatttgtgcctcatctcgaaaatatattgtatattg

SEQ ID NO: 139879 - DNA, 642 bp, Homo sapiens
  Payload ID: 7434
  Gene Symbol: HSF2
  Gene Name: heat shock transcription factor 2
  ENST ID: ENST00000465214
  CDS Start-End: 1-642
cacagtaggactgaaggtttaaagccaagggagaggatttcagatgacatcattatttatgatgttactgatgataatgcagatgaagaaaatatcccagttattccagaaactaatgaggatgttatatctgatccctccaactgtagccagtaccctgatattgtcatcgttgaagatgacaatgaagatgagtatgcacctgtcattcagagtggagagcagaatgaaccagccagagaatccctaagttcaggcagtgatggcagcagccctctcatgtctagtgctgtccagctaaatggctcatccagtctgacctcagaagatccagtgaccatgatggattccattttgaatgataacatcaatcttttgggaaaggttgagctgttggattatcttgacagtattgactgcagtttagaggacttccaggccatgctatcaggaagacaatttagcatagacccagatctcctggttgattctgagaataaaggattagaaactaccaagaacaatgtagttcagccagtttcggaagagggaagaaaatctaaatccaaaccagataagcagcttatccagtataccgcctttccacttcttgcattcctcgatgggaaccctgcttcttct

SEQ ID NO: 139880 - DNA, 1899 bp, Homo sapiens
  Payload ID: 7435
  Gene Symbol: HSF2BP
  Gene Name: heat shock transcription factor 2 binding protein
  Uniprot ID: O75031
  ENST ID: ENST00000291560
  CDS Start-End: 333-1337
ggagtgagcgcggcagtggccctggcagctggcggagcggcccagcccgtgtgcacgtggcgccggcgctgcctttcggttgccaaaattcaggctgtagacggcgagataacaagtttaaaaccccggctaagccagaagagccaaagagggacctcgccaaggccactcctcgctctctaggccgagaatactgcgcaaattctgggaggtttgggcctggcggctctccgttcccgacccccggcgtggattcgttcccgcgctttctggcgtgaggggtcagagggcgcgccgacgctcaggcgaacggagcggaggcggcagcggccatgggcgaagcgggcgccgctgaggaggcctgccggcacatgggaactaaagaggaatttgttaaagtcagaaagaaggatctggaacggctgacaactgaagtgatgcaaatacgggacttcttacccagaatactaaatggggaggtgctggagagcttccagaaattaaagattgtagaaaaaaacctggaaaggaaagagcaagaattagagcagctgaaaatggattgtgagcactttaaagcccgcctggaaaccgtgcaggccgacaacataagagagaagaaggagaaactggctcttcgacagcagttgaatgaagcgaagcagcaactcctgcagcaggcagagtattgtacagaaatgggagcagcagcgtgtaccctcttgtggggtgtctccagcagtgaggaagtcgtcaaggccattttgggaggagataaagctttgaagtttttcagcatcactggtcaaacaatggagagttttgtgaagtcgttagacggtgatgtccaggagctggattcggatgaaagtcagtttgttttcgctctggctggaattgtcacgaatgttgctgctatagcatgtggtcgtgaattcttggttaattcaagccgggtgctcttggacaccatattgcagcttctgggagacttgaagccaggacagtgtaccaaactcaaagtgctaatgctgatgtccctatacaatgtaagcatcaatttgaaaggcttgaaatacatcagcgagagtccaggattcatccctttgctgtggtggcttttgagtgatccagatgcagaggtgtgccttcatgtactgaggcttgtccagtctgtggttctggaacctgaagtcttctccaagtcggcctctgagttccggagctccctgcccctgcaacgcatcctggcaatgtccaagagccgcaacccccgcctgcaaaccgcagcccaggagctcctggaagatctccgcactctggagcataatgtgtaggtgtgctcggccaccagggttttggtgaaaatgccggtgtcccttctccccagatccctcatttgatactccaaaaccatcaccatgtaccatgtgttagagttggcaaaatgtgattgactagagatggacatgaattgatatgtatcccacataactttgtcttggaagtgagagtgcttgtaggtggttggttaagcttgccaaaggagaggccatgaaagaacctgtccttctggaaaagtggtccatgtctgtgctggctggaagagggcttgcttagggcagcttcttgctgctcagcagaccatgacctgtaggttcacctataaaacagggaaattgaataaccatctaccccattagtcagcattttcttgagatacatttctttgaaaagcaattcattctctctctagtaattgtaattaatccccccaaaatgcaagtttacttttataaccttttggtgaacctgctatttcggatgacattgggcattttagttctatattttttgtgcctcttttatttttgaataaagaaaatcagaagagttgta

SEQ ID NO: 139881 - DNA, 989 bp, Homo sapiens
  Payload ID: 7435
  Gene Symbol: HSF2BP
  Gene Name: heat shock transcription factor 2 binding protein
  ENST ID: ENST00000443485
  CDS Start-End: 310-989
ggcagctggcggagcggcccagcccgtgtgcacgtggcgccggcgctgcctttcggttgccaaaattcaggctgtagacggcgagataacaagtttaaaaccccggctaagccagaagagccaaagagggacctcgccaaggccactcctcgctctctaggccgagaatactgcgcaaattctgggaggtttgggcctggcggctctccgttcccgacccccggcgtggattcgttcccgcgctttctggcgtgaggggtcagagggcgcgccgacgctcaggcgaacggagcggaggcggcagcggccatgggcgaagcgggcgccgctgaggaggcctgccggcacatgggaactaaagaggaatttgttaaagtcagaaagaaggatctggaacggctgacaactgaagtgatgcaaatacgggacttcttacccagaatactaaatggggaggtgctggagagcttccagaaattaaagattgtagaaaaaaacctggaaaggaaagagcaagaattagagcagctgaaaatggattgtgagcactttaaagcccgcctggaaaccgtgcaggccgacaacataagagagaagaaggagaaactggctcttcgacagcagttgaatgaagcgaagcagcaactcctgcagcaggcagagtattgtacagaaatgggagcagcagcgtgtaccctcttgtggggtgtctccagcagtgaggaagtcgtcaaggccattttgggaggagtaagtatggataaagctttgaagtttttcagcatcactggtcaaacaatggagagttttgtgaagtcgttagacggtgatgtccaggagctggattcggatgaaagtcagtttgttttcgctctggctggaattgtcacgaatgttgctgctatagcatgtggtcgtgaattcttggttaattcaagccgggtgctcttggacaccatattgcagcttctgggagacttgaagccagg

SEQ ID NO: 139882 - DNA, 1568 bp, Homo sapiens
  Payload ID: 7436
  Gene Symbol: HSF4
  Gene Name: heat shock transcription factor 4
  ENST ID: ENST00000434833
  CDS Start-End: 69-1016
cactttccgcggctttgacgagcccgcagcggccgggcccgagcgcagagccgggccgagactgcaccatgcaggaagcgccagctgcgctgcccacggagccaggccccagccccgtgcctgccttcctcggcaagctatgggcgctggtgggggacccaggcacagaccacctgatccgctggagcccgagcgggaccagtttcctcgtaagcgaccagagccgtttcgccaaggaagtgctgccccagtatttcaagcatagcaacatggcgagcttcgtgcgccaactcaacatgtacggttttcggaaggtggtgagcatcgagcagggcggcctgcttaggccggagcgcgaccacgtcgagttccagcacccgagcttcgtgcgcggccgcgagcagctactggagcgcgtgcggcgcaaggtgcccgcgctgcgcggcgacgacggccgctggcgcccggaggacctgggtcgactactgggcgaggtgcaggctttgcggggagtgcaggagagcaccgaggcgcggctgcgggagctcaggcagcagaacgagatcttgtggcgggaggtggtgacacttcggcagagccacggtcagcagcaccgggtcattggcaagctgatccagtgtctctttgggccacttcaggcggggccgagcaatgcaggaggcaagagaaagctgtccctgatgctggatgaggggagctcatgcccaacacctgccaagttcaacacctgccctctacctggtgcccttctgcaggacccctacttcatccagtcgcctctcccagagacaaatttgggccttagccctcacagggccaggggccccatcatctctgacatcccagaagactctccatcccctgaggggaccaggctttctccctccagtgatggcaggagcccccccgccactgcctgtggctgtggtgcaggccatcctggaagggaaagggagcttcagccccgaggggcccaggaatgcccaacagcctgaaccaggggatcccagggagatacctgacagggggcctctgggcctggaaagcggggacaggagcccagagagtctgctgcctccgatgctgcttcagccccctcaagaaagtgtggaacctgcagggcctctagatgtgctgggccccagtctccaagggcgagaatggaccctgatggacttggacatggagctgtccttgatgcagcccttggttccagagcggggtgagcctgagctggcggtcaaggggttaaattctccaagcccagggaaggaccccacgctcggggccccactcctgctggatgtccaggcggccttgggaggcccagccctgggcctgcctggggctttaaccatttatagcactcctgagagccggactgcctcctacttgggcccggaagccagtccctccccctaagaccccgcgcctctgaaggggcttggaaccagtccgccgctgcacatccttcttggcttcctggcgccccctatcgggggtgagcgaagcccccactactaaatggcctctctccactaccccga

SEQ ID NO: 139883 - DNA, 1539 bp, Homo sapiens
  Payload ID: 7436
  Gene Symbol: HSF4
  Gene Name: heat shock transcription factor 4
  ENST ID: ENST00000522295
  CDS Start-End: 70-654
gcactttccgcggctttgacgagcccgcagcggccgggcccgagcgcagagccgggccgagactgcaccatgcaggaagcgccagctgcgctgcccacggagccaggccccagccccgtgcctgccttcctcggcaagctatgggcgctggtgggggacccaggcacagaccacctgatccgctggagcccgagcgggaccagtttcctcgtaagcgaccagagccgtttcgccaaggaagtgctgccccagtatttcaagcatagcaacatggcgagcttcgtgcgccaactcaacatgtacggttttcggaaggtggtgagcatcgagcagggcggcctgcttaggccggagcgcgaccacgtcgagttccagcacccgagcttcgtgcgcggccgcgagcagctactggagcgcgtgcggcgcaaggtgcccgcgctgcgcggcgacgacggccgctggcgcccggaggacctgggtcgactactgggcgaggcagaacgagatcttgtggcgggaggtggtgacacttcggcagagccacggtcagcagcaccgggtcattggcaagctgatccagtgtctctttgggccacttcaggcggggccgagcaatgcaggaggcaagagaaagctgtccctgatgctggatgaggggagctcatgcccaacacctgccaagttcaacacctgccctctacctggtgcccttctgcaggacccctacttcatccagtcgcctctcccagagacaaatttgggccttagccctcacagggccaggggccccatcatctctgacatcccagaagactctccatcccctgaggggaccaggctttctccctccagtgatggcaggagcccccccgccactgcctgtggctgtggtgcaggccatcctggaagggaaagggagcttcagccccgaggggcccaggaatgcccaacagcctgaaccaggggatcccagggagatacctgacagggggcctctgggcctggaaagcggggacaggagcccagagagtctgctgcctccgatgctgcttcagccccctcaagaaagtgtggaacctgcagggcctctagatgtgctgggccccagtctccaagggcgagaatggaccctgatggacttggacatggagctgtccttgatgcagcccttggttccagagcggggtgagcctgagctggcggtcaaggggttaaattctccaagcccagggaaggaccccacgctcggggccccactcctgctggatgtccaggcggccttgggaggcccagccctgggcctgcctggggctttaaccatttatagcactcctgagagccggactgcctcctacttgggcccggaagccagtccctccccctaagaccccgcgcctctgaaggggcttggaaccagtccgccgctgcacatccttcttggcttcctggcgccccctatcgggggtgagcgaagcccccactactaaatggcctctctccactaccccgactatccctgcacataaactccgttttttt

SEQ ID NO: 139884 - DNA, 717 bp, Homo sapiens
  Payload ID: 7436
  Gene Symbol: HSF4
  Gene Name: heat shock transcription factor 4
  ENST ID: ENST00000520528
  CDS Start-End: 1-52
cttctcccttagacctggcccagcctctcccagagacaaatttgggccttagccctcacagggccaggggccccatcatctctgacatcccagaagactctccatcccctgaggggaccaggctttctccctccagtgatggcaggagcccccccgccactgcctgtggctgtggtgcaggccatcctggaagggaaagggagcttcagccccgaggggcccaggaatgcccaacagcctgaaccaggggatcccagggagatacctgacagggggcctctgggcctggaaagcggggacaggagcccagagagtctgctgcctccgatgctgcttcagccccctcaagaaagtgtggaacctgcagggcctctagatgtgctgggccccagtctccaagggcgagaatggaccctgatggacttggacatggagctgtccttgggaaggaccccacgctcggggccccactcctgctggatgtccaggcggccttgggaggcccagccctgggcctgcctggggctttaaccatttatagcactcctgagagccggactgcctcctacttgggcccggaagccagtccctccccctaagaccccgcgcctctgaaggggcttggaaccagtccgccgctgcacatccttcttggcttcctggcgccccctatcgggggtgagcgaagcccccactactaaatggcctctctccact

SEQ ID NO: 139885 - DNA, 669 bp, Homo sapiens
  Payload ID: 7436
  Gene Symbol: HSF4
  Gene Name: heat shock transcription factor 4
  ENST ID: ENST00000519601
  CDS Start-End: 1-669
cacctgccctctacctggtgcccttctgcaggacccctacttcatccagtcggaagagaagatggaagccagccttccccccaaccagacccaggccctccagcatggactgagcctcctccctcaaaccttctcccttagacctggcccagcccccccgccactgcctgtggctgtggtgcaggccatcctggaagggaaagggagcttcagccccgaggggcccaggaatgcccaacagcctgaaccaggggatcccagggagatacctgacagggggcctctgggcctggaaagcggggacaggagcccagagagtctgctgcctccgatgctgcttcagccccctcaagaaagtgtggaacctgcagggcctctagatgtgctgggccccagtctccaagggcgagaatggaccctgatggacttggacatggagctgtccttgatgcagcccttggttccagagcggggtgagcctgagctggcggtcaaggggttaaattctccaagcccagggaaggaccccacgctcggggccccactcctgctggatgtccaggcggccttgggaggcccagccctgggcctgcctggggctttaaccatttatagcactcctgagagccggactgcctcctacttgggcccggaagccagtccctcccc

SEQ ID NO: 139886 - DNA, 1358 bp, Homo sapiens
  Payload ID: 7436
  Gene Symbol: HSF4
  Gene Name: heat shock transcription factor 4
  ENST ID: ENST00000521624
  CDS Start-End: 23-979
agagccgggccgagactgcaccatgcaggaagcgccagctgcgctgcccacggagccaggccccagccccgtgcctgccttcctcggcaagctatgggcgctggtgggggacccaggcacagaccacctgatccgctggagcccgagcgggaccagtttcctcgtaagcgaccagagccgtttcgccaaggaagtgctgccccagtatttcaagcatagcaacatggcgagcttcgtgcgccaactcaacatgtacggttttcggaaggtggtgagcatcgagcagggcggcctgcttaggccggagcgcgaccacgtcgagttccagcacccgagcttcgtgcgcggccgcgagcagctactggagcgcgtgcggcgcaaggtgcccgcgctgcgcggcgacgacggccgctggcgcccggaggacctgggtcgactactgggcgaggtgcaggctttgcggggagtgcaggagagcaccgaggcgcggctgcgggagctcaggcagcagaacgagatcttgtggcgggaggtggtgacacttcggcagagccacggtcagcagcaccgggtcattggcaagctgatccagtgtctctttgggccacttcaggcggggccgagcaatgcaggaggcaagagaaagctgtccctgatgctggatgaggggagctcatgcccaacacctgccaagttcaacacctgccctctacctggtgcccttctgcaggacccctacttcatccagtcgcccccccgccactgcctgtggctgtggtgcaggccatcctggaagggaaagggagcttcagccccgaggggcccaggaatgcccaacagcctgaaccaggggatcccagggagatacctgacagggggcctctgggcctggaaagcggggacaggagcccagagagtctgctgcctccgatgctgcttcagccccctcaagaaagtgtggaacctgcagggcctctagatgtgctgggccccagtctccaagggcgagaatggaccctgatggacttggacatggagctgtccttgggaaggaccccacgctcggggccccactcctgctggatgtccaggcggccttgggaggcccagccctgggcctgcctggggctttaaccatttatagcactcctgagagccggactgcctcctacttgggcccggaagccagtccctccccctaagaccccgcgcctctgaaggggcttggaaccagtccgccgctgcacatccttcttggcttcctggcgccccctatcgggggtgagcgaagcccccactactaaatggcctctctccactaccccgactatccctgcacataaactccgttttttttt

SEQ ID NO: 139887 - DNA, 1249 bp, Homo sapiens
  Payload ID: 7436
  Gene Symbol: HSF4
  Gene Name: heat shock transcription factor 4
  ENST ID: ENST00000517685
  CDS Start-End: 1-1249
atgcaggaagcgccagctgcgctgcccacggagccaggccccagccccgtgcctgccttcctcggcaagctatgggcgctggtgggggacccaggcacagaccacctgatccgctggagcccgagcgggaccagtttcctcgtaagcgaccagagccgtttcgccaaggaagtgctgccccagtatttcaagcatagcaacatggcgagcttcgtgcgccaactcaacatgtacggttttcggaaggtggtgagcatcgagcagggcggcctgcttaggccggagcgcgaccacgtcgagttccagcacccgagcttcgtgcgcggccgcgagcagctactggagcgcgtgcggcgcaaggtgcccgcgctgcgcggcgacgacggccgctggcgcccggaggacctgggtcgactactgggcgaggtgcaggctttgcggggagtgcaggagagcaccgaggcgcggctgcgggagctcaggcagcagaacgagatcttgtggcgggaggtggtgacacttcggcagagccacggtcagcagcaccgggtcattggcaagctgatccagtgtctctttgggccacttcaggcggggccgagcaatgcaggaggcaagagaaagctgtccctgatgctggatgaggggagctcatgcccaacacctgccaagttcaacacctgccctctacctggtgcccttctgcaggacccctacttcatccagtcgcctctcccagagacaaatttgggccttagccctcacagggccaggggccccatcatctctgacatcccagaagactctccatcccctgaggggaccaggctttctccctccagtgatggcaggagggggcctctgggcctggaaagcggggacaggagcccagagagtctgctgcctccgatgctgcttcagccccctcaagaaagtgtggaacctgcagggcctctagatgtgctgggccccagtctccaagggcgagaatggaccctgatggacttggacatggagctgtccttgatgcagcccttggttccagagcggggtgagcctgagctggcggtcaaggggttaaattctccaagcccagggaaggaccccacgctcggggccccactcctgctggatgtccaggcggccttgggaggcccagccctgggcctgcctggggctttaaccatttatagcactcctgagagccggactgcctcctacttgggcccggaagccagtccctccccct

SEQ ID NO: 139888 - DNA, 404 bp, Homo sapiens
  Payload ID: 7436
  Gene Symbol: HSF4
  Gene Name: heat shock transcription factor 4
  ENST ID: ENST00000521916
  CDS Start-End: 1-190
gatggacttggacatggagctgtccttgatgcagcccttggttccagagcggggtgagcctgagctggcggtcaaggggttaaattctccaagcccaggaccccacgctcggggccccactcctgctggatgtccaggcggccttgggaggcccagccctgggcctgcctggggctttaaccatttatagcactcctgagagccggactgcctcctacttgggcccggaagccagtccctccccctaagaccccgcgcctctgaaggggcttggaaccagtccgccgctgcacatccttcttggcttcctggcgccccctatcgggggtgagcgaagcccccactactaaatggcctctctccactaccccgactatccctgcacataaactccgttttttttt

SEQ ID NO: 139889 - DNA, 1555 bp, Homo sapiens
  Payload ID: 7436
  Gene Symbol: HSF4
  Gene Name: heat shock transcription factor 4
  ENST ID: ENST00000521314
  CDS Start-End: 42-185
agcggccgggcccgagcgcagagccgggccgagactgcaccatgcaggaagcgccagctgcgctgcccacggagccaggccccagccccgtgcctgccttcctcggcaagctatgggcgctggtgggggacccaggcacagaccacctgatccgctggagcccgacggttttcggaaggtggtgagcatcgagcagggcggcctgcttaggccggagcgcgaccacgtcgagttccagcacccgagcttcgtgcgcggccgcgagcagctactggagcgcgtgcggcgcaaggtgcccgcgctgcgcggcgacgacggccgctggcgcccggaggacctgggtcgactactgggcgaggtgcaggctttgcggggagtgcaggagagcaccgaggcgcggctgcgggagctcaggcagcagaacgagatcttgtggcgggaggtggtgacacttcggcagagccacggtcagcagcaccgggtcattggcaagctgatccagtgtctctttgggccacttcaggcggggccgagcaatgcaggaggcaagagaaagctgtccctgatgctggatgaggggagctcatgcccaacacctgccaagttcaacacctgccctctacctggtgcccttctgcaggacccctacttcatccagtcgcctctcccagagacaaatttgggccttagccctcacagggccaggggccccatcatctctgacatcccagaagactctccatcccctgaggggaccaggctttctccctccagtgatggcaggagggagaagggcctggcactgctcaaagaagagccggccagtccagggggggatggcgaggccgggctggccctggccccaaacgagtgtgacttctgcgtgacagcccccccgccactgcctgtggctgtggtgcaggccatcctggaagggaaagggagcttcagccccgaggggcccaggaatgcccaacagcctgaaccaggggatcccagggagatacctgacagggggcctctgggcctggaaagcggggacaggagcccagagagtctgctgcctccgatgctgcttcagccccctcaagaaagtgtggaacctgcagggcctctagatgtgctgggccccagtctccaagggcgagaatggaccctgatggacttggacatggagctgtccttgatgcagcccttggttccagagcggggtgagcctgagctggcggtcaaggggttaaattctccaagcccagggaaggaccccacgctcggggccccactcctgctggatgtccaggcggccttgggaggcccagccctgggcctgcctggggctttaaccatttatagcactcctgagagccggactgcctcctacttgggcccggaagccagtccctccccctaagaccccgcgcctctgaaggggcttggaaccagtccgccgctgcacatccttcttggcttcctggcgccccctatcgggggtgagcgaagcccccactactaaatggcctctctccactaccccgactatccctgcacataaact

SEQ ID NO: 139890 - DNA, 546 bp, Homo sapiens
  Payload ID: 7436
  Gene Symbol: HSF4
  Gene Name: heat shock transcription factor 4
  ENST ID: ENST00000517750
  CDS Start-End: 1-546
ggcgcggctgcgggagctcaggcagcagaacgagatcttgtggcgggaggtggtgacacttcggcagagccacggtcagcagcaccgggtcattggcaagctgatccagtgtctctttgggccacttcaggcggggccgagcaatgcaggaggcaagagaaagctgacccctacttcatccagtcgcctctcccagagacaaatttgggccttagccctcacagggccaggggccccatcatctctgacatcccagaagactctccatcccctgaggggaccaggctttctccctccagtgatggcaggagcccccccgccactgcctgtggctgtggtgcaggccatcctggaagggaaagggagcttcagccccgaggggcccaggaatgcccaacagcctgaaccaggggatcccagggagatacctgacagggggcctctgggcctggaaagcggggacaggagcccagagagtctgctgcctccgatgctgcttcagccccctcaagaaagtgtggaacctgcagggcctctagatgtgct

SEQ ID NO: 139891 - DNA, 556 bp, Homo sapiens
  Payload ID: 7436
  Gene Symbol: HSF4
  Gene Name: heat shock transcription factor 4
  ENST ID: ENST00000517729
  CDS Start-End: 1-556
gggaccagtttcctcgtaagcgaccagagccgtttcgccaaggaagtgctgccccagtatttcaagcatagcaacatggcgagcttcgtgcgccaactcaacatgtacggttttcggaaggtggtgagcatcgagcagggcggcctgcttaggccggagcgcgaccacgtcgagttccagcacccgagcttcgtgcgcggccgcgagcagctactggagcgcgtgcggcgcaaggtgcccgcgctgcgcggcgacgacggccgctggcgcccggaggacctgggtcgactactgggcgagaacgagatcttgtggcgggaggtggtgacacttcggcagagccacggtcagcagcaccgggtcattggcaagctgatccagtgtctctttgggccacttcaggcggggccgagcaatgcaggaggcaagagaaagctgtccctgatgctggatgaggggagctcatgcccaacacctgccaagttcaacacctgccctctacctggtgcccttctgcaggacccctacttcatccagtcgcctctcccagagacaa

SEQ ID NO: 139892 - DNA, 1839 bp, Homo sapiens
  Payload ID: 7436
  Gene Symbol: HSF4
  Gene Name: heat shock transcription factor 4
  ENST ID: ENST00000523562
  CDS Start-End: 23-970
agagccgggccgagactgcaccatgcaggaagcgccagctgcgctgcccacggagccaggccccagccccgtgcctgccttcctcggcaagctatgggcgctggtgggggacccaggcacagaccacctgatccgctggagcccgagcgggaccagtttcctcgtaagcgaccagagccgtttcgccaaggaagtgctgccccagtatttcaagcatagcaacatggcgagcttcgtgcgccaactcaacatgtacggttttcggaaggtggtgagcatcgagcagggcggcctgcttaggccggagcgcgaccacgtcgagttccagcacccgagcttcgtgcgcggccgcgagcagctactggagcgcgtgcggcgcaaggtgcccgcgctgcgcggcgacgacggccgctggcgcccggaggacctgggtcgactactgggcgaggtgcaggctttgcggggagtgcaggagagcaccgaggcgcggctgcgggagctcaggcagcagaacgagatcttgtggcgggaggtggtgacacttcggcagagccacggtcagcagcaccgggtcattggcaagctgatccagtgtctctttgggccacttcaggcggggccgagcaatgcaggaggcaagagaaagctgtccctgatgctggatgaggggagctcatgcccaacacctgccaagttcaacacctgccctctacctggtgcccttctgcaggacccctacttcatccagtcgcctctcccagagacaaatttgggccttagccctcacagggccaggggccccatcatctctgacatcccagaagactctccatcccctgaggggaccaggctttctccctccagtgatggcaggagcccccccgccactgcctgtggctgtggtgcaggccatcctggaagggaaagggagcttcagccccgaggggcccaggaatgcccaacagcctgaaccaggggatcccagggagatacctgacagggggcctctgggcctggaaagcggggacaggagcccagagagtctgctgcctccgatgctgcttcagccccctcaagaaagtgtggaacctgcagggcctctagatgtgctgggccccagtctccaagggcgagaatggaccctgatggacttggacatggagctgtccttgatgcagcccttggttccagagcggggtgagcctgagctggcggtcaaggggttaaattctccaagcccaggtaatggttgtgatgactcctacctgggaggacgccgtgattgggctgagctaccttgattgagtgagggggcaatctgcaatttgcagggaaatcctgagttcaggctgcactgcagagcgttccttgagccacccatgccctcaccattgggcgagagtggggaggttaagaatggatgttttatcctaactgagcagaaggcaggcgggcagggctctccttccctgaagaaaggagggggaacatttcccctggtgagcgcagtcccacttctcctagggaaggaccccacgctcggggccccactcctgctggatgtccaggcggccttgggaggcccagccctgggcctgcctggggctttaaccatttatagcactcctgagagccggactgcctcctacttgggcccggaagccagtccctccccctaagaccccgcgcctctgaaggggcttggaaccagtccgccgctgcacatccttcttggcttcctggcgccccctatcgggggtgagcgaagcccccactactaaatggcctctctccactaccccgactatccctgcacataaactccgttttttttttttc

SEQ ID NO: 139893 - DNA, 637 bp, Homo sapiens
  Payload ID: 7436
  Gene Symbol: HSF4
  Gene Name: heat shock transcription factor 4
  ENST ID: ENST00000519224
  CDS Start-End: 1-233
ggcgcaaggtgcccgcgctgcgcggcgacgacggccgctggcgcccggaggacctgggtcgactactgggcgaggcagaacgagatcttgtggcgggaggtggtgacacttcggcagagccacggtcagcagcaccgggtcattggcaagctgatccagtgtctctttgggccacttcaggcggggccgagcaatgcaggaggcaagagaaagctgtccctgatgctggatgaggggagctcatgcccaacacctgccaagttcaacacctgccctctacctggtgcccttctgcaggacccctacttcatccagtcggaagagaagatggaagccagccttccccccaaccagacccaggccctccagcatggactgagcctcctccctcaaaccttctcccttagacctggcccagcctctcccagagacaaatttgggccttagccctcacagggccaggggccccatcatctctgacatcccagaagactctccatcccctgaggggaccaggctttctccctccagtgatggcaggagcccccccgccactgcctgtggctgtggtgcaggccatcctggaagggaaagggagcttcagccccgaggggcccaggaatgcccaacagcctga

SEQ ID NO: 139894 - DNA, 565 bp, Homo sapiens
  Payload ID: 7436
  Gene Symbol: HSF4
  Gene Name: heat shock transcription factor 4
  ENST ID: ENST00000520304
  CDS Start-End: 1-425
ctgtggctgtggtgcaggccatcctggaagggaaagggagcttcagccccgaggggcccaggaatgcccaacagcctgaaccaggggatcccagggagatacctgacagggggcctctgggcctggaaagcggggacaggagcccagagagtctgctgcctccgatgctgcttcagccccctcaagaaagtgtggaacctgcagggcctctagatgtgctgggccccagtctccaagggcgagaatggaccctgatggacttggacatggagctgtccttgatgcagcccttggttccagagcggggtgagcctgagctggcggtcaaggggttaaattctccaagcccagcactcctgagagccggactgcctcctacttgggcccggaagccagtccctccccctaagaccccgcgcctctgaaggggcttggaaccagtccgccgctgcacatccttcttggcttcctggcgccccctatcgggggtgagcgaagcccccactactaaatggcctctctccactaccccgactatccctgcacataaactccgttttttttt

SEQ ID NO: 139895 - DNA, 1515 bp, Homo sapiens
  Payload ID: 7436
  Gene Symbol: HSF4
  Gene Name: heat shock transcription factor 4
  Uniprot ID: Q9ULV5
  ENST ID: ENST00000521374
  CDS Start-End: 1-1479
atgcaggaagcgccagctgcgctgcccacggagccaggccccagccccgtgcctgccttcctcggcaagctatgggcgctggtgggggacccaggcacagaccacctgatccgctggagcccgagcgggaccagtttcctcgtaagcgaccagagccgtttcgccaaggaagtgctgccccagtatttcaagcatagcaacatggcgagcttcgtgcgccaactcaacatgtacggttttcggaaggtggtgagcatcgagcagggcggcctgcttaggccggagcgcgaccacgtcgagttccagcacccgagcttcgtgcgcggccgcgagcagctactggagcgcgtgcggcgcaaggtgcccgcgctgcgcggcgacgacggccgctggcgcccggaggacctgggtcgactactgggcgaggtgcaggctttgcggggagtgcaggagagcaccgaggcgcggctgcgggagctcaggcagcagaacgagatcttgtggcgggaggtggtgacacttcggcagagccacggtcagcagcaccgggtcattggcaagctgatccagtgtctctttgggccacttcaggcggggccgagcaatgcaggaggcaagagaaagctgtccctgatgctggatgaggggagctcatgcccaacacctgccaagttcaacacctgccctctacctggtgcccttctgcaggacccctacttcatccagtcgcctctcccagagacaaatttgggccttagccctcacagggccaggggccccatcatctctgacatcccagaagactctccatcccctgaggggaccaggctttctccctccagtgatggcaggagggagaagggcctggcactgctcaaagaagagccggccagtccagggggggatggcgaggccgggctggccctggccccaaacgagtgtgacttctgcgtgacagcccccccgccactgcctgtggctgtggtgcaggccatcctggaagggaaagggagcttcagccccgaggggcccaggaatgcccaacagcctgaaccaggggatcccagggagatacctgacagggggcctctgggcctggaaagcggggacaggagcccagagagtctgctgcctccgatgctgcttcagccccctcaagaaagtgtggaacctgcagggcctctagatgtgctgggccccagtctccaagggcgagaatggaccctgatggacttggacatggagctgtccttgatgcagcccttggttccagagcggggtgagcctgagctggcggtcaaggggttaaattctccaagcccagggaaggaccccacgctcggggccccactcctgctggatgtccaggcggccttgggaggcccagccctgggcctgcctggggctttaaccatttatagcactcctgagagccggactgcctcctacttgggcccggaagccagtccctccccctaagaccccgcgcctctgaaggggcttggaaccagtccg

SEQ ID NO: 139896 - DNA, 1549 bp, Homo sapiens
  Payload ID: 7436
  Gene Symbol: HSF4
  Gene Name: heat shock transcription factor 4
  Uniprot ID: Q9ULV5
  ENST ID: ENST00000584272
  CDS Start-End: 1-1389
atgcaggaagcgccagctgcgctgcccacggagccaggccccagccccgtgcctgccttcctcggcaagctatgggcgctggtgggggacccaggcacagaccacctgatccgctggagcccgagcgggaccagtttcctcgtaagcgaccagagccgtttcgccaaggaagtgctgccccagtatttcaagcatagcaacatggcgagcttcgtgcgccaactcaacatgtacggttttcggaaggtggtgagcatcgagcagggcggcctgcttaggccggagcgcgaccacgtcgagttccagcacccgagcttcgtgcgcggccgcgagcagctactggagcgcgtgcggcgcaaggtgcccgcgctgcgcggcgacgacggccgctggcgcccggaggacctgggtcgactactgggcgaggtgcaggctttgcggggagtgcaggagagcaccgaggcgcggctgcgggagctcaggcagcagaacgagatcttgtggcgggaggtggtgacacttcggcagagccacggtcagcagcaccgggtcattggcaagctgatccagtgtctctttgggccacttcaggcggggccgagcaatgcaggaggcaagagaaagctgtccctgatgctggatgaggggagctcatgcccaacacctgccaagttcaacacctgccctctacctggtgcccttctgcaggacccctacttcatccagtcgccttctacttacagcctctcccagagacaaatttgggccttagccctcacagggccaggggccccatcatctctgacatcccagaagactctccatcccctgaggggaccaggctttctccctccagtgatggcaggagcccccccgccactgcctgtggctgtggtgcaggccatcctggaagggaaagggagcttcagccccgaggggcccaggaatgcccaacagcctgaaccaggggatcccagggagatacctgacagggggcctctgggcctggaaagcggggacaggagcccagagagtctgctgcctccgatgctgcttcagccccctcaagaaagtgtggaacctgcagggcctctagatgtgctgggccccagtctccaagggcgagaatggaccctgatggacttggacatggagctgtccttgatgcagcccttggttccagagcggggtgagcctgagctggcggtcaaggggttaaattctccaagcccagggaaggaccccacgctcggggccccactcctgctggatgtccaggcggccttgggaggcccagccctgggcctgcctggggctttaaccatttatagcactcctgagagccggactgcctcctacttgggcccggaagccagtccctccccctaagaccccgcgcctctgaaggggcttggaaccagtccgccgctgcacatccttcttggcttcctggcgccccctatcgggggtgagcgaagcccccactactaaatggcctctctccactaccccgactatccctgcacataaactccgttttttttttttc

SEQ ID NO: 139897 - DNA, 4094 bp, Homo sapiens
  Payload ID: 7437
  Gene Symbol: HSF5
  Gene Name: heat shock transcription factor family member 5
  Uniprot ID: Q4G112
  ENST ID: ENST00000323777
  CDS Start-End: 111-1901
ggcggatgggcgccggcaggagcgggcagggcgaggcgaaggccggggagggatcgagaacggtgtgggagagctaggctcggggggcgaggccccggcccggcggggcgatggaggcgctgctctccacccccatcaaccccaacaacttccccgccaagctgtggcgcctggtgaacagcccgcgctaccgctccatccgctgggacggccgcggcgaggggctgcttatcgatcagccgctcttcgaggccgagctgctcagcccgcccgggccggggggcggtggcgggactgcgggggccggggccgagcccgagctcttcaaaaccaccagcttcaccagcttcatccgccagctcaacctctacggcttccgcaaggtggtgctgggcgggccggggggcggcaaaccggcaggcaatgggccgctccatcacttccacaacccgcacttccgccgcgaccagccacagctgctcgtgcacctcaagcgcctcaccagcgccaacaaggccaagctggcggccggcctggaggtgccctgccgcccgcccaaccgcttccagcggctgctcatcacctcggcctccgccgccaccgcgccactgcagcaccagcagccgccgccgcccgcggggccccggcccgagccgcacggaccagtggctgtaggacaatttcaccggtcatttcgtcgagatagtttgtctccttactcctgtgtatcaactccatcccacgaccacagtacttaccctctgaaaggtttagatcggaccccagttcctcatagaatatggcagaactcccttggaatgcatcctggacaagtggagacatctcccacattttcagataaaggggttccgtttcctgtactccagaggtttccaactgaggttacctatacactgcagcccagcaccacatctgtacatgttcaacaaggtcctcaaacaatggtcagctcctcccaaaaatacagtaactacacaccctcagcacagtactcgcaagcctactatccaacagctgtgctacagtgctgttctcctacccacatggatgctctaagtagttgtgtcactcccactgcctcttcctatgcacactgcaactacttccagaatccttcaatgcagtcctcctatccagttgaatttttgccttccaattggccctgcagtactactgatgaaaatacaaagacagaagtaaacctagaggctgtctttcagatagttgatgagttgcattcctcccctaaattggagatggtaaaggtggagcctgttgagaatcagtgcccaacatctccgtcttacagaggccaacacattttagctaattctaacaacagcaatccatgttctgcaagtcaggctagccagctggagccacttactcctgtaggctcagatattatgtcttttgtggttggaacagaacaagcagttgcctgctctctaccacagtcacctgagtacatctataccatccacacagctcagcctgttgaaaatagcacaatacaggaatctgcagccatccagcaagctcatgtcaaactgaaggagcacctaaatcataatccatctccatcttcagtagtatttgtgcaggaagggccaccattcagcacacaccaggtggatgccaacataaaatgccagaccagttcacgtgagaatatcttgccgtcagaacagatgggattcctcatttcagaaatggggcctgctagcaagcctagtgaagacacaggtttagccactccagccagatacagagagcacagaagcaactcacaacaaggaaagtcccctgatcttcatctgctggtggacgtggcctgcaagcaggagcgctttccaaaggaggaagaattaaaagagtgaggaatggatgacaaatgtgacattgtgcactagctgtagctggaggcagactagccttgcacatgacaaactgttgggattttttcagttctgttaaggaaaaaaaagtattttttgtttcgttaattgagaattttgttaattgagaattgggaatttgtatgtactacagtggttcagttcagattatctgccttgacaaactactgaacatctagcagccacgttttttggctgcccagatcccttttaaatgaaaagttctgaccttctgttatagtcaaggagcatctaaaaactgctccatctatggtactaagaataatctgtgtgtgtgctgatttgttgtcttgccactcaaactgtagtcagcacaactttagtggggaattcagtctctctgattcaagtcacagtgtgatccttttagaggagattgtgtgagaaacaaaggcatgtgaggtcaccagcatcacaggtctaaatgcatcaggaattccagggaagaaactctggagaagagctaattttctaagtgattaaccaggaaattctcttacttcctaacccagcattctgttttaagagcaaggcatccggacttggaccatctatcacacttaacagcccctgattcttttatattaatggaagcattcttctattttcatatctttctttaattttaatgatacattatcataaatggtaaaaagattttattaatatatcacttatttaaatgtctttaaagaaagtatttaacttgtttaatataattgtatttataaatgctgatagatttaaaggttttaaagttttatatttttattattgcaggatagaaggataaaggatgcatgtgtagtatttttattttgaaaggaaaatgtacaatgtgtgaacaaaaacattaagagatttaatatactattttcttattttagatttttacattcaataagtataaattctcatctatataaggtattgtgtgcaaatttgggaaaaaactgattagcagccatttagtagaagctatgcctctgatttttaaagaatggtttcaatctggtttaagcttctgagagaattttggataatgggatagatggtaacatttttttcttatccctgttacaggattctagatttgtgcagtaggattgtgggactgtgttttaggagagaaggatgtcttggatgtccagtttctgtggttaatcccttacttgcttatccagtgacagcaagaaactttctgatttaaagtctttcaattgaccaaaactttcttattggattctgtttcagttctcctattaagcactgcagaaacgaaaggaaagcctaggaatatgaaactaattaaaaaggcacttggtgatatgacatagtactatgctagccgttgtggatgtaacagttcatttcttatactgcattgtgccttcccaatgatgtcaaaccctagaaatattacagagatctacttttctggaaaagggtgagctctgtattgatctgcagtgactctgtttagatattaaagtaggttctgaaaagcgacctgtgtggtccctctgattagactagttaatgtctatgtgatgggcatttatttatctttattagcaaggtttaaaagagcaaattatcaagacacctatatcttttggccagactatataatattttgtcagagtatgtgaagaggagacccaatttccaaatgaaggaactttgctttttctctgtcatgttgaagagctaatatactgtgtagattttcccctaaatatggctttcttagctttatagatgttgagataatatcttttgaggaacacatgtcaagcaggaaccttggcatagatttggtttcagttgttttaaggcttaattaatgaaatgccttaatcagctttccaaacatttttatatatgaatacagcagaccaaggagctggatctcctgctatccttacacgccttgtatctatcaactaaagctgtcattaatgacttgggcaaaatggcaagaggtataataaagtcttcctgtgaattagccagtagggtctgacacaactagtcaactaacaaggttcctgactagtacctcagtatttcagcaccttaagcactgataaatttcaatcagtcaacaataaagtgagtgttccaactaga

SEQ ID NO: 139898 - DNA, 3079 bp, Homo sapiens
  Payload ID: 7437
  Gene Symbol: HSF5
  Gene Name: heat shock transcription factor family member 5
  Uniprot ID: Q4G112
  ENST ID: ENST00000617946
  CDS Start-End: 67-1494
ggggagggatcgagaacggtgtgggagagctaggctcggggggcgaggccccggcccggcggggcgatggaggcgctgctctccacccccatcaaccccaacaacttccccgccaagctgtggcgcctggtgaacagcccgcgctaccgctccatccgctgggacggccgcggcgaggggctgcttatcgatcagccgctcttcgaggccgagctgctcagcccgcccgcggggccccggcccgagccgcacggaccagtggctgtaggacaatttcaccggtcatttcgtcgagatagtttgtctccttactcctgtgtatcaactccatcccacgaccacagtacttaccctctgaaaggtttagatcggaccccagttcctcatagaatatggcagaactcccttggaatgcatcctggacaagtggagacatctcccacattttcagataaaggggttccgtttcctgtactccagaggtttccaactgaggttacctatacactgcagcccagcaccacatctgtacatgttcaacaaggtcctcaaacaatggtcagctcctcccaaaaatacagtaactacacaccctcagcacagtactcgcaagcctactatccaacagctgtgctacagtgctgttctcctacccacatggatgctctaagtagttgtgtcactcccactgcctcttcctatgcacactgcaactacttccagaatccttcaatgcagtcctcctatccagttgaatttttgccttccaattggccctgcagtactactgatgaaaatacaaagacagaagtaaacctagaggctgtctttcagatagttgatgagttgcattcctcccctaaattggagatggtaaaggtggagcctgttgagaatcagtgcccaacatctccgtcttacagaggccaacacattttagctaattctaacaacagcaatccatgttctgcaagtcaggctagccagctggagccacttactcctgtaggctcagatattatgtcttttgtggttggaacagaacaagcagttgcctgctctctaccacagtcacctgagtacatctataccatccacacagctcagcctgttgaaaatagcacaatacaggaatctgcagccatccagcaagctcatgtcaaactgaaggagcacctaaatcataatccatctccatcttcagtagtatttgtgcaggaagggccaccattcagcacacaccaggtggatgccaacataaaatgccagaccagttcacgtgagaatatcttgccgtcagaacagatgggattcctcatttcagaaatggggcctgctagcaagcctagtgaagacacaggtttagccactccagccagatacagagagcacagaagcaactcacaacaaggaaagtcccctgatcttcatctgctggtggacgtggcctgcaagcaggagcgctttccaaaggaggaagaattaaaagagtgaggaatggatgacaaatgtgacattgtgcactagctgtagctggaggcagactagccttgcacatgacaaactgttgggattttttcagttctgttaaggaaaaaaaagtattttttgtttcgttaattgagaattttgttaattgagaattgggaatttgtatgtactacagtggttcagttcagattatctgccttgacaaactactgaacatctagcagccacgttttttggctgcccagatcccttttaaatgaaaagttctgaccttctgttatagtcaaggagcatctaaaaactgctccatctatggtactaagaataatctgtgtgtgtgctgatttgttgtcttgccactcaaactgtagtcagcacaactttagtggggaattcagtctctctgattcaagtcacagtgtgatccttttagaggagattgtgtgagaaacaaaggcatgtgaggtcaccagcatcacaggtctaaatgcatcaggaattccagggaagaaactctggagaagagctaattttctaagtgattaaccaggaaattctcttacttcctaacccagcattctgttttaagagcaaggcatccggacttggaccatctatcacacttaacagcccctgattcttttatattaatggaagcattcttctattttcatatctttctttaattttaatgatacattatcataaatggtaaaaagattttattaatatatcacttatttaaatgtctttaaagaaagtatttaacttgtttaatataattgtatttataaatgctgatagatttaaaggttttaaagttttatatttttattattgcaggatagaaggataaaggatgcatgtgtagtatttttattttgaaaggaaaatgtacaatgtgtgaacaaaaacattaagagatttaatatactattttcttattttagatttttacattcaataagtataaattctcatctatataaggtattgtgtgcaaatttgggaaaaaactgattagcagccatttagtagaagctatgcctctgatttttaaagaatggtttcaatctggtttaagcttctgagagaattttggataatgggatagatggtaacatttttttcttatccctgttacaggattctagatttgtgcagtaggattgtgggactgtgttttaggagagaaggatgtcttggatgtccagtttctgtggttaatcccttacttgcttatccagtgacagcaagaaactttctgatttaaagtctttcaattgaccaaaactttcttattggattctgtttcagttctcctattaagcactgcagaaacgaaaggaaagcctaggaatatgaaactaattaaaaaggcacttggtgatatgacatagtactatgctagccgttgtggatgtaacagttcatttcttatactgcattgtgccttcccaatgatgtcaaaccctagaaatattacagagatctacttttctggaaaagggtgagctctgtattgatctgcagtgactctgtttagatattaaagtaggttctgaaaagcgacctgtgtggtccctct

SEQ ID NO: 139899 - DNA, 1963 bp, Homo sapiens
  Payload ID: 7438
  Gene Symbol: HSFX1
  Gene Name: heat shock transcription factor family, X-linked 1
  Uniprot ID: Q9UBD0
  ENST ID: ENST00000370416
  CDS Start-End: 615-1886
ctgcctccgactccccactggactgcatggcgacggcgtgtggtggggcagtcagctaagccatttgcctaaggggctgtcgggcatctgcgtgctggggaccgacagtgtgggtgtgttaggaggatctgtatggagcacattgctgcctctggctaggacagggtggaaagggtggcgtggctacagcctgacccatgggcaccgtcctaccctttgttctgtgcttccgagtgtcagtcatgtgctggggtctgtgggcccatgactcagacggtgagctctgaccttcctgagccagggctttgctgtagttgtgcctggctcaggagctctaggacaaggggaccgctccaggtctgcatctacggtgtggcagggcccctcggcactcttgtgcactagtgtcatctttcccattgaaatgactgtgaggaccagaatgtgcacatgcagatgggcagctacttgtctgccttggccctttattacacaacttgctgggggtggagatgccaccccccggcagtcagagcccctttatgatgtcatggggctggttacatgactgccaaggggtgctgctggccacactgcactagcaagtttgccagatggaggacaagcgatcattgagtatggctcgctgtgaagaaagaaattcgagaggacaggatcatggcttggaaagggtgcctttccctccccagttgcagtcagagacctaccttcacccagcagatccttcccctgcctgggacgacccggggtccactgggagccctaacttgaggctgctgacagaagaaatcgctttccaacctctggccgaggaagcttcgttcagaaggccgcaccctgacggtgacgtcccgccccagggagaagataatctcctctccctcccctttccacagaaactgtggagactggtcagcagcaaccagttttcgtccatctggtgggatgacagtggggcttgtagagtgatcaatcaaaaactctttgaaaaggagattctcaaaagggacgtcgcacacaaagtgtttgccacaacttcgataaagagcttcttccgccagctaaacttgtatggcttccgaaaacggcgtcaatgcactttcaggaccttcacccgcattttctccgcaaaaaggctggtctccatcttgaataagttagagttctactgccatccttactttcaaagagactcccctcacctcctcgtgaggatgaagagaagagtgggtgtcaagtctgcaccaagacatcaggaggaggacaagccagaagctgctggatcctgtctggcaccagcagacactgagcaacaagatcacacgtctccgaatgagaatgaccaggtcacaccgcaacaccgggaaccggccggtcccaacacccaaatcaggagtggctctgctccaccagcaactcctgtgatggtgcctgattccgccgtggcgagtgacaacagtccagtgacccagccggccggcgagtggtcagagggcagccaggctcacgtcactccggtggccgctgtccctgggcctgcagcgctgcccttcctctatgtccctggatctcccactcagatgaattcttacgggcctgtggtggcccttcccacagcgtcccgtagtacccttgccatggacaccacaggacttcctgcacctggcatgctgcccttttgccatctctgggtaccggtgaccctagtggctgctggggctgcacagcctgctgcctccatggtcatgttcccccatctcccagctctgcaccaccattgcccccacagccaccgcacgtcacagtacatgccagctagcgatgggccccaggcgtacccagactacgcagaccagagcacatagagggcagcatttgggcagaatatgtgctggtcaataaatgtgtcagaaaatgagtaattttctgactgcacaaaaaa

SEQ ID NO: 139900 - DNA, 1365 bp, Homo sapiens
  Payload ID: 7439
  Gene Symbol: HSFX2
  Gene Name: heat shock transcription factor family, X-linked 2
  Uniprot ID: Q9UBD0
  ENST ID: ENST00000598963
  CDS Start-End: 17-1288
ctagcaagtttgccagatggaggacaagcgatcattgagtatggctcgctgtgaagaaagaaattcgaggggacaggatcatggcttggaaagggtgcctttccctccccagttgcagtcagagacctaccttcacccagcagatccttcccctgcctgggacgacccggggtccactgggagccctaacttgaggctgctgacagaagaaatcgctttccaacctctggccgaggaagcttcgttcagaaggccgcaccctgacggtgacgtcccgccccagggagaagataatctcctctccctcccctttccacagaaactgtggagactggtcagcagcaaccagttttcgtccatctggtgggatgacagtggggcttgtagagtgatcaatcaaaaactctttgaaaaggagattctcaaaagggacgtcgcacacaaagtgtttgccacaacttcgataaagagcttcttccgccagctaaacttgtatggcttccgaaaacggcgtcaatgcactttcaggaccttcacccgcattttctccgcaaaaaggctggtctccatcttgaataagttagagttctactgccatccttactttcaaagagactcccctcacctcctcgtgaggatgaagagaagagtgggtgtcaagtctgcaccaagacatcaggaggaggacaagccagaagctgctggatcctgtctggcaccagcagacactgagcaacaagatcacacgtctccgaatgagaatgaccaggtcacaccgcaacaccgggaaccggccggtcccaacacccaaatcaggagtggctctgctccaccagcaactcctgtgatggtgcctgattccgccgtggcgagtgacaacagtccagtgacccagccggccggcgagtggtcagagggcagccaggctcacgtcactccggtggccgctgtccctgggcctgcagcgctgcccttcctctatgtccctggatctcccactcagatgaattcttacgggcctgtggtggcccttcccacagcgtcccgtagtacccttgccatggacaccacaggacttcctgcacctggcatgctgcccttttgccatctctgggtaccggtgaccctagtggctgctggggctgcacagcctgctgcctccatggtcatgttcccccatctcccagctctgcaccaccattgcccccacagccaccgcacgtcacagtacatgccagctagcgatgggccccaggcgtacccagactacgcagaccagagcacatagagggcagcatttgggcagaatatgtgctggtcaataaatgtgtcagaaaatgagtaattttctgactgcacaaaaaa

SEQ ID NO: 139901 - DNA, 1444 bp, Homo sapiens
  Payload ID: 7440
  Gene Symbol: HSFY1
  Gene Name: heat shock transcription factor, Y-linked 1
  Uniprot ID: Q96LI6
  ENST ID: ENST00000307393
  CDS Start-End: 118-1323
aaccattgtgatggtctagataagtgtacatgcttaggccttctgaagcagcatttgaagctgcagtcctgaaaaccatgcaggccggaagagtagataaagaaatatttatttgagatggcacatgtttcttcagaaactcaagatgtttcccccaaagatgaattaactgcttcagaagcctccactaggtctccattgtgtgaacacaccttccctggggactcagacttacggtcaatgattgaagaacatgcttttcaggttttgtcacaaggatccttgttagaaagtccaagttacacagtttgtgtctctgagccagataaagatgatgattttctttctctgaactttcccaggaaactttggaaaatagtggaaagtgaccaattcaagtctatttcatgggatgagaatggaacttgcatagtgattaatgaagaactcttcaagaaagaaattttggaaacaaaggctccttacagaatatttcaaactgatgctatcaaaagttttgttcgacagctcaacctttatggatttagtaaaattcaacagaattttcaaagatctgcctttctagccacctttctgtcagaagagaaagaatcgtctgtcttaagcaagttaaagttctattataatccaaatttcaagcgtggctatccccaacttttagtaagagtgaagagaagaattggtgttaaaaatgcttcacctatatctactttattcaacgaagatttcaacaagaagcattttagagcaggggctaacatggagaatcataattctgccttagctgctgaagctagtgaagaaagtttattttcagcctctaaaaatttaaatatgcctctaacaagggaatcttctgtcagacagataattgcaaattcatctgtccccattagaagtggtttccctcctccttcaccttcaacctcagttggaccatcagaacaaattgcaacagatcaacatgctattttaaatcagttgaccactattcatatgcactctcatagtacctacatgcaagcaaggggccacattgtgaattttattacaaccacaacttctcaataccacatcatatctcccttacaaaatggttattttgggctgacagtggaaccatctgctgttcccacacgatatcctctggtatcagtcaatgaggctccatatcgtaacatgctaccagcaggcaacccgtggttgcaaatgcctacgatcgctgatagatcagctgcccctcattccaggctagctcttcaaccatcaccactggacaaatatcaccctaattacaactgatctgccattaaaagaggaccagattatgaatgacaacagagactaacatttacattgacaaaaaaccctaaaaatttctgcaattatcttattgaacaataaaattgcatgtttacttcta

SEQ ID NO: 139902 - DNA, 1038 bp, Homo sapiens
  Payload ID: 7440
  Gene Symbol: HSFY1
  Gene Name: heat shock transcription factor, Y-linked 1
  Uniprot ID: Q96LI6
  ENST ID: ENST00000309834
  CDS Start-End: 98-709
taagtgtacatgcttaggccttctgaagcagcatttgaagctgcagtcctgaaaaccatgcaggccggaagagtagataaagaaatatttatttgagatggcacatgtttcttcagaaactcaagatgtttcccccaaagatgaattaactgcttcagaagcctccactaggtctccattgtgtgaacacaccttccctggggactcagacttacggtcaatgattgaagaacatgcttttcaggttttgtcacaaggatccttgttagaaagtccaagttacacagtttgtgtctctgagccagataaagatgatgattttctttctctgaactttcccaggaaactttggaaaatagtggaaagtgaccaattcaagtctatttcatgggatgagaatggaacttgcatagtgattaatgaagaactcttcaagaaagaaattttggaaacaaaggctccttacagaatatttcaaactgatgctatcaaaagttttgttcgacagctcaacctttatggatttagtaaaattcaacagaattttcaaagatctgcctttctagccacctttctgtcagaagagaaagaatcgtctgtcttaagcaagatacgcttcaccaaaatgaaactttccagatcttcaacttatgaaaacaggtatttatgttgcaacttacatttaaaagatgagtcgaattactcataatccttagaagttagcttgtccgcatctgaaaattcacttttaccttgaagttcaatctgtctctgggaaagactagattggaagaataaaattcaagaatgtgatgttttagtaatggaaaagccaagagcgtcaggtggcaaaagtccttctgttactcaagaaaatgctctgaaaaattccttttctcttttttttttgtaaagattaactccacctcaccaccacaatgaggtatttttctcagcaattgacacctgtttactcagttactccctgtaactatgttatgctgtgaagtaggcaatacagttgttaaagaagaataa

SEQ ID NO: 139903 - DNA, 1476 bp, Homo sapiens
  Payload ID: 7440
  Gene Symbol: HSFY1
  Gene Name: heat shock transcription factor, Y-linked 1
  Uniprot ID: Q96LI6
  ENST ID: ENST00000338876
  CDS Start-End: 98-742
taagtgtacatgcttaggccttctgaagcagcatttgaagctgcagtcctgaaaaccatgcaggccggaagagtagataaagaaatatttatttgagatggcacatgtttcttcagaaactcaagatgtttcccccaaagatgaattaactgcttcagaagcctccactaggtctccattgtgtgaacacaccttccctggggactcagacttacggtcaatgattgaagaacatgcttttcaggttttgtcacaaggatccttgttagaaagtccaagttacacagtttgtgtctctgagccagataaagatgatgattttctttctctgaactttcccaggaaactttggaaaatagtggaaagtgaccaattcaagtctatttcatgggatgagaatggaacttgcatagtgattaatgaagaactcttcaagaaagaaattttggaaacaaaggctccttacagaatatttcaaactgatgctatcaaaagttttgttcgacagctcaacctttatggatttagtaaaattcaacagaattttcaaagatctgcctttctagccacctttctgtcagaagagaaagaatcgtctgtcttaagcaagcttcatgtctttgtgtttcaccacagtctatttggagcaacattcggagaacatcactttcagccatgccctttaccatctggtaacaaggctcccatttctacttggagtggagattcctggttgctgtgatgaaatgggatacactggggatccagctgcacaacttttcggaagcagcattcactgtggatttggaacatcacggacgttcttcatcttgagtcatcacttgagtaataaagtagatggagaagatgtactttctccctcacataaatgcaattaatatccgtgcgtgatatatataaagcaaacataagactgaaggatggagcaagaagataaactgattgaagcatgtctatagggagccttcctgaaccacctttcttgagctctgattatgtggcagaaagggaagatttttgaaatttgatacgcttcaccaaaatgaaactttccagatcttcaacttatgaaaacaggtatttatgttgcaacttacatttaaaagatgagtcgaattactcataatccttagaagttagcttgtccgcatctgaaaattcacttttaccttgaagttcaatctgtctctgggaaagactagattggaagaataaaattcaagaatgtgatgttttagtaatggaaaagccaagagcgtcaggtggcaaaagtccttctgttactcaagaaaatgctctgaaaaattccttttctcttttttttttgtaaagattaactccacctcaccaccacaatgaggtatttttctcagcaattgacacctgtttactcagttactccctgtaactatgttatgctgtgaagtaggcaatacagttgttaaagaagaataa

SEQ ID NO: 139904 - DNA, 1374 bp, Homo sapiens
  Payload ID: 7440
  Gene Symbol: HSFY1
  Gene Name: heat shock transcription factor, Y-linked 1
  Uniprot ID: Q96LI6
  ENST ID: ENST00000382856
  CDS Start-End: 69-713
agcatttgaagctgcagtcctgaaaaccatgcaggccggaagagtagataaagaaatatttatttgagatggcacatgtttcttcagaaactcaagatgtttcccccaaagatgaattaactgcttcagaagcctccactaggtctccattgtgtgaacacaccttccctggggactcagacttacggtcaatgattgaagaacatgcttttcaggttttgtcacaaggatccttgttagaaagtccaagttacacagtttgtgtctctgagccagataaagatgatgattttctttctctgaactttcccaggaaactttggaaaatagtggaaagtgaccaattcaagtctatttcatgggatgagaatggaacttgcatagtgattaatgaagaactcttcaagaaagaaattttggaaacaaaggctccttacagaatatttcaaactgatgctatcaaaagttttgttcgacagctcaacctttatggatttagtaaaattcaacagaattttcaaagatctgcctttctagccacctttctgtcagaagagaaagaatcgtctgtcttaagcaagcttcatgtctttgtgtttcaccacagtctatttggagcaacattcggagaacatcactttcagccatgccctttaccatctggtaacaaggctcccatttctacttggagtggagattcctggttgctgtgatgaaatgggatacactggggatccagctgcacaacttttcggaagcagcattcactgtggatttggtatattatgcagcttttggtgtcacaggctaaggtctgacaagattcaccatgcagttttctgggatagcagaaaatgaacatggatttggacagccagattcctcaggatggaaacctagtggtgccatctaaccatatacgtatatttccaagttgtgcataagtagaaaaagtttagaatccatcatctaaaaagggaatcctgatttcctttcctggcagaccatgacagaaagacaaaggtcatttcacctatatccacatgctattaactttttagttctcaaactgggttttcagaaggtagtgtgatagacatggttaaatggttaacaggaagaatgtttaaaaaaaaaattccggctggggtggtggctcaggcctgtaatcacagcattttgggaggccaagctgagtcaggagaatcgcttgaacccaggaggcggaggttgcagtaagctgagatcctgcttttgcgctccagcctgggtgacagagtaagacttcatcttaaagaaatccacaacaataaaaaggctaatgccagacacaataaaaaatgaaaagaataacttgggtgaacagcaaggcaa

SEQ ID NO: 139905 - DNA, 1444 bp, Homo sapiens; identical to SEQ ID NO: 139901
  Payload ID: 7441
  Gene Symbol: HSFY2
  Gene Name: heat shock transcription factor, Y-linked 2
  Uniprot ID: Q96LI6
  ENST ID: ENST00000304790
  CDS Start-End: 118-1323

SEQ ID NO: 139906 - DNA, 1038 bp, Homo sapiens; identical to SEQ ID NO: 139902
  Payload ID: 7441
  Gene Symbol: HSFY2
  Gene Name: heat shock transcription factor, Y-linked 2
  Uniprot ID: Q96LI6
  ENST ID: ENST00000344884
  CDS Start-End: 98-709

SEQ ID NO: 139907 - DNA, 1390 bp, Homo sapiens
  Payload ID: 7441
  Gene Symbol: HSFY2
  Gene Name: heat shock transcription factor, Y-linked 2
  Uniprot ID: Q96LI6
  ENST ID: ENST00000382852
  CDS Start-End: 69-713
agcatttgaagctgcagtcctgaaaaccatgcaggccggaagagtagataaagaaatatttatttgagatggcacatgtttcttcagaaactcaagatgtttcccccaaagatgaattaactgcttcagaagcctccactaggtctccattgtgtgaacacaccttccctggggactcagacttacggtcaatgattgaagaacatgcttttcaggttttgtcacaaggatccttgttagaaagtccaagttacacagtttgtgtctctgagccagataaagatgatgattttctttctctgaactttcccaggaaactttggaaaatagtggaaagtgaccaattcaagtctatttcatgggatgagaatggaacttgcatagtgattaatgaagaactcttcaagaaagaaattttggaaacaaaggctccttacagaatatttcaaactgatgctatcaaaagttttgttcgacagctcaacctttatggatttagtaaaattcaacagaattttcaaagatctgcctttctagccacctttctgtcagaagagaaagaatcgtctgtcttaagcaagcttcatgtctttgtgtttcaccacagtctatttggagcaacattcggagaacatcactttcagccatgccctttaccatctggtaacaaggctcccatttctacttggagtggagattcctggttgctgtgatgaaatgggatacactggggatccagctgcacaacttttcggaagcagcattcactgtggatttggtatattatgcagcttttggtgtcacaggctaaggtctgacaagattcaccatgcagttttctgggatagcagaaaatgaacatggatttggacagccagattcctcaggatggaaacctagtggtgccatctaaccatatacgtatatttccaagttgtgcataagtagaaaaagtttagaatccatcatctaaaaagggaatcctgatttcctttcctggcagaccatgacagaaagacaaaggtcatttcacctatatccacatgctattaactttttagttctcaaactgggttttcagaaggtagtgtgatagacatggttaaatggttaacaggaagaatgtttaaaaaaaaaattccggctggggtggtggctcaggcctgtaatcacagcattttgggaggccaagctgagtcaggagaatcgcttgaacccaggaggcggaggttgcagtaagctgagatcctgcttttgcgctccagcctgggtgacagagtaagacttcatcttaaagaaatccacaacaataaaaaggctaatgccagacacaataaaaaatgaaaagaataacttgggtgaacagcaaggcaagaaagaaaaaaggaaa

SEQ ID NO: 139908 - DNA, 1057 bp, Homo sapiens
  Payload ID: 7442
  Gene Symbol: HRSP12
  Gene Name: heat-responsive protein 12
  Uniprot ID: P52758
  ENST ID: ENST00000254878
  CDS Start-End: 146-559
agttcccagaatgccgcacgagcccgcccccagcgggagctgtggggcagaggcgctgctgtggttggtcagtccagtaagaagccagcagggctggtgctggggcttcttctcctgaaggggctgcaagagggaaggcttagccatgtcgtccttgatcagaagggtgatcagcaccgcgaaagccccaggggccattggaccctacagtcaagctgtattagtcgacaggaccatttacatttcaggacagataggcatggacccttcaagtggacagcttgtgtcaggaggggtagcagaagaagctaaacaagctcttaaaaacatgggtgaaattctgaaagctgcaggctgtgacttcactaacgtggtgaaaacaactgttcttctggctgacataaatgacttcaatactgtcaatgaaatctacaaacagtatttcaagagtaattttcctgctagagctgcttaccaagttgctgctttacccaaaggcagccgaattgaaattgaagcagtagctatccaaggaccactgacaacggcatcactataagtgggcccagtgctgtgtagtctggaattgttaacattttaatttttacaattgatgtaacatcttaattaaccttttaattttcacaattgatgacagtgtgagtttgatgaaaatatctgaagctattatggaaataccatgtaatagggagagttgaacatgaatattagagaaggaatccagttacttttttaaattacacctgtgtgcacctgtattactgaatataggaaagagatacccattacatagttactcagtaaacaaaagagaaataccaggtaggaaagaagagttactattcctgagaaataatcaagaacatatttaatttaaactaatgatgtgaactatttagttttgatgtccgttatgtgattctgcttttacttgagtaaaattaaagtgtttaaatttgagatcaaggagaagatagtggaacaaaatgttatatagataatatttttctaatggaaataaaataggcagatttcc

SEQ ID NO: 139909 - DNA, 848 bp, Homo sapiens
  Payload ID: 7442
  Gene Symbol: HRSP12
  Gene Name: heat-responsive protein 12
  ENST ID: ENST00000520507
  CDS Start-End: 1-445
gggaaggcttagccatgtcgtccttgatcagaagggtgatcagcaccgcgaaagccccaggggccattggaccctacagctttctgtttattgcagtcaagctgtattagtcgacaggaccatttacatttcaggacagataggcatggacccttcaagtggacagcttgtgtcaggaggggtagcagaagaagctaaacaagctcttaaaaacatgggtgaaattctgaaagctgcaggctgtgacttcactaacgtggtgaaaacaactgttcttctggctgacataaatgacttcaatactgtcaatgaaatctacaaacagtatttcaagagtaattttcctgctagagctgcttaccaagttgctgctttacccaaaggcagccgaattgaaattgaagcagtagctatccaaggaccactgacaacggcatcactataagtgggcccagtgctgtgtagtctggaattgttaacattttaatttttacaattgatgtaacatcttaattaaccttttaattttcacaattgatgacagtgtgagtttgatgaaaatatctgaagctattatggaaataccatgtaatagggagagttgaacatgaatattagagaaggaatccagttacttttttaaattacacctgtgtgcacctgtattactgaatataggaaagagatacccattacatagttactcagtaaacaaaagagaaataccaggtaggaaagaagagttactattcctgagaaataatcaagaacatatttaatttaaactaatgatgtgaactatttagttttgatgtccgttatgtgattctgcttttacttgagtaaaa

SEQ ID NO: 139910 - DNA, 884 bp, Homo sapiens
  Payload ID: 7442
  Gene Symbol: HRSP12
  Gene Name: heat-responsive protein 12
  ENST ID: ENST00000522791
  CDS Start-End: 64-192
agccagcagggctggtgctggggcttcttctcctgaaggggctgcaagagggaaggcttagccatgtcgtccttgatcagaagggtgatcagcaccgcgaaagccccaggggccattggaccctacaggacagataggcatggacccttcaagtggacagcttgtgtcaggaggggtagcagaagaagctaaacaagctcttaaaaacatgggtgaaattctgaaagctgcaggctgtgacttcactaacgtggtgaaaacaactgttcttctggctgacataaatgacttcaatactgtcaatgaaatctacaaacagtatttcaagagtaattttcctgctagagctgcttaccaagttgctgctttacccaaaggcagccgaattgaaattgaagcagtagctatccaaggaccactgacaacggcatcactataagtgggcccagtgctgtgtagtctggaattgttaacattttaatttttacaattgatgtaacatcttaattaaccttttaattttcacaattgatgacagtgtgagtttgatgaaaatatctgaagctattatggaaataccatgtaatagggagagttgaacatgaatattagagaaggaatccagttacttttttaaattacacctgtgtgcacctgtattactgaatataggaaagagatacccattacatagttactcagtaaacaaaagagaaataccaggtaggaaagaagagttactattcctgagaaataatcaagaacatatttaatttaaactaatgatgtgaactatttagttttgatgtccgttatgtgattctgcttttacttgagtaaaattaaagtgtttaaatttgagatcaaggagaagatagtggaac

SEQ ID NO: 139911 - DNA, 761 bp, Homo sapiens
  Payload ID: 7442
  Gene Symbol: HRSP12
  Gene Name: heat-responsive protein 12
  ENST ID: ENST00000521560
  CDS Start-End: 1-383
agtccagtaagaagccagcagggctggtgctggggcttcttctcctgaaggggctgcaagagggaaggcttagccatgtcgtccttgatcagaagggtgatcagcaccgcgaaagccccaggggccattggaccctacaggctcttaaaaacatgggtgaaattctgaaagctgcaggctgtgacttcactaacgtggtgaaaacaactgttcttctggctgacataaatgacttcaatactgtcaatgaaatctacaaacagtatttcaagagtaattttcctgctagagctgcttaccaagttgctgctttacccaaaggcagccgaattgaaattgaagcagtagctatccaaggaccactgacaacggcatcactataagtgggcccagtgctgtgtagtctggaattgttaacattttaatttttacaattgatgtaacatcttaattaaccttttaattttcacaattgatgacagtgtgagtttgatgaaaatatctgaagctattatggaaataccatgtaatagggagagttgaacatgaatattagagaaggaatccagttacttttttaaattacacctgtgtgcacctgtattactgaatataggaaagagatacccattacatagttactcagtaaacaaaagagaaataccaggtaggaaagaagagttactattcctgagaaataatcaagaacatatttaatttaaactaatgatgtgaactatttagttttgatgtccgttatg

SEQ ID NO: 139912 - DNA, 15337 bp, Homo sapiens
  Payload ID: 7443
  Gene Symbol: HERC2
  Gene Name: HECT and RLD domain containing E3 ubiquitin protein ligase 2
  Uniprot ID: O95714
  ENST ID: ENST00000261609
  CDS Start-End: 110-14614
gcgccggctgagccagcggctcttgggaggctgcgtccgcgcgccggcgaggcgaggcggccgggccctgcgcgtcaggcctgagacctgggaggaagctggagaaaagatgccctctgaatctttctgtttggctgcccaggctcgcctcgactccaaatggttgaaaacagatatacagcttgcattcacaagagatgggctctgtggtctgtggaatgaaatggttaaagatggagaaattgtatacactggaacagaatcaacccagaacggagagctccctcctagaaaagatgatagtgtcgaaccaagtggaacaaagaaagaagatctgaatgacaaagagaaaaaagatgaagaagaaactcctgcacctatatatagggccaagtcaattctggacagctgggtatggggcaagcaaccagatgtgaatgaactgaaggagtgtctttctgtgctggttaaagagcagcaggccctggccgtccagtcagccaccaccaccctctcagccctgcgactcaagcagaggctggtgatcttggagcgctatttcattgccttgaatagaaccgtttttcaggagaatgtcaaagttaagtggaaaagcagcggtatttctctgcctcctgtggacaaaaaaagttcccggcctgcgggcaaaggtgtggaggggctcgccagagtgggatcccgagcggcgctgtcttttgcctttgccttcctgcgcagggcctggcgatcaggcgaggatgcggacctctgcagtgagctgttgcaggagtccctggacgccctgcgagcacttcccgaggcctcgctctttgacgagagcaccgtgtcctctgtgtggctggaggtggtggagagagcgaccaggttcctcaggtccgtcgtgacgggggatgttcacggaacgccagccaccaaagggccaggaagcatccccctgcaggaccagcacttggccctggccatcctgctggagctggctgtgcagagaggcacgctgagccaaatgttgtctgccatcctgttgttgcttcagctgtgggacagcggggcacaggagactgacaatgagcgttccgcccagggcaccagcgccccacttttgcccttgctgcaaaggttccagagcatcatttgcaggaaggatgcaccccactccgagggcgacatgcaccttttgtctggccctctgagccccaatgagagtttcctgaggtacctcacccttccacaagacaacgagcttgccattgatctgcgacaaacggcggttgttgtcatggcccatttagaccgtctggctacgccctgtatgcctccgctgtgtagctctccgacatctcataagggatcattgcaagaggtcataggttgggggttaataggatggaaatactatgccaatgtgattggtccaatccagtgcgaaggcctggccaacctgggagtcacacagattgcctgtgcagagaagcgtttcctgattctgtcacgcaatggccgcgtgtacacacaggcctataatagtgacacgctggccccacagctggtccaaggccttgcctccagaaacattgtaaaaattgctgcccattctgatggtcaccactacctagccttggctgctactggagaggtgtactcctggggctgtggggacggcggacggctgggccatggggacactgtgcctttggaggagcctaaggtgatctccgccttctctggaaagcaggccgggaagcacgtggtgcacatcgcttgcgggagcacttacagtgcggccatcactgccgagggggagctgtacacctggggccgcgggaactacggccggctgggccatggctccagtgaggacgaggccattccgatgctggtagccgggcttaaaggactgaaggtcatcgatgtggcgtgtgggagtggggatgctcaaaccctggctgtcactgagaacgggcaagtgtggtcttggggagatggtgactatgggaaattgggcagaggtggtagtgatggctgcaaaaccccaaagctgattgaaaagcttcaagacttggatgtggtcaaagtccgctgtggaagtcagttttccattgctttgacgaaagatggccaagtttattcatggggaaaaggtgacaaccagagacttggacatggaacagaggaacatgttcgttatccaaaactcttagaaggcttgcaagggaagaaggtgattgatgtggctgcaggctccacccactgcctggctctgactgaggacagcgaggtccacagctgggggagcaacgaccagtgccagcactttgacaccttgcgcgtgaccaagccagaacctgcagcattgccaggactggacaccaaacacatagtgggaattgcctgtgggcctgcccagagctttgcttggtcatcatgttctgagtggtccattggcctccgtgtcccttttgtggtggacatctgctcaatgacttttgagcagctggatctcctgcttcggcaggtgagtgaggggatggatggttccgcggactggcccccgccccaggagaaagagtgtgtggccgtggcaacgctgaatcttctacgacttcagttgcatgctgccattagtcaccaggttgacccggaattccttggtttaggtctgggcagcatcctcctgaacagcctgaagcagacggtggtgaccctggccagcagtgcgggcgtgctgagcaccgtgcagtcggccgcccaggccgtgctgcagagtggctggtccgtgctgctgcccaccgcggaggagcgggcccgggcactctctgctctcctgccctgcgcagtttcaggcaatgaagtgaacataagtccaggtcgtcgattcatgattgatcttctggtgggcagcttgatggctgatggagggttggagtcagccttacacgcagccattactgcagagatccaggatattgaagccaaaaaagaagcacagaaggaaaaagaaattgatgaacaggaagcgaatgcctcaacatttcatagaagcaggactccactggataaagaccttattaatacggggatctgtgagtcttctggcaaacagtgtttgcctctggttcagctcatacaacagcttcttagaaacattgcttctcagactgtagccagattgaaagatgttgcccgtcggatttcatcatgtctggactttgagcaacacagtcgtgaaagatctgcttcattggatttgttactgcgttttcaacgtttgcttattagtaaactttatccaggagaaagtattggtcagacctcagatatttctagtccagagctaatgggtgttggttccttgctgaagaagtacacagccctcctgtgcacgcacattggagatatactgcctgtggccgccagcattgcttctaccagctggcggcacttcgcggaggtggcttacattgtggaaggggactttactggtgttctccttccagaactagtagtttctatagtgcttctgctcagtaaaaatgctggtctcatgcaagaggctggagctgtacctctgctgggtggcctgttggaacatctggatcggttcaaccatctggcaccaggaaaggaacgggatgatcatgaagagttagcctggcctggcataatggagtcattttttacaggtcagaactgtagaaataatgaggaagtgacacttatacgcaaagctgatttggagaaccataataaagatggaggcttctggactgtgattgacgggaaggtgtatgatataaaggacttccagacacagtcgttaacaggaaatagtattcttgctcagtttgcaggggaagacccagtggtagctttggaagctgctttgcagtttgaagacacccgggaatccatgcacgcgttttgtgttggccagtatttggagcctgaccaagaaatcgtcaccataccagatctggggagtctctcttcacctctgatagacacagagaggaatctgggcctgcttctcggattacacgcttcgtatttggcaatgagcacaccgctgtctcctgtcgagattgaatgtgccaaatggcttcagtcatccatcttctctggaggcctgcagaccagccagatccactacagctacaacgaggagaaagacgaggaccactgcagctccccagggggcacacctgccagcaaatctcgactctgctcccacagacgggccctgggggaccattcccaggcatttctgcaagccattgcagacaacaacattcaggatcacaacgtgaaggactttttgtgtcaaatagaaaggtactgtaggcagtgccatttgaccacaccgatcatgtttccccccgagcatcccgtggaagaggtcggtcgcttgttgttatgttgcctcttaaaacatgaagatttaggtcatgtggcattatctttagttcatgcaggtgcacttggtattgagcaagtaaagcacagaacgttgcctaagtcagtggtggatgtttgtagagttgtctaccaagcaaaatgttcgctcattaagactcatcaagaacagggccgttcttacaaggaggtctgcgctcctgtcatcgaacgtttgagattcctctttaatgaattgagacctgctgtttgtaatgacctctctataatgtctaagtttaaattgttaagttctttgccccgttggaggaggatagctcaaaagataattcgagaacgaaggaaaaagagagttcctaagaagccagaatctacggatgatgaagaaaaaattggaaacgaagagagtgatttagaagaagcttgcattttgcctcatagtccaataaatgtggacaagagacccattgcaattaaatcacccaaggacaaatggcagccgctgttgagtactgttacaggtgttcacaaatacaagtggttgaagcagaatgtgcagggtctttatccgcagtctccactcctcagtacaattgctgaatttgcccttaaagaagagccagtggatgtggaaaaaatgagaaagtgcctactaaaacagttggagagagcagaggttcgcctggaagggatagatacaattttaaaactggcgagcaagaatttcttacttccatctgtgcagtatgcgatgttttgtggatggcaaagacttattcctgagggaatcgatataggggaacctcttactgattgtttaaaggatgttgatttgatcccgccttttaatcggatgctgctggaagtcacctttggcaagctgtacgcttgggctgtacagaacattcgaaatgttttgatggatgccagtgccaaatttaaagagcttggtatccagccggttcccctgcaaaccatcaccaatgagaacccgtcaggaccgagcctggggaccatcccgcaagcccgcttcctcctggtgatgctcagcatgctcaccctgcagcacggcgcaaacaacctcgaccttctgctcaattccggcatgctggccctcacgcagacggcactgcgcctgattggccccagttgtgacaacgttgaggaagatatgaatgcttctgctcaaggtgcttctgccacagttttggaagaaacaaggaaggaaacggctcctgtgcagctccctgtttcaggaccagaactggctgccatgatgaagattggaacaagggtcatgagaggtgtggactggaaatggggcgatcaggatgggcctcctccaggcctaggccgcgtgattggtgagctgggagaggacggatggataagagtccagtgggacacaggcagcaccaactcctacaggatggggaaagaaggaaaatacgacctcaagctggcagagctgccggctgctgcacagccctcagcagaggattcggacacagaggatgactctgaagccgaacaaactgaaaggaacattcaccccactgcaatgatgtttaccagcactattaacttactgcagactctttgtctgtctgctggagttcatgctgagatcatgcagagcgaagccaccaagactttatgcggactgctgcgaatgttagtggaaagcggaacgacggacaagacatcttctccaaacaggctggtgtacagggagcaacaccggagctggtgcacgctggggtttgtgcggagcatcgctctcacgccgcaggtatgcggcgccctcagctccccgcagtggatcacgctgctcatgaaggtcgtggaagggcacgcacccttcactgccacctcgctgcagaggcagatcttagctgtgcatttgttgcaagcagtccttccatcatgggacaagaccgaaagggcgagggacatgaaatgcctcgtggagaagctgtttgacttcttgggaagcttgctcactacctgctcctctgacgtgccattactcagagagtccacgctgaggcggcgcagggtgcgcccgcaggcctcgctgactgccacccacagcagcacactggcggaggaggtggtggcactgctgcgcacgctgcactccctgactcagtggaatgggctcatcaacaagtacatcaactcccagctccgctccatcacccacagctttgtgggaaggccttccgaaggggcccagttagaggactacttccccgactccgagaaccctgaagtggggggcctcatggcagtcctggctgtgattggaggcatcgatggtcgcctgcgcctgggcggtcaagttatgcacgatgagtttggagaaggcactgtgactcgcatcaccccaaagggcaaaatcaccgtgcagttctctgacatgcggacgtgtcgcgtttgcccattgaatcagctgaaaccactccctgccgtggcctttaatgtgaacaacctgcccttcacagagcccatgctgtctgtctgggctcagttggtgaacctcgctggaagcaagttagaaaagcacaaaataaagaaatcgactaaacaggcctttgcaggacaagtggacctggacctgctgcggtgccagcagttgaagctatacatcctgaaagcaggtcgggcgctgctctcccaccaggataaactgcggcagatcctgtctcagccagctgttcaggagactggaactgttcacacagatgatggagcagtggtatcacctgaccttggggacatgtctcctgaagggccgcagccccccatgatcctcttgcagcagctgctggcctcggccacccagccgtctcctgtgaaggccatatttgataaacaggaacttgaggctgctgcactggccgtttgccagtgcttggctgtggagtccactcacccttcgagcccaggatttgaagactgcagctccagtgaggccaccacgcctgtcgccgtgcagcacatccgccctgccagagtgaagaggcgcaagcagtcgcccgttcccgctctgccgatcgtggtgcagctcatggagatgggattttccagaaggaacatcgagtttgccctgaagtctctcactggtgcttccgggaatgcatccagcttgcctggtgtggaagccttggtcgggtggctgctggaccactccgacatacaggtcacggagctctcagatgcagacacggtgtccgacgagtattctgacgaggaggtggtggaggacgtggatgatgccgcctactccatgtctactggtgctgttgtgacggagagccagacgtacaaaaaacgagctgatttcttgagtaatgatgattatgctgtatatgtgagagagaatattcaggtgggaatgatggttagatgctgccgagcgtatgaagaagtgtgcgaaggtgatgttggcaaagtcatcaagctggacagagatggattgcatgatctcaatgtgcagtgtgactggcagcagaaagggggcacctactgggttaggtacattcatgtggaacttataggctatcctccaccaagttcttcttctcacatcaagattggtgataaagtgcgggtcaaagcctctgtcaccacaccaaaatacaaatggggatctgtgactcatcagagtgtgggggttgtgaaagctttcagtgccaatggaaaagatatcattgtcgactttccccagcagtctcactggactgggttgctatcagaaatggagttggtacccagtattcatcctggggttacgtgtgatggatgtcagatgtttcctatcaatggatccagattcaaatgcagaaactgtgatgactttgatttttgtgaaacgtgtttcaagaccaaaaaacacaataccaggcatacatttggcagaataaatgaaccaggtcagtctgcggtattttgtggccgttctggaaaacagctgaagcgttgccacagcagccagccaggcatgctgctggacagctggtcccgcatggtgaagagcctgaatgtgtcgtcctccgtgaaccaggcatcccgtctcattgacggcagcgagccctgctggcagtcatcggggtcgcaaggaaagcactggattcgtttggagattttcccagatgttcttgttcatagattaaaaatgatcgtagatcctgctgacagtagctacatgccgtccctggttgtagtgtcaggtggaaattccctgaataaccttattgaactaaagacaatcaatattaacccttctgacaccacagtgccccttctgaatgactgcacagagtatcacaggtatattgaaattgctataaagcagtgcaggagctcaggaatcgattgtaaaatccatggtctcatcctgctgggacggatccgtgcagaagaggaagatttggctgcagttcctttcttagcttcggataatgaagaggaggaggatgagaaaggcaacagcggaagcctcattagaaagaaggctgctgggctggaatcagcagctacgataagaaccaaggtgtttgtgtggggcctgaatgacaaggaccagctgggcgggctgaaaggctccaagataaaggttccttcgttctctgagacactgtcagctttgaatgtggtacaggtggctggtggatctaaaagtttgtttgcagtgactgtggaagggaaggtgtatgcctgtggagaagccacgaatggccggctggggctgggcatttccagcgggacggtgcccatcccacggcagatcacagctctcagcagctacgtggtcaagaaggtggctgttcactcaggtggccggcacgcgacggctttaactgtcgatggaaaagtgttttcgtggggcgaaggtgacgatggaaaacttggacacttcagcagaatgaactgtgacaaaccaaggctgatcgaggccctgaaaaccaagcgtatccgggatatcgcctgtgggagctcgcacagcgcagccctcacatccagcggagaactgtacacctggggcctcggcgagtacggccggctgggacatggggataatacgacacagctaaagcccaaaatggtgaaagtccttctcggtcacagagtaatccaggttgcatgtgggagtagagacgcgcagaccctggctctgaccgatgaaggtttggtattttcctggggtgatggtgactttggaaaactgggccggggcggaagtgaaggctgtaacattccccagaacattgagagactaaatggacagggggtgtgccagattgagtgtggagctcagttctccctggcgctcaccaagtctggagtggtgtggacatggggaaagggggattacttcagattgggccacggctctgacgtgcacgtgcggaaaccacaggtggtggaagggctgagagggaagaagatcgtgcatgtggctgtcggggccctgcactgcctggcggtcacggactcggggcaggtgtatgcttggggtgacaacgaccacggccagcagggcaatggcacgaccacggttaacaggaagcccacactcgtgcaaggcttagaaggccagaagatcacacgcgtggcttgtgggtcgtcccacagtgtggcgtggacaactgtggatgtggccacgccctctgtccacgagcccgtcctcttccagactgcaagagaccctttaggtgcttcctatttaggcgtgccttcagatgctgattcttctgctgccagtaataaaataagtggtgcaagtaattctaagccaaatcgcccttctcttgccaagattctcttgtcattggatggaaatctggccaaacagcaggccttatcacatattcttacagcattgcaaatcatgtatgccagagatgctgttgtcggggccctgatgccggccgccatgatcgccccggtggagtgcccctcgttctcctcggcggccccttccgacgcatctgcgatggctagtcccatgaatggagaagaatgcatgctggctgttgatatcgaagacagactgagtccaaatccatggcaagaaaagagagagattgtttcctctgaggacgcagtgaccccctctgcagtgactccgtcggccccctcagcctccgctcggccttttatcccagtgacggatgacctgggagccgcaagcatcattgcagaaaccatgaccaaaaccaaagaggatgttgaaagccaaaataaagcagcaggtccggagcctcaggccttggatgagttcaccagtctgctgattgcggatgacactcgtgtggtggtagacctgctcaagctgtcagtgtgcagccgggccggggacaggggcagggatgtgctctccgcggtgctttccggcatggggaccgcctacccacaggtggcagatatgctgttggagctctgtgtcaccgagttggaggatgtggccacagactcgcagagcggccgcctctcttctcagcctgtggtggtggagagtagccacccttacaccgacgacacctccaccagtggcacagtgaagataccaggtgcagaaggactcagggtagaatttgaccggcagtgctccacagagaggcgccacgaccctctcacagtcatggacggcgtcaacaggatcgtctccgtgcggtcaggccgagagtggtccgactggtccagcgagctgcgcatcccaggggatgagttaaagtggaagttcatcagcgatgggtctgtgaatggctggggctggcgcttcaccgtctatcccatcatgccagctgctggccctaaagaactcctctctgaccgctgcgtcctctcctgtccatccatggacttggtgacgtgtctgttagacttccgactcaaccttgcctctaacagaagcatcgtccctcgccttgcggcctcgctggcagcttgtgcacagctgagtgccctagctgccagtcacagaatgtgggcccttcagagactgaggaagctgcttacaactgaatttgggcagtcaattaacataaataggctgcttggagaaaatgatggggaaacaagagctttgagttttacaggtagtgctcttgctgctttggtgaaaggtcttccagaagctttgcaaaggcagtttgaatatgaagatcctattgtgaggggtggcaaacagctgctccacagcccattctttaaggtactggtagctcttgcttgtgacctggagctggacactctgccttgctgtgccgagacgcacaagtgggcctggttccggaggtactgcatggcctcccgtgttgctgtggcccttgacaaaagaacaccgttgccccgtctgtttcttgatgaggtggctaagaaaattcgtgaattaatggcagacagcgaaaacatggatgttctgcatgagagccatgacatttttaaaagagagcaagacgaacaacttgtgcagtggatgaacaggcgaccagatgactggactctctctgctggtggcagtggaacaatttatggatggggacataatcacaggggccagctcgggggcattgaaggcgcaaaagtcaaagttcccactccctgtgaagcccttgcaactctcagacccgtgcagttaatcggaggggaacagaccctctttgctgtgacggctgatgggaagctgtatgccactgggtatggtgcaggtggcagactaggcattggagggacagagtcggtgtccaccccaacattgcttgaatccattcagcatgtgtttattaagaaagtagctgtgaactctggaggaaagcactgccttgccctgtcttcagaaggagaagtttactcttggggtgaggcagaagatgggaagttggggcatggcaacagaagtccgtgtgaccgccctcgtgtcatcgagtctctgagaggaattgaagtggtcgatgttgctgctggcggagcccacagcgcctgtgtcacagcagccggggacctctacacatggggcaaaggccgctacggccggctggggcacagcgacagtgaggaccagctgaagccgaagctggtggaggcgctgcagggccaccgtgtggttgacatcgcctgtggcagtggagatgcccagaccctctgcctcacagatgacgacactgtctggtcctggggggacggggactacggcaagctcggccggggaggcagcgatggctgtaaagtgcctatgaagattgattctcttactggtcttggagtagttaaagtggaatgcggatcccagttttctgttgcccttaccaaatctggagctgtttatacctggggcaaaggcgattatcacaggttgggccatggatcagatgaccatgttcgaaggcctcggcaggtccaagggttgcaggggaagaaagtcatcgccatcgccactggctccctgcactgtgtgtgctgcacagaggatggtgaggtttatacatggggcgacaatgatgagggacaactgggagacggaaccaccaatgccatccagaggcctcggttggtagctgcccttcagggtaagaaggtcaaccgtgtggcctgtggctcagcacataccctcgcctggtcgaccagcaagcccgccagtgctggcaaactccctgcacaggtccccatggagtacaatcacctgcaggagatccccatcattgcgctgaggaaccgtctgctgctgctgcaccacctctccgagctcttctgcccctgcatccccatgttcgacctggaaggctcgctcgacgaaactggactcgggccttctgttgggttcgacactctccgaggaattctgatatcccagggaaaggaggcggctttccggaaagtagtacaagcaactatggtacgcgatcgtcagcatggccccgtcgtggagctgaaccgcatccaggtcaaacgatcaaggagcaaaggcgggctggccggccccgacggcaccaagtctgtctttgggcagatgtgtgctaagatgagctcgtttggtcccgacagcctcctccttcctcaccgtgtctggaaagtcaagtttgtgggtgaatctgtggatgactgtgggggcggctacagcgagtccatagctgagatctgtgaggagctgcagaacggactcacgcccctgctgatcgtgacacccaacgggagggatgagtctggggccaaccgagactgctacctgctcagcccggccgccagagcacccgtgcacagcagcatgttccgcttcctgggtgtgttgctgggcattgccatccgaaccgggagtcccctgagcctcaaccttgccgagcctgtctggaagcagctggctgggatgagcctcaccatcgcggacctcagtgaggttgataaggattttattcctggactcatgtacatccgagacaatgaagccacctcagaggagtttgaagccatgagcctgcccttcacagtgccaagtgccagtggccaggacattcagttgagctccaagcacacacacatcaccctggacaaccgcgcggagtacgtgcggctggcgataaactatagactccatgaatttgatgagcaggtggctgctgttcgggaaggaatggcccgcgttgtgcctgttcccctcctctctctgttcaccggctacgaactggagacgatggtgtgtggcagccctgacatcccgctgcaccttctcaagtcggtggccacctataaaggcatcgagccttccgcatcgctgatccagtggttctgggaggtgatggagtccttctccaacacagagcgctctcttttccttcgcttcgtctggggccggacgaggctgcccaggaccatcgccgacttccggggccgagacttcgtcatccaggtgttggataaatacaaccctccagaccacttcctccctgagtcctacacctgtttcttcttgctgaagctgcccaggtattcctgcaagcaggtgctggaggagaagctcaagtacgccatccacttctgcaagtccatagacacagatgactacgctcgcatcgcacttacaggagagccagccgccgacgacagcagcgacgattcagataacgaggatgtcgactcctttgcttcggactctacacaagattatttaacaggacactaagatggggaaacgtcctcgtgagatgagagcctgagccaggcagcagagcgctcgctgctgtgtagactgtaggctgcctggtgtgtctgatgagaagcgtccgtcctcgagccaggcgggaggagggagtggagagactgactggccgtgatgggaatgacagtgagaaggtccgcctgtgcgcgtggaacactgtggacgctcgacttccaagggtcttctcacccgtaatgctgcattacatgtaggactgtgtttactaaagtgtgtaaatgtttatataaataccaaattgcagcatccccaaaatgaataaagcctttttacttgtgggtgcaatcgattttttttctttctcctttctttcaagtgtcgtgagtcgtcttgattgtatattggaaataactgtgtaacaaatcgtattataaatatttcaattaattttactctgaatttgtttattaaaagacttttgaacatgaaatgattagtattacttgaatgcatccagaggatatttaaaccaaaatgaaaaaccagaaggccatttggtgtcccccctcccaggtgtccccttgtagcatatgcattatgtcatctgaattgaggcctttctgtgaacagcatcataacttctatcatggaaagtgtactatatataatgtttgtgtcatgtatatgcctaaattttaattatctataaataaaacatctgacataaaa

SEQ ID NO: 139913 - DNA, 3121 bp, Homo sapiens
  Payload ID: 7443
  Gene Symbol: HERC2
  Gene Name: HECT and RLD domain containing E3 ubiquitin protein ligase 2
  ENST ID: ENST00000564734
  CDS Start-End: 107-349
ccggctgagccagcggctcttgggaggctgcgtccgcgcgccggcgaggcgaggcggccgggccctgcgcgtcaggcctgagacctgggaggaagctggagaaaagatgccctctgaatctttctgtttggctgcccaggctcgcctcgactccaaatggttgaaaacagatatacagcttgcattcacaagagatgggctctgtggtctgtggaatgaaatggttaaagatggagaaattgtatacactggaacagaatcaacccagaacggagagctccctcctagaaaagtagagacagggtttcaccgtgttagccaggatggtctcgagctcctgacctcgtgatccgcccgcctcagcctcccaaagtgctgggattataggcgtgagccaccgtgcctgatgatagtgtcgaaccaagtggaacaaagaaagaagatctgaatgacaaagagaaaaaagatgaagaagaaactcctgcacctatatatagggccaagtcaattctggacagctgggtatggggcaagcaaccagatgtgaatgaactgaaggagtgtctttctgtgctggttaaagagcagcaggccctggccgtccagtcagccaccaccaccctctcagccctgcgactcaagcagaggctggtgatcttggagcgctatttcattgccttgaatagaaccgtttttcaggagaatgtcaaagttaagtggaaaagcagcggtatttctctgcctcctgtggacaaaaaaagttcccggcctgcgggcaaaggtgtggaggggctcgccagagtgggatcccgagcggcgctgtcttttgcctttgccttcctgcgcagggcctggcgatcaggcgaggatgcggacctctgcagtgagctgttgcaggagtccctggacgccctgcgagcacttcccgaggcctcgctctttgacgagagcaccgtgtcctctgtgtggctggaggtggtggagagagcgaccaggttcctcaggtccgtcgtgacgggggatgttcacggaacgccagccaccaaagggccaggaagcatccccctgcaggaccagcacttggccctggccatcctgctggagctggctgtgcagagaggcacgctgagccaaatgttgtctgccatcctgttgttgcttcagctgtgggacagcggggcacaggagactgacaatgagcgttccgcccagggcaccagcgccccacttttgcccttgctgcaaaggttccagagcatcatttgcaggaaggatgcaccccactccgagggcgacatgcaccttttgtctggccctctgagccccaatgagagtttcctgaggtacctcacccttccacaagacaacgagcttgccattgatctgcgacaaacggcggttgttgtcatggcccatttagaccgtctggctacgccctgtatgcctccgctgtgtagctctccgacatctcataagggatcattgcaagaggtcataggttgggggttaataggatggaaatactatgccaatgtgattggtccaatccagtgcgaaggcctggccaacctgggagtcacacagattgcctgtgcagagaagcgtttcctgattctgtcacgcaatggccgcgtgtacacacaggcctataatagtgacacgctggccccacagctggtccaaggccttgcctccagaaacattgtaaaaattgctgcccattctgatggtcaccactacctagccttggctgctactggagaggtgtactcctggggctgtggggacggcggacggctgggccatggggacactgtgcctttggaggagcctaaggtgatctccgccttctctggaaagcaggccgggaagcacgtggtgcacatcgcttgcgggagcacttacagtgcggccatcactgccgagggggagctgtacacctggggccgcgggaactacggccggctgggccatggctccagtgaggacgaggccattccgatgctggtagccgggcttaaaggactgaaggtcatcgatgtggcgtgtgggagtggggatgctcaaaccctggctgtcactgagaacgggcaagtgtggtcttggggagatggtgactatgggaaattgggcagaggtggtagtgatggctgcaaaaccccaaagctgattgaaaagcttcaagacttggatgtggtcaaagtccgctgtggaagtcagttttccattgctttgacgaaagatggccaagtttattcatggggaaaaggtgacaaccagagacttggacatggaacagaggaacatgttcgttatccaaaactcttagaaggcttgcaagggaagaaggtgattgatgtggctgcaggctccacccactgcctggctctgactgaggacagcgaggtccacagctgggggagcaacgaccagtgccagcactttgacaccttgcgcgtgaccaagccagaacctgcagcattgccaggactggacaccaaacacatagtgggaattgcctgtgggcctgcccagagctttgcttggtcatcatgttctgagtggtccattggcctccgtgtcccttttgtggtggacatctgctcaatgacttttgagcagctggatctcctgcttcggcaggtgagtgaggggatggatggttccgcggactggcccccgccccaggagaaagagtgtgtggccgtggcaacgctgaatcttctacgacttcagttgcatgctgccattagtcaccaggttgacccggaattccttggtttaggtctgggcagcatcctcctgaacagcctgaagcagacggtggtgaccctggccagcagtgcgggcgtgctgagcaccgtgcagtcggccgcccaggccgtgctgcagagtggctggtccgtgctgctgcccaccgcggaggagcgggcccgggcactctctgctctcctgccctgcgcagtttcaggcaatgaagtgaacataagtccaggtcgtcgattcatgattgatcttctggtgggcagcttgatggctgatggagggttggagtcagccttacacgcagccattactgcagagatccaggatattgaagccaaaaaagaagcacagaagg

SEQ ID NO: 139914 - DNA, 598 bp, Homo sapiens
  Payload ID: 7443
  Gene Symbol: HERC2
  Gene Name: HECT and RLD domain containing E3 ubiquitin protein ligase 2
  ENST ID: ENST00000569772
  CDS Start-End: 1-598
aagagaccctttaggtgcttcctatttaggcgtgccttcagatgctgattcttctgctgccagtaataaaataagtggtgcaagtaattctaagccaaatcgcccttctcttgccaagattctcttgtcattggatggaaatctggccaaacagcaggccttatcacatattcttacagcattgcaaatcatgtatgccagagatgctgttgtcggggccctgatgccggccgccatgatcgccccggtggagtgcccctcgttctcctcggcggccccttccgacgcatctgcgatggctagtcccatgaatggagaagaatgcatgctggctgttgatatcgaagacagactgagtccaaatccatggcaagaaaagagagagattgtttcctctgaggacgcagtgaccccctctgcagtgactccgtcggccccctcagcctccgctcggccttttatcccagtgacggatgacctgggagccgcaagcatcattgcagaaaccatgaccaaaaccaaagaggtggcagatatgctgttggagctctgtgtcaccgagttggaggatgtggccacagactcgcagagcggccgc

SEQ ID NO: 139915 - DNA, 181 bp, Homo sapiens
  Payload ID: 7443
  Gene Symbol: HERC2
  Gene Name: HECT and RLD domain containing E3 ubiquitin protein ligase 2
  ENST ID: ENST00000612410
  CDS Start-End: 110-181
gcgccggctgagccagcggctcttgggaggctgcgtccgcgcgccggcgaggcgaggcggccgggccctgcgcgtcaggcctgagacctgggaggaagctggagaaaagatgccctctgaatctttctgtttggctgcccaggctcgcctcgactccaaatggttgaaaacagatatacag

SEQ ID NO: 139916 - DNA, 2112 bp, Homo sapiens
  Payload ID: 7443
  Gene Symbol: HERC2
  Gene Name: HECT and RLD domain containing E3 ubiquitin protein ligase 2
  ENST ID: ENST00000620983
  CDS Start-End: 59-1630
cttatttcatgaggtcgtggcaagatggtgaagtagcagcagtgcttagggtgtgaggatggtccgtgccagggtggtgctgccgggccgcagctgtggacgtggtggtggtgtgtgtcgtgttggaaggtgtgtttgttcagacacactagtcctgggggctgctgggcacatcactggcgacatgcccaatggggtgaggcagcggtctcgggtgtccacagtcgagcgccccagatggcagggtctgcctggcgtccacacaagcaggtgtgtgaccagggaggggcccatgcacggtgcctcctcctcgtgcattcgccagtgccgcatatccccgactgtgtgcttcctgctgcggcagcggcctcacgcttgcttgcttcctcctctccaggtcaaacgatcaaggagcaaaggcgggctggccggccccgacggcaccaagtctgtctttgggcagatgtgtgctaagatgagctcgtttggtcccgacagcctcctccttcctcaccgtgtctggaaagtcaagtttgtgggtgaatctgtggatgactgtgggggcggctacagcgagtccatagctgagatctgtgaggagctgcagaacggactcacgcccctgctgatcgtgacacccaacgggagggatgagtctggggccaaccgagactgctacctgctcagcccggccgccagagcacccgtgcacagcagcatgttccgcttcctgggtgtgttgctgggcattgccatccgaaccgggagtcccctgagcctcaaccttgccgagcctgtctggaagcagctggctgggatgagcctcaccatcgcggacctcagtgaggttgataaggattttattcctggactcatgtacatccgagacaatgaagccacctcagaggagtttgaagccatgagcctgcccttcacagtgccaagtgccagtggccaggacattcagttgagctccaagcacacacacatcaccctggacaaccgcgcggagtacgtgcggctggcgataaactatagactccatgaatttgatgagcaggtggctgctgttcgggaaggaatggcccgcgttgtgcctgttcccctcctctctctgttcaccggctacgaactggagacgatggtgtgtggcagccctgacatcccgctgcaccttctcaagtcggtggccacctataaaggcatcgagccttccgcatcgctgatccagtggttctgggaggtgatggagtccttctccaacacagagcgctctcttttccttcgcttcgtctggggccggacgaggctgcccaggaccatcgccgacttccggggccgagacttcgtcatccaggtgttggataaatacaaccctccagaccacttcctccctgagtcctacacctgtttcttcttgctgaagctgcccaggtattcctgcaagcaggtgctggaggagaagctcaagtacgccatccacttctgcaagtccatagacacagatgactacgctcgcatcgcacttacaggagagccagccgccgacgacagcagcgacgattcagataacgaggatgtcgactcctttgcttcggactctacacaagattatttaacaggacactaagatggggaaacgtcctcgtgagatgagagcctgagccaggcagcagagcactcgctgctgtgtagactgtaggctgcctggtgtgtctgatgagaagcgtccgtcctcgagccaggcgggaggagggagtggagagactgactggccgtgatgggaatgacagtgagaaggtccgcctgtgcgcgtggaacactgtggacgctcgacttccaagggtcttctcacccgtaatgctgcattacatgtaggactgtgtttactaaagtgtgtaaatgtttatataaataccaaattgcagcatccccaaaatgaataaagcctttttacttgtgggtgcaatcgatttttttttctttctcctttctttcaagtgtcgtgagtcgtcttgattgtatattggaaataactgtgtaacaaatcgtattataaatatttcaattaattttactctgaatttgtttattaaaagacttttgaacatg

SEQ ID NO: 139917 - DNA, 6969 bp, Homo sapiens
  Payload ID: 7443
  Gene Symbol: HERC2
  Gene Name: HECT and RLD domain containing E3 ubiquitin protein ligase 2
  ENST ID: ENST00000632916
  CDS Start-End: 1-6245
gtcagtctgcggtattttgtggccgttctggaaaacagctgaagcgttgccacagcagccagccaggcatgctgctggacagctggtcccgcatggtgaagagcctgaatgtgtcgtcctccgtgaaccaggcatcccgtctcattgacggcagcgagccctgctggcagtcatcggggtcgcaaggaaagcactggattcgtttggagattttcccagatgttcttgttcatagattaaaaatgatcgtagatcctgctgacagtagctacatgccgtccctggttgtagtgtcaggtggaaattccctgaataaccttattgaactaaagacaatcaatattaacccttctgacaccacagtgccccttctgaatgactgcacagagtatcacaggtatattgaaattgctataaagcagtgcaggagctcaggaatcgattgtaaaatccatggtctcatcctgctgggacggatccgtgcagaagaggaagatttggctgcagttcctttcttagcttcggataatgaagaggaggaggatgagaaaggcaacagcggaagcctcattagaaagaaggctgctgggctggaatcagcagctacgataagaaccaaggtgtttgtgtggggcctgaatgacaaggaccagctgggcgggctgaaaggctccaagataaaggttccttcgttctctgagacactgtcagctttgaatgtggtacaggtggctggtggatctaaaagtttgtttgcagtgactgtggaagggaaggtgtatgcctgtggagaagccacgaatggccggctggggctgggcatttccagcgggacggtgcccatcccacggcagatcacagctctcagcagctacgtggtcaagaaggtggctgttcactcaggtggccggcacgcgacggctttaactgtcgatggaaaagtgttttcgtggggcgaaggtgacgatggaaaacttggacacttcagcagaatgaactgtgacaaaccaaggctgatcgaggccctgaaaaccaagcgtatccgggatatcgcctgtgggagctcgcacagcgcagccctcacatccagcggagaactgtacacctggggcctcggcgagtacggccggctgggacatggggataatacgacacagctaaagcccaaaatggtgaaagtccttctcggtcacagagtaatccaggttgcatgtgggagtagagacgcgcagaccctggctctgaccgatgaaggtttggtattttcctggggtgatggtgactttggaaaactgggccggggcggaagtgaaggctgtaacattccccagaacattgagagactaaatggacagggggtgtgccagattgagtgtggagctcagttctccctggcgctcaccaagtctggagtggtgtggacatggggaaagggggattacttcagattgggccacggctctgacgtgcacgtgcggaaaccacaggtggtggaagggctgagagggaagaagatcgtgcatgtggctgtcggggccctgcactgcctggcggtcacggactcggggcaggtgtatgcttggggtgacaacgaccacggccagcagggcaatggcacgaccacggttaacaggaagcccacactcgtgcaaggcttagaaggccagaagatcacacgcgtggcttgtgggtcgtcccacagtgtggcgtggacaactgtggatgtggccacgccctctgtccacgagcccgtcctcttccagactgcaagagaccctttaggtgcttcctatttaggcgtgccttcagatgctgattcttctgctgccagtaataaaataagtggtgcaagtaattctaagccaaatcgcccttctcttgccaagattctcttgtcattggatggaaatctggccaaacagcaggccttatcgcatattcttacagcattgcaaatcatgtatgccagagatgctgttgtcggggccctgatgccggccgccatgatcgccccggtggagtgcccctcgttctcctcggcggccccttccgacgcatctgcgatggctagtcccatgaatggagaagaatgcatgctggctgttgatatcgaagacagactgagtccaaatccatggcaagaaaagagagagattgtttcctctgaggacgcagtgaccccctctgcagtgactccgtcggccccctcagcctccgctcggccttttatcccagtgacggatgacctgggagccgcaagcatcattgcagaaaccatgaccaaaaccaaagaggatgttgaaagccaaaataaagcagcaggtccggagcctcaggccttggatgagttcaccagtctgctgattgcggatgacactcgtgtggtggtagacctgctcaagctgtcagtgtgcagccgggccggggacaggggcagggatgtgctctccgcggtgctttccggcatggggaccgcctacccacaggtggcagatatgctgttggagctctgtgtcaccgagttggaggatgtggccacagactcgcagagcggccgcctctcttctcagcctgtggtggtggagagtagccacccttacaccgacgacacctccaccagtggcacagtgaagataccaggtgcagaaggactcagggtagaatttgaccggcagtgctccacagagaggcgccacgaccctctcacagtcatggacggcgtcaacaggatcgtctccgtgcggtcaggccgagagtggtccgactggtccagcgagctgcgcatcccaggggatgagttaaagtggaagttcatcagcgatgggtctgtgaatggctggggctggcgcttcaccgtctatcccatcatgccagctgctggccctaaagaactcctctctgaccgctgcgtcctctcctgtccatccatggacttggtgacgtgtctgttagacttccgactcaaccttgcctctaacagaagcatcgtccctcgccttgcggcctcgctggcagcttgtgcacagctgagtgccctagctgccagtcacagaatgtgggcccttcagagactgaggaagctgcttacaactgaatttgggcagtcaattaacataaataggctgcttggagaaaatgatggggaaacaagagctttgagttttacaggtagtgctcttgctgctttggtgaaaggtcttccagaagctttgcaaaggcagtttgaatatgaagatcctattgtgaggggtggcaaacagctgctccacagcccattctttaaggtactggtagctcttgcttgtgacctggagctggacactctgccttgctgtgccgagacgcacaagtgggcctggttccggaggtactgcatggcctcccgtgttgctgtggcccttgacaaaagaacaccgttgccccgtctgtttcttgatgaggtggctaagaaaattcgtgaattaatggcagacagcgaaaacatggatgttctgcatgagagccatgacatttttaaaagagagcaagacgaacaacttgtgcagtggatgaacaggcgaccagatgactggactctctctgctggtggcagtggaacaatttatggatggggacataatcacaggggccagctcgggggcattgaaggcgcaaaagtcaaagttcccactccctgtgaagcccttgcaactctcagacccgtgcagttaatcggaggggaacagaccctctttgctgtgacggctgatgggaagctgtatgccactgggtatggtgcaggtggcagactaggcattggagggacagagtcggtgtccaccccaacattgcttgaatccattcagcatgtgtttattaagaaagtagctgtgaactctggaggaaagcactgccttgccctgtcttcagaaggagaagtttactcttggggtgaggcagaagatgggaagttggggcatggcaacagaagtccgtgtgaccgccctcgtgtcatcgagtctctgagaggaattgaagtggtcgatgttgctgctggcggagcccacagcgcctgtgtcacagcagccggggacctctacacatggggcaaaggccgctacggccggctggggcacagcgacagtgaggaccagctgaagccgaagctggtggaggcgctgcagggccaccgtgtggttgacatcgcctgtggcagtggagatgcccagaccctctgcctcacagatgacgacactgtctggtcctggggggacggggactacggcaagctcggccggggaggcagcgatggctgtaaagtgcctatgaagattgattctcttactggtcttggagtagttaaagtggaatgcggatcccagttttctgttgcccttaccaaatctggagctgtttatacctggggcaaaggcgattatcacaggttgggccatggatcagatgaccatgttcgaaggcctcggcaggtccaagggttgcaggggaagaaagtcatcgccatcgccactggctccctgcactgtgtgtgctgcacagaggatggtgaggtttatacatggggcgacaatgatgagggacaactgggagacggaaccaccaatgccatccagaggcctcggttggtagctgcccttcagggtaagaaggtcaaccgtgtggcctgtggctcagcacataccctcgcctggtcgaccagcaagcccgccagtgctggcaaactccctgcacaggtccccatggagtacaatcacctgcaggagatccccatcattgcgctgaggaaccgtctgctgctgctgcaccacctctccgagctcttctgcccctgcatccccatgttcgacctggaaggctcgctcgacgaaactggactcgggccttctgttgggttcgacactctccgaggaattctgatatcccagggaaaggaggcggctttccggaaagtagtacaagcaactatggtacgcgatcgtcagcatggccccgtcgtggagctgaaccgcatccaggtcaaacgatcaaggagcaaaggcgggctggccggccccgacggcaccaagtctgtctttgggcagatgtgtgctaagatgagctcgtttggtcccgacagcctcctccttcctcaccgtgtctggaaagtcaagtttgtgggtgaatctgtggatgactgtgggggcggctacagcgagtccatagctgagatctgtgaggagctgcagaacggactcacgcccctgctgatcgtgacacccaacgggagggatgagtctggggccaaccgagactgctacctgctcagcccggccgccagagcacccgtgcacagcagcatgttccgcttcctgggtgtgttgctgggcattgccatccgaaccgggagtcccctgagcctcaaccttgccgagcctgtctggaagcagctggctgggatgagcctcaccatcgcggacctcagtgaggttgataaggattttattcctggactcatgtacatccgagacaatgaagccacctcagaggagtttgaagccatgagcctgcccttcacagtgccaagtgccagtggccaggacattcagttgagctccaagcacacacacatcaccctggacaaccgcgcggagtacgtgcggctggcgataaactatagactccatgaatttgatgagcaggtggctgctgttcgggaaggaatggcccgcgttgtgcctgttcccctcctctctctgttcaccggctacgaactggagacgatggtgtgtggcagccctgacatcccgctgcaccttctcaagtcggtggccacctataaaggcatcgagccttccgcatcgctgatccagtggttctgggaggtgatggagtccttctccaacacagagcgctctcttttccttcgcttcgtctggggccggacgaggctgcccaggaccatcgccgacttccggggccgagacttcgtcatccaggtgttggataaatacaaccctccagaccacttcctccctgagtcctacacctgtttcttcttgctgaagctgcccaggtattcctgcaagcaggtgctggaggagaagctcaagtacgccatccacttctgcaagtccatagacacagatgactacgctcgcatcgcacttacaggagagccagccgccgacgacagcagcgacgattcagataacgaggatgtcgactcctttgcttcggactctacacaagattatttaacaggacactaagatggggaaacgtcctcgtgagatgagagcctgagccaggcagcagagcactcgctgctgtgtagactgtaggctgcctggtgtgtctgatgagaagcgtccgtcctcgagccaggcgggaggagggagtggagagactgactggccgtgatgggaatgacagtgagaaggtccgcctgtgcgcgtggaacactgtggacgctcgacttccaagggtcttctcacccgtaatgctgcattacatgtaggactgtgtttactaaagtgtgtaaatgtttatataaataccaaattgcagcatccccaaaatgaataaagcctttttacttgtgggtgcaatcgatttttttttctttctcctttctttcaagtgtcgtgagtcgtcttgattgtatattggaaataactgtgtaacaaatcgtattataaatatttcaattaattttactctgaatttgtttattaaaagacttttgaacatgaaatgattagtattacttgaatgcatccagaggatatttaaaccaaaatgaaaaaccagaaggccatttggtgtcccctctcccaggtgtccccttgtagcatatgcattatgtcatctgaattgaggcctttctgtgaacagcatcataacttctatcatggaaagtgtactatatataatgtttgtgtcatgtatatgcctaaattttaattatctataaataaaacatctgacataaaa

SEQ ID NO: 139918 - DNA, 2977 bp, Homo sapiens
  Payload ID: 7443
  Gene Symbol: HERC2
  Gene Name: HECT and RLD domain containing E3 ubiquitin protein ligase 2
  ENST ID: ENST00000633685
  CDS Start-End: 101-2977
gagccagcggctcttgggaggctgcgtccgcgcgccggcgaggcgaggcggccgggccctgcgcgtcaggcctgagacctgggaggaagctggagaaaagatgccctctgaatctttctgtttggctgcccaggctcgcctcgactccaaatggttgaaaacagatatacagcttgcattcacaagagatgggctctgtggtctgtggaatgaaatggttaaagatggagaaattgtatacactggaacagaatcaacccagaacggagagctccctcctagaaaagatgatagtgtcgaaccaagtggaacaaagaaagaagatctgaatgacaaagagaaaaaagatgaagaagaaactcctgcacctatatatagggccaagtcaattctggacagctgggtatggggcaagcaaccagatgtgaatgaactgaaggagtgtctttctgtgctggttaaagagcagcaggccctggccgtccagtcagccaccaccaccctctcagccctgcgactcaagcagaggctggtgatcttggagcgctatttcattgccttgaatagaaccgtttttcaggagaatgtcaaagttaagtggaaaagcagcggtatttctctgcctcctgtggacaaaaaaagttcccggcctgcgggcaaaggtgtggaggggctcgccagagtgggatcccgagcggcgctgtcttttgcctttgccttcctgcgcagggcctggcgatcaggcgaggatgcggacctctgcagtgagctgttgcaggagtccctggacgccctgcgagcacttcccgaggcctcgctctttgacgagagcaccgtgtcctctgtgtggctggaggtggtggagagagcgaccaggttcctcaggtccgtcgtgacgggggatgttcacggaacgccagccaccaaagggccaggaagcatccccctgcaggaccagcacttggccctggccatcctgctggagctggctgtgcagagaggcacgctgagccaaatgttgtctgccatcctgttgttgcttcagctgtgggacagcggggcacaggagactgacaatgagcgttccgcccagggcaccagcgccccacttttgcccttgctgcaaaggttccagagcatcatttgcaggaaggatgcaccccactccgagggcgacatgcaccttttgtctggccctctgagccccaatgagagtttcctgaggtacctcacccttccacaagacaacgagcttgccattgatctgcgacaaacggcggttgttgtcatggcccatttagaccgtctggctacgccctgtatgcctccgctgtgtagctctccgacatctcataagggatcattgcaagaggtcataggttgggggttaataggatggaaatactatgccaatgtgattggtccaatccagtgcgaaggcctggccaacctgggagtcacacagattgcctgtgcagagaagcgtttcctgattctgtcacgcaatggccgcgtgtacacacaggcctataatagtgacacgctggccccacagctggtccaaggccttgcctccagaaacattgtaaaaattgctgcccattctgatggtcaccactacctagccttggctgctactggagaggtgtactcctggggctgtggggacggcggacggctgggccatggggacactgtgcctttggaggagcctaaggtgatctccgccttctctggaaagcaggccgggaagcacgtggtgcacatcgcttgcgggagcacttacagtgcggccatcactgccgagggggagctgtacacctggggccgcgggaactacggccggctgggccatggctccagtgaggacgaggccattccgatgctggtagccgggcttaaaggactgaaggtcatcgatgtggcgtgtgggagtggggatgctcaaaccctggctgtcactgagaacgggcaagtgtggtcttggggagatggtgactatgggaaattgggcagaggtggtagtgatggctgcaaaaccccaaagctgattgaaaagcttcaagacttggatgtggtcaaagtccgctgtggaagtcagttttccattgctttgacgaaagatggccaagtttattcatggggaaaaggtgacaaccagagacttggacatggaacagaggaacatgttcgttatccaaaactcttagaaggcttgcaagggaagaaggtgattgatgtggctgcaggctccacccactgcctggctctgactgaggacagcgaggtccacagctgggggagcaacgaccagtgccagcactttgacaccttgcgcgtgaccaagccagaacctgcagcattgccaggactggacaccaaacacatagtgggaattgcctgtgggcctgcccagagctttgcttggtcatcatgttctgagtggtccattggcctccgtgtcccttttgtggtggacatctgctcaatgacttttgagcagctggatctcctgcttcggcaggtgagtgaggggatggatggctccgcggactggcccccgccccaggagaaagagtgtgtggccgtggcaacgctgaatcttctacgacttcagttgcatgctgccattagtcaccaggttgacccggaattccttggtttaggtctgggcagcatcctcctgaacagcctgaagcagacggtggtgaccctggccagcagtgcgggcgtgctgagcaccgtgcagtcggccgcccaggccgtgctgcagagtggctggtccgtgctgctgcccaccgcggaggagcgggcccgggcactctctgctctcctgccctgcgcagtttcaggcaatgaagtgaacataagtccaggtcgtcgattcatgattgatcttctggtgggcagcttgatggctgatggagggttggagtcagccttacacgcagccattactgcagagatccaggtatgg

SEQ ID NO: 139919 - DNA, 178 bp, Homo sapiens
  Payload ID: 7443
  Gene Symbol: HERC2
  Gene Name: HECT and RLD domain containing E3 ubiquitin protein ligase 2
  ENST ID: ENST00000619734
  CDS Start-End: 107-178
ccggctgagccagcggctcttgggaggctgcgtccgcgcgccggcgaggcgaggcggccgggccctgcgcgtcaggcctgagacctgggaggaagctggagaaaagatgccctctgaatctttctgtttggctgcccaggctcgcctcgactccaaatggttgaaaacagatatacag

SEQ ID NO: 139920 - DNA, 4764 bp, Homo sapiens
  Payload ID: 7444
  Gene Symbol: HERC3
  Gene Name: HECT and RLD domain containing E3 ubiquitin protein ligase 3
  Uniprot ID: Q15034
  ENST ID: ENST00000264345
  CDS Start-End: 31-3183
ggctacatgattccctgaaagataagaacaatgttatgttggggatattggtctctgggccaacctggtatcagcaccaacctgcagggaattgtggctgagccccaggtgtgtgggttcatatctgacagaagtgtcaaggaagtggcctgtgggggaaaccactctgtgttcctgctggaagatggggaagtttacacatgtggtttgaacaccaaggggcaactgggccatgagagggaaggaaacaagccagaacaaattggagctctggcagatcagcatatcattcatgtggcatgtggcgagtcccacagtctggccctcagtgaccgaggccagctgttttcttggggtgcagggagtgatggtcagctaggactcatgactactgaggattctgtggcagtgcccaggttaatacaaaagctgaaccagcaaacaatattacaagtttcctgtggcaactggcattgcttggctcttgcggctgatggccagttcttcacctggggaaagaacagccatgggcagcttggcttagggaaggagttcccctcccaagccagcccacagagggtgaggtccctggaggggatcccactggctcaggtggctgccggaggggctcacagctttgccctgtctctctcaggagctgtttttggctgggggatgaataatgccgggcagctagggctcagtgatgaaaaagatcgagaatctccatgccatgtaaaactcttacgcacgcaaaaagttgtctatattagttgtggagaagaacacacagcagttctcacaaagagtggaggtgtgtttacctttggcgctggttcctgtgggcaacttggacacgactccatgaatgatgaggttaaccctagaagagttctagagctgatgggtagtgaagtaactcaaattgcttgtggcagacaacataccctagccttcgtgccttcttctggactcatctatgcatttggttgtggagcaagaggtcaattaggaactgggcacacttgtaatgttaagtgcccatctcctgtcaagggttactgggctgcccacagtggccagctttcagcccgagctgatcgctttaaatatcatatcgttaagcagatcttctctggaggagaccagacttttgtactttgctccaaatacgagaattattctcctgctgttgacttcaggactatgaaccaagcacattataccagtttaataaatgatgaaaccatagcagtttggagacaaaaactctcagaacacaacaatgcaaatacaatcaatggtgttgttcagatattatcttctgcagcctgttggaatggaagttttcttgaaaaaaaaattgatgaacattttaaaacgagtcccaaaatccctgggattgacctgaactcaactagggtgttatttgagaagttaatgaactctcagcactccatgattctagaacagattttgaacagttttgaaagttgtctgattccccagttgtcaagctcaccaccagatgttgaagccatgagaatctatttaatactacctgagtttcccctactccaggattccaagtattatataacattgactattcccttggctatggccattcttcggctggatacaaaccccagcaaagtactagataactggtggtctcaggtatgcccgaaatatttcatgaagctggtaaacctctataaaggtgcagtcctttatctactgaggggaagaaagacattcttaattcccgtactgtttaacaattatatcacagcagctctcaaactcttggagaagttatataaggtaaatcttaaagtgaagcatgtggaatatgatacattttacattcctgagatttccaatctcgtggacattcaggaagactacctcatgtggttcttgcatcaagcagggatgaaggctagaccatcaataatacaggatactgtaacactttgttcctaccctttcatctttgatgcccaagccaagaccaaaatgttacagacagatgctgaactacagatgcaggtggcagtcaatggagccaacctgcagaatgtcttcatgcttctcaccctggagcctctgctggccagaagccccttcctggtccttcacgttcgcaggaacaaccttgttggagatgccctaagagagctgagcattcattctgatattgatttgaaaaagcctctcaaagtaatctttgatggtgaagaagcagtggatgccggtggtgttacaaaggaattttttcttttgctgttaaaagaacttttgaatcccatctatggaatgtttacctactatcaagattcaaatctcttgtggttttcagacacgtgttttgtagagcacaactggtttcacttgattggtataacctgtggactagctatctacaactccactgtggtcgatctccacttcccattggctctctacaagaagttactcaatgtaaagcctggcttggaagacttaaaggagttgtcacccactgaaggaaggagtctccaagagcttttagattaccccggggaggatgtggaggagactttctgcctcaacttcacgatctgccgagaaagctatggagtgattgaacagaagaagctgatacctgggggagataatgtaactgtgtgcaaggataacaggcaggaatttgtggatgcttatgtgaattatgtcttccaaatctcagttcatgaatggtacacagccttctctagtggcttcctaaaggtgtgtggtggcaaagtacttgagctcttccagccttcagaactgagggctatgatggtggggaacagcaactacaactgggaagaactggaagagactgccatctacaagggagattactcggccacacatcccactgtaaaactattttgggaaacatttcatgagtttccattggaaaagaagaagaagtttctcttgttcctgacaggcagcgatcggattcccatctacggcatggccagtctgcagattgtcatccagtccacagccagcggggaggagtacttgccggtggcccacacttgctacaaccttcttgacctccccaagtacagcagcaaagagattctgagtgcccggctgacccaggcccttgacaactatgaagggtttagtttggcctgaggcttctcagcttgtccagtatttcccttcgttcctcagtgtccacattgaggcctatacagaaaatcatggggagtgatttctatttttttattgtctaagtgggttgggacttttaaatactgagcctggttgatgtgtttctgggattgtatagcagtaaacaacctttttgaaaaattagaggttggggatggggtgaaaaattggcccttgtatgggaggtgtttttgtttttgttttaaaccaaactacccagtattccttgcacttgtgaatgtgttgcactctgctggatgaaatggcagtggatttttaaactttaatttcccaaatgtctctctcagccctgatgttttctcacagtgcttccttgtccttctcttaacttctcattcctctataagaatgatttagactgacctgtccttttttatctgcgcatgcgagaacatcaccttcctctgtacacttggaaatgcctctggcttgttgcagccctcctttaacccaaaggaggaaaggactgcttcagaaactcccaattccaaaaagctgagtctgggtccattattttggcagaactcctaagaatttatgggagcctatataaacatatcttgcttttaaaaagttcttgagggaatagcaactttcccatggctgtgcctatttcctagaccttttaaaagatgtgcagagcagcttagcattcgttgcagctgagcctaattttttcttgctcatccttgtccctttgacaataaggttaattgatagacccaccacctcttgcactctcgcttttggagcaagttgcattaactattttgagtctctatattgtccaagaaaagtagaaataataaatttactttccctttttctatcaccttatgtcctctaccattttctccttcctcccttcccttattttctccttttcgtaccctgtgtcctccctgattttcctttcgtttcttctttattttatcccattctctgttacttgactcagtgctcccttcctctcctctccttctagtggatgcatgcagcctttttttcaatttttatttaaattgcaaaatttttactcagattttttttcctcttccctaattgctaagatttaaggacgttctttattatgaaactttatcacattcgaaatgtttgtttacagtgggattttaggggggattgtgtttaaatcaaatatatgtattttaaaaataatgacatgctcaaccttcctcatcatggagtaagaaaattctacatgattaaagaatccatgtaagtctaattttaaattcctagtaactagagaaaagacttatttatataaaatgaagtatttatgaactgtgataaagcatcaaatcttgatgaaggattgtagatttttgctttttctttttgtttttaaaacttattccaattgctaaattggtagtttttcagtctttataaatacaggattaaaaatatatatacagttatatgaaatgtttattttctatgtgtgtgcatatagttcaatattatgcaataaatttggtgttttaacttaaaact

SEQ ID NO: 139921 - DNA, 2634 bp, Homo sapiens
  Payload ID: 7444
  Gene Symbol: HERC3
  Gene Name: HECT and RLD domain containing E3 ubiquitin protein ligase 3
  Uniprot ID: Q15034
  ENST ID: ENST00000407637
  CDS Start-End: 167-1273
cgaaaacggagaaaccccgggtccggcgagaggggctgtgacagtcggagtcccaagctgcggttcggctgctgccgagaactgcaaggtgtggaatatttctggcttctagtccaatgccaagtgtgtgacctgtggctacatgattccctgaaagataagaacaatgttatgttggggatattggtctctgggccaacctggtatcagcaccaacctgcagggaattgtggctgagccccaggtgtgtgggttcatatctgacagaagtgtcaaggaagtggcctgtgggggaaaccactctgtgttcctgctggaagatggggaagtttacacatgtggtttgaacaccaaggggcaactgggccatgagagggaaggaaacaagccagaacaaattggagctctggcagatcagcatatcattcatgtggcatgtggcgagtcccacagtctggccctcagtgaccgaggccagctgttttcttggggtgcagggagtgatggtcagctaggactcatgactactgaggattctgtggcagtgcccaggttaatacaaaagctgaaccagcaaacaatattacaagtttcctgtggcaactggcattgcttggctcttgcggctgatggccagttcttcacctggggaaagaacagccatgggcagcttggcttagggaaggagttcccctcccaagccagcccacagagggtgaggtccctggaggggatcccactggctcaggtggctgccggaggggctcacagctttgccctgtctctctcaggagctgtttttggctgggggatgaataatgccgggcagctagggctcagtgatgaaaaagatcgagaatctccatgccatgtaaaactcttacgcacgcaaaaagttgtctatattagttgtggagaagaacacacagcagttctcacaaagagtggaggtgtgtttacctttggcgctggttcctgtgggcaacttggacacgactccatgaatgatgaggttaaccctagaagagttctagagctgatgggtagtgaagtaactcaaattgcttgtggcagacaacataccctagccttcgtgccttcttctggactcatctatgcatttggttgtggagcaagaggtcaattaggaactgggcacacttgtaatgttaagtgcccatctcctgtcaagggttactgggctgcccacagtggccagctttcagcccgagctggtaagaatgattgtctctggaatttaaaggtattttaagtgatgaaaacagttgtttacagaatatgtatctattacttactttgaggtcttttggagggaatgaagataaggtattttttaacatcaattaataatttctgtacttactatgcatgaagctgtagagttgagatcctagagaataaataaagcaggaaatactgttgtgttaggccgttcttgcattgctgtaaagagcacctgaaacagggtgatttatgaagaaaagagttttaattggctcacagttctgcaggctctacagggagcatgatgcagccatctgcttggcttctggggaggcctcaggaatcttacagtcatggcagaaggcaaagaaggagcagacacttcacatggcagaagcaggagcaagaggaagagtggagaggaggtgccatactttttacaccaccagatctcatgtgaactcagagcaagagctcacttatcaccaaggggatggcccaagccattcatgagggatccgccctcatgatctaaacacataccaccatgcctcacctccaacattgggattactgcaattcaacatgagttttgaccagaacatacattcaaactataccagttattttgtttccacagaccttggtggtggtgtatacattttattgttgttgctaataatgacagttcgcatgtattgaatgcttaatgacgtttcattactatgcaaagcactcaaaataatctaagaactagttagtggttattatccccatgttagagataagggaacaaagtcttaaggaggtcaagtaatttgcccaagatcacatagattctggaggcaggatttaaacccaggtcattctaaatcatgtgtactatgttacctctactttgctgttggcattttggtatataacatgatgtgatttctttttaagccattttttttcttcccttaaaaaatagttaaatagcagtcttggtttcattggaaatcaaagtcaggcagtcattaatattgaatgactgcttcaccttgaaataataaatctgaggctgaaatggagctagagaatcattaaaaggaagtgtaacttattaattttgattttgaagtcgataaagtgacacacttatggcttgatcaggaatttgtttgaaacagtaaccatcataagttttagtactggattataagaaactcaaggacacagacaaactcttttcctttttgtaaacctagcatatagcacaggacctggcatgaacttgtcactcagtagacatttttggaatggatatatgagcatctgaaatgtagtgcaacttaaaatataaataaacaagattttgtctgggtgatgttcccagaagcaaaagaa

SEQ ID NO: 139922 - DNA, 4974 bp, Homo sapiens
  Payload ID: 7444
  Gene Symbol: HERC3
  Gene Name: HECT and RLD domain containing E3 ubiquitin protein ligase 3
  Uniprot ID: Q15034
  ENST ID: ENST00000402738
  CDS Start-End: 240-3392
ggtgcgaagccattcacccagcgcattccgccgcccgcaggcttgcggggaaacttccttattattgtgacgccgaaaacggagaaaccccgggtccggcgagaggggctgtgacagtcggagtcccaagctgcggttcggctgctgccgagaactgcaaggtgtggaatatttctggcttctagtccaatgccaagtgtgtgacctgtggctacatgattccctgaaagataagaacaatgttatgttggggatattggtctctgggccaacctggtatcagcaccaacctgcagggaattgtggctgagccccaggtgtgtgggttcatatctgacagaagtgtcaaggaagtggcctgtgggggaaaccactctgtgttcctgctggaagatggggaagtttacacatgtggtttgaacaccaaggggcaactgggccatgagagggaaggaaacaagccagaacaaattggagctctggcagatcagcatatcattcatgtggcatgtggcgagtcccacagtctggccctcagtgaccgaggccagctgttttcttggggtgcagggagtgatggtcagctaggactcatgactactgaggattctgtggcagtgcccaggttaatacaaaagctgaaccagcaaacaatattacaagtttcctgtggcaactggcattgcttggctcttgcggctgatggccagttcttcacctggggaaagaacagccatgggcagcttggcttagggaaggagttcccctcccaagccagcccacagagggtgaggtccctggaggggatcccactggctcaggtggctgccggaggggctcacagctttgccctgtctctctcaggagctgtttttggctgggggatgaataatgccgggcagctagggctcagtgatgaaaaagatcgagaatctccatgccatgtaaaactcttacgcacgcaaaaagttgtctatattagttgtggagaagaacacacagcagttctcacaaagagtggaggtgtgtttacctttggcgctggttcctgtgggcaacttggacacgactccatgaatgatgaggttaaccctagaagagttctagagctgatgggtagtgaagtaactcaaattgcttgtggcagacaacataccctagccttcgtgccttcttctggactcatctatgcatttggttgtggagcaagaggtcaattaggaactgggcacacttgtaatgttaagtgcccatctcctgtcaagggttactgggctgcccacagtggccagctttcagcccgagctgatcgctttaaatatcatatcgttaagcagatcttctctggaggagaccagacttttgtactttgctccaaatacgagaattattctcctgctgttgacttcaggactatgaaccaagcacattataccagtttaataaatgatgaaaccatagcagtttggagacaaaaactctcagaacacaacaatgcaaatacaatcaatggtgttgttcagatattatcttctgcagcctgttggaatggaagttttcttgaaaaaaaaattgatgaacattttaaaacgagtcccaaaatccctgggattgacctgaactcaactagggtgttatttgagaagttaatgaactctcagcactccatgattctagaacagattttgaacagttttgaaagttgtctgattccccagttgtcaagctcaccaccagatgttgaagccatgagaatctatttaatactacctgagtttcccctactccaggattccaagtattatataacattgactattcccttggctatggccattcttcggctggatacaaaccccagcaaagtactagataactggtggtctcaggtatgcccgaaatatttcatgaagctggtaaacctctataaaggtgcagtcctttatctactgaggggaagaaagacattcttaattcccgtactgtttaacaattatatcacagcagctctcaaactcttggagaagttatataaggtaaatcttaaagtgaagcatgtggaatatgatacattttacattcctgagatttccaatctcgtggacattcaggaagactacctcatgtggttcttgcatcaagcagggatgaaggctagaccatcaataatacaggatactgtaacactttgttcctaccctttcatctttgatgcccaagccaagaccaaaatgttacagacagatgctgaactacagatgcaggtggcagtcaatggagccaacctgcagaatgtcttcatgcttctcaccctggagcctctgctggccagaagccccttcctggtccttcacgttcgcaggaacaaccttgttggagatgccctaagagagctgagcattcattctgatattgatttgaaaaagcctctcaaagtaatctttgatggtgaagaagcagtggatgccggtggtgttacaaaggaattttttcttttgctgttaaaagaacttttgaatcccatctatggaatgtttacctactatcaagattcaaatctcttgtggttttcagacacgtgttttgtagagcacaactggtttcacttgattggtataacctgtggactagctatctacaactccactgtggtcgatctccacttcccattggctctctacaagaagttactcaatgtaaagcctggcttggaagacttaaaggagttgtcacccactgaaggaaggagtctccaagagcttttagattaccccggggaggatgtggaggagactttctgcctcaacttcacgatctgccgagaaagctatggagtgattgaacagaagaagctgatacctgggggagataatgtaactgtgtgcaaggataacaggcaggaatttgtggatgcttatgtgaattatgtcttccaaatctcagttcatgaatggtacacagccttctctagtggcttcctaaaggtgtgtggtggcaaagtacttgagctcttccagccttcagaactgagggctatgatggtggggaacagcaactacaactgggaagaactggaagagactgccatctacaagggagattactcggccacacatcccactgtaaaactattttgggaaacatttcatgagtttccattggaaaagaagaagaagtttctcttgttcctgacaggcagcgatcggattcccatctacggcatggccagtctgcagattgtcatccagtccacagccagcggggaggagtacttgccggtggcccacacttgctacaaccttcttgacctccccaagtacagcagcaaagagattctgagtgcccggctgacccaggcccttgacaactatgaagggtttagtttggcctgaggcttctcagcttgtccagtatttcccttcgttcctcagtgtccacattgaggcctatacagaaaatcatggggagtgatttctatttttttattgtctaagtgggttgggacttttaaatactgagcctggttgatgtgtttctgggattgtatagcagtaaacaacctttttgaaaaattagaggttggggatggggtgaaaaattggcccttgtatgggaggtgtttttgtttttgttttaaaccaaactacccagtattccttgcacttgtgaatgtgttgcactctgctggatgaaatggcagtggatttttaaactttaatttcccaaatgtctctctcagccctgatgttttctcacagtgcttccttgtccttctcttaacttctcattcctctataagaatgatttagactgacctgtccttttttatctgcgcatgcgagaacatcaccttcctctgtacacttggaaatgcctctggcttgttgcagccctcctttaacccaaaggaggaaaggactgcttcagaaactcccaattccaaaaagctgagtctgggtccattattttggcagaactcctaagaatttatgggagcctatataaacatatcttgcttttaaaaagttcttgagggaatagcaactttcccatggctgtgcctatttcctagaccttttaaaagatgtgcagagcagcttagcattcgttgcagctgagcctaattttttcttgctcatccttgtccctttgacaataaggttaattgatagacccaccacctcttgcactctcgcttttggagcaagttgcattaactattttgagtctctatattgtccaagaaaagtagaaataataaatttactttccctttttctatcaccttatgtcctctaccattttctccttcctcccttcccttattttctccttttcgtaccctgtgtcctccctgattttcctttcgtttcttctttattttatcccattctctgttacttgactcagtgctcccttcctctcctctccttctagtggatgcatgcagcctttttttcaatttttatttaaattgcaaaatttttactcagattttttttcctcttccctaattgctaagatttaaggacgttctttattatgaaactttatcacattcgaaatgtttgtttacagtgggattttaggggggattgtgtttaaatcaaatatatgtattttaaaaataatgacatgctcaaccttcctcatcatggagtaagaaaattctacatgattaaagaatccatgtaagtctaattttaaattcctagtaactagagaaaagacttatttatataaaatgaagtatttatgaactgtgataaagcatcaaatcttgatgaaggattgtagatttttgctttttctttttgtttttaaaacttattccaattgctaaattggtagtttttcagtctttataaatacaggattaaaaatatatatacagttatatgaaatgtttattttctatgtgtgtgcatatagttcaatattatgcaataaatttggtgttttaacttaaaacta

SEQ ID NO: 139923 - DNA, 559 bp, Homo sapiens
  Payload ID: 7444
  Gene Symbol: HERC3
  Gene Name: HECT and RLD domain containing E3 ubiquitin protein ligase 3
  ENST ID: ENST00000426683
  CDS Start-End: 175-559
gtgtgtacgggtgtgtgtgtgtgtgtacgccgacacgtcggtgcggaccgacgcgggggtgtcaggagctgggacggccgggggcagaactgcaaggtgtggaatatttctggcttctagtccaatgccaagtgtgtgacctgtggctacatgattccctgaaagataagaacaatgttatgttggggatattggtctctgggccaacctggtatcagcaccaacctgcagggaattgtggctgagccccaggtgtgtgggttcatatctgacagaagtgtcaaggaagtggcctgtgggggaaaccactctgtgttcctgctggaagatggggaagtttacacatgtggtttgaacaccaaggggcaactgggccatgagagggaaggaaacaagccagaacaaattggagctctggcagatcagcatatcattcatgtggcatgtggcgagtcccacagtctggccctcagtgaccgaggccagctgttttcttggggtgcagggagtgatggtcagctaggactcatgactactgaggattctgtggcagtgccca

SEQ ID NO: 139924 - DNA, 761 bp, Homo sapiens
  Payload ID: 7444
  Gene Symbol: HERC3
  Gene Name: HECT and RLD domain containing E3 ubiquitin protein ligase 3
  ENST ID: ENST00000431413
  CDS Start-End: 367-761
attcacccagcgcattccgccgcccgcaggcttgcggggaaacttccttattattgtgacgccgaaaacggagaaaccccgggtccggcgagaggggctgtgacagtcggagtcccaagctgcggttcggctgctgccgagaactgcaaggtgtggaatatttctggcttctagtccaatgccaagtgtgtgacctgtgagttaattctgcattttagttttggccctacatttatttaaagcctgaatttggggagtatctgcaaagcactgaaggttttggacattgtcttttcctgctgttgaaagagaccctcttcatatatacaacattcaggctacatgattccctgaaagataagaacaatgttatgttggggatattggtctctgggccaacctggtatcagcaccaacctgcagggaattgtggctgagccccaggtgtgtgggttcatatctgacagaagtgtcaaggaagtggcctgtgggggaaaccactctgtgttcctgctggaagatggggaagtttacacatgtggtttgaacaccaaggggcaactgggccatgagagggaaggaaacaagccagaacaaattggagctctggcagatcagcatatcattcatgtggcatgtggcgagtcccacagtctggccctcagtgaccgaggccagctgttttcttggggtgcagggagtgatggtcagctaggactcatgactactgaggattctgtggcagtgcccaggttaataca

SEQ ID NO: 139925 - DNA, 887 bp, Homo sapiens
  Payload ID: 7444
  Gene Symbol: HERC3
  Gene Name: HECT and RLD domain containing E3 ubiquitin protein ligase 3
  ENST ID: ENST00000452979
  CDS Start-End: 205-887
ccagggcaaccagaccgagaggagcatgtgtaacctgaaacaggtgagcctatggagacagtacctaatgcgactgtgcacggaatatgtgtatgcagcatgagctccagggaataaaactgcaaggtgtggaatatttctggcttctagtccaatgccaagtgtgtgacctgtggctacatgattccctgaaagataagaacaatgttatgttggggatattggtctctgggccaacctggtatcagcaccaacctgcagggaattgtggctgagccccaggtgtgtgggttcatatctgacagaagtgtcaaggaagtggcctgtgggggaaaccactctgtgttcctgctggaagatggggaagtttacacatgtggtttgaacaccaaggggcaactgggccatgagagggaaggaaacaagccagaacaaattggagctctggcagatcagcatatcattcatgtggcatgtggcgagtcccacagtctggccctcagtgaccgaggccagctgttttcttggggtgcagggagtgatggtcagctaggactcatgactactgaggattctgtggcagtgcccaggttaatacaaaagctgaaccagcaaacaatattacaagtttcctgtggcaactggcattgcttggctcttgcggctgatggccagttcttcacctggggaaagaacagccatgggcagcttggcttagggaaggagttcccctcccaagccagcccacagagggtgaggtccctggaggggatcccactggctcaggtggctgccggaggggctcacagctttgccctgtctctctcaggagctgtttttggctgggggatgaataatgccgggcagctagggctcagtgatgaaaa

SEQ ID NO: 139926 - DNA, 579 bp, Homo sapiens
  Payload ID: 7444
  Gene Symbol: HERC3
  Gene Name: HECT and RLD domain containing E3 ubiquitin protein ligase 3
  ENST ID: ENST00000422770
  CDS Start-End: 298-579
ttattgtgacgccgaaaacggagaaaccccgggtccggcgagaggggctgtgacagtcggagtcccaagctgcggttcggctgctgccgagaactgcaaggtgtggaatatttctggcttctagtccaatgccaagtgtgtgacctgtgttttggccctacatttatttaaagcctgaatttggggagtatctgcaaagcactgaaggttttggacattgtcttttcctgctgttgaaagagaccctcttcatatatacaacattcaggctacatgattccctgaaagataagaacaatgttatgttggggatattggtctctgggccaacctggtatcagcaccaacctgcagggaattgtggctgagccccaggtgtgtgggttcatatctgacagaagtgtcaaggaagtggcctgtgggggaaaccactctgtgttcctgctggaagatggggaagtttacacatgtggtttgaacaccaaggggcaactgggccatgagagggaaggaaacaagccagaacaaattggagctctggcagatcagcatatcattcatgtggcatgtggcgagtcc

SEQ ID NO: 139927 - DNA, 836 bp, Homo sapiens
  Payload ID: 7444
  Gene Symbol: HERC3
  Gene Name:: HECT and RLD domain containing E3 ubiquitin protein ligase 3
  ENST ID: ENST00000512194
  CDS Start-End: 1-836
gtaaatcttaaagtgaagcatgtggaatatgatacattttacattcctgagatttccaatctcgtggacattcaggaagactacctcatgtggttcttgcatcaagcagggatggatactgtaacactttgttcctaccctttcatctttgatgcccaagccaagaccaaaatgttacagacagatgctgaactacagatgcaggtggcagtcaatggagccaacctgcagaatgtcttcatgcttctcaccctggagcctctgctggccagaagccccttcctggtccttcacgttcgcaggaacaaccttgttggagatgccctaagagagctgagcattcattctgatattgatttgaaaaagcctctcaaagtaatctttgatggtgaagaagcagtggatgccggtggtgttacaaaggaattttttcttttgctgttaaaagaacttttgaatcccatctatggaatgtttacctactatcaagattcaaatctcttgtggttttcagacacgtgttttgtagagcacaactggtttcacttgattggtataacctgtggactagctatctacaactccactgtggtcgatctccacttcccattggctctctacaagaagttactcaatgtaaagcctggcttggaagacttaaaggagttgtcacccactgaaggaaggagtctccaagagcttttagattaccccggggaggatgtggaggagactttctgcctcaacttcacgatctgccgagaaagctatggagtgattgaacagaagaagctgatacctgggggagataatgtaactgtgtgcaaggataacag

SEQ ID NO: 139928 - DNA, 582 bp, Homo sapiens
  Payload ID: 7444
  Gene Symbol: HERC3
  Gene Name: HECT and RLD domain containing E3 ubiquitin protein ligase 3
  ENST ID: ENST00000513325
  CDS Start-End: 349-582
aggaaacgctgccgaggagtaggcggggcgggcgctttggttccgagggtgcttctgctccgactgcttttcccacgggcgtcatctatagtccggaggacagccccagggcagaggcctctgaactgcaaggtgtggaatatttctggcttctagtccaatgccaagtgtgtgacctgtgagttaattctgcattttagttttggccctacatttatttaaagcctgaatttggggagtatctgcaaagcactgaaggttttggacattgtcttttcctgctgttgaaagagaccctcttcatatatacaacattcaggctacatgattccctgaaagataagaacaatgttatgttggggatattggtctctgggccaacctggtatcagcaccaacctgcagggaattgtggctgagccccaggtgtgtgggttcatatctgacagaagtgtcaaggaagtggcctgtgggggaaaccactctgtgttcctgctggaagatggggaagtttacacatgtggtttgaacaccaaggggcaactgggccatgagagggaaggaaacaagccagaacaaatt

SEQ ID NO: 139929 - DNA, 4371 bp, Homo sapiens
  Payload ID: 7445
  Gene Symbol: HERC4
  Gene Name: HECT and RLD domain containing E3 ubiquitin protein ligase 4
  Uniprot ID: Q5GLZ8
  ENST ID: ENST00000277817
  CDS Start-End: 496-3339
gtggttagtagcgataaatgctctgaaggaaaaaacatacagtactgtgagaatgtagtattttgaaatgtttcatttgcaaaattgtacttgatactcagaatagtgtttttttttcctaaaatacttaatatgctgaacaggtcaatgtatcatctgcctagtatgcataaacaataacagtaaatgtttagtaatttgagcacagttgggtatgttcatgtattttttattccttactctgtttgcattgccagtgtttgattttgctatttcaaagaaatggcattttgttgagtttgaaaatttgaaggtgcattggatcctgctaatttgttggattctgctaaattgtagcagtacagctctcaggttttgtagttaagagcataacttcactaaataaaaatatttttaatacaataatatggaatcagagtaactctcctttttcctgctcaaactttgatttgctgaagctgcttcccgaaaatcatgtgtgtcgactctctggtcagaatttgctccggactctcttatggcagaatcagaaatattaaaagtttgtcagatatccagattgtacaggttgcttgtggttactatcattcacttgcactttctaaagcaagtgaagtcttctgttggggacagaataaatatggccaattgggtttaggtactgactgtaaaaagcaaacttcaccgcagctgcttaagtctttgcttggaatccctttcatgcaagttgcagcaggaggagcccatagttttgtactcaccctttctggagctatctttggatggggacgcaacaagtttggtcagctaggtcttaatgatgaaaatgataggtatgttcctaatttactaaagtcactaagatctcagaaaatagtttatatttgttgtggagaagatcatactgctgctctaaccaaggaaggtggagtgtttacttttggagctggagggtatggtcagttgggccataattctaccagtcatgaaataaacccaaggaaagtttttgaacttatgggaagcattgtcactgagattgcttgtggacggcagcacacttctgcttttgttccttcatcaggacgaatttactcttttgggcttggtggtaatgggcagctgggaaccggttcaacaagcaacaggaaaagcccctttactgtaaaaggaaattggtacccctataatgggcagtgtctaccagatattgattctgaagaatatttctgtgtaaaaagaattttctcagggggagatcaaagcttttcacattactctagtccccagaactgtgggccaccagatgacttcagatgtcccaatccgacaaagcagatctggacagtgaatgaagctctaattcagaaatggctgagctatccttctggaaggtttcctgtggagatagccaatgagatagatggaacgttttcttcctctggttgcctaaatggaagttttttagctgttagcaatgatgatcactatagaacaggtaccagattttcaggggttgatatgaatgctgctaggcttttattccacaaacttatacaacctgatcatccgcagatatctcagcaggtggcagctagtttggaaaagaatcttattcctaaactgactagctccttacctgatgttgaagcattgaggttttatcttactctaccagaatgtcccctgatgagtgattccaacaatttcacaacaatagcaattccctttggtacagctcttgtgaacctagaaaaggcaccactgaaagtacttgaaaactggtggtcagtacttgaacctccactattcctcaagatagtagaactttttaaggaagttgtggtacatcttttgaaactctacaagatcggtattcccccttctgaaagaagaattttcaacagttttcttcatactgcattaaaggttttagaaatactacatagggtaaatgagaaaatgggacagattatacagtatgataaattttatatacatgaagtacaagaattgatagacataagaaatgattatatcaactgggtccaacagcaggcctatggaatggatgtcaaccatggattaactgagttggcagatatccctgttacaatctgtacatatccatttgtatttgatgcccaagcaaaaactactctgttacagaccgatgcagtcttacagatgcagatggctattgatcaggcccacaggcagaatgtctcctctctttttctcccagtgattgaatctgtgaatccctgcttaattctagtggtgcgtagagaaaatattgtaggagatgcaatggaagtccttaggaaaacaaagaacatagattacaagaagccactcaaggttatatttgttggagaagatgctgtggatgcaggaggggtgcgcaaagaatttttcttgctcatcatgagggaattattggatcctaaatacggcatgtttaggtattatgaagattccaggctcatttggttttctgataagacatttgaagacagtgatttgttccatttgattggtgttatctgtggcttagcaatttataattgtaccattgtggacctccattttcctttggctttatataagaaactactgaaaaagaagccatccttggatgatttgaaagaactaatgcctgatgttgggagaagcatgcaacagttactggattatccagaagatgacatagaggaaacattttgtcttaattttacgatcacagttgaaaactttggtgcaacagaagtgaaagagctggttctaaatggtgcagacacagctgttaacaaacaaaatcggcaagagtttgtcgatgcttatgtggattacatattcaataaatcagtggcttccttatttgatgcttttcatgcgggctttcataaggtctgtggaggaaaagtccttctgctctttcagcctaatgaactacaagcaatggtcattggaaatacaaattatgattggaaggaactggaaaagaatacagaatacaaaggggaatattgggcagaacatcctacgataaaaattttttgggaagtatttcacgaattaccattggaaaagaagaaacagtttctgttatttttgacaggtagtgatcgcattcctattcttggtatgaagagtctgaaactagtcatccagtccacaggaggtggtgaggagtatctcccagtttcccatacttgttttaatcttctggatcttccaaaatatacagaaaaagaaactctacgctctaaactgatccaagctattgatcacaatgaaggcttcagtttaatataactttggagttataactattcagtttagtgcaaaagcattaaactatttgtgtttttcttgtggtgatgaattcagcaaggtgacagaggtactattataattcttacttgcagaatgttcaatctacgagtgttcatggaagccaaaaaatattaaaggaaaatgaacaaactgttaatattattgtacagaaccatggattttttttgaccatcttctaataaacatagcaagtattatgaatacattaaagttttactaacatgaattttaagagtttgcatatttcagaaatgatctggtgtgagtgcatggaaatattgcttaatttttcttcaatcattgagtgaaaaacctttaactttggcctgcaatagtcatttgattattttttcattttgtaaataatgttaagttttgtaataaaatagttatgttctgataccagtacagtttctatggttgtaattgaacttgaacagacttttaaaggttaaaaattatgatttaaatcttactctgagactctataaaaagaaaaaaaaggtagcatggtggaaacactatcttttcttttttgctagaataagtgtctttgtgcaaacctaaatcacagatagggaatatactacataacctgcagttcttttctttgtgaatcctgacacactgatagatgggggattgtcgatcagagaacttattaatatttagtactggaagaactctgtctccacagttgccagtaataaaaagaaacattggctactatgagcaccaatcactgggttatagctttcaaaattattgatgctgcagtgctttagagctatttccttgaatttaagaaacaaatcttaacagttttatggtgctgatgcttagttgtctcatgccattaaattgtaaaagtgagttgatgcaatacatgtgactttctgctataatgcaaatatttattttttaaatttattttaaaatgccgtgaaaactgtttaataaagatttattgttttaatatttaaactttca

SEQ ID NO: 139930 - DNA, 3905 bp, Homo sapiens
  Payload ID: 7445
  Gene Symbol: HERC4
  Gene Name: HECT and RLD domain containing E3 ubiquitin protein ligase 4
  Uniprot ID: Q5GLZ8
  ENST ID: ENST00000373700
  CDS Start-End: 314-3463
acttccggccagcccctcccccgcctccctcgcgtggccacctccccctctgccttctcctacccagtctcttccccaactctccccacccctggtgctctccgccccgcttgcctcccgttcttccccgcccgctccatccgggtcgctgacggctgtctctggactggacagcagtggcgtccgcttttctctaaggaacccgataagaactccattttctgttgatgtggagacatagggtacctccaactttccggggtttcagaagagaattttttattgaaactggaagaccaaaataattacaagcatgttgtgctggggaaatgcatcctttgggcagctaggtttgggtggaattgatgaagaaattgtactagagcccagaaaaagtgacttctttataaataaaagggtccgagatgtaggatgtggactcagacatactgtgtttgttctggatgatggaacagtgtacacatgtggatgtaatgatctaggacagctaggtcatgaaaaatccagaaagaaaccagagcaggttgttgccctggatgcccaaaatattgtagctgtttcatgtggagaagctcatacgttagcgctaaatgacaaaggccaggtgtatgcttggggtctcgattctgatggacagcttggcctggtaggatcagaggaatgcatcagagtacccagaaatattaaaagtttgtcagatatccagattgtacaggttgcttgtggttactatcattcacttgcactttctaaagcaagtgaagtcttctgttggggacagaataaatatggccaattgggtttaggtactgactgtaaaaagcaaacttcaccgcagctgcttaagtctttgcttggaatccctttcatgcaagttgcagcaggaggagcccatagttttgtactcaccctttctggagctatctttggatggggacgcaacaagtttggtcagctaggtcttaatgatgaaaatgataggtatgttcctaatttactaaagtcactaagatctcagaaaatagtttatatttgttgtggagaagatcatactgctgctctaaccaaggaaggtggagtgtttacttttggagctggagggtatggtcagttgggccataattctaccagtcatgaaataaacccaaggaaagtttttgaacttatgggaagcattgtcactgagattgcttgtggacggcagcacacttctgcttttgttccttcatcaggacgaatttactcttttgggcttggtggtaatgggcagctgggaaccggttcaacaagcaacaggaaaagcccctttactgtaaaaggaaattggtacccctataatgggcagtgtctaccagatattgattctgaagaatatttctgtgtaaaaagaattttctcagggggagatcaaagcttttcacattactctagtccccagaactgtgggccaccagatgacttcagatgtcccaatccgacaaagcagatctggacagtgaatgaagctctaattcagaaatggctgagctatccttctggaaggtttcctgtggagatagccaatgagatagatggaacgttttcttcctctggttgcctaaatggaagttttttagctgttagcaatgatgatcactatagaacaggtaccagattttcaggggttgatatgaatgctgctaggcttttattccacaaacttatacaacctgatcatccgcagatatctcagcaggtggcagctagtttggaaaagaatcttattcctaaactgactagctccttacctgatgttgaagcattgaggttttatcttactctaccagaatgtcccctgatgagtgattccaacaatttcacaacaatagcaattccctttggtacagctcttgtgaacctagaaaaggcaccactgaaagtacttgaaaactggtggtcagtacttgaacctccactattcctcaagatagtagaactttttaaggaagttgtggtacatcttttgaaactctacaagatcggtattcccccttctgaaagaagaattttcaacagttttcttcatactgcattaaaggttttagaaatactacatagggtaaatgagaaaatgggacagattatacagtatgataaattttatatacatgaagtacaagaattgatagacataagaaatgattatatcaactgggtccaacagcaggcctatggaatgttggcagatatccctgttacaatctgtacatatccatttgtatttgatgcccaagcaaaaactactctgttacagaccgatgcagtcttacagatgcagatggctattgatcaggcccacaggcagaatgtctcctctctttttctcccagtgattgaatctgtgaatccctgcttaattctagtggtgcgtagagaaaatattgtaggagatgcaatggaagtccttaggaaaacaaagaacatagattacaagaagccactcaaggttatatttgttggagaagatgctgtggatgcaggaggggtgcgcaaagaatttttcttgctcatcatgagggaattattggatcctaaatacggcatgtttaggtattatgaagattccaggctcatttggttttctgataagacatttgaagacagtgatttgttccatttgattggtgttatctgtggcttagcaatttataattgtaccattgtggacctccattttcctttggctttatataagaaactactgaaaaagaagccatccttggatgatttgaaagaactaatgcctgatgttgggagaagcatgcaacagttactggattatccagaagatgacatagaggaaacattttgtcttaattttacgatcacagttgaaaactttggtgcaacagaagtgaaagagctggttctaaatggtgcagacacagctgttaacaaacaaaatcggcaagagtttgtcgatgcttatgtggattacatattcaataaatcagtggcttccttatttgatgcttttcatgcgggctttcataaggtctgtggaggaaaagtccttctgctctttcagcctaatgaactacaagcaatggtcattggaaatacaaattatgattggaaggaactggaaaagaatacagaatacaaaggggaatattgggcagaacatcctacgataaaaattttttgggaagtatttcacgaattaccattggaaaagaagaaacagtttctgttatttttgacaggtagtgatcgcattcctattcttggtatgaagagtctgaaactagtcatccagtccacaggaggtggtgaggagtatctcccagtttcccatacttgttttaatcttctggatcttccaaaatatacagaaaaagaaactctacgctctaaactgatccaagctattgatcacaatgaaggcttcagtttaatataactttggagttataactattcagtttagtgcaaaagcattaaactatttgtgtttttcttgtggtgatgaattcagcaaggtgacagaggtactattataattcttacttgcagaatgttcaatctacgagtgttcatggaagccaaaaaatattaaaggaaaatgaacaaactgttaatattattgtacagaaccatggattttttttgaccatcttctaataaacatagcaagtattatgaatacattaaagttttactaacatgaattttaagagtttgcatatttcagaaatgatctggtgtgagtgcatggaaatattgcttaatttttcttcaatcattgagtgaaaaacctttaactttggcctgcaatagtcatttgattattttttcattttgtaaataatgttaagttttgtaataaaatagttatgttctga

SEQ ID NO: 139931 - DNA, 4445 bp, Homo sapiens
  Payload ID: 7445
  Gene Symbol: HERC4
  Gene Name: HECT and RLD domain containing E3 ubiquitin protein ligase 4
  Uniprot ID: Q5GLZ8
  ENST ID: ENST00000395198
  CDS Start-End: 249-3422
agtctcttccccaactctccccacccctggtgctctccgccccgcttgcctcccgttcttccccgcccgctccatccgggtcgctgacggctgtctctggactggacagcagtggcgtccgcttttctctaaggaacccgataagaactccattttctgttgatgtggagacatagggtacctccaactttccggggtttcagaagagaattttttattgaaactggaagaccaaaataattacaagcatgttgtgctggggaaatgcatcctttgggcagctaggtttgggtggaattgatgaagaaattgtactagagcccagaaaaagtgacttctttataaataaaagggtccgagatgtaggatgtggactcagacatactgtgtttgttctggatgatggaacagtgtacacatgtggatgtaatgatctaggacagctaggtcatgaaaaatccagaaagaaaccagagcaggttgttgccctggatgcccaaaatattgtagctgtttcatgtggagaagctcatacgttagcgctaaatgacaaaggccaggtgtatgcttggggtctcgattctgatggacagcttggcctggtaggatcagaggaatgcatcagagtacccagaaatattaaaagtttgtcagatatccagattgtacaggttgcttgtggttactatcattcacttgcactttctaaagcaagtgaagtcttctgttggggacagaataaatatggccaattgggtttaggtactgactgtaaaaagcaaacttcaccgcagctgcttaagtctttgcttggaatccctttcatgcaagttgcagcaggaggagcccatagttttgtactcaccctttctggagctatctttggatggggacgcaacaagtttggtcagctaggtcttaatgatgaaaatgataggtatgttcctaatttactaaagtcactaagatctcagaaaatagtttatatttgttgtggagaagatcatactgctgctctaaccaaggaaggtggagtgtttacttttggagctggagggtatggtcagttgggccataattctaccagtcatgaaataaacccaaggaaagtttttgaacttatgggaagcattgtcactgagattgcttgtggacggcagcacacttctgcttttgttccttcatcaggacgaatttactcttttgggcttggtggtaatgggcagctgggaaccggttcaacaagcaacaggaaaagcccctttactgtaaaaggaaattggtacccctataatgggcagtgtctaccagatattgattctgaagaatatttctgtgtaaaaagaattttctcagggggagatcaaagcttttcacattactctagtccccagaactgtgggccaccagatgacttcagatgtcccaatccgacaaagcagatctggacagtgaatgaagctctaattcagaaatggctgagctatccttctggaaggtttcctgtggagatagccaatgagatagatggaacgttttcttcctctggttgcctaaatggaagttttttagctgttagcaatgatgatcactatagaacaggtaccagattttcaggggttgatatgaatgctgctaggcttttattccacaaacttatacaacctgatcatccgcagatatctcagcaggtggcagctagtttggaaaagaatcttattcctaaactgactagctccttacctgatgttgaagcattgaggttttatcttactctaccagaatgtcccctgatgagtgattccaacaatttcacaacaatagcaattccctttggtacagctcttgtgaacctagaaaaggcaccactgaaagtacttgaaaactggtggtcagtacttgaacctccactattcctcaagatagtagaactttttaaggaagttgtggtacatcttttgaaactctacaagatcggtattcccccttctgaaagaagaattttcaacagttttcttcatactgcattaaaggttttagaaatactacatagggtaaatgagaaaatgggacagattatacagtatgataaattttatatacatgaagtacaagaattgatagacataagaaatgattatatcaactgggtccaacagcaggcctatggaatggatgtcaaccatggattaactgagttggcagatatccctgttacaatctgtacatatccatttgtatttgatgcccaagcaaaaactactctgttacagaccgatgcagtcttacagatgcagatggctattgatcaggcccacaggcagaatgtctcctctctttttctcccagtgattgaatctgtgaatccctgcttaattctagtggtgcgtagagaaaatattgtaggagatgcaatggaagtccttaggaaaacaaagaacatagattacaagaagccactcaaggttatatttgttggagaagatgctgtggatgcaggaggggtgcgcaaagaatttttcttgctcatcatgagggaattattggatcctaaatacggcatgtttaggtattatgaagattccaggctcatttggttttctgataagacatttgaagacagtgatttgttccatttgattggtgttatctgtggcttagcaatttataattgtaccattgtggacctccattttcctttggctttatataagaaactactgaaaaagaagccatccttggatgatttgaaagaactaatgcctgatgttgggagaagcatgcaacagttactggattatccagaagatgacatagaggaaacattttgtcttaattttacgatcacagttgaaaactttggtgcaacagaagtgaaagagctggttctaaatggtgcagacacagctgttaacaaacaaaatcggcaagagtttgtcgatgcttatgtggattacatattcaataaatcagtggcttccttatttgatgcttttcatgcgggctttcataaggtctgtggaggaaaagtccttctgctctttcagcctaatgaactacaagcaatggtcattggaaatacaaattatgattggaaggaactggaaaagaatacagaatacaaaggggaatattgggcagaacatcctacgataaaaattttttgggaagtatttcacgaattaccattggaaaagaagaaacagtttctgttatttttgacaggtagtgatcgcattcctattcttggtatgaagagtctgaaactagtcatccagtccacaggaggtggtgaggagtatctcccagtttcccatacttgttttaatcttctggatcttccaaaatatacagaaaaagaaactctacgctctaaactgatccaagctattgatcacaatgaaggcttcagtttaatataactttggagttataactattcagtttagtgcaaaagcattaaactatttgtgtttttcttgtggtgatgaattcagcaaggtgacagaggtactattataattcttacttgcagaatgttcaatctacgagtgttcatggaagccaaaaaatattaaaggaaaatgaacaaactgttaatattattgtacagaaccatggattttttttgaccatcttctaataaacatagcaagtattatgaatacattaaagttttactaacatgaattttaagagtttgcatatttcagaaatgatctggtgtgagtgcatggaaatattgcttaatttttcttcaatcattgagtgaaaaacctttaactttggcctgcaatagtcatttgattattttttcattttgtaaataatgttaagttttgtaataaaatagttatgttctgataccagtacagtttctatggttgtaattgaacttgaacagacttttaaaggttaaaaattatgatttaaatcttactctgagactctataaaaagaaaaaaaaggtagcatggtggaaacactatcttttcttttttgctagaataagtgtctttgtgcaaacctaaatcacagatagggaatatactacataacctgcagttcttttctttgtgaatcctgacacactgatagatgggggattgtcgatcagagaacttattaatatttagtactggaagaactctgtctccacagttgccagtaataaaaagaaacattggctactatgagcaccaatcactgggttatagctttcaaaattattgatgctgcagtgctttagagctatttccttgaatttaagaaacaaatcttaacagttttatggtgctgatgcttagttgtctcatgccattaaattgtaaaagtgagttgatgcaatacatgtgactttctgctataatgcaaatatttattttttaaatttattttaaaatgccgtgaaaactgtttaataaagatttattgttttaatattt

SEQ ID NO: 139932 - DNA, 6391 bp, Homo sapiens
  Payload ID: 7445
  Gene Symbol: HERC4
  Gene Name: HECT and RLD domain containing E3 ubiquitin protein ligase 4
  ENST ID: ENST00000427635
  CDS Start-End: 1-1198
gggaaatgcatcctttgggcagctaggtttgggtggaattgatgaagaaattgtactagagcccagaaaaagtgacttctttataaataaaagggtccgagatgtaggatgtggactcagacatactgtgtttgttctggatgatggaacagtgtacacatgtggatgtaatgatctaggacagctaggtcatgaaaaatccagaaagaaaccagagcaggttgttgccctggatgcccaaaatattgtagctgtttcatgtggagaagctcatacgttagcgctaaatgacaaaggccaggtgtatgcttggggtctcgattctgatggacagcttggcctggtaggatcagaggaatgcatcagagtacccagaaatattaaaagtttgtcagatatccagattgtacaggttgcttgtggttactatcattcacttgcactttctaaagcaagtgaagtcttctgttggggacagaataaatatggccaattgggtttaggtactgactgtaaaaagcaaacttcaccgcagctgcttaagtctttgcttggaatccctttcatgcaagttgcagcaggaggagcccatagttttgtactcaccctttctggagctatctttggatggggacgcaacaagtttggtcagctaggtcttaatgatgaaaatgataggtatgttcctaatttactaaagtcactaagatctcagaaaatagtttatatttgttgtggagaagatcatactgctgctctaaccaaggaaggtggagtgtttacttttggagctggagggtatggtcagttgggccataattctaccagtcatgaaataaacccaaggaaagtttttgaacttatgggaagcattgtcactgagattgcttgtggacggcagcacacttctgcttttgttccttcatcaggacgaatttactcttttgggcttggtggtaatgggcagctgggaaccggttcaacaagcaacaggaaaagcccctttactgtaaaaggaaattggtacccctataatgggcagtgtctaccagatattgaggcgaggtcttgccatgttgtccaggctggtcttgaactcctgggctcaagtgatcctcctaccttggcttcccaaagtgctgggattacagtgaatgagcatcaatgcctactaccaccacaaaaaagaactcagtgaaaattcttctcaaaggaattatgtgtttcctgatggaactactctcctgcctccatgtagtagttttactgaaataaccaaatggtgattgaaacctgtctagattcaaccaccaatttacagaacagaagaccaagccaaatgttaggagaaaccacaaagataaagtcagcaaaatccagtctgcataaagttgtacaggacaaatgactaggtttctcaaactttttcgagtagtgattaaaaggaaattaaggataggatgcagtggctcacacctgtaatcccagcactttgggaggctgaggtgggcagatcacttgaggtcaggagttcgagaccagcctgaccaaaatggtgaaaccccatctgtactaaatacaaaaattagatgtggtggtgggcgcctgtaatctcagttactcgggaggctgaggttgcagtaagccgagatcatgccactgcactccaacccgggcgacagagtgagacctgtctcaaaaaataaaaataaggccaggtgcagtggctcacacctgtaattctgacactttgggaggctgaggtgggcggatcacctgaggttgggagttcgagaccagcctgaccaacatggagaaaccccgtctctactaaaaataaaaaattaatcaggagtggtggcccatgcctgtaatcccagctaattgggaggctgaggtgggacaatcgcttgaacttgggagatggaggttgcggtgaaccaagatcgcgccactgcactccagcctgggcaacaagagtgaaactccgtctcaaaaaagaaataaataaaaataaaaaaaggaaattaaggaaacttaacttttggtacctaactcatagcctccagaaacccattcatgtactgtagattagtcaaccatcttgtagggaattgtttatagagggcacaatcacattttaagagtaaataaataacatcctgctaaatcttttgaggaaatgagcaattccatatagatttgtgagaattatttagaaaaaagattttaggttgaataattggcttatttaataaagatttacccttttattctattcttaaaacttgtttttggccttagggtattcttgtgacttacggaaaatttgatagtaattatcaaattattgttctaaactctgaagctcatttttggtataacctagataacaattgcatatttgtatggacaggtatttactgatttcttttacaaataaaacattgtgcttgcttgtaaggaataatcaaggaaattaacatgtggtcatttccttgaaaagaatggataattctatagcagccatggtcacaaataatacaaggtgaagaattagtcaactaaggaatgggaataggataacagggatagactatggactagccaagcaatatttttggtaatagatactctttccagtttggggagcagaagaaaagaaaaaaaagaggcccggaatatctttttcaaaagaaactttgttgccctttctttattcctaataaatttgcttattaatgtattcactttggggcctaatttggcttttactgacaaatagctgccaacaaagagctgtatgtattatcttgtacacctatattgaaaaaaaaaattctgcattatgaaatatttactccagaagttttaatttttgtttgctgtttctttttaagaataattttttttttttttagagatgggtcttgctatgttgcttgctggagtgcagtggctagtcacagatgcagtcatagcatactgcagctttgaactgggctcacgccatcctcctgcctcactctcccaagtagctgggactacagacatgtgccactgtagcccagttcaattctttcttttttttttttttttgaggtggagtcttatgctctggcccaggctggagtgcagtggggtgatctcggctcactgcaacctccgcctcctgggttcaagcgattctcctgtctcagcctcccaagtagctgggattacaggcacacaccaccacgcctggctaatttttgtatttttagtagagatggggtttcactatattggccaggctggcgtcgaactcctaacatcaaatgatcctcccacctcagcctcccaaagtgctgggattacaggcatgagccactgtgcctcgccaagaataaatactcttgatttttatttccttctagctatcttttgtagcttttgttctattttttttaaatcatctttggtttaaactgaaatatactgagatgcagattagaaaaagctttttttcttggtgcagggcagaagaaaggcttgtaaacttcaccaaatgctgcttatgcttgtgggatcgtttaatgttcatcatttggtcagtctcatccccatagcagtcagaatatttcaagtcactttataccatgaagtccatgaatgggaggccttattaaataagatgattatgtgaaaatctaatggcatattgatgctctgaaatatgttatgtaaatcttggcttttaattttttacatttttattacagattctgaagaatatttctgtgtaaaaagaattttctcagggggagatcaaagcttttcacattactctagtccccagaactgtgggccaccagatgacttcagatgtcccaatccgacaaagcagatctggacagtgaatgaagctctaattcagaaatggctgagctatccttctggaaggtttcctgtggagatagccaatgagatagatggaacgttttcttcctctggttgcctaaatggaagttttttagctgttagcaatgatgatcactatagaacaggtaccagattttcaggggttgatatgaatgctgctaggcttttattccacaaacttatacaacctgatcatccgcagatatctcagcaggtggcagctagtttggaaaagaatcttattcctaaactgactagctccttacctgatgttgaagcattgaggttttatcttactctaccagaatgtcccctgatgagtgattccaacaatttcacaacaatagcaattccctttggtacagctcttgtgaacctagaaaaggcaccactgaaagtacttgaaaactggtggtcagtacttgaacctccactattcctcaagatagtagaactttttaaggaagttgtggtacatcttttgaaactctacaagatcggtattcccccttctgaaagaagaattttcaacagttttcttcatactgcattaaaggttttagaaatactacataggtgtaacaaatagtaccctttacacttgtagcagttcaaagttatatgaagaagtagactctgagctgtttcattaaagatggattttcatccctgacagttggtaaatgagaaaatgggacagattatacagtatgataaattttatatacatgaagtacaagaattgatagacataagaaatgattatatcaactgggtccaacagcaggcctatggaatgttggcagatatccctgttacaatctgtacatatccatttgtatttgatgcccaagcaaaaactactctgttacagaccgatgcagtcttacagatgcagatggctattgatcaggcccacaggcagaatgtctcctctctttttctcccagtgattgaatctgtgaatccctgcttaattctagtggtgcgtagagaaaatattgtaggagatgcaatggaagtccttaggaaaacaaagaacatagattacaagaagccactcaaggttatatttgttggagaagatgctgtggatgcaggaggggtgcgcaaagaatttttcttgctcatcatgagggaattattggatcctaaatacggcatgtttaggtattatgaagattccaggctcatttggttttctgataagacatttgaagacagtgatttgttccatttgattggtgttatctgtggcttagcaatttataattgtaccattgtggacctccattttcctttggctttatataagaaactactgaaaaagaagccatccttggatgatttgaaagaactaatgcctgatgttgggagaagcatgcaacagttactggattatccagaagatgacatagaggaaacattttgtcttaattttacgatcacagttgaaaactttggtgcaacagaagtgaaagagctggttctaaatggtgcagacacagctgttaacaaacaaaatcggcaagagtttgtcgatgcttatgtggattacatattcaataaatcagtggcttccttatttgatgcttttcatgcgggctttcataaggtctgtggaggaaaagtccttctgctctttcagcctaatgaactacaagcaatggtcattggaaatacaaattatgattggaaggaactggaaaagaatacagaatacaaaggggaatattgggcagaacatcctacgataaaaattttttgggaagtatttcacgaattaccattggaaaagaagaaacagtttctgttatttttgacaggtagtgatcgcattcctattcttggtatgaagagtctgaaactagtcatccagtccacaggaggtggtgaggagtatctcccagtttcccatacttgttttaatcttctggatcttccaaaatatacagaaaaagaaactctacgctctaaactgatccaagctattgatcacaatgaaggcttcagtttaatataactttggagttataactattcagtttagtgcaaaagcattaaactatttgtgtttttcttgtggtgatgaattcagcaaggtgacagaggtactattataattcttacttgcagaatgttcaatctacgagtgttcatggaagccaaaaaatattaaaggaaaatgaacaaactgttaatattattgtacagaaccatggattttttttgaccatcttctaataaacatagcaagtattatgaatacattaaagttttactaacatgaattttaagagtttgcatatttcagaaatgatctggtgtgagtgcatggaaatattgcttaatttttcttcaatcattgagtgaaaaacctttaactttggcctgcaatagtcatttgattattttttcattttgtaaataatgttaagttttgtaataaaatagttatgttctgatacca

SEQ ID NO: 139933 - DNA, 4211 bp, Homo sapiens
  Payload ID: 7445
  Gene Symbol: HERC4
  Gene Name: HECT and RLD domain containing E3 ubiquitin protein ligase 4
  Uniprot ID: Q5GLZ8
  ENST ID: ENST00000412272
  CDS Start-End: 249-3188
agtctcttccccaactctccccacccctggtgctctccgccccgcttgcctcccgttcttccccgcccgctccatccgggtcgctgacggctgtctctggactggacagcagtggcgtccgcttttctctaaggaacccgataagaactccattttctgttgatgtggagacatagggtacctccaactttccggggtttcagaagagaattttttattgaaactggaagaccaaaataattacaagcatgttgtgctggggaaatgcatcctttgggcagctaggtttgggtggaattgatgaagaaattgtactagagcccagaaaaagtgacttctttataaataaaagggtccgagatgtaggatgtggactcagacatactgtgtttgttctggatgatggaacagtgtacacatgtggatgtaatgatctaggacagctaggtcatgaaaaatccagaaagaaaccagagcaggttgttgccctggatgcccaaaatattgtagctgtttcatgtggagaagctcatacgttagcgctaaatgacaaaggccaggtgtatgcttggggtctcgattctgatggacagcttggcctggtaggatcagaggaatgcatcagagtacccagaaatattaaaagtttgtcagatatccagattgtacaggttgcttgtggttactatcattcacttgcactttctaaagcaagtgaagtcttctgttggggacagaataaatatggccaattgggtttaggtactgactgtaaaaagcaaacttcaccgcagctgcttaagtctttgcttggaatccctttcatgcaagttgcagcaggaggagcccatagttttgtactcaccctttctggagctatctttggatggggacgcaacaagtttggtcagctaggtcttaatgatgaaaatgataggtatgttcctaatttactaaagtcactaagatctcagaaaatagtttatatttgttgtggagaagatcatactgctgctctaaccaaggaaggtggagtgtttacttttggagctggagggtatggtcagttgggccataattctaccagtcatgaaataaacccaaggaaagtttttgaacttatgggaagcattgtcactgagattgcttgtggacggcagcacacttctgcttttgttccttcatcaggacgaatttactcttttgggcttggtggtaatgggcagctgggaaccggttcaacaagcaacaggaaaagcccctttactgtaaaaggaaattggtacccctataatgggcagtgtctaccagatattgattctgaagaatatttctgtgtaaaaagaattttctcagggggagatcaaagcttttcacattactctagtccccagaactgtgggccaccagatgacttcagatgtcccaatccgacaaagcagatctggacagtgaatgaagctctaattcagaaatggctgagctatccttctggaaggtttcctgtggagatagccaatgagatagatggaacgttttcttcctctggttgcctaaatggaagttttttagctgttagcaatgatgatcactatagaacaggtaccagattttcaggggttgatatgaatgctgctaggcttttattccacaaacttatacaacctgatcatccgcagatatctcagcaggtggcagctagtttggaaaagaatcttattcctaaactgactagctccttacctgatgttgaagcattgaggttttatcttactctaccagaatgtcccctgatgagtgattccaacaatttcacaacaatagcaattccctttggtacagctcttgtgaacctagaaaaggcaccactgaaagtacttgaaaactggtggtcagtacttgaacctccactattcctcaagatagtagaactttttaaggaagttgtggtacatcttttgaaactctacaagatcggtattcccccttctgaaagaagaattttcaacagttttcttcatactgcattaaaggttttagaaatactacatagggtaaatgagaaaatgggacagattatacagtatgataaattttatatacatgaagtacaagaattgatagacataagaaatgattatatcaactgggtccaacagcaggcctatggaatggatgtcaaccatggattaactgagttggcagatatccctgttacaatctgtacatatccatttgtatttgatgcccaagcaaaaactactctgttacagaccgatgcagtcttacagatgcagatggctattgatcaggcccacaggcagaatgtctcctctctttttctcccagtgattgaatctgtgaatccctgcttaattctagtggtgcgtagagaaaatattgtaggagatgcaatggaagtccttaggaaaacaaagaacatagattacaagaagccactcaaggttatatttgttggagaagatgctgtggatgcaggaggggtgcgcaaagaatttttcttgctcatcatgagggaattattggatcctaaatacggcatgtttaggtattatgaagattccaggctcatttggttttctgataagatcacagttgaaaactttggtgcaacagaagtgaaagagctggttctaaatggtgcagacacagctgttaacaaacaaaatcggcaagagtttgtcgatgcttatgtggattacatattcaataaatcagtggcttccttatttgatgcttttcatgcgggctttcataaggtctgtggaggaaaagtccttctgctctttcagcctaatgaactacaagcaatggtcattggaaatacaaattatgattggaaggaactggaaaagaatacagaatacaaaggggaatattgggcagaacatcctacgataaaaattttttgggaagtatttcacgaattaccattggaaaagaagaaacagtttctgttatttttgacaggtagtgatcgcattcctattcttggtatgaagagtctgaaactagtcatccagtccacaggaggtggtgaggagtatctcccagtttcccatacttgttttaatcttctggatcttccaaaatatacagaaaaagaaactctacgctctaaactgatccaagctattgatcacaatgaaggcttcagtttaatataactttggagttataactattcagtttagtgcaaaagcattaaactatttgtgtttttcttgtggtgatgaattcagcaaggtgacagaggtactattataattcttacttgcagaatgttcaatctacgagtgttcatggaagccaaaaaatattaaaggaaaatgaacaaactgttaatattattgtacagaaccatggattttttttgaccatcttctaataaacatagcaagtattatgaatacattaaagttttactaacatgaattttaagagtttgcatatttcagaaatgatctggtgtgagtgcatggaaatattgcttaatttttcttcaatcattgagtgaaaaacctttaactttggcctgcaatagtcatttgattattttttcattttgtaaataatgttaagttttgtaataaaatagttatgttctgataccagtacagtttctatggttgtaattgaacttgaacagacttttaaaggttaaaaattatgatttaaatcttactctgagactctataaaaagaaaaaaaaggtagcatggtggaaacactatcttttcttttttgctagaataagtgtctttgtgcaaacctaaatcacagatagggaatatactacataacctgcagttcttttctttgtgaatcctgacacactgatagatgggggattgtcgatcagagaacttattaatatttagtactggaagaactctgtctccacagttgccagtaataaaaagaaacattggctactatgagcaccaatcactgggttatagctttcaaaattattgatgctgcagtgctttagagctatttccttgaatttaagaaacaaatcttaacagttttatggtgctgatgcttagttgtctcatgccattaaattgtaaaagtgagttgatgcaatacatgtgactttctgctataatgcaaatatttattttttaaatttattttaaaatgccgtgaaaactgtttaataaagatttattgttttaatattt

SEQ ID NO: 139934 - DNA, 3385 bp, Homo sapiens
  Payload ID: 7445
  Gene Symbol: HERC4
  Gene Name: HECT and RLD domain containing E3 ubiquitin protein ligase 4
  Uniprot ID: Q5GLZ8
  ENST ID: ENST00000492996
  CDS Start-End: 249-581
agtctcttccccaactctccccacccctggtgctctccgccccgcttgcctcccgttcttccccgcccgctccatccgggtcgctgacggctgtctctggactggacagcagtggcgtccgcttttctctaaggaacccgataagaactccattttctgttgatgtggagacatagggtacctccaactttccggggtttcagaagagaattttttattgaaactggaagaccaaaataattacaagcatgttgtgctggggaaatgcatcctttgggcagctaggtttgggtggaattgatgaagaaattgtactagagcccagaaaaagtgacttctttataaataaaagggtccgagatgtaggatgtggactcagacatactgtgtttgttctggatgatggaacagtgtacacatgtggatgtaatgatctaggacagctaggtcatgaaaaatccagaaagaaaccagagtttcgctcttgtttcccaggccggagtgcaatggcgccatctcggctcaccgcaacctctgcctcccaggttcaagcaattctcctgcctcagcctcccgaatagctgggattacaggcgcccaccacaatgcctggctacttttcatattttaatggagatggggttttaccatgttggccaggctggtctcgaactcctgacctcaggtgatccgcctgccttggcctcccgaagtgctggaattacaggcatgagccactgctcctggcctaagatgttttttaaataatgtttttaactaaattttaagaatgtttttaactaaagttatttatatttggaataattcgttaatgatttgtgtcatttccccaacccctttttaaatttgtgaatttgaggactggattaaaagataaaaagttgttggatcttatttattttaaagtcttctggtaattgagcaagttggttatatttctgggacaatgtaataaacatagttcatttcccaggaggtttttgttttgttttgttttgtttcgttttgtttgagacagagtctcactctgttgcccaggctggaatgcagtggcacgatctctgctcactgcaacctccgcctcccaggttcaagcgattctcctgcctcggcctcccgagtaggtgggactataggggcgtgccaccatgcccgggtaattttttatatttttagtagggacggggtttcaccgtgttagccaggatggtcttgatatcctgaccttgtgatctgcccgccttggcctcccagagtgctgggattacaggcgtgagccaccgtgcccagctgacttcacaagaactttaaacttgtgtcagaaagcacatggaatggagggaactaagaattgtttctttacataggttggctttataaatatacatattccataactaataaggaatgaaggagaaagaggtagccttattaaggataaattattctcgagattcataataacctactggaggacttggcctgacaatgtagtgaatagatttaacctgtggcctattgaaaagaggtgtttctgttctggactttttagggaccacacagaaagatttaactgaattcctttattatactaaaggtgcagattatgttcatgttcatctctgttgtcttgtatatgtatgtccttttctatcactactggcttttctgaattatttccagagaagtgaatgtctgtttcactttcatgtttttttcttcataagaactttaaaatactttttaagctaatgtctcaatttttaaatttatagctaacaaatatatttaatcttcagtgcgctagaccaatccatttaaatgaattgttgtttttttatactttcaaattcagttctgaagattttaagtatgggaagtatacttttctttacaagatccttttcttactgtgtatctaatcataggtataatttggtgaccatggttatgttttgcacattgatttccatttgtttcatgttagaaacagtactaaactgttctgtgaccataatttgtaaataaagtggtgttctgtttaaaaacaagccctgttatctaaaaaacagttttttgtgttttacaacattctttcaaatggagtatctcatttaattctcacaacagttgtatgtagctaaggcaggtatcatggtccgcattttacagatgaggacactgaggttaaaagagattaagagactaatagggtcacttggctagcacatcttgagaccaccctaaatcttgtggtttttatccttaatctcacaaatcttttcctttgctacatttagaaggtaaaagaatatttgttcacctttgaggaagctggtttccatcagtattttattgtaattctgagggttttttattttttatatttttttgagatggggtcttattctgttgcttagggtagagtgcagtggcgtgataatagctcactgtagccttggactcctgggctcaagtgatcctcctgcctcagcttccccagtagttgggactacacttatgtgccaccatgcctggctaattttttttttttttttttttttttgaaacggagtcttgctctgttacccaggctggcgtgcagtggtgtgatctctgctcactgcagcctccacctcccaggttcaagtgattctcctgtctcagcctcccgagtagctgggactacaggtgtgtgccaccacacctggctaatttttttgtagttttagtagagacagggtttcaccatgttggccaggggggtctcgaactcctgacctcaggtgatctgcccacctcggtctcccaaagtgctgggattacaggcatgagccaccaggcctggccaatttttttatgtttgttagagaagggggtctccctatgttgcccagtctggtctcaaactccagtcctcaagctatcctcctgtcctggcttccccaaattgctgggatttatagggatgagctactgtggcagccaagaaaaatctttaaaaaattactatcttataactaagcttatacaatgaagacagcatattttattgtcttcccccttgtacacaaacttaaaaatcattttaagaactgataagaagatcgagagttctattttcaagatgtaatattgtaccaacaaaagctaaaaaattcaaatatgtatagtgtattactgaatggaagactaactcgattggcagagtttataggtaatagttttaatagtatgataaaatttattgtggtttatgttgaactctttttaaagatgatgagcattgattctttgttttccatatcctcgaatggtaatttctactgttgagtcattccaataaaagcattttggtcacata

SEQ ID NO: 139935 - DNA, 3593 bp, Homo sapiens
  Payload ID: 7445
  Gene Symbol: HERC4
  Gene Name: HECT and RLD domain containing E3 ubiquitin protein ligase 4
  Uniprot ID: Q5GLZ8
  ENST ID: ENST00000473533
  CDS Start-End: 249-602
agtctcttccccaactctccccacccctggtgctctccgccccgcttgcctcccgttcttccccgcccgctccatccgggtcgctgacggctgtctctggactggacagcagtggcgtccgcttttctctaaggaacccgataagaactccattttctgttgatgtggagacatagggtacctccaactttccggggtttcagaagagaattttttattgaaactggaagaccaaaataattacaagcatgttgtgctggggaaatgcatcctttgggcagctaggtttgggtggaattgatgaagaaattgtactagagcccagaaaaagtgacttctttataaataaaagggtccgagatgtaggatgtggactcagacatactgtgtttgttctggatgatggaacagtgtacacatgtggatgtaatgatctaggacagctaggtcatgaaaaatccagaaagaaaccagaaatattaaaagtttgtcagatatccagattgtacaggttgcttgtggttactatcattcacttgcactttctaaagcaagtgaagtcttctgttggggacagaataaatatggccaattgggtttaggtactgactgtaaaaagcaaacttcaccgcagctgcttaagtctttgcttggaatccctttcatgcaagttgcagcaggaggagcccatagttttgtactcaccctttctggagctatctttggatggggacgcaacaagtttggtcagctaggtcttaatgatgaaaatggaaggtggagtgtttacttttggagctggagggtatggtcagttgggccataattctaccagtcatgaaataaacccaaggaaagtttttgaacttatgggaagcattgtcactgagattgcttgtggacggcagcacacttctgcttttgttccttcatcaggacgaatttactcttttgggcttggtggtaatgggcagctgggaaccggttcaacaagcaacaggaaaagcccctttactgtaaaaggaaattggtacccctataatgggcagtgtctaccagatattgattctgaagaatatttctgtgtaaaaagaattttctcagggggagatcaaagcttttcacattactctagtccccagaactgtgggccaccagatgacttcagatgtcccaatccgacaaagcagatctggacagtgaatgaagctctaattcagaaatggctgagctatccttctggaaggtttcctgtggagatagccaatgagatagatggaacgttttcttcctctggttgcctaaatggaagttttttagctgttagcaatgatgatcactatagaacaggtaccagattttcaggggttgatatgaatgctgctaggcttttattccacaaacttatacaacctgatcatccgcagatatctcagcaggtggcagctagtttggaaaagaatcttattcctaaactgactagctccttacctgatgttgaagcattgaggttttatcttactctaccagaatgtcccctgatgagtgattccaacaatttcacaacaatagcaattccctttggtacagctcttgtgaacctagaaaaggcaccactgaaagtacttgaaaactggtggtcagtacttgaacctccactattcctcaagatagtagaactttttaaggaagttgtggtacatcttttgaaactctacaagatcggtattcccccttctgaaagaagaattttcaacagttttcttcatactgcattaaaggttttagaaatactacatagggtaaatgagaaaatgggacagattatacagtatgataaattttatatacatgaagtacaagaattgatagacataagaaatgattatatcaactgggtccaacagcaggcctatggaatgttggcagatatccctgttacaatctgtacatatccatttgtatttgatgcccaagcaaaaactactctgttacagaccgatgcagtcttacagatgcagatggctattgatcaggcccacaggcagaatgtctcctctctttttctcccagtgattgaatctgtgaatccctgcttaattctagtggtgcgtagagaaaatattgtaggagatgcaatggaagtccttaggaaaacaaagaacatagattacaagaagccactcaaggttatatttgttggagaagatgctgtggatgcaggaggggtgcgcaaagaatttttcttgctcatcatgagggaattattggatcctaaatacggcatgtttaggtattatgaagattccaggctcatttggttttctgataagacatttgaagacagtgatttgttccatttgattggtgttatctgtggcttagcaatttataattgtaccattgtggacctccattttcctttggctttatataagaaactactgaaaaagaagccatccttggatgatttgaaagaactaatgcctgatgttgggagaagcatgcaacagttactggattatccagaagatgacatagaggaaacattttgtcttaattttacgatcacagttgaaaactttggtgcaacagaagtgaaagagctggttctaaatggtgcagacacagctgttaacaaacaaaatcggcaagagtttgtcgatgcttatgtggattacatattcaataaatcagtggcttccttatttgatgcttttcatgcgggctttcataaggtctgtggaggaaaagtccttctgctctttcagcctaatgaactacaagcaatggtcattggaaatacaaattatgattggaaggaactggaaaagaatacagaatacaaaggggaatattgggcagaacatcctacgataaaaattttttgggaagtatttcacgaattaccattggaaaagaagaaacagtttctgttatttttgacaggtagtgatcgcattcctattcttggtatgaagagtctgaaactagtcatccagtccacaggaggtggtgaggagtatctcccagtttcccatacttgttttaatcttctggatcttccaaaatatacagaaaaagaaactctacgctctaaactgatccaagctattgatcacaatgaaggcttcagtttaatataactttggagttataactattcagtttagtgcaaaagcattaaactatttgtgtttttcttgtggtgatgaattcagcaaggtgacagaggtactattataattcttacttgcagaatgttcaatctacgagtgttcatggaagccaaaaaatattaaaggaaaatgaacaaactgttaatattattgtacagaaccatggattttttttgaccatcttctaataaacatagcaagtattatgaatacattaaagttttactaacatgaattttaagagtttgcatatttcagaaatgatctggtgtgagtgcatggaaatattgcttaatttttcttcaatcattgagtgaaaaacctttaactttggcctgcaatagtcatttgattattttttcattttgtaaataatgttaagttttgtaataaaatagttatgttctgatacca

SEQ ID NO: 139936 - DNA, 540 bp, Homo sapiens
  Payload ID: 7445
  Gene Symbol: HERC4
  Gene Name: HECT and RLD domain containing E3 ubiquitin protein ligase 4
  ENST ID: ENST00000506515
  CDS Start-End: 453-540
agtgtgctggaaagttctacagatttcgccatcagactatccattcctattcttgaaaaatctgcagtgctggagttatttgcaattcccccccgccaatctttaaataattgtctcagagatatagatagatatagattgcccacgggtgatttttttaatcccggttaccacttgtaataaaagaggttgaattttggagagaattgatatttaaattgcatgtttttttttctgtattataattatgcacattgatttagttttaaaattagtgaggttggaatgttagtattttgatttgaaatctgggatctttggaggtgatttaagattatggtttgataagaactccattttctgttgatgtggagacatagggtacctccaactttccggggtttcagaagagaattttttattgaaactggaagaccaaaataattacaagcatgttgtgctggggaaatgcatcctttgggcagctaggtttgggtggaattgatgaagaaattgtactagagcccagaaaaagtgact

SEQ ID NO: 139937 - DNA, 944 bp, Homo sapiens
  Payload ID: 7445
  Gene Symbol: HERC4
  Gene Name: HECT and RLD domain containing E3 ubiquitin protein ligase 4
  ENST ID: ENST00000513996
  CDS Start-End: 223-944
ctggtgctctccgccccgcttgcctcccgttcttccccgcccgctccatccgggtcgctgacggctgtctctggactggacagcagtggcgtccgcttttctctaaggaacccgataagaactccattttctgttgatgtggagacatagggtacctccaactttccggggtttcagaagagaattttttattgaaactggaagaccaaaataattacaagcatgttgtgctggggaaatgcatcctttgggcagctaggtttgggtggaattgatgaagaaattgtactagagcccagaaaaagtgacttctttataaataaaagggtccgagatgtaggatgtggactcagacatactgtgtttgttctggatgatggaacagtgtacacatgtggatgtaatgatctaggacagctaggtcatgaaaaatccagaaagaaaccagagcaggttgttgccctggatgcccaaaatattgtagctgtttcatgtggagaagctcatacgttagcgctaaatgacaaaggccaggtgtatgcttggggtctcgattctgatggacagcttggcctggtaggatcagaggaatgcatcagagtacccagctgcttcccgaaaatcatgtgtgtcgactctctggtcagaatttgctccggactctcttatggcagaatcagaaatattaaaagtttgtcagatatccagattgtacaggttgcttgtggttactatcattcacttgcactttctaaagcaagtgaagtcttctgttggggacagaataaatatggccaattgggtttaggtactgactgtaaaaagcaaacttcaccgcagctgcttaagtctttgcttggaatccctttcatgcaagttgcagcaggaggagcccatagttttgtactcaccctttctggagctatctttggatggggacgcaa

SEQ ID NO: 139938 - DNA, 3513 bp, Homo sapiens
  Payload ID: 7446
  Gene Symbol: HERC5
  Gene Name: HECT and RLD domain containing E3 ubiquitin protein ligase 5
  Uniprot ID: Q9UII4
  ENST ID: ENST00000264350
  CDS Start-End: 154-3228
tcagtagctgaggctgcggttccccgacgccacgcagctgcgcgcagctggttcccgctctgcagcgcaacgcctgaggcagtgggcgcgctcagtcccgggaccaggcgttctctcctctcgcctctgggcctgggaccccgcaaagcggcgatggagcggaggtcgcggaggaagtcgcggcgcaacgggcgctcgaccgcgggcaaggccgccgcgacccagcccgcgaagtctccgggcgcacagctctggctctttcccagcgccgcgggcctccaccgcgcgctgctccggagggtggaggtgacgcgccaactctgctgctcgccggggcgcctcgcggtcttggaacgcggcggggcgggcgtccaggttcaccagctgctcgccgggagcggcggcgcccggacgccgaaatgcattaaattaggaaaaaacatgaagatacattccgtggaccaaggagcagagcacatgctgattctctcatcagatggaaaaccatttgagtatgacaactatagcatgaaacatctaaggtttgaaagcattttacaagaaaaaaaaataattcagatcacatgtggagattaccattctcttgcactctcaaaaggtggtgagctttttgcctggggacagaacctgcatgggcagcttggagttggaaggaaatttccctcaaccaccacaccacagattgtggagcacctcgcaggagtacccttggctcagatttctgccggagaagcccacagcatggccttatccatgtctggcaacatttattcatggggaaaaaatgaatgtggacaactaggcctgggccacactgagagtaaagatgatccatcccttattgaaggactagacaatcagaaagttgaatttgtcgcttgtggtggctctcacagtgccctactcacacaggatgggctgctgtttactttcggtgctggaaaacatgggcaacttggtcataattcaacacagaatgagctaagaccctgtttggtggctgagcttgttgggtatagagtgactcagatagcatgtggaaggtggcacacacttgcctatgtttctgatttgggaaaggtcttttcctttggttctggaaaagatggacaactgggaaatggtggaacacgtgaccagctgatgccgcttccagtgaaagtatcatcaagtgaagaactcaaacttgaaagccatacctcagaaaaggagttaataatgattgctggagggaatcaaagcattttgctctggataaagaaagagaattcatatgttaatctgaagaggacaattcctactctgaatgaagggactgtaaagagatggattgctgatgtggagactaaacggtggcagagcacaaaaagggaaatccaagagatattttcatctcctgcttgtctaactggaagttttttaaggaaaagaagaactacagaaatgatgcctgtttatttggacttaaataaagcaagaaacatcttcaaggagttaacccaaaaggactggattactaacatgataaccacctgcctcaaagataatctgctcaaaagacttccatttcattctccaccccaagaagctttagaaattttcttccttctcccagaatgtcctatgatgcatatttccaacaactgggagagccttgtggttccatttgcaaaggttgtttgtaaaatgagtgaccagtcttcactggttctggaagagtattgggcaactctgcaagaatccactttcagcaaactggtccagatgtttaaaacagccgtcatatgccagttggattactgggatgaaagtgctgaggagaatggtaatgttcaagctctcctagaaatgttgaagaagctgcacagggtaaaccaggtgaaatgtcaactacctgaaagtattttccaagtagacgaactcttgcaccgtctcaatttttttgtagaagtatgcagaaggtacttgtggaaaatgactgtggacgcttcagaaaatgtacaatgctgcgtcatattcagtcactttccatttatctttaataatctgtcgaaaattaaactactacatacagacacacttttaaaaatagagagtaaaaaacataaagcttatcttaggtcggcagcaattgaggaagaaagagagtctgaattcgctttgaggcccacgtttgatctaacagtcagaaggaatcacttgattgaggatgttttgaatcagctaagtcaatttgagaatgaagacctgaggaaagagttatgggtttcatttagtggagaaattgggtatgacctcggaggagtcaagaaagagttcttctactgtctgtttgcagagatgatccagccggaatatgggatgttcatgtatcctgaaggggcttcctgcatgtggtttcctgtcaagcctaaatttgagaagaaaagatacttcttttttggggttctatgtggactttccctgttcaattgcaatgttgccaaccttcctttcccactggcactgtttaagaaacttttggaccaaatgccatcattggaagacttgaaagaactcagtcctgatttgggaaagaatttgcaaacacttctggatgatgaaggtgataactttgaggaagtattttacatccattttaatgtgcactgggacagaaacgacacaaacttaattcctaatggaagtagcataactgtcaaccagactaacaagagagactatgtttctaagtatatcaattacattttcaacgactctgtaaaggcggtttatgaagaatttcggagaggattttataaaatgtgcgacgaagacattatcaaattattccaccccgaagaactgaaggatgtgattgttggaaatacagattatgattggaaaacatttgaaaagaatgcacgttatgaaccaggatataacagttcacatcccaccatagtgatgttttggaaggctttccacaaattgactctggaagaaaagaaaaaattccttgtatttcttacaggaactgacagactacaaatgaaagatttaaataatatgaaaataacattttgctgtcctgaaagttggaatgaaagagaccctataagagcactgacatgtttcagtgtcctcttcctccctaaatattctacaatggaaacagttgaagaagcgcttcaagaagccatcaacaacaacagaggatttggctgaccagcttgcttgtccaacagccttattttgttgttgttatcgttgttgttgttgttgttgttgttgtttctctactttgttttgttttaggcttttagcagcctgaagccatggtttttcatttctgtctctagtgataagcaggaaagagggatgaagaagagggtttactggccggttagaacccgtgactgtattctctcccttggatacccctatgcctacatcatattccttacctcttttgggaaatatttttcaaaaataaaataaccgaaaaattaa

SEQ ID NO: 139939 - DNA, 2243 bp, Homo sapiens
  Payload ID: 7446
  Gene Symbol: HERC5
  Gene Name: HECT and RLD domain containing E3 ubiquitin protein ligase 5
  ENST ID: ENST00000508159
  CDS Start-End: 111-2099
aaagcttagtggtgacctcaagtaacaaaatctactcatttcttgtaggaaaacgaacagagttatttccttaagcagcataaagccatacctcagaaaaggagttaataatgattgctggagggaatcaaagcattttgctctggataaagaaagagaattcatatgttaatctgaagaggacaattcctactctgaatgaagggactgtaaagagatggattgctgatgtggagactaaacggtggcagagcacaaaaagggaaatccaagagatattttcatctcctgcttgtctaactggaagttttttaaggaaaagaagaactacagaaatgatgcctgtttatttggacttaaataaagcaagaaacatcttcaaggagttaacccaaaaggactggattactaacatgataaccacctgcctcaaagataatctgctcaaaagacttccatttcattctccaccccaagaagctttagaaattttcttccttctcccagaatgtcctatgatgcatatttccaacaactgggagagccttgtggttccatttgcaaaggttgtttgtaaaatgagtgaccagtcttcactggttctggaagagtattgggcaactctgcaagaatccactttcagcaaactggtccagatgtttaaaacagccgtcatatgccagttggattactgggatgaaagtgctgaggagaatggtaatgttcaagctctcctagaaatgttgaagaagctgcacagggtaaaccaggtgaaatgtcaactacctgaaagtattttccaagtagacgaactcttgcaccgtctcaatttttttgtagaagtatgcagaaggtacttgtggaaaatgactgtggacgcttcagaaaatgtacaatgctgcgtcatattcagtcactttccatttatctttaataatctgtcgaaaattaaactactacatacagacacacttttaaaaatagagagtaaaaaacataaagcttatcttaggtcggcagcaattgaggaagaaagagagtctgaattcgctttgaggcccacgtttgatctaacagtcagaaggaatcacttgattgaggatgttttgaatcagctaagtcaatttgagaatgaagacctgaggaaagagttatgggtttcatttagtggagaaattgggtatgacctcggaggagtcaagaaagagttcttctactgtctgtttgcagagatgatccagccggaatatgggatgttcatgtatcctgaaggggcttcctgcatgtggtttcctgtcaagcctaaatttgagaagaaaagatacttcttttttggggttctatgtggactttccctgttcaattgcaatgttgccaaccttcctttcccactggcactgtttaagaaacttttggaccaaatgccatcattggaagacttgaaagaactcagtcctgatttgggaaagaatttgcaaacacttctggatgatgaaggtgataactttgaggaagtattttacatccattttaatgtgcactgggacagaaacgacacaaacttaattcctaatggaagtagcataactgtcaaccagactaacaagagagactatgtttctaagtatatcaattacattttcaacgactctgtaaaggcggtttatgaagaatttcggagaggattttataaaatgtgcgacgaagacattatcaaattattccaccccgaagaactgaaggatgtgattgttggaaatacagattatgattggaaaacatttgaaaagaatgcacgttatgaaccaggatataacagttcacatcccaccatagtgatgttttggaaggctttccacaaattgactctggaagaaaagaaaaaattccttgtatttcttacaggaactgacagactacaaatgaaagatttaaataatatgaaaataacattttgctgtcctgaaagttggaatgaaagagaccctataagagcactgacatgtttcagtgtcctcttcctccctaaatattctacaatggaaacagttgaagaagcgcttcaagaagccatcaacaacaacagaggatttggctgaccagcttgcttgtccaacagccttattttgttgttgttatcgttgttgttgttgttgttgttgttgtttctctactttgttttgttttaggcttttagcagcctgaagccatggtttttcatttctgtctctagtgataagcag

SEQ ID NO: 139940 - DNA, 15137 bp, Homo sapiens
  Payload ID: 7447
  Gene Symbol: HERC1
  Gene Name: HECT and RLD domain containing E3 ubiquitin protein ligase family member 1
  Uniprot ID: Q15751
  ENST ID: ENST00000443617
  CDS Start-End: 89-14674
cctctgcggagccgggctcgggtcgccggagccgcgccccaccccgccagctccagagccacgactaatggctgaaggataaatcaacatggcaactatgattccaccagtgaagctgaaatggcttgaacacttgaacagctcctggattacagaggacagtgaatctattgctacaagagagggagttgctgttctgtattctaaactggttagcaataaggaagtagtacctttgccccaacaagttttatgcctcaaaggaccacagttgccagactttgaacgtgagtctctttcaagtgatgagcaggaccactatttggatgcccttcttagcagccagctagcattggcaaagatggtatgttcagattccccatttgccggggcacttagaaaacgactgcttgtactccagcgtgtcttttatgcactttctaataaataccatgacaaaggcaaggtgaagcagcagcagcattctccggagagcagttctggttcagcagatgtccattctgttagtgaacgcccccggtcaagcactgatgcacttatagaaatgggtgttcgaactggtctaagtttattatttgcgcttctaagacaaagttggatgatgcctgtgtcaggacctggtctcagtctttgcaacgatgtcattcatactgcaattgaagttgtgagctctttgccaccattatcattagcaaatgaaagcaagattcctcctatgggcttggactgcttatcgcaagtaacaacatttcttaaaggagtcactattcctaattctggggcagacactttaggtcgtagattagcttctgagttgctgcttggtttggcagctcaacgaggctcattgcgatatcttcttgaatggatagaaatggctttgggggcttcggcagttgtacacaccatggagaaaggcaaactactctcaagccaggaaggaatgatcagctttgactgctttatgaccatattaatgcagatgaggcgttctttgggttcatctgctgatcggagtcagtggagagaaccaaccagaacatcggatggcttgtgctccctttacgaggcagcattatgtctctttgaagaggtttgcagaatggcttctgattattcgagaacatgtgctagcccagatagcattcagactggtgatgctcccattgtctccgaaacctgtgaggtttatgtttgggggagcaatagcagccatcagttggtagaaggtacacaggagaaaatactgcaacccaaactggctcctagtttctctgatgcacagaccattgaagctggacagtactgcacttttgtcatttctacggatggctctgttagagcttgcgggaaaggcagctatgggagactgggccttggagactccaataatcagtcaactttaaaaaagttaacattcgagcctcacagatccattaaaaaggtttcatcttctaaaggatctgatggtcacactttagcctttacgacagaaggagaagtcttcagttggggagatggtgattatgggaaactggggcatggaaatagttcaacacagaaatatcccaagcttattcagggacctctacaaggaaaggtagttgtttgtgtgtcagctggatacagacatagtgctgctgtcacagaggatggggaattatacacatggggtgaaggagactttggaagattaggtcatggtgacagcaatagtcgtaacattccaacattagtaaaagacatcagcaatgtaggagaggtttcttgtggcagttcacatactattgctctgtctaaagatgggagaactgtatggtcttttggaggaggagacaatggtaaacttggtcatggtgataccaacagagtgtataaacctaaagttattgaagctttacaaggaatgttcattcgcaaagtttgtgctgggagccagtcttcacttgctttgacatcaacagggcaggtctatgcttggggctgtggagcttgtctaggttgtggttcttcagaagctactgctttgagacccaagcttattgaagaactggctgccacaagaatagttgatgtttctattggagacagtcattgtttggctctttctcatgataatgaagtttatgcctggggcaataactcaatggggcaatgtggtcagggaaattccacaggtcctattactaaaccaaagaaagtgagtggcttagatggcatagctattcagcagatttcggctggaacatcacatagtctggcatggactgctcttcctagggacagacaagttgttgcatggcaccgaccttattgtgtagatcttgaagagagtaccttctcacacctgcgttcttttcttgagagatactgtgataaaataaacagtgagattcccccactccctttcccttcatcaagagaacaccacagttttctcaagctgtgcctgaagctactttcaaatcaccttgctcttgcacttgcgggaggggtagctaccagcattctcgggaggcaggcaggtccacttcgaaatttgctcttcagactgatggactcaactgtcccagatgaaatccaagaggtggtaattgaaactttatcagtgggagcaaccatgctgttacctccattacgagaacggatggaattacttcattctcttttacctcaaggacctgatagatgggaaagcttatctaaaggacagagaatgcaactggatatcatcctgacaagtttgcaagatcatacccacgtagcctccctacttggctatagttcaccctctgatgctgctgacctatcttctgtgtgtactggctacggaaatctgtcagatcaaccttacggcactcagagctgccatccagatacccacctggctgaaattttgatgaagaccctcttaagaaatttaggattttatacagatcaagcatttggagagctagaaaagaatagtgataaatttctacttggaacatcatcatcagaaaacagtcagcctgctcatcttcatgaactgctatgttcactacagaaacagctgctggcattttgccatatcaataacattagtgagaactcaagcagtgtggcattgcttcataaacatcttcagcttttgttgcctcatgccacagatatttattcacgttctgcaaatttgctcaaagaaagtccttggaatggcagtgttggagaaaaattaagagatgtgatatacgtctcagctgctggcagtatgctctgccagattgttaactccctgctgttactccctgtgtcagtggctcggcctttattgagttacctcctcgacttgttgccacctcttgattgccttaatagactcctgccagctgctgatcttttagaagaccaggagttacagtggcctcttcatggagggccagaactaattgatcctgctggtctgccattacctcagccagctcagtcctgggtatggcttgtggatctagaaagaacaattgctctccttattgggcggtgtcttggtggcatgcttcagggctcccctgtgtctccagaggaacaggacactgcatattggatgaaaacgccactgttcagtgacggtgtagaaatggacactcctcaattggataaatgtatgagttgcctgttagaagtagcactttctggaaatgaagaacagaagccttttgattataaattgcggcctgaaattgctgtctatgtagacttggcattgggttgttctaaagagcctgcccgaagcctttggatcagcatgcaggactatgctgttagtaaagattgggacagtgcaactttaagtaatgagtcactcttggacactgtgtctagatttgttcttgcagctcttctgaaacacacaaatttacttagtcaagcatgtggagaaagccgatatcaacctggtaaacacttatcagaagtgtaccgttgtgtatacaaagttcgaagtcgtttacttgcttgcaagaaccttgaacttattcaaacaaggtcatcatcacgggacagatggatatcagaaaaccaggactctgcagatgttgatcctcaggagcattcatttactcgaactattgatgaagaagctgaaatggaagaacaggctgagagagaccgggaagaggggcatccggagccagaggatgaagaggaggaacgggaacatgaagtgatgacagctggcaaaatctttcagtgtttcctctcagcccgtgaagtagctcgtagccgagaccgagatagaatgaacagtggggcagggtctggggctcgagctgatgatccacctcctcagtctcagcaagagcgaagggtcagcacagaccttcctgagggtcaggatgtgtacactgctgcatgcaactccgtgatccatcggtgtgccctgttaatattaggagtaagtcctgtgatagatgagcttcagaagcgaagagaagaaggacagttgcagcaaccttcaacaagtgcctctgaagggggtggacttatgaccaggagtgaaagtcttactgcagagagccggctagtccacacaagcccaaattatagactgatcaaatcgaggagtgaatctgatttgtctcagcctgaatcagatgaagagggttacgcactgagtggcagacgaaatgttgatttggatttggcagcatctcacagaaagagaggtcctatgcacagtcaattggaatccctgagtgactcttgggctcgcctgaaacatagcagagactggttatgcaactcctcctattcctttgagtcagattttgatcttaccaagtctttgggagttcacactttgattgaaaatgttgtaagctttgtgagtggagatgtggggaatgccccaggttttaaagagccagaggaaagtatgtctacaagtccccaggcctccatcattgcaatggaacagcagcagttaagggcagaacttcgtttagaggcacttcatcagatcctcgttctattgtctgggatggaagaaaaaggtagcatctcactggcaggaagcagattgagttcaggcttccagtcctccacactactcacgtctgtgaggctgcagttcctagcagggtgttttggtttaggcactgttggacacacaggaggcaagggagagagtggccgattgcatcactatcaggatgggatcagagcagctaagagaaatattcagattgaaatccaggtagctgtgcataaaatttatcaacagttgtctgctaccctggaaagagccctgcaagcaaacaagcatcacattgaagcccagcaacgtctgcttctggttacagtttttgccctaagtgttcattatcaaccagtagatgtttctttggcaatttccactggtctgctaaacgtattgtcacagttgtgtggtacagacaccatgctaggacagcccctgcagttgttgccaaagacgggtgtttcccagcttagcacagctttgaaagtggccagtacaaggttgctccagattctagccatcactactgggacctatgctgataaactgagtcccaaagtagttcaatccttgttggatctactctgtagtcagttgaagaatttattgtcccaaactggtgtactacatatggcctctttcggagaaggggagcaagaagacggtgaagaagaagaaaaaaaagttgactccagtggagaaactgagaagaaagatttcagagctgctcttaggaaacaacatgcagccgaactccatctaggggattttttagtttttcttcgcagagttgtatcttcaaaagcaattcaatcaaaaatggcttccccaaagtggaccgaagtgcttctaaatatagcatctcagaaatgttcttcaggtatccctctggttggtaacttaagaacaaggctccttgcacttcatgtccttgaagctgtgctgccagcttgtgaatctggtgtagaagatgatcaaatggcccagattgttgagcgcttattttcccttctctctgattgtatgtgggagacacccattgctcaggccaaacatgctattcagataaaggaaaaagaacaagaaataaaactacagaagcagggcgagttggaagaagaagatgagaatcttcctatccaagaagtatcctttgacccggagaaagctcagtgttgcctagtggagaatggacagattttaactcacggcagtggagggaaaggatatggattggcatctacaggagtaacttctgggtgctatcagtggaagttttatattgtgaaggaaaacagaggtaatgaaggcacgtgtgttggagtttctcgctggccagtacatgactttaatcaccgcactacctcggatatgtggctctatagggcctacagtggtaacctctatcacaatggagaacagactctcacattgtccagctttactcaaggagatttcattacctgtgtgttagacatggaagccaggaccatttcttttgggaaaaatggagaggaacccaaattagcttttgaagatgtggatgcagcagagttgtacccatgtgtgatgttctatagtagcaatccaggggaaaaggtgaaaatttgtgatatgcagatgcgtggcacaccccgagacttacttccaggagaccctatttgtagtccagtagcagcagtgctggctgaggccactattcagctcatccgtatccttcaccgaacagaccgttggacttactgcattaacaaaaaaatgatggaaaggcttcacaaaattaagatatgtattaaagagtcaggtcagaagctaaagaaaagccgctcggttcagagccgagaggaaaatgaaatgagagaggagaaggagagcaaagaggaagagaaaggtaaacatactaggcatggcctcgctgacctctcagagctgcagctgaggactctttgcatagaggtgtggcccgtgctggctgtgataggaggagttgatgctggtcttagagttggaggtcggtgtgttcacaagcaaactgggcgccatgccacgctgctgggagtggtcaaagagggcagcacgtctgccaaggtccaatgggatgaagcagaaattactatcagcttcccaactttttggtcgcctagtgatactccattgtataatctggaaccctgtgaaccattgccgtttgatgtggcgcgattccgaggcctgacggcttctgtgctgctggacctaacatatctcactggcgttcatgaagacatgggcaaacagagcaccaaacgacatgaaaagaaacaccgacatgaatccgaggagaaaggggatgttgagcagaaacctgagagtgaatccgctttagatatgcgaacaggcctaacatctgatgacgtcaaaagtcagagtaccacaagctccaaatcagaaaatgaaatcgcttcattttctttagatccaacactgccaagtgtggaatcccaacatcaaataacagaagggaaaagaaaaaatcatgaacacatgtccaaaaaccatgatgtagcccagtcagaaatcagagcagtccagctgtcctatctttacctcggtgctatgaagtcacttagtgcccttcttggctgtagtaaatatgctgagctgttgctgataccaaaagttctggctgaaaatggccacaactcagactgtgcaagttctccagttgttcatgaagacgtggagatgcgagcagccctgcagttcttgatgcgacacatggtgaagcgagcagtcatgcggtcacccataaagagagcattgggattagctgatctggaacgagcgcaagccatgatctataaattagtggttcatgggcttttggaagaccagtttgggggcaaaattaagcaagagattgatcaacaagctgaagaaagtgaccctgcccagcaggcacagacaccagttactactagcccatcagcctcaagcacgacctcctttatgagcagctctctggaggacaccacaactgccaccactccagtcactgacacagaaacagtgcctgcatccgagtccccgggagtgatgcctcttagtcttctcaggcaaatgttctctagttacccaactaccactgtacttcccacacgtcgggcacagactcctccaatatcttcgttaccaacctctccttctgatgaagtaggaaggaggcaaagtttaacttctcctgattcccagtcagcaaggccagctaaccgcacagccttgtcagacccaagcagtagactttcaacttctcctcctcctccagcaattgcagttcccttgctggaaatggggttctctcttcggcagattgccaaagccatggaagctacaggtgctaggggagaggctgatgcccagaatatcactgtccttgccatgtggatgatagagcaccctgggcatgaggatgaagaggagccccagtcgggcagcacagcagactctaggcctggagcagccgttctaggcagtggcgggaagtcaaatgatccctgttatttgcagtcacctggagacataccatcagctgatgctgctgaaatggaggaaggttttagtgaaagccctgataatttggatcatacagagaatgcagcttctggaagtggaccatcagctagaggtcgctcagcggtaacaagaagacacaagtttgacttagctgctcgcacactgctagcaagagcagcgggattataccgctctgtgcaggcccacaggaatcaaagtcggagagaaggaatatctttgcagcaagacccaggggcgttgtatgactttaatttagatgaggaattggaaattgatcttgatgatgaggcgatggaagctatgtttggacaagacctgaccagtgacaatgatattctgggaatgtggatcccagaggtactggattggcctacctggcatgtttgtgagtctgaagacagggaagaagtggtggtgtgtgaactgtgtgaatgcagcgtcgtcagcttcaatcagcacatgaagagaaaccatccaggctgtgggcgcagtgcaaaccgccagggctatcgcagcaatggttcctatgtggatggctggtttggcggtgaatgtgggagtggaaatccgtactacctgttatgtggcacctgcagggagaagtacttagccatgaagaccaaatctaagtcaacaagttctgaaaggtacaagggacaagctccagatctaattggcaagcaagacagtgtgtatgaagaagactgggacatgttggatgttgatgaagatgaaaagctaactggtgaagaagaatttgaattacttgctggaccgcttggtttaaatgaccggcgcattgtaccagaaccagttcagttccctgacagcgatccactgggagcatcagtagcaatggtcacagccaccaacagtatggaagagactctgatgcaaataggttgccatggctccgtagaaaagagctcctctgggagaataacgttaggagagcaggcagctgccctagcaaaccctcatgaccgtgtggtggctttaaggagagtgactgctgctgctcaggttcttctggccagaaccatggtcatgagagcgctgtctcttctctcagtcagtggttccagttgtagcctggctgctggtcttgagtctctggggctaacagatatccgaacgctagttcgattaatgtgcttggcagcagcagggagagctggcctctccaccagcccttctgccatggctagcacctcagaacgatcacgaggtgggcatagcaaggctaacaagcctatctcttgcctggcctatttgagcacagcagtgggatgtctggcatcaaatgctcctagtgctgccaaactgcttgtacagttgtgtacacagaacttgatttctgctgcaacaggtgtaaatctaaccacagttgatgactcaattcagcgaaagtttctacccagctttctccgaggaattgctgaagagaacaagcttgtgacctccccaaactttgttgtaacacaggcccttgtggcattgctagcagacaaaggggccaaactaagacctaactatgataagtcagaagttgaaaagaaaggccctctggagttggctaatgccctggcagcctgctgcctctcctccaggctgtcctcacagcatcggcaatgggcagctcagcaactcgtgcgcactcttgctgcacacgaccgtgacaaccaaactactctgcagacacttgctgatatgggaggagatcttagaaaatgctcctttatcaaattggaggctcatcagaacagagtaatgacatgtgtttggtgtaataaaaaaggtcttttggctacaagtggcaatgatggcaccatccgcgtatggaatgttaccaagaagcaatattcactgcaacagacctgtgtgttcaacagattggaaggggatgctgaggaaagcctgggatcacccagtgatccaagtttctcaccagtttcctggagtatcagtggcaaatatctagcaggcgctttggaaaagatggtgaatatctggcaagttaatggaggaaaaggattagtagatattcagcctcattgggtatctgccctggcttggccagaagagggtccggctacagcctggtcaggagagtctccagaattgttgttggtgggacggatggatggatctctgggactgattgaagttgttgatgtgtccaccatgcaccgtcgagaattggagcattgctatcgaaaggatgtgtctgttacttgcattgcatggttcagtgaagacagaccatttgcagtgggatattttgatggaaaactgttactgggaacaaaggaaccacttgagaaaggaggcattgttctaattgatgcacataaggatactcttattagcatgaagtgggaccctacaggtcatattcttatgacatgtgccaaagaagacagtgtgaaactctggggctctatttcgggatgctggtgctgtctacattcactctgccatccatctattgtaaatggcattgcttggtgccgccttccagggaaaggatccaagttgcagttactgatggctactggctgtcagagtggcttagtatgtgtttggcgcattcctcaagatactacacagaccaatgtgactagtgcagaaggatggtgggagcaggaatcaaattgccaggatggatataggaaatcatcaggagccaagtgtgtttatcagctgcggggacacatcactcctgttcggactgttgcctttagttctgatgggttggccctggtgtctggtggactaggtgggctcatgaacatttggtctttaagggatggctctgtcttgcaaactgttgtgataggctctggagctattcagaccacagtatggattccagaagttggagtagctgcttgctcaaatagatcaaaggatgttttggtcgtgaattgtacagcagaatgggcagctgccaatcatgttttggcaacctgtaggacagcattgaaacagcagggtgttctgggattgaacatggctccctgcatgagagcatttttggagcggctccccatgatgcttcaggagcagtatgcctatgaaaagcctcatgtggtttgtggtgaccaacttgttcatagcccctatatgcaatgcttggcttcccttgctgtgggacttcatctggatcagctgttgtgtaaccctccagtgccaccacaccaccagaactgtctccctgaccctgcatcctggaatccaaatgaatgggcctggttagaatgtttctcaaccactataaaagctgccgaagccctgaccaatggagcccagtttccagaatcttttaccgttccagatctagaacctgttccagaggatgaacttgtatttctaatggataacagtaaatggattaacggcatggatgaacaaattatgtcttgggcaacttccagacctgaggactggcacctgggaggtaaatgtgatgtctacttatggggtgctggtaggcatggacagctggcagaagctggaagaaatgtaatggtacctgcagcagctccctcattctcacaggcccaacaggtcatttgtggtcagaattgtacctttgtcatccaggccaatggcacagtgttggcttgtggggaaggaagttatggcagattaggacaaggaaattcagatgaccttcatgtgctgacagttatttcagccttacaaggctttgtggtgacccagctggtgacttcctgtggttctgatgggcactctatggccctaactgaaagtggtgaggtctttagctggggagatggtgactatggtaaacttggccatgggaacagcgacaggcagcggcggcccaggcagatcgaggccttacaaggagaagaagtggtgcagatgtcttgtggcttcaagcactcagcagtggtcacttcagatggcaaactgttcacctttgggaatggtgactatggtcgtctgggtcttggaaatacctctaacaaaaaacttccagagagagtgactgcactggagggatatcagattggacaggtggcctgtggattaaaccacactttggcagtgtcagcagatggttccatggtgtgggcttttggagatggagactatggaaaactaggcttaggaaattccactgcaaaatcttcacctcagaaaattgacgtcctttgtggaattggaataaaaaaggttgcttgtggaactcagttttctgttgctttgaccaaagatggtcatgtgtatacctttggtcaagatcgcctgataggcttgccagaggggcgtgctcgcaatcacaatcgaccgcaacaaatccctgtcctggctggagtaatcatagaagatgtggcagttggagctgaacacacacttgctttggcatcaaatggagatgtgtatgcctgggggagcaattcagaagggcagctcggcttaggccataccaaccatgttcgagaaccaaccctggtaacaggtctgcaagggaaaaatgttcggcagatctcggctggccgctgccacagtgctgcatggacagcaccacctgtcccaccaagagcaccaggtgtgtcagtacctctgcagctgggcctgcctgacacagtgcccccccagtatggggcgctgagagaagtcagcattcacacggtgcgggccaggctccggctgctctaccacttctctgacctcatgtactcatcctggagactgctgaaccttagccccaacaaccagaacagcacatcccattataatgctggaacttggggcattgtacagggacaacttcggcctttgttagccccaagagtctacactctgccaatggtgcgctccataggaaaaaccatggttcaaggcaaaaactatggacctcagataactgtaaagaggatatcaaccagaggacggaagtgtaagcctatttttgtccaaatagcgagacaagtagttaagctgaatgcttcagacctccgcctgccttcccgagcgtggaaggttaagctggttggagaaggggctgatgatgctggaggagtgtttgatgacaccatcacagagatgtgccaggaacttgaaactggtattgttgaccttcttataccctctcccaatgccaccgcagaagtgggttacaatagggacaggttcctttttaacccttctgcctgcctcgatgaacacttaatgcagtttaagtttttaggaattttaatgggggttgccattcgcacaaagaagcctctggacctccacttggcccctctggtgtggaagcagctgtgctgtgtcccactcaccctagaggacctggaggaggtggatctgctctacgtgcagactctcaacagcattcttcacattgaagacagtgggattaccgaggagagtttccatgagatgattcctcttgattcttttgttggccagagtgctgatggcaaaatggttcctataatccctggtggaaatagtatcccactcacattttccaacaggaaggaatatgtggagagggccattgaatatcgacttcatgagatggacagacaggtggctgcagtccgagaagggatgtcctggattgttcctgtgccgctgctgtccctcctcacagcaaaacaactggagcagatggtgtgtgggatgcccgagatctctgtggaagtcttgaagaaagtggtgcggtaccgtgaggtggatgagcagcatcagctggtgcagtggttctggcacacgctggaagagttctccaatgaggagcgggtgcttttcatgaggtttgtgtcaggaagatctcgactaccagccaacactgctgacatttctcagagatttcaaatcatgaaggttgataggccttacgacagtctgcctacctcacagacctgcttcttccagctgaggctgcccccgtactccagccagctggtcatggccgagcgcctgcgctatgccatcaacaactgccgctcaatcgacatggacaactacatgctctcgagaaacgtggacaacgccgagggctccgacactgactactgaccgtgcgggtgctctcaccctcccttctctccctcaataatgctcacttctgatttgatgttgatatacttttatggtaactacatagatgttataagaacataaaccaacattataaacaatggccacatttagttactctaaatgtaacaaagaaattagatgtttttatttttctgtgattgtacaaaaacaacaaaaacgaagtgctctcagtcaggtttttccctccatatttttggtcacttttgataagtttgcatgaaaccattttggtgcatttttagttgggaatggtacatttttgtaaatccacccagtgaacatgaaattgtacattgtgtataattgttcattagaaaggacagttttacatgaatattcatatatttattttgttttaatttgaattgcctgttcagggttccttatgcagagaaataaagcagattcaggaattgga

SEQ ID NO: 139941 - DNA, 495 bp, Homo sapiens
  Payload ID: 7447
  Gene Symbol: HERC1
  Gene Name: HECT and RLD domain containing E3 ubiquitin protein ligase family member 1
  ENST ID: ENST00000559715
  CDS Start-End: 1-495
taggaggagttgatgctggtcttagagttggaggtcggtgtgttcacaagcaaactgggcgccatgccacgctgctgggagtggtcaaagagggcagcacgtctgccaaggtccaatgggatgaagcagaaattactatcagtgatactccattgtataatctggaaccctgtgaaccattgccgtttgatgtggcgcgattccgaggcctgacggcttctgtgctgctggacctaacatatctcactggcgttcatgaagacatgggcaaacagagcaccaaacgacatgaaaagaaacaccgacatgaatccgaggagaaaggggatgttgagcagaaacctgagagtgaatccgctttagatatgcgaacaggcctaacatctgatgacgtcaaaagtcagagtaccacaagctccaaatcagaaaatgaaatcgcttcattttctttagatccaacactgccaagtgtggaatcccaacatcaaataacag

SEQ ID NO: 139942 - DNA, 539 bp, Homo sapiens
  Payload ID: 7447
  Gene Symbol: HERC1
  Gene Name: HECT and RLD domain containing E3 ubiquitin protein ligase family member 1
  ENST ID: ENST00000560897
  CDS Start-End: 1-81
aattcagatgaccttcatgtgctgacagttatttcagccttacaagactttaaaggacatcttcatcagagttctttgtgacttggagagagaacacctttggagaaaccactgtacaagcccccggcttgctcattaactgaactcataatgactctgaagcctacaaagagagcaccgacggtttttttaggctttgtggtgacccagctggtgacttcctgtggttctgatgggcactctatggccctaactgaaagtggtgaggtctttagctggggagatggtgactatggtaaacttggccatgggaacagcgacaggcagcggcggcccaggcagatcgaggccttacaaggagaagaagtggtgcagatgtcttgtggcttcaagcactcagcagtggtcacttcagatggcaaactgttcacctttgggaatggtgactatggtcgtctgggtcttggaaatacctctaacaaaaaacttccagagagagtgactgcactggagggatatcagattggacaggtggcctg

SEQ ID NO: 139943 - DNA, 647 bp, Homo sapiens
  Payload ID: 7447
  Gene Symbol: HERC1
  Gene Name: HECT and RLD domain containing E3 ubiquitin protein ligase family member 1
  ENST ID: ENST00000560462
  CDS Start-End: 212-647
caaaaataaaggacgcgaccgccgcagcctctgcggagccgggctcgggtcgccggagccgcgccccaccccgccagctccagagccacgtacgaaatggggtttcaccgtgttagccaggatggtctcaatctcctgacctcgtgatccgcccacctcggcctcccaaagtactgggattacaggactaatggctgaaggataaatcaacatggcaactatgattccaccagtgaagctgaaatggcttgaacacttgaacagctcctggattacagaggacagtgaatctattgctacaagagagggagttgctgttctgtattctaaactggttagcaataaggaagtagtacctttgccccaacaagttttatgcctcaaaggaccacagttgccagactttgaacgtgagtctctttcaagtgatgagcaggaccactatttggatgcccttcttagcagccagctagcattggcaaagatggtatgttcagattccccatttgccggggcacttagaaaacgactgcttgtactccagcgtgtcttttatgcactttctaataaataccatgacaaaggcaaggtgaagcagcagcagcattctccggagagcagttctggttcagcagatgtccattctg

SEQ ID NO: 139944 - DNA, 577 bp, Homo sapiens
  Payload ID: 7447
  Gene Symbol: HERC1
  Gene Name: HECT and RLD domain containing E3 ubiquitin protein ligase family member 1
  ENST ID: ENST00000560316
  CDS Start-End: 518-577
ctgcggagccgggctcgggtcgccggagccgcgccccaccccgccagctccagagccacgtacgatggagtctccctctgtcgccaggctggagtgcagtcttgtgatctcggctcactgcaacctccacctcccgggttcgagcgattctcctgcctctgcctcccaagtagctgggactacaggcgcgcaccaccactactggctaatttttgtatttttattaaagacggggtttcaccatgttggcaaggatggtctccatctcttgacctcgtgatcctcccacctcgacctccaaaagtgctgggattacaggcgtgagccaccgtgcctggcctgaataatatcatcttaaacttttgggacttgccttaccagtcatcagaacatttatacatttataagcctattgtaatcaagtcactgttgtaagaatagacaagtggaccagaatagagaatccagaaatagatcctgttagtggaaaagactaatggctgaaggataaatcaacatggcaactatgattccaccagtgaagctgaaatggcttgaacacttgaacagctcctgg

SEQ ID NO: 139945 - DNA, 581 bp, Homo sapiens
  Payload ID: 7447
  Gene Symbol: HERC1
  Gene Name: HECT and RLD domain containing E3 ubiquitin protein ligase family member 1
  ENST ID: ENST00000558532
  CDS Start-End: 123-581
agcaaaaataaaggacgcgaccgccgcagcctctgcggagccgggctcgggtcgccggagccgcgccccaccccgccagctccagagccacgtacggactaatggctgaaggataaatcaacatggcaactatgattccaccagtgaagctgaaatggcttgaacacttgaacagctcctggattacagaggacagtgaatctattgctacaagagagggagttgctgttctgtattctaaactggttagcaataaggaagtagtacctttgccccaacaagttttatgcctcaaaggaccacagttgccagactttgaacgtgagtctctttcaagtgatgagcaggaccactatttggatgcccttcttagcagccagctagcattggcaaagatggtatgttcagattccccatttgccggggcacttagaaaacgactgcttgtactccagcgtgtcttttatgcactttctaataaataccatgacaaaggcaaggtgaagcagcagcagcattctccggagagcagttctggttcagcagatgtccattctgttagtgaacgcccccggtcaagc

SEQ ID NO: 139946 - DNA, 828 bp, Homo sapiens
  Payload ID: 7447
  Gene Symbol: HERC1
  Gene Name: HECT and RLD domain containing E3 ubiquitin protein ligase family member 1
  ENST ID: ENST00000558324
  CDS Start-End: 1-458
aagatgtggcagttggagctgaacacacacttgctttggcatcaaatggagatgtgtatgcctgggggagcaattcagaagggcagctcggcttaggccataccaaccatgttcgagaaccaaccctggtaacaggtctgcaagggaaaaatgttcggcagatctcggctggccgctgccacagtgctgcatggacagcaccacctgtcccaccaagagcaccaggtgtgtcagtacctctgcagctgggcctgcctgacacagtgcccccccagtatggggcgctgagagaagtcagcattcacacggtgcgggccaggctccggctgctctaccacttctctgacctcatgtactcatcctggagactgctgaaccttagccccaacaaccaggtaacagactggcgtggtaagcagccaggcacagactggcttgaacagcacatcccattataatgctggaacttggggcattgtacagggacaacttcggcctttgttagccccaagagtctacactctgccaatggtgcgctccataggaaaaaccatggttcaaggcaaaaactatggacctcagataactgtaaagaggatatcaaccagaggacggaagtgtaagcctatttttgtccaaatagcgagacaagtagttaagctgaatgcttcagacctccgcctgccttcccgagcgtggaaggttaagctggttggagaaggggctgatgatgctggaggagtgtttgatgacaccatcacagagatgtgccaggaacttgaaactggtattgttgaccttcttataccctctcccaatgccaccgca

SEQ ID NO: 139947 - DNA, 551 bp, Homo sapiens
  Payload ID: 7447
  Gene Symbol: HERC1
  Gene Name: HECT and RLD domain containing E3 ubiquitin protein ligase family member 1
  ENST ID: ENST00000561359
  CDS Start-End: 1-143
gaaattccactgcaaaatcttcacctcagaaaattgacgtcctttgtggaattggaataaaaaaggttgcttgtggaactcagttttctgttgctttgaccaaagatggtcatgtgtatacctttggtcaaggtggtgagtagtcactatgacctcctttcagtatagataattttccacttctctttcatgtgctttattataaagacaaactcccctccccattaagaccccttatgccagagccagcactcttgctagaagagtccctgccaagggccgtcccctcttcttttctactgcccttgacatgctgccacaaatactgccttgaccatcagagctcctctgtgtcctgcctcattcttcatcccttctagggactggggctgcagatcttaggaactggaggaattcataggcactctgggttcaaatcttgagtagatcgcctgataggcttgccagaggggcgtgctcgcaatcacaatcgaccgcaacaaatccctgtcctggctggagtaatcatagaagatgtggcagttggagct

SEQ ID NO: 139948 - DNA, 2215 bp, Homo sapiens
  Payload ID: 7447
  Gene Symbol: HERC1
  Gene Name: HECT and RLD domain containing E3 ubiquitin protein ligase family member 1
  ENST ID: ENST00000561400
  CDS Start-End: 143-2215
ccctttgacaagtcgctgctgctgcagcaaaaataaaggacgcgaccgccgcagcctctgcggagccgggctcgggtcgccggagccgcgccccaccccgccagctccagagccacgactaatggctgaaggataaatcaacatggcaactatgattccaccagtgaagctgaaatggcttgaacacttgaacagctcctggattacagaggacagtgaatctattgctacaagagagggagttgctgttctgtattctaaactggttagcaataaggaagtagtacctttgccccaacaagttttatgcctcaaaggaccacagttgccagactttgaacgtgagtctctttcaagtgatgagcaggaccactatttggatgcccttcttagcagccagctagcattggcaaagatggtatgttcagattccccatttgccggggcacttagaaaacgactgcttgtactccagcgtgtcttttatgcactttctaataaataccatgacaaaggcaaggtgaagcagcagcagcattctccggagagcagttctggttcagcagatgtccattctgttagtgaacgcccccggtcaagcactgatgcacttatagaaatgggtgttcgaactggtctaagtttattatttgcgcttctaagacaaagttggatgatgcctgtgtcaggacctggtctcagtctttgcaacgatgtcattcatactgcaattgaagttgtgagctctttgccaccattatcattagcaaatgaaagcaagattcctcctatgggcttggactgcttatcgcaagtaacaacatttcttaaaggagtcactattcctaattctggggcagacactttaggtcgtagattagcttctgagttgctgcttggtttggcagctcaacgaggctcattgcgatatcttcttgaatggatagaaatggctttgggggcttcggcagttgtacacaccatggagaaaggcaaactactctcaagccaggaaggaatgatcagctttgactgctttatgaccatattaatgcagatgaggcgttctttgatatcagaaaaccaggactctgcagatgttgatcctcaggagcattcatttactcgaactattgatgaagaagctgaaatggaagaacaggctgagagagaccgggaagaggggcatccggagccagaggatgaagaggaggaacgggaacatgaagtgatgacagctggcaaaatctttcagtgtttcctctcagcccgtgaagtagctcgtagccgagaccgagatagaatgaacagtggggcagggtctggggctcgagctgatgatccacctcctcagtctcagcaagagcgaagggtcagcacagaccttcctgagggtcaggatgtgtacactgctgcatgcaactccgtgatccatcggtgtgccctgttaatattaggagtaagtcctgtgatagatgagcttcagaagcgaagagaagaaggacagttgcagcaaccttcaacaagtgcctctgaagggggtggacttatgaccaggagtgaaagtcttactgcagagagccggctagtccacacaagcccaaattatagactgatcaaatcgaggagtgaatctgatttgtctcagcctgaatcagatgaagagggttacgcactgagtggcagacgaaatgttgatttggatttggcagcatctcacagaaagagaggtcctatgcacagtcaattggaatccctgagtgactcttgggctcgcctgaaacatagcagagactggttatgcaactcctcctattcctttgagtcagattttgatcttaccaagtctttgggagttcacactttgattgaaaatgttgtaagctttgtgagtggagatgtggggaatgccccaggttttaaagagccagaggaaagtatgtctacaagtccccaggcctccatcattgcaatggaacagcagcagttaagggcagaacttcgtttagaggcacttcatcagatcctcgttctattgtctgggatggaagaaaaaggtagcatctcactggcaggaagcagattgagttcaggcttccagtcctccacactactcacgtctgtgaggctgcagttcctagcagggtgttttggtttaggcactgttggacacacaggaggcaagggagagagtggccgattgcatcactatcag

SEQ ID NO: 139949 - DNA, 3779 bp, Homo sapiens
  Payload ID: 7448
  Gene Symbol: HERC6
  Gene Name: HECT and RLD domain containing E3 ubiquitin protein ligase family member 6
  Uniprot ID: Q8IVU3
  ENST ID: ENST00000264346
  CDS Start-End: 60-3128
ggagcctgtcgcagcgggaccgacggaatccggagcaggcgacagggcgcagaagcgggatgtacttctgttggggcgccgactccagggagctgcagcgccggaggacggcgggcagccccggggctgagctactgcaggcggccagcggggagcgccactctctgctgctgctgaccaaccacagggtcctctcgtgcggagacaacagcaggggtcagctgggccgcaggggcgcgcagcgcggggagctgccagaaccaattcaggcattggaaaccctaattgttgatctcgtgagctgcgggaaggagcactccctggctgtgtgccacaaaggaagggtcttcgcatggggagctggttctgaagggcagctggggattggagaattcaaggaaataagtttcacacctaagaaaataatgactctgaatgatataaaaataatacaagtttcctgtggacactaccactccctggcattatcaaaagatagccaagtgttttcgtggggaaagaacagccatgggcagctgggcttggggaaggagttcccctcccaagccagcccgcagagggtgaggtccctggaggggatcccactggctcaggtggctgccggaggggctcacagctttgccctgtctctctgtgggacttcgtttggctggggaagtaacagtgccgggcagctggccctcagtgggcgtaatgtcccagtgcaaagcaacaagcctctctcagtcggtgcactgaagaatctaggtgtggtttatatcagctgtggtgatgcacacactgcggtgcttacccaggacgggaaagtgttcacatttggagacaatcgctctggacagctgggatacagccccactcctgagaagagaggtccacaacttgtggaaagaattgatggcctagtttcgcagatagattgtggaagttatcacaccctggcatatgtgcacaccactggtcaggtggtatcttttggtcatggaccaagtgacacaagcaagccaactcatccggaggccctgacagagaactttgacattagctgcctgatttctgctgaagacttcgtggatgttcaagtcaaacacatttttgctggaacatatgccaactttgtgacaactcatcaggatactagttccacacgtgctcccgggaaaaccctgccagaaataagccgaattagccagtccatggcagaaaaatggatagcagtgaaaagaagaagtactgaacatgaaatggctaaaagtgaaattagaatgatattttcatctcctgcttgtctgactgcaagttttttaaagaaaagaggaactggagaaacgacttccattgatgtggacttagaaatggcaagagataccttcaagaagttaacaaaaaaggaatggatttcttccatgataactacgtgtctcgaggatgatctgctcagagctcttccatgccattctccacaccaagaagctttatcagttttcctcctgctcccagaatgtcctgtgatgcatgattctaagaactggaagaacctggtggttccatttgcaaaggctgtgtgtgaaatgagtaaacaatctttgcaagtcctaaagaagtgttgggcatttttgcaagaatcttctctgaatccgctgatccagatgcttaaagcagccatcatctctcagctgcttcatcagactaaaaccgaacaggatcactgtaatgttaaagctcttttaggaatgatgaaagaactgcataaggtaaacaaagctaactgtcgactaccagaaaatactttcaacataaatgaactctccaacttattaaacttttatatagatagaggaagacagctctttcgggataaccacctgatacctgcagaaacccccagtcctgttattttcagtgattttccatttatctttaattcgctatccaaaattaaattattgcaagctgattcacatataaagatgcagatgtcagaaaagaaagcatacatgcttatgcatgaaacaattctgcaaaaaaaggatgaatttcctccatcacccagatttatacttagagtcagacgaagtcgcctggttaaagatgctctgcgtcaattaagtcaagctgaagctactgacttctgcaaagtattagtggttgaatttattaatgaaatttgtcctgagtctggaggggttagttcagagttcttccactgtatgtttgaagagatgaccaagccagaatatggaatgttcatgtatcctgaaatgggttcctgcatgtggtttcctgccaagcctaaacctgagaagaaaagatatttcctctttggaatgctgtgtggactctccttattcaatttaaatgttgctaaccttcctttcccactggctctgtataaaaaacttctggaccaaaagccatcattggaagatttaaaagaactcagtcctcggttggggaagagtttgcaagaagttctagatgatgctgctgatgacattggagatgcgctctgcatacgcttttctatacactgggaccaaaatgatgttgacttaattccaaatgggatctccatacctgtggaccaaaccaacaagagagactatgtttctaagtatattgattacattttcaacgtctctgtaaaagcagtttatgaggaatttcagagaggattttatagagtctgtgagaaggagatacttagacatttctaccctgaagaactaatgacagcaatcattggaaatactgattatgactggaaacagtttgaacagaattcaaagtatgagcaaggataccaaaaatcacatcctactatacagttgttttggaaggctttccacaaactaaccttggatgaaaagaaaaaattcctctttttccttacaggacgtgataggctgcatgcaagaggcatacagaaaatggaaatagtatttcgctgtcctgaaactttcagtgaaagagatcacccaacatcaataacttgtcataatattctctccctccctaagtattctacaatggaaagaatggaggaagcacttcaagtagccatcaacaacaacagaggatttgtctcacccatgctcacacagtcataatcacctctgagagactcagggtgggctttctcacacttggatccttctgttcttccttacacctaaataatacaagagattaatgaatagtggttagaagtagttgagggagagattgggggaatggggagatgatgatgatggtcaaagggtgcaaaatctcacacaagactgaggcaggagaatagggtacagagatagggatctaaggatgacttggacacactccctggcactgaagagtctgaacactggcctgtgattggtccattccaggaccttcatttgcataaggtatcaaaccacatcagcctctgattggccatgggccagacctgcactctggccaatgattggttcattccaggacattcatttgcataaggagtcaaaccacaccagtcttggattggctgtgagccaattcacctcagtctctaattggctgtgagtcagtctttcatttacatagggtgtaaccatcaagaaacctctacagggtacttaagccccagaagattttgctaccagggctcttgagccacttgctctagcccactcccaccctgtggaatgtactttcacttttgctgcttcactgccttgtgctccaataaatccactccttcaccacccattcatgcatgtcgc

SEQ ID NO: 139950 - DNA, 3473 bp, Homo sapiens
  Payload ID: 7448
  Gene Symbol: HERC6
  Gene Name: HECT and RLD domain containing E3 ubiquitin protein ligase family member 6
  ENST ID: ENST00000273960
  CDS Start-End: 184-1152
agcacttgaagttcaggcagcgagagttgacatggggccagggctgcgcccctggggcgggttgaagacagggtgagtctcttgatattcaggaaatcatcgcgcacccagtcaccagcgttcgggagcctgtcgcagcgggaccgacggaatccggagcaggcgacagggcgcagaagcgggatgtacttctgttggggcgccgactccagggagctgcagcgccggaggacggcgggcagccccggggctgagctactgcaggcggccagcggggagcgccactctctgctgctgctgaccaaccacagggtcctctcgtgcggagacaacagcaggggtcagctgggccgcaggggcgcgcagcgcggggagctgccagaaccaattcaggcattggaaaccctaattgttgatctcgtgagctgcgggaaggagcactccctggctgtgtgccacaaaggaagggtcttcgcatggggagctggttctgaagggcagctggggattggagaattcaaggaaataagtttcacacctaagaaaataatgactctgaatgatataaaaataatacaagtttcctgtggacactaccactccctggcattatcaaaagatagccaagtgttttcgtggggaaagaacagccatgggcagctgggcttggggaaggagttcccctcccaagccagcccgcagagggtgaggtccctggaggggatcccactggctcaggtggctgccggaggggctcacagctttgccctgtctctctgtgggacttcgtttggctggggaagtaacagtgccgggcagctggccctcagtgggcgtaatgtcccagtgcaaagcaacaagcctctctcagtcggtgcactgaagaatctaggtgtggtttatatcagctgtggtgatgcacacactgcggtgcttacccaggacgggaaagtgttcacatttggagacaatcgctctggacagctgggatacagccccactcctgagaagagaggtccacaacttgtggaaagaattgatggcctagtttcgcagatagattgtggaagacttcgtggatgttcaagtcaaacacatttttgctggaacatatgccaactttgtgacaactcatcagtgaaattagaatgatattttcatctcctgcttgtctgactgcaagttttttaaagaaaagaggaactggagaaacgacttccattgatgtggacttagaaatggcaagagataccttcaagaagttaacaaaaaaggaatggatttcttccatgataactacgtgtctcgaggatgatctgctcagagctcttccatgccattctccacaccaagaagctttatcagttttcctcctgctcccagaatgtcctgtgatgcatgattctaagaactggaagaacctggtggttccatttgcaaaggctgtgtgtgaaatgagtaaacaatctttgcaagtcctaataaacaaagctaactgtcgactaccagaaaatactttcaacataaatgaactctccaacttattaaacttttatatagatagaggaagacagctctttcgggataaccacctgatacctgcagaaacccccagtcctgttattttcagtgattttccatttatctttaattcgctatccaaaattaaattattgcaagctgattcacatataaagatgcagatgtcagaaaagaaagcatacatgcttatgcatgaaacaattctgcaaaaaaaggatgaatttcctccatcacccagatttatacttagagtcagacgaagtcgcctggttaaagatgctctgcgtcaattaagtcaagctgaagctactgacttctgcaaagtattagtggttgaatttattaatgaaatttgtcctgagtctggaggggttagttcagagttcttccactgtatgtttgaagagatgaccaagccagaatatggaatgttcatgtatcctgaaatgggttcctgcatgtggtttcctgccaagcctaaacctgagaagaaaagatatttcctctttggaatgctgtgtggactctccttattcaatttaaatgttgctaaccttcctttcccactggctctgtataaaaaacttctggaccaaaagccatcattggaagatttaaaagaactcagtcctcggttggggaagagtttgcaagaagttctagatgatgctgctgatgacattggagatgcgctctgcatacgcttttctatacactgggaccaaaatgatgttgacttaattccaaatgggatctccatacctgtggaccaaaccaacaagagagactatgtttctaagtatattgattacattttcaacgtctctgtaaaagcagtttatgaggaatttcagagaggattttatagagtctgtgagaaggagatacttagacatttctaccctgaagaactaatgacagcaatcattggaaatactgattatgactggaaacagtttgaacagaattcaaagtatgagcaaggataccaaaaatcacatcctactatacagttgttttggaaggctttccacaaactaaccttggatgaaaagaaaaaattcctctttttccttacaggacgtgataggctgcatgcaagaggcatacagaaaatggaaatagtatttcgctgtcctgaaactttcagtgaaagagatcacccaacatcaataacttgtcataatattctctccctccctaagtattctacaatggaaagaatggaggaagcacttcaagtagccatcaacaacaacagaggatttgtctcacccatgctcacacagtcataatcacctctgagagactcagggtgggctttctcacacttggatccttctgttcttccttacacctaaataatacaagagattaatgaatagtggttagaagtagttgagggagagattgggggaatggggagatgatgatgatggtcaaagggtgcaaaatctcacacaagactgaggcaggagaatagggtacagagatagggatctaaggatgacttggacacactccctggcactgaagagtctgaacactggcctgtgattggtccattccaggaccttcatttgcataaggtatcaaaccacatcagcctctgattggccatgggccagacctgcactctggccaatgattggttcattccaggacattcatttgcataaggagtcaaaccacaccagtcttggattggctgtgagccaattcacctcagtctctaattggctgtgagtcagtctttcatttacatagggtgtaaccatcaagaaacctctacagggtacttaagccccagaagattttgctaccagggctcttgagccacttgctctagcccactcccaccctgtggaatgtactttcacttttgctgcttcactgccttgtgctccaataaatccactccttcaccaccc

SEQ ID NO: 139951 - DNA, 3781 bp, Homo sapiens
  Payload ID: 7448
  Gene Symbol: HERC6
  Gene Name: HECT and RLD domain containing E3 ubiquitin protein ligase family member 6
  Uniprot ID: Q8IVU3
  ENST ID: ENST00000380265
  CDS Start-End: 184-3144
agcacttgaagttcaggcagcgagagttgacatggggccagggctgcgcccctggggcgggttgaagacagggtgagtctcttgatattcaggaaatcatcgcgcacccagtcaccagcgttcgggagcctgtcgcagcgggaccgacggaatccggagcaggcgacagggcgcagaagcgggatgtacttctgttggggcgccgactccagggagctgcagcgccggaggacggcgggcagccccggggctgagctactgcaggcggccagcggggagcgccactctctgctgctgctgaccaaccacagggtcctctcgtgcggagacaacagcaggggtcagctgggccgcaggggcgcgcagcgcggggagctgccagaaccaattcaggcattggaaaccctaattgttgatctcgtgagctgcgggaaggagcactccctggctgtgtgccacaaaggaagggtcttcgcatggggagctggttctgaagggcagctggggattggagaattcaaggaaataagtttcacacctaagaaaataatgactctgaatgatataaaaataatacaagtttcctgtggacactaccactccctggcattatcaaaagatagccaagtgttttcgtggggaaagaacagccatgggcagctgggcttggggaaggagttcccctcccaagccagcccgcagagggtgaggtccctggaggggatcccactggctcaggtggctgccggaggggctcacagctttgccctgtctctctgtgggacttcgtttggctggggaagtaacagtgccgggcagctggccctcagtgggcgtaatgtcccagtgcaaagcaacaagcctctctcagtcggtgcactgaagaatctaggtgtggtttatatcagctgtggtgatgcacacactgcggtgcttacccaggacgggaaagtgttcacatttggagacaatcgctctggacagctgggatacagccccactcctgagaagagaggtccacaacttgtggaaagaattgatggcctagtttcgcagatagattgtggaagttatcacaccctggcatatgtgcacaccactggtcaggtggtatcttttggtcatggaccaagtgacacaagcaagccaactcatccggaggccctgacagagaactttgacattagctgcctgatttctgctgaagacttcgtggatgttcaagtcaaacacatttttgctggaacatatgccaactttgtgacaactcatcaggatactagttccacacgtgctcccgggaaaaccctgccagaaataagccgaattagccagtccatggcagaaaaatggatagcagtgaaaagaagaagtactgaacatgaaatggctaaaagtgaaattagaatgatattttcatctcctgcttgtctgactgcaagttttttaaagaaaagaggaactggagaaacgacttccattgatgtggacttagaaatggcaagagataccttcaagaagttaacaaaaaaggaatggatttcttccatgataactacgtgtctcgaggatgatctgctcagagctcttccatgccattctccacaccaagaagctttatcagttttcctcctgctcccagaatgtcctgtgatgcatgattctaagaactggaagaacctggtggttccatttgcaaaggctgtgtgtgaaatgagtaaacaatctttgcaagtcctaaagaagtgttgggcatttttgcaagaatcttctctgaatccgctgatccagatgcttaaagcagccatcatctctcagctgcttcatcagactaaaaccgaacaggatcactgtaatgttaaagctcttttaggaatgatgaaagaactgcataaggtaaacaaagctaactgtcgactaccagaaaatactttcaacataaatgaactctccaacttattaaacttttatatagatagaggaagacagctctttcgggataaccacctgatgtcagaaaagaaagcatacatgcttatgcatgaaacaattctgcaaaaaaaggatgaatttcctccatcacccagatttatacttagagtcagacgaagtcgcctggttaaagatgctctgcgtcaattaagtcaagctgaagctactgacttctgcaaagtattagtggttgaatttattaatgaaatttgtcctgagtctggaggggttagttcagagttcttccactgtatgtttgaagagatgaccaagccagaatatggaatgttcatgtatcctgaaatgggttcctgcatgtggtttcctgccaagcctaaacctgagaagaaaagatatttcctctttggaatgctgtgtggactctccttattcaatttaaatgttgctaaccttcctttcccactggctctgtataaaaaacttctggaccaaaagccatcattggaagatttaaaagaactcagtcctcggttggggaagagtttgcaagaagttctagatgatgctgctgatgacattggagatgcgctctgcatacgcttttctatacactgggaccaaaatgatgttgacttaattccaaatgggatctccatacctgtggaccaaaccaacaagagagactatgtttctaagtatattgattacattttcaacgtctctgtaaaagcagtttatgaggaatttcagagaggattttatagagtctgtgagaaggagatacttagacatttctaccctgaagaactaatgacagcaatcattggaaatactgattatgactggaaacagtttgaacagaattcaaagtatgagcaaggataccaaaaatcacatcctactatacagttgttttggaaggctttccacaaactaaccttggatgaaaagaaaaaattcctctttttccttacaggacgtgataggctgcatgcaagaggcatacagaaaatggaaatagtatttcgctgtcctgaaactttcagtgaaagagatcacccaacatcaataacttgtcataatattctctccctccctaagtattctacaatggaaagaatggaggaagcacttcaagtagccatcaacaacaacagaggatttgtctcacccatgctcacacagtcataatcacctctgagagactcagggtgggctttctcacacttggatccttctgttcttccttacacctaaataatacaagagattaatgaatagtggttagaagtagttgagggagagattgggggaatggggagatgatgatgatggtcaaagggtgcaaaatctcacacaagactgaggcaggagaatagggtacagagatagggatctaaggatgacttggacacactccctggcactgaagagtctgaacactggcctgtgattggtccattccaggaccttcatttgcataaggtatcaaaccacatcagcctctgattggccatgggccagacctgcactctggccaatgattggttcattccaggacattcatttgcataaggagtcaaaccacaccagtcttggattggctgtgagccaattcacctcagtctctaattggctgtgagtcagtctttcatttacatagggtgtaaccatcaagaaacctctacagggtacttaagccccagaagattttgctaccagggctcttgagccacttgctctagcccactcccaccctgtggaatgtactttcacttttgctgcttcactgccttgtgctccaataaatccactccttcaccaccca

SEQ ID NO: 139952 - DNA, 557 bp, Homo sapiens
  Payload ID: 7448
  Gene Symbol: HERC6
  Gene Name: HECT and RLD domain containing E3 ubiquitin protein ligase family member 6
  ENST ID: ENST00000502870
  CDS Start-End: 1-557
gagacaacagcaggggtcagctgggccgcaggggcgcgcagcgcggggagctgccagtggtggttggggggtgttttgttttgtttcccaaagaaccaattcaggcattggaaaccctaattgttgatctcgtgagctgcgggaaggagcactccctggctgtgtgccacaaaggaagggtcttcgcatggggagctggttctgaagggcagctggggattggagaattcaaggaaataagtttcacacctaagaaaataatgactctgaatgatataaaaataatacaagtttcctgtggacactaccactccctggcattatcaaaagatagccaagtgttttcgtggggaaagaacagccatgggcagctgggcttggggaaggagttcccctcccaagccagcccgcagagggtgaggtccctggaggggatcccactggctcaggtggctgccggaggggctcacagctttgccctgtctctctgtgggacttcgtttggctggggaagtaacagtgccgggcagctggccctcagtgggcgtaatgtccca

SEQ ID NO: 139953 - DNA, 517 bp, Homo sapiens
  Payload ID: 7448
  Gene Symbol: HERC6
  Gene Name: HECT and RLD domain containing E3 ubiquitin protein ligase family member 6
  ENST ID: ENST00000504905
  CDS Start-End: 12-233
gcagaagcgggatgtacttctgttggggcgccgactccagggagctgcagcgccggaggacggcgggcagccccggggctgagctactgcaggcggccagcggggagcgccactctctgctgctgctgaccaaccacagggtcctctcgtgcggagacaacagcaggggtcagctgggccgcaggggcgcgcagcgcggggagctgccaggcattggaaaccctaattgttgatctcgtgagctgcgggaaggagcactccctggctgtgtgccacaaaggaagggtcttcgcatggggagctggttctgaagggcagctggggattggagaattcaaggaaataagtttcacacctaagaaaataatgactctgaatgatataaaaataatacaagtttcctgtggacactaccactccctggcattatcaaaagatagccaagtgttttcgtggggaaagaacagccatgggcagctgggcttggggaaggagttcccctcccaagccagcccgc

SEQ ID NO: 139954 - DNA, 4576 bp, Homo sapiens
  Payload ID: 7449
  Gene Symbol: HACE1
  Gene Name: HECT domain and ankyrin repeat containing E3 ubiquitin protein ligase 1
  Uniprot ID: Q8IYU2
  ENST ID: ENST00000262903
  CDS Start-End: 278-3007
agaaggccacgcgagcccgggagggacgcggcggcgggggctgcaggaaaggcgcgagcagaggcggcggcgggtgtactgtaggtggtcggtccggcagcagcccggcccccggacgcaggacgtggccccaggcagccctcgcagctcagtgctctagccggggcaagcccgcgtctccgcctgctggacgggcccaggcgagatgtagggctctgggcgcggaggccgccggtggggcggctgatcgcggaggatcgcggagggcgcgccgaggatggagagagcgatggagcaactcaaccgcctgacgcgctcgctgcgccgcgcgcgcaccgtggagttgcccgaggataatgaaactgctgtttatacattaatgccaatggttatggctgatcaacacaggtctgtttctgaactactatcaaattcaaaatttgatgtcaattatgcattcggacgtgtgaaaagaagcttgcttcacattgcagcaaattgtggatcggtggaatgcttggttttgctgttaaagaaaggagcaaatcctaactatcaagatatttcaggctgtacaccccttcatttggcagcaagaaatgggcagaagaaatgtatgagtaaattattagaatatagcgctgatgtcaacatttgtaataatgaaggccttacagcaatacattggctggctgtgaatgggcggacagaactactccatgaccttgtgcagcatgtcagtgatgttgatgttgaggatgccatggggcagacagcactgcatgttgcctgccagaacggtcacaagacgacagtgcagtgcttgctagacagtggtgctgatattaacaggccaaatgtatcaggagcaactccattgtactttgcttgcagtcatggtcagagagatacagcacagatcctactattacgaggagccaaatatctgccagataaaaatggagtaactcctctggatttatgtgtacagggtggatatggagagacttgtgaagtattaattcaatatcacccgaggctttttcagactattattcaaatgacacagaatgaagacctccgagaaaacatgttacggcaagttctggagcatttgtctcagcaaagtgaaagccagtacctaaagattctaacaagccttgctgaagttgctacaacaaatggtcataaactgcttagcctctctagcaattatgatgctcaaatgaagagccttttaaggattgtgagaatgttttgtcacgtctttcgaattggtccatcctcccccagtaatggaattgatatgggctacaatgggaataaaactccaagaagccaggtgttcaagcctctggaattgctttggcactcgttagatgaatggctagttttaatagccacagaattgatgaaaaacaaaagagactcaacagagatcacttctattttactgaaacaaaaaggccaagatcaagatgctgcttccattcctccatttgaacctccaggacctgggagctatgaaaatctgtccactggcacaagggaatctaaaccagatgctcttgcagggagacaggaagccagtgcagattgtcaggatgttatttctatgacagctaaccggctaagtgctgtcattcaagctttttacatgtgctgttcttgtcagatgcctccgggaatgacttcacctcgtttcattgaatttgtctgcaaacatgatgaagttttaaaatgctttgttaatagaaatcccaaaattatatttgaccactttcactttctccttgaatgtcctgagttgatgtcaagattcatgcatatcataaaagcacagccttttaaagatcgctgtgaatggttctatgaacatttgcattcaggacagccagattcagatatggtgcacaggccagtgaatgaaaatgatatcctgctggttcacagagattctatttttaggagtagctgtgaagttgtgtcaaaagcaaattgtgcaaagctaaagcaagggattgctgtacggttccatggagaagaaggcatgggtcaaggtgttgtgcgtgagtggtttgatattctgtccaatgagatagtcaatcctgattatgcattgtttacccagtcagctgatggaacaacttttcagcctaatagcaactcttatgtaaatcctgatcacttgaactattttcggtttgctgggcagatcttgggattagcgttgaaccacaggcagctggtcaatatttacttcacacgatccttctacaagcacattcttggtattcctgtaaattaccaagatgtggcatccattgatccagaatatgcgaaaaatttgcaatggattttagataatgatataagtgatctgggtctagaactaactttttctgttgagactgatgtgtttggagcaatggaagaggtgcctttgaaacctgggggtgggagtattcttgtgacacaaaataataaagcggagtacgtccagcttgttactgaacttcgaatgacaagagccattcagcctcagatcaatgcttttttacagggctttcatatgttcattccaccctccctcatacagctttttgatgaatatgaattggagctactgctttctggcatgccagaaattgatgtgagtgattggataaaaaatacagaatacacaagtggctatgaaagagaagatccagttattcagtggttctgggaagttgtagaagacattactcaagaggagagagttcttctcttacagtttgttacgggcagttccagggtcccacatggtgggtttgctaatatcatgggtggaagtggattgcaaaactttacaatcgctgctgtgccatatactccaaatcttttaccaacttcaagcacatgcatcaacatgctcaagttacctgaatacccaagtaaagaaatactcaaggacagacttcttgtggcactacattgtggcagctatggttacacaatggcataatgaagtctggaaaactcctctgactactgatgcacaattcagaatggcagaagtaatttgggaaaatgtcaacaaaaaagcagcctaaatgcaacccataggcagggctgatgcttccaatttataaaggatcatcaggttttctgtttctctcttttcccttttatgttttctctgtttgtgatacaattagaaaatataaaatcacagtagattttattttttaaaatgctaactgaaagtaatagagactgtcctttttcataattaattttatccaagattgtattaaggcaaaatctgattctacattccacctctgctatgtaactgtcttgttaaaagggtgttttctcctaatttctgatatattatatgaggtcatccagctggtgtgttcttttgcatgtaaactgccatttatattttagaaaactattgtatagaatggatttagattgtctataaagccacaaatacgtattttgccacagtgtattctatattgcaatgatttttttagcattttaatattttaatatatattgtaaaatttagactgatgatactaacagttgatgaaatgacatataatttatatatgaaagcttacgctatattgtatgaattatttgcatctttcagtggccagttttccatatgtatatattatggtctcaatgtttttcttacgcctcattttaatttataatgaaggtaaaattaaaatgtattttaccacgtttcttttcattacttttatctgtgagctctgacacatctgaaaaagtaatctgatgtgcaaattataatttaaatatgttaatttttttgcttcttaaatttgcttttcatcattaaaatgtcaagttcaagtgatatgtgcctaatatcacttggatgttggtgggtttttgaatttttgggtggttaatcagttttattttgaaaagacgtacttgaatagttacagcatatgtttgaacaggaagtaggaacatgcatacacgaagaaatgctaacggaaggatttgttatgtttaggatcttcccttggaaactaaaaatagaatattaatgacattactgtttgtagaatgacatatgcagattttctcataagcagtcattgtgtttgccagtaatgtttgagagacatgtaagttgaaagttttgctaaattataaagctcctttaattcgttggttttgattctcttattctcttgtcttttctaaatgttaacaaaatatatcttaacagattacatgaaatttaggaattatttaaaagttaccattagctctaaaattaagattcggatgctttatttatagtaactgaagctaataatgttttatgttttgattttttgaaatttaattgtagaagtcactgccttctgagttttcaaatagataaccacctttaatattacactgcttataatactaatgtttacagatatgtttctgtttataaccatataatacattggctttgtcatattagttttttttgcaagtagttatgtaaaagagatagataataaaatattaaataactgag

SEQ ID NO: 139955 - DNA, 3102 bp, Homo sapiens
  Payload ID: 7449
  Gene Symbol: HACE1
  Gene Name: HECT domain and ankyrin repeat containing E3 ubiquitin protein ligase 1
  Uniprot ID: Q8IYU2
  ENST ID: ENST00000369125
  CDS Start-End: 278-2362
agaaggccacgcgagcccgggagggacgcggcggcgggggctgcaggaaaggcgcgagcagaggcggcggcgggtgtactgtaggtggtcggtccggcagcagcccggcccccggacgcaggacgtggccccaggcagccctcgcagctcagtgctctagccggggcaagcccgcgtctccgcctgctggacgggcccaggcgagatgtagggctctgggcgcggaggccgccggtggggcggctgatcgcggaggatcgcggagggcgcgccgaggatggagagagcgatggagcaactcaaccgcctgacgcgctcgctgcgccgcgcgcgcaccgtggagttgcccgaggataatgaaactgctgtttatacattaatgccaatggttatggctgatcaacacaggtctgtttctgaactactatcaaattcaaaatttgatgtcaattatgcattcggacgtgtgaaaagaagcttgcttcacattgcagcaaattgtggatcggtggaatgcttggttttgctgttaaagaaaggagcaaatcctaactatcaagatatttcaggctgtacaccccttcatttggcagcaagaaatgggcagaagaaatgtatgagtaaattattagaatatagcgctgatgtcaacatttgtaataatgaaggccttacagcaatacattggctggctgtgaatgggcggacagaactactccatgaccttgtgcagcatgtcagtgatgttgatgttgaggatgccatggggcagacagcactgcatgttgcctgccagaacggtcacaagacgacagtgcagtgcttgctagacagtggtgctgatattaacaggccaaatgtatcaggagcaactccattgtactttgcttgcagtcatggtcagagagatacagcacagatcctactattacgaggagccaaatatctgccagataaaaatggagtaactcctctggatttatgtgtacagggtggatatggagagacttgtgaagtattaattcaatatcacccgaggctttttcagactattattcaaatgacacagaatgaagacctccgagaaaacatgttacggcaagttctggagcatttgtctcagcaaagtgaaagccagtacctaaagattctaacaagccttgctgaagttgctacaacaaatggtcataaactgcttagcctctctagcaattatgatgctcaaatgaagagccttttaaggattgtgagaatgttttgtcacgtctttcgaattggtccatcctcccccagtaatggaattgatatgggctacaatgggaataaaactccaagaagccaggtgttcaagcctctggaattgctttggcactcgttagatgaatggctagttttaatagccacagaattgatgaaaaacaaaagagactcaacagagatcacttctattttactgaaacaaaaaggccaagatcaagatgctgcttccattcctccatttgaacctccaggacctgggagctatgaaaatctgtccactggcacaagggaatctaaaccagatgctcttgcagggagacaggaagccagtgcagattgtcaggatgttatttctatgacagctaaccggctaagtgctgtcattcaagctttttacatgtgctgttcttgtcagatgcctccgggaatgacttcacctcgtttcattgaatttgtctgcaaacatgatgaagttttaaaatgctttgttaatagaaatcccaaaattatatttgaccactttcactttctccttgaatgtcctgagttgatgtcaagattcatgcatatcataaaagcacaggcggagtacgtccagcttgttactgaacttcgaatgacaagagccattcagcctcagatcaatgcttttttacagggctttcatatgttcattccaccctccctcatacagctttttgatgaatatgaattggagctactgctttctggcatgccagaaattgatgtgagtgattggataaaaaatacagaatacacaagtggctatgaaagagaagatccagttattcagtggttctgggaagttgtagaagacattactcaagaggagagagttcttctcttacagtttgttacgggcagttccagggtcccacatggtgggtttgctaatatcatgggtggaagtggattgcaaaactttacaatcgctgctgtgccatatactccaaatcttttaccaacttcaagcacatgcatcaacatgctcaagttacctgaatacccaagtaaagaaatactcaaggacagacttcttgtggcactacattgtggcagctatggttacacaatggcataatgaagtctggaaaactcctctgactactgatgcacaattcagaatggcagaagtaatttgggaaaatgtcaacaaaaaagcagcctaaatgcaacccataggcagggctgatgcttccaatttataaaggatcatcaggttttctgtttctctcttttcccttttatgttttctctgtttgtgatacaattagaaaatataaaatcacagtagattttattttttaaaatgctaactgaaagtaatagagactgtcctttttcataattaattttatccaagattgtattaaggcaaaatctgattctacattccacctctgctatgtaactgtcttgttaaaagggtgttttctcctaatttctgatatattatatgaggtcatccagctggtgtgttcttttgcatgtaaactgccatttatattttagaaaactattgtatagaatggatttagattgtctataaagccacaaatacgtattttgccacagtgtattctatattgcaatgatttttttagcattttaatattttaatatatattgtaaaatttagactgatgatactaacagttgatgaaatgacatataatttatatatgaaagcttacgctatattgtatgaattatttgcatctttcagtggccagttttccatatgtatatattatggtctcaatgtttttcttacgcctcattttaatttataatgaaggtaaaattaaaatgtattttacc

SEQ ID NO: 139956 - DNA, 4729 bp, Homo sapiens
  Payload ID: 7449
  Gene Symbol: HACE1
  Gene Name: HECT domain and ankyrin repeat containing E3 ubiquitin protein ligase 1
  ENST ID: ENST00000416605
  CDS Start-End: 236-772
gcaggaaaggcgcgagcagaggcggcggcgggtgtactgtaggtggtcggtccggcagcagcccggcccccggacgcaggacgtggccccaggcagccctcgcagctcagtgctctagccggggcaagcccgcgtctccgcctgctggacgggcccaggcgagatgtagggctctgggcgcggaggccgccggtggggcggctgatcgcggaggatcgcggagggcgcgccgaggatggagagagcgatggagcaactcaaccgcctgacgcgctcgctgcgccgcgcgcgcaccgtggagttgcccgaggataatgaaactgctgtttatacattaatgccaatggttatggctgatcaacacaggtctgtttctgaactactatcaaattcaaaatttgatgtcaattatgcattcggacgtgtgaaaagaagcttgcttcacattgcagcaaattgtggatcggtggaatgcttggttttgctgttaaagaaaggagcaaatcctaactatcaagatatttcaggctgtacaccccttcatttggcagcaagaaatgggcagaagaaatgtatgagtaaattattagaatatagcgctgatgtcaacatttgtaataatgaaggccttacagcaatacattggctggctgtgaatgggcggacagaactactccatgaccttgtgcagcatgtcagtgatgttgatgttgaggatgccatggggcagacagcactgcatgttgcctgccagaacggtcacaagacgtagagacggggtttcaccgtgttagccaggatggtctcaatctcctgacgtcgtgatctgcccgcctcggcctccctaagtgttgggattacagacagtgcagtgcttgctagacagtggtgctgatattaacaggccaaatgtatcaggagcaactccattgtactttgcttgcagtcatggtcagagagatacagcacagatcctactattacgaggagccaaatatctgccagataaaaatggagtaactcctctggatttatgtgtacagggtggatatggagagacttgtgaagtattaattcaatatcacccgaggctttttcagactattattcaaatgacacagaatgaagacctccgagaaaacatgttacggcaagttctggagcatttgtctcagcaaagtgaaagccagtacctaaagattctaacaagccttgctgaagttgctacaacaaatggtcataaactgcttagcctctctagcaattatgatgctcaaatgaagagccttttaaggattgtgagaatgttttgtcacgtctttcgaattggtccatcctcccccagtaatggaattgatatgggctacaatgggaataaaactccaagaagccaggtgttcaagcctctggaattgctttggcactcgttagatgaatggctagttttaatagccacagaattgatgaaaaacaaaagagactcaacagagatcacttctattttactgaaacaaaaaggccaagatcaagatgctgcttccattcctccatttgaacctccaggacctgggagctatgaaaatctgtccactggcacaagggaatctaaaccagatgctcttgcagggagacaggaagccagtgcagattgtcaggatgttatttctatgacagctaaccggctaagtgctgtcattcaagctttttacatgtgctgttcttgtcagatgcctccgggaatgacttcacctcgtttcattgaatttgtctgcaaacatgatgaagttttaaaatgctttgttaatagaaatcccaaaattatatttgaccactttcactttctccttgaatgtcctgagttgatgtcaagattcatgcatatcataaaagcacaggtggccagtagttaaagggagaaacattttgtattgctgtacaaatgctattaagaggagcctctataatcagtcctgttttgtgaattatttatggaaatgcagccttttaaagatcgctgtgaatggttctatgaacatttgcattcaggacagccagattcagatatggtgcacaggccagtgaatgaaaatgatatcctgctggttcacagagattctatttttaggagtagctgtgaagttgtgtcaaaagcaaattgtgcaaagctaaagcaagggattgctgtacggttccatggagaagaaggcatgggtcaaggtgttgtgcgtgagtggtttgatattctgtccaatgagatagtcaatcctgattatgcattgtttacccagtcagctgatggaacaacttttcagcctaatagcaactcttatgtaaatcctgatcacttgaactattttcggtttgctgggcagatcttgggattagcgttgaaccacaggcagctggtcaatatttacttcacacgatccttctacaagcacattcttggtattcctgtaaattaccaagatgtggcatccattgatccagaatatgcgaaaaatttgcaatggattttagataatgatataagtgatctgggtctagaactaactttttctgttgagactgatgtgtttggagcaatggaagaggtgcctttgaaacctgggggtgggagtattcttgtgacacaaaataataaagcggagtacgtccagcttgttactgaacttcgaatgacaagagccattcagcctcagatcaatgcttttttacagggctttcatatgttcattccaccctccctcatacagctttttgatgaatatgaattggagctactgctttctggcatgccagaaattgatgtgagtgattggataaaaaatacagaatacacaagtggctatgaaagagaagatccagttattcagtggttctgggaagttgtagaagacattactcaagaggagagagttcttctcttacagtttgttacgggcagttccagggtcccacatggtgggtttgctaatatcatgggtggaagtggattgcaaaactttacaatcgctgctgtgccatatactccaaatcttttaccaacttcaagcacatgcatcaacatgctcaagttacctgaatacccaagtaaagaaatactcaaggacagacttcttgtggcactacattgtggcagctatggttacacaatggcataatgaagtctggaaaactcctctgactactgatgcacaattcagaatggcagaagtaatttgggaaaatgtcaacaaaaaagcagcctaaatgcaacccataggcagggctgatgcttccaatttataaaggatcatcaggttttctgtttctctcttttcccttttatgttttctctgtttgtgatacaattagaaaatataaaatcacagtagattttattttttaaaatgctaactgaaagtaatagagactgtcctttttcataattaattttatccaagattgtattaaggcaaaatctgattctacattccacctctgctatgtaactgtcttgttaaaagggtgttttctcctaatttctgatatattatatgaggtcatccagctggtgtgttcttttgcatgtaaactgccatttatattttagaaaactattgtatagaatggatttagattgtctataaagccacaaatacgtattttgccacagtgtattctatattgcaatgatttttttagcattttaatattttaatatatattgtaaaatttagactgatgatactaacagttgatgaaatgacatataatttatatatgaaagcttacgctatattgtatgaattatttgcatctttcagtggccagttttccatatgtatatattatggtctcaatgtttttcttacgcctcattttaatttataatgaaggtaaaattaaaatgtattttaccacgtttcttttcattacttttatctgtgagctctgacacatctgaaaaagtaatctgatgtgcaaattataatttaaatatgttaatttttttgcttcttaaatttgcttttcatcattaaaatgtcaagttcaagtgatatgtgcctaatatcacttggatgttggtgggtttttgaatttttgggtggttaatcagttttattttgaaaagacgtacttgaatagttacagcatatgtttgaacaggaagtaggaacatgcatacacgaagaaatgctaacggaaggatttgttatgtttaggatcttcccttggaaactaaaaatagaatattaatgacattactgtttgtagaatgacatatgcagattttctcataagcagtcattgtgtttgccagtaatgtttgagagacatgtaagttgaaagttttgctaaattataaagctcctttaattcgttggttttgattctcttattctcttgtcttttctaaatgttaacaaaatatatcttaacagattacatgaaatttaggaattatttaaaagttaccattagctctaaaattaagattcggatgctttatttatagtaactgaagctaataatgttttatgttttgattttttgaaatttaattgtagaagtcactgccttctgagttttcaaatagataaccacctttaatattacactgcttataatactaatgtttacagatatgtttctgtttataaccatataatacattggctttgtcatattagttttttttgcaagtagttatgtaaaagagatagataataaaatattaaataac

SEQ ID NO: 139957 - DNA, 622 bp, Homo sapiens
  Payload ID: 7449
  Gene Symbol: HACE1
  Gene Name: HECT domain and ankyrin repeat containing E3 ubiquitin protein ligase 1
  ENST ID: ENST00000524020
  CDS Start-End: 209-622
cgggtcgcggggccaggctggccgcggggctgggggcggccagtggggcaggagctccggccgcgtcaaggtcgggtggaaaaactaactgaaagctgagaaaacgcccacttttactttccagagctgagaggcggccccgggccccgaactcccctggcccgacgctcccaccccggcagataatgaaactgctgtttatacattaatgccaatggttatggctgatcaacacaggtctgtttctgaactactatcaaattcaaaatttgatgtcaattatgcattcggacgtgtgaaaagaagcttgcttcacattgcagcaaattgtggatcggtggaatgcttggttttgctgttaaagaaaggagcaaatcctaactatcaagatatttcaggctgtacaccccttcatttggcagcaagaaatgggcagaagaaatgtatgagtaaattattagaatatagcgctgatgtcaacatttgtaataatgaaggccttacagcaatacattggctggctgtgaatgggcggacagaactactccatgaccttgtgcagcatgtcagtgatgttgatgttgaggatgccatggggcagacagcactgcatgttgcctgc

SEQ ID NO: 139958 - DNA, 1521 bp, Homo sapiens
  Payload ID: 7449
  Gene Symbol: HACE1
  Gene Name: HECT domain and ankyrin repeat containing E3 ubiquitin protein ligase 1
  ENST ID: ENST00000518402
  CDS Start-End: 1-901
ctgtgaagttgtgtcaaaagcaaattgtgcaaagctaaagcaagggattgctgtacggttccatggagaagaaggcatgggtcaaggtgttgtgcgtgagtggtttgatattctgtccaatgagatagtcaatcctgattatgcattgtttacccagtcagctgatggaacaacttttcagcctaatagcaactcttatgtaaatcctgatcacttgaactattttcggtttgctgggcagatcttgggattagcgttgaaccacaggcagctggtcaatatttacttcacacgatccttctacaagcacattcttggtattcctgtaaattaccaagatgtggcatccattgatccagaatatgcgaaaaatttgcaatggattttagataatgatataagtgatctgggtctagaactaactttttctgttgagactgatgtgtttggagcaatggaagaggtgcctttgaaacctgggggtgggagtattcttgtgacacaaaataataaagagctactgctttctggcatgccagaaattgatgtgagtgattggataaaaaatacagaatacacaagtggctatgaaagagaagatccagttattcagtggttctgggaagttgtagaagacattactcaagaggagagagttcttctcttacagtttgttacgggcagttccagggtcccacatggtgggtttgctaatatcatgggtggaagtggattgcaaaactttacaatcgctgctgtgccatatactccaaatcttttaccaacttcaagcacatgcatcaacatgctcaagttacctgaatacccaagtaaagaaatactcaaggacagacttcttgtggcactacattgtggcagctatggttacacaatggcataatgaagtctggaaaactcctctgactactgatgcacaattcagaatggcagaagtaatttgggaaaatgtcaacaaaaaagcagcctaaatgcaacccataggcagggctgatgcttccaatttataaaggatcatcaggttttctgtttctctcttttcccttttatgttttctctgtttgtgatacaattagaaaatataaaatcacagtagattttattttttaaaatgctaactgaaagtaatagagactgtcctttttcataattaattttatccaagattgtattaaggcaaaatctgattctacattccacctctgctatgtaactgtcttgttaaaagggtgttttctcctaatttctgatatattatatgaggtcatccagctggtgtgttcttttgcatgtaaactgccatttatattttagaaaactattgtatagaatggatttagattgtctataaagccacaaatacgtattttgccacagtgtattctatattgcaatgatttttttagcattttaatattttaatatatattgtaaaatttagactgatgatactaacagttgatgaaatgacatataatttatatatgaaagcttacgctatat

SEQ ID NO: 139959 - DNA, 1608 bp, Homo sapiens
  Payload ID: 7449
  Gene Symbol: HACE1
  Gene Name: HECT domain and ankyrin repeat containing E3 ubiquitin protein ligase 1
  ENST ID: ENST00000518503
  CDS Start-End: 1-988
cataaaagcacagccttttaaagatcgctgtgaatggttctatgaacatttgcattcaggacagccagattcagatatggtgcacaggccagtgaatgaaaatgatatcctgctggttcacagagattctatttttaggagtagctgtgaagttgtgtcaaaagcaaattgtgcaaagctaaagcaagggattgctgtacggttccatggagaagaaggcatgggtcaaggtgttgtgcgtgagtggtttgatattctgtccaatgagatagtcaatcctgattatgcattgtttacccagtcagctgatggaacaacttttcagcctaatagcaactcttatgtaaatcctgatcacttgaactattttcggtttgctgggcagatcttgggattagcgttgaaccacaggcagctggtcaatatttacttcacacgatccttctacaagcacattcttggtattcctgtaaattaccaagatgtggcatccattgatccagaatatgcgaaaaatttgcaatggattttagataatgatataagtgatctgggtctagaactaactttttctgttgagactgatgtgtttggagcaatggaagaggtgcctttgaaacctgggggtgggagtattcttgtgacacaaaataataaagagctactgctttctggcatgccagaaattgatgtgagtgattggataaaaaatacagaatacacaagtggctatgaaagagaagatccagttattcagtttgttacgggcagttccagggtcccacatggtgggtttgctaatatcatgggtggaagtggattgcaaaactttacaatcgctgctgtgccatatactccaaatcttttaccaacttcaagcacatgcatcaacatgctcaagttacctgaatacccaagtaaagaaatactcaaggacagacttcttgtggcactacattgtggcagctatggttacacaatggcataatgaagtctggaaaactcctctgactactgatgcacaattcagaatggcagaagtaatttgggaaaatgtcaacaaaaaagcagcctaaatgcaacccataggcagggctgatgcttccaatttataaaggatcatcaggttttctgtttctctcttttcccttttatgttttctctgtttgtgatacaattagaaaatataaaatcacagtagattttattttttaaaatgctaactgaaagtaatagagactgtcctttttcataattaattttatccaagattgtattaaggcaaaatctgattctacattccacctctgctatgtaactgtcttgttaaaagggtgttttctcctaatttctgatatattatatgaggtcatccagctggtgtgttcttttgcatgtaaactgccatttatattttagaaaactattgtatagaatggatttagattgtctataaagccacaaatacgtattttgccacagtgtattctatattgcaatgatttttttagcattttaatattttaatatatattgtaaaatttagactgatgatactaacagttgatgaaatgacatataatttatatatgaaagcttacgctatat

SEQ ID NO: 139960 - DNA, 859 bp, Homo sapiens
  Payload ID: 7449
  Gene Symbol: HACE1
  Gene Name: HECT domain and ankyrin repeat containing E3 ubiquitin protein ligase 1
  ENST ID: ENST00000519645
  CDS Start-End: 238-859
ctgcaggaaaggcgcgagcagaggcggcggcgggtgtactgtaggtggtcggtccggcagcagcccggcccccggacgcaggacgtggccccaggcagccctcgcagctcagtgctctagccggggcaagcccgcgtctccgcctgctggacgggcccaggcgagatgtagggctctgggcgcggaggccgccggtggggcggctgatcgcggaggatcgcggagggcgcgccgaggatggagagagcgatggagcaactcaaccgcctgacgcgctcgctgcgccgcgcgcgcaccgtggagttgcccgaggataatgaaactgctgtttatacattaatgccaatggttatggctgatcaacacaggtctgtttctgaactactatcaaattcaaaatttgatgtcaattatgcattcggacgtgtgaaaagaagcttgcttcacattgcagcaaattgtggatcggtggaatgcttggttttgctgttaaagaaaggagcaaatcctaactatcaagatatttcaggctgtacaccccttcatttggcagcaagaaatgggcagaagaaatgtatgagtaaattattagaatatagcgctgatgtcaacatttgtaataatgaaggccttacagcaacagtgcagtgcttgctagacagtggtgctgatattaacaggccaaatgtatcaggagcaactccattgtactttgcttgcagtcatggtcagagagatacagcacagatcctactattacgaggagccaaatatctgccagataaaaatggagtaactcctctggatttatgtgtacagggtggatatggagagacttgtgaagtattaattcaatatc

SEQ ID NO: 139961 - DNA, 561 bp, Homo sapiens
  Payload ID: 7449
  Gene Symbol: HACE1
  Gene Name: HECT domain and ankyrin repeat containing E3 ubiquitin protein ligase 1
  ENST ID: ENST00000521962
  CDS Start-End: 1-133
ctcgctgcgccgcgcgcgcaccgtggagttgcccgaggagctgagaggcggccccgggccccgaactcccctggcccgacgctcccaccccggcagagatgaggtctcactatgttccccaggctggtcttgaactcctgggctcaagtgatccgcaccctgctccccccaaagtgttgggattacagatgtgagccaccgcgcctggcctggggataatcttcttgaaaaaatgataatgaaactgctgtttatacattaatgccaatggttatggctgatcaacacaggtctgtttctgaactactatcaaattcaaaatttgatgtcaattatgcattcggacgtgtgaaaagaagcttgcttcacattgcagcaaattgtggatcggtggaatgcttggttttgctgttaaagaaaggagcaaatcctaactatcaagatatttcaggctgtacaccccttcatttggcagcaagaaatgggcagaagaaatgtatgagtaaattattagaatatagcgctgatgtcaacatttgtaataatgaaggccttacagca

SEQ ID NO: 139962 - DNA, 1866 bp, Homo sapiens
  Payload ID: 7449
  Gene Symbol: HACE1
  Gene Name: HECT domain and ankyrin repeat containing E3 ubiquitin protein ligase 1
  ENST ID: ENST00000517424
  CDS Start-End: 1-527
atcaagatgctgcttccattcctccatttgaacctccaggacctgggagctatgaaaatctgtccactggcacaagggaatctaaaccagatgctcttgcagggagacaggaagccagtgcagattgtcaggatgttatttctatgacagctaaccggctaagtgctgtcattcaagctttttacatgtgctgttcttgtcagatgcctccgggaatgacttcacctcgtttcattgaatttgtctgcaaacatgatgaagttttaaaatgctttgttaatagaaatcccaaaattatatttgaccactttcactttctccttgaatgtcctgagttgatgtcaagattcatgcatatcataaaagcacagccttttaaagatcgctgtgaatggttctatgaacatttgcattcaggacagccagattcagatatggtgcacaggccagtgaatgaaaatgatatcctgctggttcacagaggagtagctgtgaagttgtgtcaaaagcaaattgtgcaaagctaaagcaagggattgctgtacggttccatggagaagaaggcatgggtcaaggtgttgtgcgtgagtggtttgatattctgtccaatgagatagtcaatcctgattatgcattgtttacccagtcagctgatggaacaacttttcagcctaatagcaactcttatgtaaatcctgatcacttgaactattttcggtttgctgggcagatcttgggattagcgttgaaccacaggcagctggtcaatatttacttcacacgatccttctacaagcacattcttggtattcctgtaaattaccaagatgtggcatccattgatccagaatatgcgaaaaatttgcaatggattttagataatgatataagtgatctgggtctagaactaactttttctgttgagactgatgtgtttggagcaatggaagaggtgcctttgaaacctgggggtgggagtattcttgtgacacaaaataataaagcggagtacgtccagcttgttactgaacttcgaatgacaagagccattcagcctcagatcaatgcttttttacagggctttcatatgttcattccaccctccctcatacagctttttgatgaatatgaattggagctactgctttctggcatgccagaaattgatgtgagtgattggataaaaaatacagaatacacaagtggctatgaaagagaagatccagttattcagtggttctgggaagttgtagaagacattactcaagaggagagagttcttctcttacagtttgttacgggcagttccagggtcccacatggtgggtttgctaatatcatgggtggaagtggattgcaaaactttacaatcgctgctgtgccatatactccaaatcttttaccaacttcaagcacatgcatcaacatgctcaagttacctgaatacccaagtaaagaaatactcaaggacagacttcttgtggcactacattgtggcagctatggttacacaatggcataatgaagtctggaaaactcctctgactactgatgcacaattcagaatggcagaagtaatttgggaaaatgtcaacaaaaaagcagcctaaatgcaacccataggcagggctgatgcttccaatttataaaggatcatcaggttttctgtttctctcttttcccttttatgttttctctgtttgtgatacaattagaaaatataaaatcacagtagattttattttttaaaatgctaactgaaagtaatagagactgtcctttttcataattaattttatccaagattgtattaaggcaaaatctgattctacattccacctctgctatgtaactgtcttgttaaaa

SEQ ID NO: 139963 - DNA, 9134 bp, Homo sapiens
  Payload ID: 7450
  Gene Symbol: HECTD1
  Gene Name: HECT domain containing E3 ubiquitin protein ligase 1
  Uniprot ID: Q9ULT8
  ENST ID: ENST00000399332
  CDS Start-End: 490-8322
ggcttcttgggaactctagggccgcggccgggcctggctctgccggcggcctgttgggagctggatcggagcggtttggaacgacaagcccgagtaagagcctgcgggaaggggaggcgggagcgcctcggaccgtcggaagggccctgcgtgggggcgcggatcccggacgcccggcgagtggcggaaagcgagaccccggcgccgagtgaggtcggccaggctgctgccgacttccccgctggcccctttgttcccctcccggggccctgccggcggcggggcccggttgcccgcgccagagcctcaggccggctccttttgcccttgagaagggttcgctgccaggccttcgagttccgggcgcagctcccgggagagccggcgccctgcctggcccggcggcctcctctcgggcacgaaggcttgctgctgcttctccagaacttcccttcctcgtagacacagcaaagagacttttaaaaaaccatggcagatgtggacccagatacattgctggaatggctacagatgggacagggagatgaaagggacatgcaactaatagcccttgaacagctatgcatgctgcttttgatgtctgacaacgtggatcgttgttttgaaacatgtcctcctcgcactttcttaccagccctttgcaaaatttttcttgatgaaagtgctccagacaatgtattagaggtgacagcccgtgccataacatactacctggatgtatctgcggaatgtacccgaaggattgttggggtagatggagctataaaagcactttgtaatcgtttggttgtagttgaacttaacaacaggactagcagagacttagccgaacagtgtgtaaaggtattagaactgatatgtactcgtgagtcaggagcagtctttgaggctggtggtttgaattgtgtgcttaccttcattcgtgacagtggacatctagttcataaagacaccttgcactctgctatggctgtggtatcaagactctgtggcaaaatggagcctcaagattcttctttagaaatttgtgtagaatctctgtctagtttattaaagcatgaagatcatcaggtttcagatggagctctgcgatgctttgcatcactggctgaccgatttacccgtcgtggtgttgacccagctccattagccaagcatggattaactgaggagctgttatctcgaatggctgctgctggtggtactgtttcaggaccatcatcagcatgcaaaccaggtcgcagcaccacaggagctccatccaccactgcagattccaaattgagtaatcaggtgtcaacaattgtaagtctgctctcaacactttgcagaggctctccggtagtaacacatgatcttctgaggtcggagcttccagattcaattgaaagtgcattgcagggtgatgaaagatgtgtgcttgatactatgcgtttggttgaccttctcttggtgctattatttgaaggacgaaaagctttgccaaagtctagtgctggatctacaggcagaatcccaggactccggagattagatagttctggggagcgctcacatcggcagcttatagattgtattcgaagtaaagataccgatgcacttatagatgcaattgacacaggagcctttgaagtaaattttatggatgatgtaggtcagactctattaaactgggcctctgcttttggaactcaggaaatggtagaatttctttgtgagagaggtgcagatgttaatagaggtcaaaggtcatcatcattacattatgctgcatgttttggaagacctcaagtagcaaagactctgttacggcatggtgcaaatccagatctgagagatgaagatgggaaaactccattagataaagctcgagaaaggggccatagtgaagtggtagctattcttcagtctccaggtgattggatgtgtccagttaataaaggagatgataagaaaaagaaagatacaaacaaagatgaagaagaatgtaatgagcccaaaggagatccggaaatggcacccatatacttgaaaaggttattgccagtgtttgcacaaacatttcagcaaactatgctgccttcaataaggaaagcaagtcttgctctaattcgaaaaatgattcatttttgctctgaagcactgttaaaagaagtttgtgattctgatgttggtcacaatttgcctacaatactagtggaaatcactgcaactgtcctggatcaagaggatgatgatgatggccacttgctggctttgcagatcataagggatttagtagataaaggtggtgatatatttttggatcagctagccagacttggtgtaattagcaaagtgtcaacgttggcaggtccttcctctgatgatgagaatgaagaggaatcaaaaccagaaaaagaagatgaaccacaggaagatgctaaagaattgcaacaaggtaaaccatatcattggagagactggtcaatcattaggggaagggactgcttatatatttggagtgatgcagcagccttggaattatctaatggcagtaatggatggttcagatttatcttggatggaaaacttgccaccatgtattcaagtggtagtccggaaggtggatctgacagttcagaaagccgaagtgaattcttagagaagttacaaagagctcgaggccaagtaaagccatctacttcaagtcaacctatactgtcagcaccaggacccactaaacttactgtaggaaattggtcactgacatgtttgaaagaaggagaaattgctattcataattcagatggtcagcaagctacaatattgaaagaagatttacctggttttgtatttgaatctaatagaggaaccaaacattcatttactgcagaaacttccctgggttcagaatttgtgactggctggactggcaaaagaggcagaaaactgaaatctaagttagaaaaaacaaagcaaaaggtacgaactatggctcgagatttatacgatgaccattttaaagctgttgaaagcatgcctcgtggagtagtggtaacactcagaaacatagcaactcagttagagtcatcttgggaacttcatacaaatagacaatgtattgagagtgagaacacttggagagatttaatgaagacagctttagaaaacctaattgtacttttgaaggatgaaaacacaatttcaccatatgaaatgtgtagcagtggcttggtacaagcacttcttactgtgttaaacaatagcatggatttggatatgaaacaagattgtagtcaactggtagaaagaataaatgtttttaaaactgcctttagtgaaaatgaagatgatgaaagtcgaccagcagttgcgttaattcgaaagttaatagctgtactagaatctattgaacgtctacctctccatttgtatgatacaccaggatccacatataacctccagatacttacaaggagattacgatttcggttggaacgtgcacctggtgaaactgcattgattgacaggactggcagaatgttgaagatggaacctttggctacagttgaatctctggaacagtaccttttgaaaatggtagcaaaacagtggtatgattttgaccgatcttcatttgtttttgttcgaaaattaagagaaggacaaaattttatatttcggcaccagcatgattttgatgaaaatggaatcatttactggattggaacaaatgcaaaaactgcttatgaatgggtaaatccagctgcctatggacttgtagtagtaacgtcatcagaaggaagaaatctaccttatggccgcttagaagacatactaagtcgtgataattcagctttaaattgtcatagcaatgatgataagaatgcctggtttgccatagatctgggtctctgggtgataccatcagcatatacacttcgtcatgctcgtggttatggaaggtctgcactgagaaattgggttttccaggtatccaaagatggacagaactggacttctttgtatacccatgttgatgactgcagtctcaatgaaccagggtcaactgcaacttggcctcttgatccaccaaaggatgagaaacaagggtggagacatgtgagaattaaacagatggggaaaaatgccagtggacaaacacactacctctcattatctggattcgaactttatggcactgtaaatggagtatgtgaagatcagctagggaaagcagctaaagaagcagaagctaatcttagacggcagagacgtctagtacgttcccaggttctgaaatacatggttccaggagctcgtgttatcagaggcctggattggaaatggcgagatcaggatggcagcccacagggagaaggcactgtcacaggagaactacacaatggctggattgatgtcacctgggatgctggtggctcaaactcttaccgtatgggcgcagaaggaaaatttgacctcaagcttgcaccagggtacgaccctgatacagtggcatcacccaaacctgtttcatccactgtttcaggcacaacgcaatcatggagcagcttggtgaaaaacaactgtccagacaagacatctgctgctgcaggctcctcaagtagaaaaggaagcagcagttctgtgtgtagcgtggccagtagcagcgacatcagcttgggttcgaccaaaacggaacggagatcagaaattgtaatggaacacagtatagtttcaggagctgatgtccatgaaccaattgttgttctttcatctgctgaaaacgtccctcaaacagaagtagggtcatcttccagtgcaagcaccagcaccttaacagcggaaacgggaagtgaaaatgctgaaaggaagttaggccctgatagttctgttcgtactcctggggagtctagtgcaatatccatgggaattgtcagtgttagttctcctgatgttagttcagtatctgaattaactaataaagaagcagcttcacaacgacctcttagctcttcagcaagtaacagactgtcagtgagttctttgttggctgctggggcccctatgagctctagtgcaagtgtacctaacctgtcctcaagagaaacatctagcttggagagttttgtaaggagagtggcaaacatagcacggactaatgccacgaacaacatgaatctaagccgaagcagcagtgataacaacactaatactttggggaggaatgtgatgagcacagcaacttctcctcttatgggtgctcagagtttccctaatttgaccacacctggtactacatcaacagtgactatgtcaacatccagtgttactagcagcagcaatgtagctacagcaacaacagttttatcagttggtcaatctttaagtaacactttaaccaccagcctcacatcaacttccagtgagagtgacacaggtcaggaagcagaatattccttatatgatttccttgatagctgccgtgccagtactctattggctgagctcgatgatgatgaggacttacctgagccagatgaagaagatgatgagaatgaagatgacaatcaggaggaccaagaatacgaggaggttatgattctgagacgcccatccctgcaacgtcgagctggctcccgctctgatgtaacgcatcatgctgttacctcgcagctaccacaggtacctgctggagcagggagccgacctattggggagcaggaagaagaagagtacgaaactaaaggaggacgccggagaacatgggatgatgattatgtgctaaagagacagttttctgcattggttcctgcttttgatcctagacctggtcgtactaatgtccagcagacaactgatctagaaataccacccccagggacccctcattcagagctcttggaagaagtcgaatgtactccgtcacctcgattagctctcactttgaaagtaacaggtcttggaacgactcgtgaagttgaattaccactcaccaatttcagatcaaccatcttttactatgtacaaaaattgcttcaattgtcctgtaatggcaatgtgaaatcagataaacttaggcgtatttgggagcccacatacacaatcatgtacagagaaatgaaggattctgataaagaaaaggaaaatggaaaaatgggttgctggtctatagagcatgtggagcagtaccttggcactgatgaattaccaaagaatgacttgataacctacctgcagaagaatgcagacgctgctttcctgcgccactggaaattaactggcactaataaaagtattaggaaaaacagaaattgttctcagctcatagctgcatataaggatttttgtgagcatggaacaaagtctgggttaaaccagggggccatttctactcttcaaagtagtgatattcttaatttaacaaaagaacaacctcaggccaaagcaggcaatggacagaactcttgtggagtagaagatgtccttcagcttctgcgtattctatatatagttgcaagtgacccttattcaagaatatcccaggaagatggtgatgaacagcctcagtttacttttccaccagatgaattcactagcaaaaaaattacaacaaaaatattacagcagattgaggaaccattggcactggcaagtggggctctgccagactggtgtgaacaattaaccagcaaatgtccttttctaataccatttgaaactagacagctttatttcacatgtacagcatttggcgcctcaagagcaatagtatggttacagaaccgacgtgaagccactgtggagcgaacgagaaccacaagcagtgttaggcgagatgaccctggagagtttcgagttggtcgtctcaagcatgaaagagtaaaagttccacgtggcgagtcactgatggaatgggctgagaatgtcatgcaaatacatgcagatcggaaatcagttcttgaggttgaatttttaggagaagaaggaactggcttgggacccacattagagttttatgctctggtggcagcagaattccagagaactgacttgggagcttggctttgtgatgataattttccagatgatgaatctcgtcacgttgatcttggaggtggattgaaacctcctggatattatgtgcagaggtcatgtggactgttcacagcaccatttccacaggatagtgatgagcttgaaaggatcacgaaactgtttcatttccttggaattttcttggccaaatgcattcaagacaatagacttgtggacttacctatttctaaacctttttttaaacttatgtgtatgggtgacattaaaagcaatatgagtaaactgatttatgagtcacgaggtgatagagacttacactgtactgaaagtcagtctgaagcttctacagaagaaggtcatgattcactctcggtaggaagctttgaagaggattcaaaatcagaatttattcttgatccccctaaaccaaaacccccagcttggtttaatggaattttgacttgggaagactttgaattagtaaacccacacagagccagatttttaaaagaaattaaagaccttgctatcaagaggcgccaaattttaagcaacaaaggtctttctgaagatgagaagaacacaaaattacaggaactagtgctgaagaatccatcaggttctgggcctccacttagcatagaggatttaggtttaaatttccagttttgcccttcctcaagaatatatggttttacagctgtggatctcaagccaagtggtgaagatgagatgataacaatggataatgcagaagaatatgtggatttgatgtttgacttttgtatgcatacgggtattcagaaacaaatggaagcctttagagatgggtttaataaagtttttccaatggagaaattaagttccttcagccatgaagaagtccaaatgattctttgtggaaaccagtcaccatcctgggcagcagaggatattatcaattacactgaacctaagctgggttatacacgtgacagccctggtttcctgaggtttgtgagggttttatgtggcatgtcttctgatgaaaggaaagcattcttgcagtttaccactggttgttcaactctacccccaggtggactggctaacctgcatcccaggctcacggttgtacgcaaggttgatgctactgatgcaagctatccatcagtcaatacatgtgtgcattaccttaagttgcctgaatattcttccgaggagatcatgagagagcgcctgctagctgctacaatggagaaaggctttcatctcaattgagctttgaagtgcaatgggagacatcagagactttaaaaatactagtgaagcctcttgtgtttgtgtgcagagaagtatatgatccaccatgctaatgacacttgcctttttttccaccattaaggctttaagaacatgtggaataagttttttagctgctaatgacaaaacaaatcctgtaactacccagccagcaagtatatagcacagaacactgtgttactttacaagggcttatgtgactggaataaggtggtcccacttgactgttccaaagagcagcttctcagatcttcagtgttcactggtaaatttctaacagtgtatttgtgtaaagtttgtcatttcatactccatacactacagttgctgtcactgatccctgttttgctggcttttaagctacttggtcaaaaatcctgcttccttaaaacatagagaattaatgagcatctcaagctttttcttttcctttttaatgatgcctgcactatcaagagtattctagtgttctctctttgtttggcatataatcatgcaccaaactttttatttctttaaggtgggagtatatttttatttcctaaatgccatactatgaagatcaaagtcttaagtgtgtttgcagctcaaaaataaagatgtattaaggggggaaaacctggtctaagtgcaaggcacacttacagcgagttttactttcggttgtattttctttgtatattataaacatttatttaacttgttgccgtttgaagtaaaaaatttccaaaatgtatgctcaacaataatcattaaaatgtttgcagcgt

SEQ ID NO: 139964 - DNA, 9080 bp, Homo sapiens
  Payload ID: 7450
  Gene Symbol: HECTD1
  Gene Name: HECT domain containing E3 ubiquitin protein ligase 1
  Uniprot ID: Q9ULT8
  ENST ID: ENST00000553700
  CDS Start-End: 436-8268
ggatttgctccgcctccgccgggctcggctgccctcggcagcttccccgcctggctctccctcgaccctcctcccctccccctcccggttcgcgatggactgggcctccccgccgcgccgccgccgccgtcgcccgcagcaccgcgcgggcctctgagttgcagggcctgaggagccgcgtgctggggactggacgtccgctggctgctgccgcacgcgagaacctctcgcttccctgtcaccaggtcctcgcggaggaaggggagggacgaggcgcggcttttcctgtgccgcctgcccggttcgacctgcgcggcctgcggcttcttgggaactctagggccgcggccgggcctggctctgccggcggcctgttgggagctggatcggagcggtttggaacgacaagcccgacaaagagacttttaaaaaaccatggcagatgtggacccagatacattgctggaatggctacagatgggacagggagatgaaagggacatgcaactaatagcccttgaacagctatgcatgctgcttttgatgtctgacaacgtggatcgttgttttgaaacatgtcctcctcgcactttcttaccagccctttgcaaaatttttcttgatgaaagtgctccagacaatgtattagaggtgacagcccgtgccataacatactacctggatgtatctgcggaatgtacccgaaggattgttggggtagatggagctataaaagcactttgtaatcgtttggttgtagttgaacttaacaacaggactagcagagacttagccgaacagtgtgtaaaggtattagaactgatatgtactcgtgagtcaggagcagtctttgaggctggtggtttgaattgtgtgcttaccttcattcgtgacagtggacatctagttcataaagacaccttgcactctgctatggctgtggtatcaagactctgtggcaaaatggagcctcaagattcttctttagaaatttgtgtagaatctctgtctagtttattaaagcatgaagatcatcaggtttcagatggagctctgcgatgctttgcatcactggctgaccgatttacccgtcgtggtgttgacccagctccattagccaagcatggattaactgaggagctgttatctcgaatggctgctgctggtggtactgtttcaggaccatcatcagcatgcaaaccaggtcgcagcaccacaggagctccatccaccactgcagattccaaattgagtaatcaggtgtcaacaattgtaagtctgctctcaacactttgcagaggctctccggtagtaacacatgatcttctgaggtcggagcttccagattcaattgaaagtgcattgcagggtgatgaaagatgtgtgcttgatactatgcgtttggttgaccttctcttggtgctattatttgaaggacgaaaagctttgccaaagtctagtgctggatctacaggcagaatcccaggactccggagattagatagttctggggagcgctcacatcggcagcttatagattgtattcgaagtaaagataccgatgcacttatagatgcaattgacacaggagcctttgaagtaaattttatggatgatgtaggtcagactctattaaactgggcctctgcttttggaactcaggaaatggtagaatttctttgtgagagaggtgcagatgttaatagaggtcaaaggtcatcatcattacattatgctgcatgttttggaagacctcaagtagcaaagactctgttacggcatggtgcaaatccagatctgagagatgaagatgggaaaactccattagataaagctcgagaaaggggccatagtgaagtggtagctattcttcagtctccaggtgattggatgtgtccagttaataaaggagatgataagaaaaagaaagatacaaacaaagatgaagaagaatgtaatgagcccaaaggagatccggaaatggcacccatatacttgaaaaggttattgccagtgtttgcacaaacatttcagcaaactatgctgccttcaataaggaaagcaagtcttgctctaattcgaaaaatgattcatttttgctctgaagcactgttaaaagaagtttgtgattctgatgttggtcacaatttgcctacaatactagtggaaatcactgcaactgtcctggatcaagaggatgatgatgatggccacttgctggctttgcagatcataagggatttagtagataaaggtggtgatatatttttggatcagctagccagacttggtgtaattagcaaagtgtcaacgttggcaggtccttcctctgatgatgagaatgaagaggaatcaaaaccagaaaaagaagatgaaccacaggaagatgctaaagaattgcaacaaggtaaaccatatcattggagagactggtcaatcattaggggaagggactgcttatatatttggagtgatgcagcagccttggaattatctaatggcagtaatggatggttcagatttatcttggatggaaaacttgccaccatgtattcaagtggtagtccggaaggtggatctgacagttcagaaagccgaagtgaattcttagagaagttacaaagagctcgaggccaagtaaagccatctacttcaagtcaacctatactgtcagcaccaggacccactaaacttactgtaggaaattggtcactgacatgtttgaaagaaggagaaattgctattcataattcagatggtcagcaagctacaatattgaaagaagatttacctggttttgtatttgaatctaatagaggaaccaaacattcatttactgcagaaacttccctgggttcagaatttgtgactggctggactggcaaaagaggcagaaaactgaaatctaagttagaaaaaacaaagcaaaaggtacgaactatggctcgagatttatacgatgaccattttaaagctgttgaaagcatgcctcgtggagtagtggtaacactcagaaacatagcaactcagttagagtcatcttgggaacttcatacaaatagacaatgtattgagagtgagaacacttggagagatttaatgaagacagctttagaaaacctaattgtacttttgaaggatgaaaacacaatttcaccatatgaaatgtgtagcagtggcttggtacaagcacttcttactgtgttaaacaatagcatggatttggatatgaaacaagattgtagtcaactggtagaaagaataaatgtttttaaaactgcctttagtgaaaatgaagatgatgaaagtcgaccagcagttgcgttaattcgaaagttaatagctgtactagaatctattgaacgtctacctctccatttgtatgatacaccaggatccacatataacctccagatacttacaaggagattacgatttcggttggaacgtgcacctggtgaaactgcattgattgacaggactggcagaatgttgaagatggaacctttggctacagttgaatctctggaacagtaccttttgaaaatggtagcaaaacagtggtatgattttgaccgatcttcatttgtttttgttcgaaaattaagagaaggacaaaattttatatttcggcaccagcatgattttgatgaaaatggaatcatttactggattggaacaaatgcaaaaactgcttatgaatgggtaaatccagctgcctatggacttgtagtagtaacgtcatcagaaggaagaaatctaccttatggccgcttagaagacatactaagtcgtgataattcagctttaaattgtcatagcaatgatgataagaatgcctggtttgccatagatctgggtctctgggtgataccatcagcatatacacttcgtcatgctcgtggttatggaaggtctgcactgagaaattgggttttccaggtatccaaagatggacagaactggacttctttgtatacccatgttgatgactgcagtctcaatgaaccagggtcaactgcaacttggcctcttgatccaccaaaggatgagaaacaagggtggagacatgtgagaattaaacagatggggaaaaatgccagtggacaaacacactacctctcattatctggattcgaactttatggcactgtaaatggagtatgtgaagatcagctagggaaagcagctaaagaagcagaagctaatcttagacggcagagacgtctagtacgttcccaggttctgaaatacatggttccaggagctcgtgttatcagaggcctggattggaaatggcgagatcaggatggcagcccacagggagaaggcactgtcacaggagaactacacaatggctggattgatgtcacctgggatgctggtggctcaaactcttaccgtatgggcgcagaaggaaaatttgacctcaagcttgcaccagggtacgaccctgatacagtggcatcacccaaacctgtttcatccactgtttcaggcacaacgcaatcatggagcagcttggtgaaaaacaactgtccagacaagacatctgctgctgcaggctcctcaagtagaaaaggaagcagcagttctgtgtgtagcgtggccagtagcagcgacatcagcttgggttcgaccaaaacggaacggagatcagaaattgtaatggaacacagtatagtttcaggagctgatgtccatgaaccaattgttgttctttcatctgctgaaaacgtccctcaaacagaagtagggtcatcttccagtgcaagcaccagcaccttaacagcggaaacgggaagtgaaaatgctgaaaggaagttaggccctgatagttctgttcgtactcctggggagtctagtgcaatatccatgggaattgtcagtgttagttctcctgatgttagttcagtatctgaattaactaataaagaagcagcttcacaacgacctcttagctcttcagcaagtaacagactgtcagtgagttctttgttggctgctggggcccctatgagctctagtgcaagtgtacctaacctgtcctcaagagaaacatctagcttggagagttttgtaaggagagtggcaaacatagcacggactaatgccacgaacaacatgaatctaagccgaagcagcagtgataacaacactaatactttggggaggaatgtgatgagcacagcaacttctcctcttatgggtgctcagagtttccctaatttgaccacacctggtactacatcaacagtgactatgtcaacatccagtgttactagcagcagcaatgtagctacagcaacaacagttttatcagttggtcaatctttaagtaacactttaaccaccagcctcacatcaacttccagtgagagtgacacaggtcaggaagcagaatattccttatatgatttccttgatagctgccgtgccagtactctattggctgagctcgatgatgatgaggacttacctgagccagatgaagaagatgatgagaatgaagatgacaatcaggaggaccaagaatacgaggaggttatgattctgagacgcccatccctgcaacgtcgagctggctcccgctctgatgtaacgcatcatgctgttacctcgcagctaccacaggtacctgctggagcagggagccgacctattggggagcaggaagaagaagagtacgaaactaaaggaggacgccggagaacatgggatgatgattatgtgctaaagagacagttttctgcattggttcctgcttttgatcctagacctggtcgtactaatgtccagcagacaactgatctagaaataccacccccagggacccctcattcagagctcttggaagaagtcgaatgtactccgtcacctcgattagctctcactttgaaagtaacaggtcttggaacgactcgtgaagttgaattaccactcaccaatttcagatcaaccatcttttactatgtacaaaaattgcttcaattgtcctgtaatggcaatgtgaaatcagataaacttaggcgtatttgggagcccacatacacaatcatgtacagagaaatgaaggattctgataaagaaaaggaaaatggaaaaatgggttgctggtctatagagcatgtggagcagtaccttggcactgatgaattaccaaagaatgacttgataacctacctgcagaagaatgcagacgctgctttcctgcgccactggaaattaactggcactaataaaagtattaggaaaaacagaaattgttctcagctcatagctgcatataaggatttttgtgagcatggaacaaagtctgggttaaaccagggggccatttctactcttcaaagtagtgatattcttaatttaacaaaagaacaacctcaggccaaagcaggcaatggacagaactcttgtggagtagaagatgtccttcagcttctgcgtattctatatatagttgcaagtgacccttattcaagaatatcccaggaagatggtgatgaacagcctcagtttacttttccaccagatgaattcactagcaaaaaaattacaacaaaaatattacagcagattgaggaaccattggcactggcaagtggggctctgccagactggtgtgaacaattaaccagcaaatgtccttttctaataccatttgaaactagacagctttatttcacatgtacagcatttggcgcctcaagagcaatagtatggttacagaaccgacgtgaagccactgtggagcgaacgagaaccacaagcagtgttaggcgagatgaccctggagagtttcgagttggtcgtctcaagcatgaaagagtaaaagttccacgtggcgagtcactgatggaatgggctgagaatgtcatgcaaatacatgcagatcggaaatcagttcttgaggttgaatttttaggagaagaaggaactggcttgggacccacattagagttttatgctctggtggcagcagaattccagagaactgacttgggagcttggctttgtgatgataattttccagatgatgaatctcgtcacgttgatcttggaggtggattgaaacctcctggatattatgtgcagaggtcatgtggactgttcacagcaccatttccacaggatagtgatgagcttgaaaggatcacgaaactgtttcatttccttggaattttcttggccaaatgcattcaagacaatagacttgtggacttacctatttctaaacctttttttaaacttatgtgtatgggtgacattaaaagcaatatgagtaaactgatttatgagtcacgaggtgatagagacttacactgtactgaaagtcagtctgaagcttctacagaagaaggtcatgattcactctcggtaggaagctttgaagaggattcaaaatcagaatttattcttgatccccctaaaccaaaacccccagcttggtttaatggaattttgacttgggaagactttgaattagtaaacccacacagagccagatttttaaaagaaattaaagaccttgctatcaagaggcgccaaattttaagcaacaaaggtctttctgaagatgagaagaacacaaaattacaggaactagtgctgaagaatccatcaggttctgggcctccacttagcatagaggatttaggtttaaatttccagttttgcccttcctcaagaatatatggttttacagctgtggatctcaagccaagtggtgaagatgagatgataacaatggataatgcagaagaatatgtggatttgatgtttgacttttgtatgcatacgggtattcagaaacaaatggaagcctttagagatgggtttaataaagtttttccaatggagaaattaagttccttcagccatgaagaagtccaaatgattctttgtggaaaccagtcaccatcctgggcagcagaggatattatcaattacactgaacctaagctgggttatacacgtgacagccctggtttcctgaggtttgtgagggttttatgtggcatgtcttctgatgaaaggaaagcattcttgcagtttaccactggttgttcaactctacccccaggtggactggctaacctgcatcccaggctcacggttgtacgcaaggttgatgctactgatgcaagctatccatcagtcaatacatgtgtgcattaccttaagttgcctgaatattcttccgaggagatcatgagagagcgcctgctagctgctacaatggagaaaggctttcatctcaattgagctttgaagtgcaatgggagacatcagagactttaaaaatactagtgaagcctcttgtgtttgtgtgcagagaagtatatgatccaccatgctaatgacacttgcctttttttccaccattaaggctttaagaacatgtggaataagttttttagctgctaatgacaaaacaaatcctgtaactacccagccagcaagtatatagcacagaacactgtgttactttacaagggcttatgtgactggaataaggtggtcccacttgactgttccaaagagcagcttctcagatcttcagtgttcactggtaaatttctaacagtgtatttgtgtaaagtttgtcatttcatactccatacactacagttgctgtcactgatccctgttttgctggcttttaagctacttggtcaaaaatcctgcttccttaaaacatagagaattaatgagcatctcaagctttttcttttcctttttaatgatgcctgcactatcaagagtattctagtgttctctctttgtttggcatataatcatgcaccaaactttttatttctttaaggtgggagtatatttttatttcctaaatgccatactatgaagatcaaagtcttaagtgtgtttgcagctcaaaaataaagatgtattaaggggggaaaacctggtctaagtgcaaggcacacttacagcgagttttactttcggttgtattttctttgtatattataaacatttatttaacttgttgccgtttgaagtaaaaaatttccaaaatgtatgctcaacaataatcattaaaatgtttgcagcgt

SEQ ID NO: 139965 - DNA, 775 bp, Homo sapiens
  Payload ID: 7450
  Gene Symbol: HECTD1
  Gene Name: HECT domain containing E3 ubiquitin protein ligase 1
  ENST ID: ENST00000555915
  CDS Start-End: 1-368
ggactaatgccacgaacaacatgaatctaagccgaagcagcagtgataacaacactaatactttggggaggaatgtgatgagcacagcaacttctcctcttatgggtgctcagagtttccctaatttgaccacacctggtactacatcaacagtgactatgtcaacatccagtgttactagcagcagcaatgtagctacagcaacaacagttttatcagttggtcaatctttaagtaacactttaaccaccagcctcacatcaacttccagtgagagtgacacaggtcaggaagcagaatattccttatatgtttttatgaagaacagtttgtcagcatcttcatttatgcaggacaatgtaatttgacccagtctccatcgaaggcaagagattataagaaggaaggagataaaaatgatatttccttgatagctgccgtgccagtactctattggctgagctcgatgatgatgaggacttacctgagccagatgaagaagatgatgagaatgaagatgacaatcaggaggaccaagaatacgaggaggttatgattctgagacgcccatccctgcaacgtcgagctggctcccgctctgatgtaacgcatcatgctgttacctcgcagctaccacaggtacctgctggagcagggagccgacctattggggagcaggaagaagaagagtacgaaactaaaggaggacgccggagaacatgggatgatgattatgtgctaaagagacagttttctgcattggttcctgcttttg

SEQ ID NO: 139966 - DNA, 3748 bp, Homo sapiens
  Payload ID: 7450
  Gene Symbol: HECTD1
  Gene Name: HECT domain containing E3 ubiquitin protein ligase 1
  ENST ID: ENST00000554882
  CDS Start-End: 1-2930
ctttaagtaacactttaaccaccagcctcacatcaacttccagtgagagtgacacaggtcaggaagcagaatattccttatatgatttccttgatagctgccgtgccagtactctattggctgagctcgatgatgatgaggacttacctgagccagatgaagaagatgatgagaatgaagatgacaatcaggaggaccaagaatacgaggagattctgagacgcccatccctgcaacgtcgagctggctcccgctctgatgtaacgcatcatgctgttacctcgcagctaccacaggtacctgctggagcagggagccgacctattggggagcaggaagaagaagagtacgaaactaaaggaggacgccggagaacatgggatgatgattatgtgctaaagagacagttttctgcattggttcctgcttttgatcctagacctggtcgtactaatgtccagcagacaactgatctagaaataccacccccagggacccctcattcagagctcttggaagaagtcgaatgtactccgtcacctcgattagctctcactttgaaagtaacaggtcttggaacgactcgtgaagttgaattaccactcaccaatttcagatcaaccatcttttactatgtacaaaaattgcttcaattgtcctgtaatggcaatgtgaaatcagataaacttaggcgtatttgggagcccacatacacaatcatgtacagagaaatgaaggattctgataaagaaaaggaaaatggaaaaatgggttgctggtctatagagcatgtggagcagtaccttggcactgatgaattaccaaagaatgacttgataacctacctgcagaagaatgcagacgctgctttcctgcgccactggaaattaactggcactaataaaagtattaggaaaaacagaaattgttctcagctcatagctgcatataaggatttttgtgagcatggaacaaagtctgggttaaaccagggggccatttctactcttcaaagtagtgatattcttaatttaacaaaagaacaacctcaggccaaagcaggcaatggacagaactcttgtggagtagaagatgtccttcagcttctgcgtattctatatatagttgcaagtgacccttattcaagaatatcccaggaagatggtgatgaacagcctcagtttacttttccaccagatgaattcactagcaaaaaaattacaacaaaaatattacagcagattgaggaaccattggcactggcaagtggggctctgccagactggtgtgaacaattaaccagcaaatgtccttttctaataccatttgaaactagacagctttatttcacatgtacagcatttggcgcctcaagagcaatagtatggttacagaaccgacgtgaagccactgtggagcgaacgagaaccacaagcagtgttaggcgagatgaccctggagagtttcgagttggtcgtctcaagcatgaaagagtaaaagttccacgtggcgagtcactgatggaatgggctgagaatgtcatgcaaatacatgcagatcggaaatcagttcttgaggttgaatttttaggagaagaaggaactggcttgggacccacattagagttttatgctctggtggcagcagaattccagagaactgacttgggagcttggctttgtgatgataattttccagatgatgaatctcgtcacgttgatcttggaggtggattgaaacctcctggatattatgtgcagaggtcatgtggactgttcacagcaccatttccacaggatagtgatgagcttgaaaggatcacgaaactgtttcatttccttggaattttcttggccaaatgcattcaagacaatagacttgtggacttacctatttctaaacctttttttaaacttatgtgtatgggtgacattaaaagcaatatgagtaaactgatttatgagtcacgaggtgatagagacttacactgtactgaaagtcagtctgaagcttctacagaagaaggtcatgattcactctcggtaggaagctttgaagaggattcaaaatcagaatttattcttgatccccctaaaccaaaacccccagcttggtttaatggaattttgacttgggaagactttgaattagtaaacccacacagagccagatttttaaaagaaattaaagaccttgctatcaagaggcgccaaattttaagcaacaaaggtctttctgaagatgagaagaacacaaaattacaggaactagtgctgaagaatccatcaggttctgggcctccacttagcatagaggatttaggtttaaatttccagttttgcccttcctcaagaatatatggttttacagctgtggatctcaagccaagtggtgaagatgagatgataacaatggataatgcagaagaatatgtggatttgatgtttgacttttgtatgcatacgggtattcagaaacaaatggaagcctttagagatgggtttaataaagtttttccaatggagaaattaagttccttcagccatgaagaagtccaaatgattctttgtggaaaccagtcaccatcctgggcagcagaggatattatcaattacactgaacctaagctgggttatacacgtgacagccctggtttcctgaggtttgtgagggttttatgtggcatgtcttctgatgaaaggaaagcattcttgcagtttaccactggttgttcaactctacccccaggtggactggctaacctgcatcccaggctcacggttgtacgcaaggttgatgctactgatgcaagctatccatcagtcaatacatgtgtgcattaccttaagttgcctgaatattcttccgaggagatcatgagagagcgcctgctagctgctacaatggagaaaggctttcatctcaattgagctttgaagtgcaatgggagacatcagagactttaaaaatactagtgaagcctcttgtgtttgtgtgcagagaagtatatgatccaccatgctaatgacacttgcctttttttccaccattaaggctttaagaacatgtggaataagttttttagctgctaatgacaaaacaaatcctgtaactacccagccagcaagtatatagcacagaacactgtgttactttacaagggcttatgtgactggaataaggtggtcccacttgactgttccaaagagcagcttctcagatcttcagtgttcactggtaaatttctaacagtgtatttgtgtaaagtttgtcatttcatactccatacactacagttgctgtcactgatccctgttttgctggcttttaagctacttggtcaaaaatcctgcttccttaaaacatagagaattaatgagcatctcaagctttttcttttcctttttaatgatgcctgcactatcaagagtattctagtgttctctctttgtttggcatataatcatgcaccaaactttttatttctttaaggtgggagtatatttttatttcctaaatgccatactatgaagatcaaagtcttaagtgtgtttgcagctcaaaaataaagatgtattaaggggggaaaacctggtctaagtgcaaggcacacttacagcgagttttactttcggttgtattttctttgtatattataaacatttatttaacttgttgccgtttgaagtaaaaaatttccaaaatgtatgctcaacaataatcattaaaatgtttgcagcgtacagaa

SEQ ID NO: 139967 - DNA, 4395 bp, Homo sapiens
  Payload ID: 7450
  Gene Symbol: HECTD1
  Gene Name: HECT domain containing E3 ubiquitin protein ligase 1
  ENST ID: ENST00000553957
  CDS Start-End: 1-4395
gtgtttgcacaaacatttcagcaaactatgctgccttcaataaggaaagcaagtcttgctctaattcgaaaaatgattcatttttgctctgaagcactgttaaaagaagtttgtgattctgatgttggtcacaatttgcctacaatactagtggaaatcactgcaactgtcctggatcaagaggatgatgatgatggccacttgctggctttgcagatcataagggatttagtagataaaggtggtgatatatttttggatcagctagccagacttggtgtaattagcaaagtgtcaacgttggcaggtccttcctctgatgatgagaatgaagaggaatcaaaaccagaaaaagaagatgaaccacaggaagatgctaaagaattgcaacaaggtaaaccatatcattggagagactggtcaatcattaggggaagggactgcttatatatttggagtgatgcagcagccttggaattatctaatggcagtaatggatggttcagatttatcttggatggaaaacttgccaccatgtattcaagtggtagtccggaaggtggatctgacagttcagaaagccgaagtgaattcttagagaagttacaaagagctcgaggccaagtaaagccatctacttcaagtcaacctatactgtcagcaccaggacccactaaacttactgtaggaaattggtcactgacatgtttgaaagaaggagaaattgctattcataattcagatggtcagcaagctacaatattgaaagaagatttacctggttttgtatttgaatctaatagaggaaccaaacattcatttactgcagaaacttccctgggttcagaatttgtgactggctggactggcaaaagaggcagaaaactgaaatctaagttagaaaaaacaaagcaaaaggtacgaactatggctcgagatttatacgatgaccattttaaagctgttgaaagcatgcctcgtggagtagtggtaacactcagaaacatagcaactcagttagagtcatcttgggaacttcatacaaatagacaatgtattgagagtgagaacacttggagagatttaatgaagacagctttagaaaacctaattgtacttttgaaggatgaaaacacaatttcaccatatgaaatgtgtagcagtggcttggtacaagcacttcttactgtgttaaacaatagcatggatttggatatgaaacaagattgtagtcaactggtagaaagaataaatgtttttaaaactgcctttagtgaaaatgaagatgatgaaagtcgaccagcagttgcgttaattcgaaagttaatagctgtactagaatctattgaacgtctacctctccatttgtatgatacaccaggatccacatataacctccagatacttacaaggagattacgatttcggttggaacgtgcacctggtgaaactgcattgattgacaggactggcagaatgttgaagatggaacctttggctacagttgaatctctggaacagtaccttttgaaaatggtagcaaaacagtggtatgattttgaccgatcttcatttgtttttgttcgaaaattaagagaaggacaaaattttatatttcggcaccagcatgattttgatgaaaatggaatcatttactggattggaacaaatgcaaaaactgcttatgaatgggtaaatccagctgcctatggacttgtagtagtaacgtcatcagaaggaagaaatctaccttatggccgcttagaagacatactaagtcgtgataattcagctttaaattgtcatagcaatgatgataagaatgcctggtttgccatagatctgggtctctgggtgataccatcagcatatacacttcgtcatgctcgtggttatggaaggtctgcactgagaaattgggttttccaggtatccaaagatggacagaactggacttctttgtatacccatgttgatgactgcagtctcaatgaaccagggtcaactgcaacttggcctcttgatccaccaaaggatgagaaacaagggtggagacatgtgagaattaaacagatggggaaaaatgccagtggacaaacacactacctctcattatctggattcgaactttatggcactgtaaatggagtatgtgaagatcagctagggaaagcagctaaagaagcagaagctaatcttagacggcagagacgtctagtacgttcccaggttctgaaatacatggttccaggagctcgtgttatcagaggcctggattggaaatggcgagatcaggatggcagcccacagggagaaggcactgtcacaggagaactacacaatggcacaacgcaatcatggagcagcttggtgaaaaacaactgtccagacaagacatctgctgctgcaggctcctcaagtagaaaaggaagcagcagttctgtgtgtagcgtggccagtagcagcgacatcagcttgggttcgaccaaaacggaacggagatcagaaattgtaatggaacacagtatagtttcaggagctgatgtccatgaaccaattgttgttctttcatctgctgaaaacgtccctcaaacagaagtagggtcatcttccagtgcaagcaccagcaccttaacagcggaaacgggaagtgaaaatgctgaaaggaagttaggccctgatagttctgttcgtactcctggggagtctagtgcaatatccatgggaattgtcagtgttagttctcctgatgttagttcagtatctgaattaactaataaagaagcagcttcacaacgacctcttagctcttcagcaagtaacagactgtcagtgagttctttgttggctgctggggcccctatgagctctagtgcaagtgtacctaacctgtcctcaagagaaacatctagcttggagagttttgtaaggagagtggcaaacatagcacggactaatgccacgaacaacatgaatctaagccgaagcagcagtgataacaacactaatactttggggaggaatgtgatgagcacagcaacttctcctcttatgggtgctcagagtttccctaatttgaccacacctggtactacatcaacagtgactatgtcaacatccagtgttactagcagcagcaatgtagctacagcaacaacagttttatcagttggtcaatctttaagtaacactttaaccaccagcctcacatcaacttccagtgagagtgacacaggtcaggaagcagaatattccttatatgatttccttgatagctgccgtgccagtactctattggctgagctcgatgatgatgaggacttacctgagccagatgaagaagatgatgagaatgaagatgacaatcaggaggaccaagaatacgaggaggttatgattctgagacgcccatccctgcaacgtcgagctggctcccgctctgatgtaacgcatcatgctgttacctcgcagctaccacaggtacctgctggagcagggagccgacctattggggagcaggaagaagaagagtacgaaactaaaggaggacgccggagaacatgggatgatgattatgtgctaaagagacagttttctgcattggttcctgcttttgatcctagacctggtcgtactaatgtccagcagacaactgatctagaaataccacccccagggacccctcattcagagctcttggaagaagtcgaatgtactccgtcacctcgattagctctcactttgaaagtaacaggtcttggaacgactcgtgaagttgaattaccactcaccaatttcagatcaaccatcttttactatgtacaaaaattgcttcaattgtcctgtaatggcaatgtgaaatcagataaacttaggcgtatttgggagcccacatacacaatcatgtacagagaaatgaaggattctgataaagaaaaggaaaatggaaaaatgggttgctggtctatagagcatgtggagcagtaccttggcactgatgaattaccaaagaatgacttgataacctacctgcagaagaatgcagacgctgctttcctgcgccactggaaattaactggcactaataaaagtattaggaaaaacagaaattgttctcagctcatagctgcatataaggatttttgtgagcatggaacaaagtctgggttaaaccagggggccatttctactcttcaaagtagtgatattcttaatttaacaaaagaacaacctcaggccaaagcaggcaatggacagaactcttgtggagtagaagatgtccttcagcttctgcgtattctatatatagttgcaagtgacccttattcaagaatatcccaggaagatggtgatgaacagcctcagtttacttttccaccagatgaattcactagc

SEQ ID NO: 139968 - DNA, 3267 bp, Homo sapiens
  Payload ID: 7450
  Gene Symbol: HECTD1
  Gene Name: HECT domain containing E3 ubiquitin protein ligase 1
  ENST ID: ENST00000556224
  CDS Start-End: 490-3267
ggcttcttgggaactctagggccgcggccgggcctggctctgccggcggcctgttgggagctggatcggagcggtttggaacgacaagcccgagtaagagcctgcgggaaggggaggcgggagcgcctcggaccgtcggaagggccctgcgtgggggcgcggatcccggacgcccggcgagtggcggaaagcgagaccccggcgccgagtgaggtcggccaggctgctgccgacttccccgctggcccctttgttcccctcccggggccctgccggcggcggggcccggttgcccgcgccagagcctcaggccggctccttttgcccttgagaagggttcgctgccaggccttcgagttccgggcgcagctcccgggagagccggcgccctgcctggcccggcggcctcctctcgggcacgaaggcttgctgctgcttctccagaacttcccttcctcgtagacacagcaaagagacttttaaaaaaccatggcagatgtggacccagatacattgctggaatggctacagatgggacagggagatgaaagggacatgcaactaatagcccttgaacagctatgcatgctgcttttgatgtctgacaacgtggatcgttgttttgaaacatgtcctcctcgcactttcttaccagccctttgcaaaatttttcttgatgaaagtgctccagacaatgtattagaggtgacagcccgtgccataacatactacctggatgtatctgcggaatgtacccgaaggattgttggggtagatggagctataaaagcactttgtaatcgtttggttgtagttgaacttaacaacaggactagcagagacttagccgaacagtgtgtaaaggtattagaactgatatgtactcgtgagtcaggagcagtctttgaggctggtggtttgaattgtgtgcttaccttcattcgtgacagtggacatctagttcataaagacaccttgcactctgctatggctgtggtatcaagactctgtggcaaaatggagcctcaagattcttctttagaaatttgtgtagaatctctgtctagtttattaaagcatgaagatcatcaggtttcagatggagctctgcgatgctttgcatcactggctgaccgatttacccgtcgtggtgttgacccagctccattagccaagcatggattaactgaggagctgttatctcgaatggctgctgctggtggtactgtttcaggaccatcatcagcatgcaaaccaggtcgcagcaccacaggagctccatccaccactgcagattccaaattgagtaatcaggtgtcaacaattgtaagtctgctctcaacactttgcagaggctctccggtagtaacacatgatcttctgaggtcggagcttccagattcaattgaaagtgcattgcagggtgatgaaagatgtgtgcttgatactatgcgtttggttgaccttctcttggtgctattatttgaaggacgaaaagctttgccaaagtctagtgctggatctacaggcagaatcccaggactccggagattagatagttctggggagcgctcacatcggcagcttatagattgtattcgaagtaaagataccgatgcacttatagatgcaattgacacaggagcctttgaagtaaattttatggatgatgtaggtcagactctattaaactgggcctctgcttttggaactcaggaaatggtagaatttctttgtgagagaggtgcagatgttaatagaggtcaaaggtcatcatcattacattatgctgcatgttttggaagacctcaagtagcaaagactctgttacggcatggtgcaaatccagatctgagagatgaagatgggaaaactccattagataaagctcgagaaaggggccatagtgaagtggtagctattcttcagtctccaggtgattggatgtgtccagttaataaaggagatgataagaaaaagaaagatacaaacaaagatgaagaagaatgtaatgagcccaaaggagatccggaaatggcacccatatacttgaaaaggttattgccagtgtttgcacaaacatttcagcaaactatgctgccttcaataaggaaagcaagtcttgctctaattcgaaaaatgattcatttttgctctgaagcactgttaaaagaagtttgtgattctgatgttggtcacaatttgcctacaatactagtggaaatcactgcaactgtcctggatcaagaggatgatgatgatggccacttgctggctttgcagatcataagggatttagtagataaaggtggtgatatatttttggatcagctagccagacttggtgtaattagcaaagtgtcaacgttggcaggtccttcctctgatgatgagaatgaagaggaatcaaaaccagaaaaagaagatgaaccacaggaagatgctaaagaattgcaacaaggtaaaccatatcattggagagactggtcaatcattaggggaagggactgcttatatatttggagtgatgcagcagccttggaattatctaatggcagtaatggatggttcagatttatcttggatggaaaacttgccaccatgtattcaagtggtagtccggaaggtggatctgacagttcagaaagccgaagtgaattcttagagaagttacaaagagctcgaggccaagtaaagccatctacttcaagtcaacctatactgtcagcaccaggacccactaaacttactgtaggaaattggtcactgacatgtttgaaagaaggagaaattgctattcataattcagatggtcagcaagctacaatattgaaagaagatttacctggttttgtatttgaatctaatagaggaaccaaacattcatttactgcagaaacttccctgggttcagaatttgtgactggctggactggcaaaagaggcagaaaactgaaatctaagttagaaaaaacaaagcaaaaggtacgaactatggctcgagatttatacgatgaccattttaaagctgttgaaagcatgcctcgtggagtagtggtaacactcagaaacatagcaactcagttagagtcatcttgggaacttcatacaaatagacaatgtattgagagtgagaacacttggagagatttaatgaagacagctttagaaaacctaattgtacttttgaaggatgaaaacacaatttcaccatatgaaatgtgtagcagtggcttggtacaagcacttcttactgtgttaaacaat

SEQ ID NO: 139969 - DNA, 554 bp, Homo sapiens
  Payload ID: 7450
  Gene Symbol: HECTD1
  Gene Name: HECT domain containing E3 ubiquitin protein ligase 1
  ENST ID: ENST00000557369
  CDS Start-End: 1-554
atccaaagatggacagaactggacttctttgtatacccatgttgatgactgcagtctcaatgaaccagggtcaactgcaacttggcctcttgatccaccaaaggatgagaaacaagggtggagacatgtgagaattaaacagatggggaaaaatgccagtggacaaacacactacctctcattatctggattcgaactttatggcactgtaaatggagtatgtgaagatcagctagggaaagcagctaaagaagcagaagctaatcttagacggcagagacgtctagtacgttcccaggttctgaaatacatggttccaggagctcgtgttatcagaggcctggattggaaatggcgagatcaggatggcagcccacagggagaaggcactgtcacaggagaactacacaatgcttctcctcttatgggtgctcagagtttccctaatttgaccacacctggtactacatcaacagtgactatgtcaacatccagtgttactagcagcagcaatgtagctacagcaacaacagttttatcagttggtcaatctt

SEQ ID NO: 139970 - DNA, 819 bp, Homo sapiens
  Payload ID: 7450
  Gene Symbol: HECTD1
  Gene Name: HECT domain containing E3 ubiquitin protein ligase 1
  ENST ID: ENST00000554471
  CDS Start-End: 1-637
agattcttctttagaaatttgtgtagaatctctgtctagtttattaaagcatgaagatcatcaggtttcagatggagctctgcgatgctttgcatcactggctgaccgatttacccgtcgtggtgttgacccagctccattagccaagcatggattaactgaggagctgttatctcgaatggctgctgctggtggtactgtttcaggaccatcatcagcatgcaaaccaggtcgcagcaccacaggagctccatccaccactgcagattccaaattgagtaatcaggtgtcaacaattgtaagtctgctctcaacactttgcagaggctctccggtagtaacacatgatcttctgaggtcggagcttccagattcaattgaaagtgcattgcagggtgatgaaagatgtgtgcttgatactatgcgtttggttgaccttctcttggtgctattatttgaaggacgaaaagctttgccaaagtctagtgctggatctacaggcagaatcccaggactccggagattagatagttctggggagcgctcacatcggcagcttatagattgtattcgaagtaaagataccgatgcacttatagatgcaattgacacaggaggtcagaaaatatttttttaaatataaaaagaaagttgtgagataaccatataggcagtttctagttttcggacagtactcttagaaatccagataacaaagtggcaccccttcgatattctcccctatccctgtgcataattatgtaattatcagcttggttcttggtgaaacctgaataaatgcttgttgaatgggtaaaa

SEQ ID NO: 139971 - DNA, 8980 bp, Homo sapiens
  Payload ID: 7450
  Gene Symbol: HECTD1
  Gene Name: HECT domain containing E3 ubiquitin protein ligase 1
  ENST ID: ENST00000611816
  CDS Start-End: 324-8168
cggacgcccggcgagtggcggaaagcgagaccccggcgccgagtgaggtcggccaggctgctgccgacttccccgctggcccctttgttcccctcccggggccctgccggcggcggggcccggttgcccgcgccagagcctcaggccggctccttttgcccttgagaagggttcgctgccaggccttcgagttccgggcgcagctcccgggagagccggcgccctgcctggcccggcggcctcctctcgggcacgaaggcttgctgctgcttctccagaacttcccttcctcgtagacacagcaaagagacttttaaaaaaccatggcagatgtggacccagatacattgctggaatggctacagatgggacagggagatgaaagggacatgcaactaatagcccttgaacagctatgcatgctgcttttgatgtctgacaacgtggatcgttgttttgaaacatgtcctcctcgcactttcttaccagccctttgcaaaatttttcttgatgaaagtgctccagacaatgtattagaggtgacagcccgtgccataacatactacctggatgtatctgcggaatgtacccgaaggattgttggggtagatggagctataaaagcactttgtaatcgtttggttgtagttgaacttaacaacaggactagcagagacttagccgaacagtgtgtaaaggtattagaactgatatgtactcgtgagtcaggagcagtctttgaggctggtggtttgaattgtgtgcttaccttcattcgtgacagtggacatctagttcataaagacaccttgcactctgctatggctgtggtatcaagactctgtggcaaaatggagcctcaagattcttctttagaaatttgtgtagaatctctgtctagtttattaaagcatgaagatcatcaggtttcagatggagctctgcgatgctttgcatcactggctgaccgatttacccgtcgtggtgttgacccagctccattagccaagcatggattaactgaggagctgttatctcgaatggctgctgctggtggtactgtttcaggaccatcatcagcatgcaaaccaggtcgcagcaccacaggagctccatccaccactgcagattccaaattgagtaatcaggtgtcaacaattgtaagtctgctctcaacactttgcagaggctctccggtagtaacacatgatcttctgaggtcggagcttccagattcaattgaaagtgcattgcagggtgatgaaagatgtgtgcttgatactatgcgtttggttgaccttctcttggtgctattatttgaaggacgaaaagctttgccaaagtctagtgctggatctacaggcagaatcccaggactccggagattagatagttctggggagcgctcacatcggcagcttatagattgtattcgaagtaaagataccgatgcacttatagatgcaattgacacaggagcctttgaagtaaattttatggatgatgtaggtcagactctattaaactgggcctctgcttttggaactcaggaaatggtagaatttctttgtgagagaggtgcagatgttaatagaggtcaaaggtcatcatcattacattatgctgcatgttttggaagacctcaagtagcaaagactctgttacggcatggtgcaaatccagatctgagagatgaagatgggaaaactccattagataaagctcgagaaaggggccatagtgaagtggtagctattcttcagtctccaggtgattggatgtgtccagttaataaaggagatgataagaaaaagaaagatacaaacaaagatgaagaagaatgtaatgagcccaaaggagatccggaaatggcacccatatacttgaaaaggttattgccagtgtttgcacaaacatttcagcaaactatgctgccttcaataaggaaagcaagtcttgctctaattcgaaaaatgattcatttttgctctgaagcactgttaaaagaagtttgtgattctgatgttggtcacaatttgcctacaatactagtggaaatcactgcaactgtcctggatcaagaggatgatgatgatggccacttgctggctttgcagatcataagggatttagtagataaaggtggtgatatatttttggatcagctagccagacttggtgtaattagcaaagtgtcaacgttggcaggtccttcctctgatgatgagaatgaagaggaatcaaaaccagaaaaagaagatgaaccacaggaagatgctaaagaattgcaacaaggtaaaccatatcattggagagactggtcaatcattaggggaagggactgcttatatatttggagtgatgcagcagccttggaattatctaatggcagtaatggatggttcagatttatcttggatggaaaacttgccaccatgtattcaagtggtagtccggaaggtggatctgacagttcagaaagccgaagtgaattcttagagaagttacaaagagctcgaggccaagtaaagccatctacttcaagtcaacctatactgtcagcaccaggacccactaaacttactgtaggaaattggtcactgacatgtttgaaagaaggagaaattgctattcataattcagatggtcagcaagctacaatattgaaagaagatttacctggttttgtatttgaatctaatagaggaaccaaacattcatttactgcagaaacttccctgggttcagaatttgtgactggctggactggcaaaagaggcagaaaactgaaatctaagttagaaaaaacaaagcaaaaggtacgaactatggctcgagatttatacgatgaccattttaaagctgttgaaagcatgcctcgtggagtagtggtaacactcagaaacatagcaactcagttagagtcatcttgggaacttcatacaaatagacaatgtattgagagtgagaacacttggagagatttaatgaagacagctttagaaaacctaattgtacttttgaaggatgaaaacacaatttcaccatatgaaatgtgtagcagtggcttggtacaagcacttcttactgtgttaaacaatgtaagtttatcaagtagtaaagaaaaaaatacagttttaaaaattatttcaactggtagaaagaatgtttttaaaactgcctttagtgaaaatgaagatgatgaaagtcgaccagcagttgcgttaattcgaaagttaatagctgtactagaatctattgaacgtctacctctccatttgtatgatacaccaggatccacatataacctccagatacttacaaggagattacgatttcggttggaacgtgcacctggtgaaactgcattgattgacaggactggcagaatgttgaagatggaacctttggctacagttgaatctctggaacagtaccttttgaaaatggtagcaaaacagtggtatgattttgaccgatcttcatttgtttttgttcgaaaattaagagaaggacaaaattttatatttcggcaccagcatgattttgatgaaaatggaatcatttactggattggaacaaatgcaaaaactgcttatgaatgggtaaatccagctgcctatggacttgtagtagtaacgtcatcagaaggaagaaatctaccttatggccgcttagaagacatactaagtcgtgataattcagctttaaattgtcatagcaatgatgataagaatgcctggtttgccatagatctgggtctctgggtgataccatcagcatatacacttcgtcatgctcgtggttatggaaggtctgcactgagaaattgggttttccaggtatccaaagatggacagaactggacttctttgtatacccatgttgatgactgcagtctcaatgaaccagggtcaactgcaacttggcctcttgatccaccaaaggatgagaaacaagggtggagacatgtgagaattaaacagatggggaaaaatgccagtggacaaacacactacctctcattatctggattcgaactttatggcactgtaaatggagtatgtgaagatcagctagggaaagcagctaaagaagcagaagctaatcttagacggcagagacgtctagtacgttcccaggttctgaaatacatggttccaggagctcgtgttatcagaggcctggattggaaatggcgagatcaggatggcagcccacagggagaaggcactgtcacaggagaactacacaatggctggattgatgtcacctgggatgctggtggctcaaactcttaccgtatgggcgcagaaggaaaatttgacctcaagcttgcaccagggtacgaccctgatacagtggcatcacccaaacctgtttcatccactgtttcaggcacaacgcaatcatggagcagcttggtgaaaaacaactgtccagacaagacatctgctgctgcaggctcctcaagtagaaaaggaagcagcagttctgtgtgtagcgtggccagtagcagcgacatcagcttgggttcgaccaaaacggaacggagatcagaaattgtaatggaacacagtatagtttcaggagctgatgtccatgaaccaattgttgttctttcatctgctgaaaacgtccctcaaacagaagtagggtcatcttccagtgcaagcaccagcaccttaacagcggaaacgggaagtgaaaatgctgaaaggaagttaggccctgatagttctgttcgtactcctggggagtctagtgcaatatccatgggaattgtcagtgttagttctcctgatgttagttcagtatctgaattaactaataaagaagcagcttcacaacgacctcttagctcttcagcaagtaacagactgtcagtgagttctttgttggctgctggggcccctatgagctctagtgcaagtgtacctaacctgtcctcaagagaaacatctagcttggagagttttgtaaggagagtggcaaacatagcacggactaatgccacgaacaacatgaatctaagccgaagcagcagtgataacaacactaatactttggggaggaatgtgatgagcacagcaacttctcctcttatgggtgctcagagtttccctaatttgaccacacctggtactacatcaacagtgactatgtcaacatccagtgttactagcagcagcaatgtagctacagcaacaacagttttatcagttggtcaatctttaagtaacactttaaccaccagcctcacatcaacttccagtgagagtgacacaggtcaggaagcagaatattccttatatgatttccttgatagctgccgtgccagtactctattggctgagctcgatgatgatgaggacttacctgagccagatgaagaagatgatgagaatgaagatgacaatcaggaggaccaagaatacgaggaggttatgattctgagacgcccatccctgcaacgtcgagctggctcccgctctgatgtaacgcatcatgctgttacctcgcagctaccacaggtacctgctggagcagggagccgacctattggggagcaggaagaagaagagtacgaaactaaaggaggacgccggagaacatgggatgatgattatgtgctaaagagacagttttctgcattggttcctgcttttgatcctagacctggtcgtactaatgtccagcagacaactgatctagaaataccacccccagggacccctcattcagagctcttggaagaagtcgaatgtactccgtcacctcgattagctctcactttgaaagtaacaggtcttggaacgactcgtgaagttgaattaccactcaccaatttcagatcaaccatcttttactatgtacaaaaattgcttcaattgtcctgtaatggcaatgtgaaatcagataaacttaggcgtatttgggagcccacatacacaatcatgtacagagaaatgaaggattctgataaagaaaaggaaaatggaaaaatgggttgctggtctatagagcatgtggagcagtaccttggcactgatgaattaccaaagaatgacttgataacctacctgcagaagaatgcagacgctgctttcctgcgccactggaaattaactggcactaataaaagtattaggaaaaacagaaattgttctcagctcatagctgcatataaggatttttgtgagcatggaacaaagtctgggttaaaccagggggccatttctactcttcaaagtagtgatattcttaatttaacaaaagaacaacctcaggccaaagcaggcaatggacagaactcttgtggagtagaagatgtccttcagcttctgcgtattctatatatagttgcaagtgacccttattcaagaatatcccaggaagatggtgatgaacagcctcagtttacttttccaccagatgaattcactagcaaaaaaattacaacaaaaatattacagcagattgaggaaccattggcactggcaagtggggctctgccagactggtgtgaacaattaaccagcaaatgtccttttctaataccatttgaaactagacagctttatttcacatgtacagcatttggcgcctcaagagcaatagtatggttacagaaccgacgtgaagccactgtggagcgaacgagaaccacaagcagtgttaggcgagatgaccctggagagtttcgagttggtcgtctcaagcatgaaagagtaaaagttccacgtggcgagtcactgatggaatgggctgagaatgtcatgcaaatacatgcagatcggaaatcagttcttgaggttgaatttttaggagaagaaggaactggcttgggacccacattagagttttatgctctggtggcagcagaattccagagaactgacttgggagcttggctttgtgatgataattttccagatgatgaatctcgtcacgttgatcttggaggtggattgaaacctcctggatattatgtgcagaggtcatgtggactgttcacagcaccatttccacaggatagtgatgagcttgaaaggatcacgaaactgtttcatttccttggaattttcttggccaaatgcattcaagacaatagacttgtggacttacctatttctaaacctttttttaaacttatgtgtatgggtgacattaaaagcaatatgagtaaactgatttatgagtcacgaggtgatagagacttacactgtactgaaagtcagtctgaagcttctacagaagaaggtcatgattcactctcggtaggaagctttgaagaggattcaaaatcagaatttattcttgatccccctaaaccaaaacccccagcttggtttaatggaattttgacttgggaagactttgaattagtaaacccacacagagccagatttttaaaagaaattaaagaccttgctatcaagaggcgccaaattttaagcaacaaaggtctttctgaagatgagaagaacacaaaattacaggaactagtgctgaagaatccatcaggttctgggcctccacttagcatagaggatttaggtttaaatttccagttttgcccttcctcaagaatatatggttttacagctgtggatctcaagccaagtggtgaagatgagatgataacaatggataatgcagaagaatatgtggatttgatgtttgacttttgtatgcatacgggtattcagaaacaaatggaagcctttagagatgggtttaataaagtttttccaatggagaaattaagttccttcagccatgaagaagtccaaatgattctttgtggaaaccagtcaccatcctgggcagcagaggatattatcaattacactgaacctaagctgggttatacacgtgacagccctggtttcctgaggtttgtgagggttttatgtggcatgtcttctgatgaaaggaaagcattcttgcagtttaccactggttgttcaactctacccccaggtggactggctaacctgcatcccaggctcacggttgtacgcaaggttgatgctactgatgcaagctatccatcagtcaatacatgtgtgcattaccttaagttgcctgaatattcttccgaggagatcatgagagagcgcctgctagctgctacaatggagaaaggctttcatctcaattgagctttgaagtgcaatgggagacatcagagactttaaaaatactagtgaagcctcttgtgtttgtgtgcagagaagtatatgatccaccatgctaatgacacttgcctttttttccaccattaaggctttaagaacatgtggaataagttttttagctgctaatgacaaaacaaatcctgtaactacccagccagcaagtatatagcacagaacactgtgttactttacaagggcttatgtgactggaataaggtggtcccacttgactgttccaaagagcagcttctcagatcttcagtgttcactggtaaatttctaacagtgtatttgtgtaaagtttgtcatttcatactccatacactacagttgctgtcactgatccctgttttgctggcttttaagctacttggtcaaaaatcctgcttccttaaaacatagagaattaatgagcatctcaagctttttcttttcctttttaatgatgcctgcactatcaagagtattctagtgttctctctttgtttggcatataatcatgcaccaaactttttatttctttaaggtgggagtatatttttatttcctaaatgccatactatgaagatcaaagtcttaagtgtgtttgcagctcaaaaataaagatgtattaaggggggaaaacctggtctaagtgcaaggcacacttacagcgagttttactttcggttgtattttctttgtatattataaacatttatttaacttgttgccgtttgaagtaaaaaatttccaaaatgtatgctcaacaataatcattaaaatgtttgcagcgt

SEQ ID NO: 139972 - DNA, 4802 bp, Homo sapiens
  Payload ID: 7451
  Gene Symbol: HECTD2
  Gene Name: HECT domain containing E3 ubiquitin protein ligase 2
  Uniprot ID: Q5U5R9
  ENST ID: ENST00000298068
  CDS Start-End: 95-2425
gagccctctcgcggccgcggcggcagcagcagcgccagccccagcaacactgaggccgccgccgccgcctggcgctcccgccgcccggcccgacatgagtgaggcggttcgggtaccctcgcccgccactccgctggtggtggcggcgcccgcgcctgaggagaggaaagggaaggagtcagagcgcgagaagctgccgcccatcgtatcggcgggcgccggcgcgaccgcgggtttggacagaggagccaaaggccaaatttccactttcagcagttttatttcagctgttagcccgaagaaagaagctgctgaaaacagaagttcacctgcacatcttgttttccctaacatcaagaatgtgagagaaccaccaccaatttgccttgatgttagacaaaaacagcgtacatctatggatgcatcatcatccgaaatgaaggccccagtccttccagaacctattcttcctatccagcccaaaactgtgaaagactttcaggaagatgtagaaaaagttaagtcatcaggagattggaaagcagtacatgatttttatctaacaacgtttgattctttcccagaattaaatgctgcatttaagaaagatgccactgcctcatttaacaccattgaagactctgggattaatgctaaatttgtgaatgctgtgtatgataccttacttaatactcctcaagacgttcagaagacagtattaaagggaatcattaacagcctgttacgagaatggaaaggtccacgaacaaaagatgatcttagagcatattttatacttttacagaatcctcagtttaataacacatctacgtatgtcatctatgctcacttgctacgacagatagctaccttagtggaagctgaccatcatttcctagttcactggtttaaaaaattgtcccagaagaggttcaaacaattggtagagagattgctgcaatttatttctttacgcctgtttcctgcaaagcctgaagaatttccacctataacaaagtgttcctggtggattccatcagccgctaaagtgttggctttacttaatactgcaaacaatttagttcaccctccccttattccttatactgatttctataattctacattggatcacattgatctcatggaagaatatcatacttggcaaaactttggaaactctcacaggttttccttctgtcagtacccattcgttatttctgtagctgcaaaaaaaatcattattcagagagactcagagcaacagatgataaacatcgcaaggcaaagtctggtggataaagtatctcgaagacagagacctgatatgaatatattatttctaaatatgaaagtaagacggacacatctggttagcgattcacttgatgagctaacccggaaaagagccgatttgaaaaagaagttaaaagttacatttgtaggggaagctggtttggatatgggtggtttgactaaagaatggttccttcttctaattcgccaaatttttcatccagattatggcatgtttacatatcacaaggattcacactgccattggtttagcagctttaaatgtgataactattctgaattccgattggttggaattcttatgggactagctgtttataacagcatcaccttggatattcgtttccctccctgctgttacaagaaattattgagccctcccatcattcctagtgatcaaaatataccagtaggcatctgcaatgttaccgtggacgacttatgtcaaattatgcctgagttggcccatggattaagtgaactcttatcacatgaaggcaatgttgaagaagatttctattcaacatttcaggtttttcaagaagaatttggaataatcaagtcctataatttaaagcccggtggtgataaaatttcagttaccaatcaaaatagaaaagaatatgtacagctttatactgacttccttctgaacaaatccatctataagcagtttgctgcattttattatggatttcatagtgtgtgtgcttcaaatgccctaatgctgcttcgtccagaagaggttgaaattttggtctgtggaagtcctgacctggatatgcatgctctgcagagaagtactcagtatgatggctatgcaaaaacggacttaactataaaatacttttgggatgttgtgcttggatttcctcttgatcttcaaaagaagttgctacattttactacagggagtgacagagtacctgtaggagggatggctgatttgaactttaaaatctcaaagaatgaaacttctactaactgcttacctgtggcccatacctgcttcaatcaactttgccttcccccctacaagagcaaaaaggatctgaaacagaaattgatcattggaatttcaaattcagaaggttttggacttgagtaacctagaagacttgaaatataatcttttatatgtagcattcacttccctcttactgtgcctttagccttttcatgtttctgtctcaaaacactttgacaaagctcaccaactttaaaatattaagtttttaaaaaatcaaatatgaagtatgttcagcaaaggcataattttctaaaaacacacacagaaatcgcttgagtgaggaaaagtccacatggcagagacaggtatggtccagttcctcttttatatagcactttatcattctccacaagtagtttgtcacaggcattccactgggaaagcaaagtacagtgaagaatgaatttatggtatagttgaacccagtggcagattgtacactgctagcactgctagcacacagtagcaaagcaaacagctacattatctttaacataaggcatgtagccatattttcatatagtggtatacaacacagtatcattgcaaatgcagtttacagggatttttgatatactggcttgggacctataagattcttctcagcagttgctgaaaagcatgtaaataactacataatagcctgagaataatgggattttgatagtgccatttattgttaaagatttatttttacaaagtaaattcagggttttagatgtgtacacagcttttacaaatcaataaagatgattgtacaagagtattttcagactaattggattcaaggttatattcttttaagtgttgttagtctgcatgcacattggcagtaaactagttacttgtgtactctgtaatatttgtataatgatcatttcttcttaaggctcaagatattagaaaagaaatcagacctaaataatcattgatgaagtatgtcagttacaagcacaaaagaatataactgcttttataaatcttttgaatcatgtacaagacttatatctacattttttgatcaccagttgtaccaaaacactaatttttgaaaaagataggttaaagtatttgacaaaagtgaatacaataataacacttgtgtcaaaatgatatagcttagtataaaaataaaattcaacgttttggccaaaatgtttgtttttcactggattctgaatataataaattcaaagtaccctttttttagagtttctaataaagtagtatgtaaaaagaaactgcattttaagtcagacagtaaatgttttttttaatttacagcaaatgaagcagttttattagcatgttacaaatattgccaaaccaagacttctctaccatactttaacagctttccttcagaaaactctgaagttatatttgcaataataatgaaaccagcatttagtaccagcatatggttcatatgcaaataatactttccccaaaatctttctgggctaggctattttcttgctatgcttcctgcacccaaccagcagaattcttccagggtggaggaactaatcagcttgttctccaacagttctgaagccaacccacaaatctttgaggaaaaggggtcactttgtttactattctcttggagatggaagtgattctgctcttccatttgggtatattatttcaagggtatttcttcttaaaaatcttggaaagcctaagagagttaaaggcatcctggttttgtttcattttgctctgttttaaatccatatgcaaataaaactgcttctctcttacactgcttgaactagaaaatcagctttttaatgtaggttaccacttataagcacaaaagaaacatgtataagaaaccagatttaagtgttttaaataaaatgtaaacagtttttatttggtagagatgactcatggaaaaattgtgttggcttggtctgcatgtttaatgatgtgcttgtatatcgattagctgtgtcacttttaaataagaagtccacacaagcaagccaaatttttagatgacgaagtccataaataactagagaatttttgttatctgttgttaagttgaaatgtataatcatttatcactaaattgcacattgcctttatttatttgtgctctgtttttggtttacagtgtaataatacctcatttaaaaaataaaaaccactactgttacattttattaatttaaaaagctagaaaattcatgtagttactttttttacatatataatctgttaatgaattattgatttttgtatctgccacagtaaattaaagcattacacagtatttatcagtattttttaaacatcctgtccttttttaaaatctttgcttagtcagtcatatttttgtctgtatgattagaagtttttacgtccttccttttttgtacaaatctgtattgtattaatttctggatgcaatttttcaaatattaaaattatacagtcagtc

SEQ ID NO: 139973 - DNA, 4354 bp, Homo sapiens
  Payload ID: 7451
  Gene Symbol: HECTD2
  Gene Name: HECT domain containing E3 ubiquitin protein ligase 2
  ENST ID: ENST00000371667
  CDS Start-End: 629-1909
gacctcagctggaaatgtgcatgtcaggagactaacatctttcacatgtccccaaatgaccatgaaaacacaagtattgatttggggattaacaattaaattttaccaagtaggcaaatttggaaatatagaatctgtgaataatgaagactgaatattgaaagtctttaaaatgtttgttactaactttatagtaattttggtgtttatttctcatttaacgaagacagtattcaaggtaagattttgtatcttttcaaatgtttggcaatttaagaaatagaatttgggggaatagtctaaaattttgtggcttaggatgtagtttaatatctaacagataattttggaaatagaaaatgtgaattttgattgcaattattttgaaatctttaccagattgtcccagaagaggttcaaacaattggtagagagattgctgcaatttatttctttacgcctgtttcctgcaaagcctgaagaatttccacctataacaaagtgttcctggtggattccatcagccgctaaagtgttggctttacttaatactgcaaacaatttagttcaccctccccttattccttatactgatttctataattctacattggatcacattgatctcatggaagaatatcatacttggcaaaactttggaaactctcacaggttttccttctgtcagtacccattcgttatttctgtagctgcaaaaaaaatcattattcagagagactcagagcaacagatgataaacatcgcaaggcaaagtctggtggataaagtatctcgaagacagagacctgatatgaatatattatttctaaatatgaaagtaagacggacacatctggttagcgattcacttgatgagctaacccggaaaagagccgatttgaaaaagaagttaaaagttacatttgtaggggaagctggtttggatatgggtggtttgactaaagaatggttccttcttctaattcgccaaatttttcatccagattatggcatgtttacatatcacaaggattcacactgccattggtttagcagctttaaatgtgataactattctgaattccgattggttggaattcttatgggactagctgtttataacagcatcaccttggatattcgtttccctccctgctgttacaagaaattattgagccctcccatcattcctagtgatcaaaatataccagtaggcatctgcaatgttaccgtggacgacttatgtcaaattatgcctgagttggcccatggattaagtgaactcttatcacatgaaggcaatgttgaagaagatttctattcaacatttcaggtttttcaagaagaatttggaataatcaagtcctataatttaaagcccggtggtgataaaatttcagttaccaatcaaaatagaaaagaatatgtacagctttatactgacttccttctgaacaaatccatctataagcagtttgctgcattttattatggatttcatagtgtgtgtgcttcaaatgccctaatgctgcttcgtccagaagaggttgaaattttggtctgtggaagtcctgacctggatatgcatgctctgcagagaagtactcagtatgatggctatgcaaaaacggacttaactataaaatacttttgggatgttgtgcttggatttcctcttgatcttcaaaagaagttgctacattttactacagggagtgacagagtacctgtaggagggatggctgatttgaactttaaaatctcaaagaatgaaacttctactaactgcttacctgtggcccatacctgcttcaatcaactttgccttcccccctacaagagcaaaaaggatctgaaacagaaattgatcattggaatttcaaattcagaaggttttggacttgagtaacctagaagacttgaaatataatcttttatatgtagcattcacttccctcttactgtgcctttagccttttcatgtttctgtctcaaaacactttgacaaagctcaccaactttaaaatattaagtttttaaaaaatcaaatatgaagtatgttcagcaaaggcataattttctaaaaacacacacagaaatcgcttgagtgaggaaaagtccacatggcagagacaggtatggtccagttcctcttttatatagcactttatcattctccacaagtagtttgtcacaggcattccactgggaaagcaaagtacagtgaagaatgaatttatggtatagttgaacccagtggcagattgtacactgctagcactgctagcacacagtagcaaagcaaacagctacattatctttaacataaggcatgtagccatattttcatatagtggtatacaacacagtatcattgcaaatgcagtttacagggatttttgatatactggcttgggacctataagattcttctcagcagttgctgaaaagcatgtaaataactacataatagcctgagaataatgggattttgatagtgccatttattgttaaagatttatttttacaaagtaaattcagggttttagatgtgtacacagcttttacaaatcaataaagatgattgtacaagagtattttcagactaattggattcaaggttatattcttttaagtgttgttagtctgcatgcacattggcagtaaactagttacttgtgtactctgtaatatttgtataatgatcatttcttcttaaggctcaagatattagaaaagaaatcagacctaaataatcattgatgaagtatgtcagttacaagcacaaaagaatataactgcttttataaatcttttgaatcatgtacaagacttatatctacattttttgatcaccagttgtaccaaaacactaatttttgaaaaagataggttaaagtatttgacaaaagtgaatacaataataacacttgtgtcaaaatgatatagcttagtataaaaataaaattcaacgttttggccaaaatgtttgtttttcactggattctgaatataataaattcaaagtaccctttttttagagtttctaataaagtagtatgtaaaaagaaactgcattttaagtcagacagtaaatgttttttttaatttacagcaaatgaagcagttttattagcatgttacaaatattgccaaaccaagacttctctaccatactttaacagctttccttcagaaaactctgaagttatatttgcaataataatgaaaccagcatttagtaccagcatatggttcatatgcaaataatactttccccaaaatctttctgggctaggctattttcttgctatgcttcctgcacccaaccagcagaattcttccagggtggaggaactaatcagcttgttctccaacagttctgaagccaacccacaaatctttgaggaaaaggggtcactttgtttactattctcttggagatggaagtgattctgctcttccatttgggtatattatttcaagggtatttcttcttaaaaatcttggaaagcctaagagagttaaaggcatcctggttttgtttcattttgctctgttttaaatccatatgcaaataaaactgcttctctcttacactgcttgaactagaaaatcagctttttaatgtaggttaccacttataagcacaaaagaaacatgtataagaaaccagatttaagtgttttaaataaaatgtaaacagtttttatttggtagagatgactcatggaaaaattgtgttggcttggtctgcatgtttaatgatgtgcttgtatatcgattagctgtgtcacttttaaataagaagtccacacaagcaagccaaatttttagatgacgaagtccataaataactagagaatttttgttatctgttgttaagttgaaatgtataatcatttatcactaaattgcacattgcctttatttatttgtgctctgtttttggtttacagtgtaataatacctcatttaaaaaataaaaaccactactgttacattttattaatttaaaaagctagaaaattcatgtagttactttttttacatatataatctgttaatgaattattgatttttgtatctgccacagtaaattaaagcattacacagtatttatcagtattttttaaacatcctgtccttttttaaaatctttgcttagtcagtcatatttttgtctgtatgattagaagtttttacgtccttccttttttgtacaaatctgtattgtattaatttctggatgcaatttttcaaatattaaaattatacagtcagtcaggcttcagtttattttttgaacacttgggcaattaattaaagccatatgtttaaaatattttataaa

SEQ ID NO: 139974 - DNA, 2175 bp, Homo sapiens
  Payload ID: 7451
  Gene Symbol: HECTD2
  Gene Name: HECT domain containing E3 ubiquitin protein ligase 2
  Uniprot ID: Q5U5R9
  ENST ID: ENST00000371681
  CDS Start-End: 96-719
agagccctctcgcggccgcggcggcagcagcagcgccagccccagcaacactgaggccgccgccgccgcctggcgctcccgccgcccggcccgacatgagtgaggcggttcgggtaccctcgcccgccactccgctggtggtggcggcgcccgcgcctgaggagaggaaagggaaggagtcagagcgcgagaagctgccgcccatcgtatcggcgggcgccggcgcgaccgcgggtttggacagaggagccaaaggccaaatttccactttcagcagttttatttcagctgttagcccgaagaaagaagctgctgaaaacagaagttcacctgcacatcttgttttccctaacatcaagaatgtgagagaaccaccaccaatttgccttgatgttagacaaaaacagcgtacatctatggatgcatcatcatccgaaatgaaggccccagtccttccagaacctattcttcctatccagcccaaaactgtgaaagactttcaggaagatgtagaaaaagttaagtcatcaggagattggaaagcagtacatgatttttatctaacaacgtttgattctttcccagaattaaatgctgcatttaagaaagatgccactgcctcatttaacaccattgaagactctgggattaatgctaaatttgtgaatgctgtgtatgataccttacttaatactgtaagtattatgacatgcaagtaatattattctgtgtctcttctgtatatcaaaagcagccatacaaatattgtaaaaatcaccttataattaccttagaaactctgatacaattttatagtaaatgtagctggaattctcataaagttagattattttattcttttattttttaattatgaattaagcagcaaatacttttatatccaatccttttttagaaagacttgctaaaatcatgctttacttactcagcaaaaggaggtaagttatttaattatattggaattacactgaatctgtagatcagtggttcttaaacattagcctgtatcagaatcacaagaagggcttgttaaaatacagaatttcagattcagtaggtcttgggtgaagcccaagaattttcatttgtaacaagttcccaggatatgttgatttatgagttcatttatgatgtgacacatactataaaaattatgtcaccattcaaaaaatccagatgcatatttgaaggactaagtgggaatgataaagacagaatgtaaacaaagtctccagaagtttagctatgaagtgaaagacatgttaagaatgaccacattttgagaaccatactgctatagatcaatttgtgaaaaattgacatcttttcaatccataagcatactgtatccttttaggtacctaggtcttctttaatttctcttggtaatgttttgtagttttctggatagaggtgttacacatttctcattacatgtatttctaggtacttcattttttttatcctattataattttattttccaattgtgactaatatatggaaatactttcatatatttatctttatctaaatacagttgacccttgaacaatgcgagggttaggggcgctaaccccctatgcagtaaaaaaaaaaatctgtgtataacttttgactccccagaagcttaactactaataacctattgttgaccagaagtcttactgataacataaacagtcaattaacgtatattttatgttatatgtattctatactatattgttacaataaagtaagctaaggaaaaggcaatgttattaagaaaaaataaggaagataaaatatatttactatatattaagtggaagtggactatcataaaggtcttcatccttattgagtaggctgaggaagaggaggggttggtcttgctgtctcaggtggcagaggtgaaagaaaataatgtatataagcagacttgcacaattcaagcctgtattcaagagtcaactgtactttgctatattcatccattaattctaatagtacatcagtaaattaacttggattttctgtgtacacaatcttgtcatttgtgaaaaaggagagttttatctccttctaatcctgtatcttatatggatatatgtatgtgtttgcattgactgggacctctttcacaattgtgaataaaagaagtaatagcag

SEQ ID NO: 139975 - DNA, 4939 bp, Homo sapiens
  Payload ID: 7451
  Gene Symbol: HECTD2
  Gene Name: HECT domain containing E3 ubiquitin protein ligase 2
  ENST ID: ENST00000446394
  CDS Start-End: 155-2497
ggcgcgggcgcgggcgggggcggagtggcggcggcagcggcggctagaagcggcagcccagagccctctcgcggccgcggcggcagcagcagcgccagccccagcaacactgaggccgccgccgccgcctggcgctcccgccgcccggcccgacatgagtgaggcggttcgggtaccctcgcccgccactccgctggtggtggcggcgcccgcgcctgaggagaggaaagggaaggagtcagagcgcgagaagctgccgcccatcgtatcggcgggcgccggcgcgaccgcgggtttggacagaggagccaaaggccaaatttccactttcagcagttttatttcagctgttagcccgaagaaagaagctgctgaaaacagaagttcacctgcacatcttgttttccctaacatcaagaatgtgagagaaccaccaccaatttgccttgatgttagacaaaaacagcgtacatctatggatgcatcatcatccgaaatgaaggccccagtccttccagaacctattcttcctatccagcccaaaactgtgaaagactttcaggaagatgtagaaaaagttaagtcatcaggagattggaaagcagtacatgatttttatctaacaacgtttgattctttcccagaattaaatgctgcatttaagaaagatgccactgcctcatttaacaccattgaagactctgggattaatgctaaatttgtgaatgctgtgtatgataccttacttaatactcctcaagacgttcagaagacagtattaaagggaatcattaacagcctgttacgagaatggaaaggtccacgaacaaaagatgatcttagagcatattttatacttttacagaatcctcagtttaataacacatctacgtatgtcatctatgctcacttgctacgacagatagctaccttagtggaagctgaccatcatttcctagttcactggtttaaaaaacagtattcaagattgtcccagaagaggttcaaacaattggtagagagattgctgcaatttatttctttacgcctgtttcctgcaaagcctgaagaatttccacctataacaaagtgttcctggtggattccatcagccgctaaagtgttggctttacttaatactgcaaacaatttagttcaccctccccttattccttatactgatttctataattctacattggatcacattgatctcatggaagaatatcatacttggcaaaactttggaaactctcacaggttttccttctgtcagtacccattcgttatttctgtagctgcaaaaaaaatcattattcagagagactcagagcaacagatgataaacatcgcaaggcaaagtctggtggataaagtatctcgaagacagagacctgatatgaatatattatttctaaatatgaaagtaagacggacacatctggttagcgattcacttgatgagctaacccggaaaagagccgatttgaaaaagaagttaaaagttacatttgtaggggaagctggtttggatatgggtggtttgactaaagaatggttccttcttctaattcgccaaatttttcatccagattatggcatgtttacatatcacaaggattcacactgccattggtttagcagctttaaatgtgataactattctgaattccgattggttggaattcttatgggactagctgtttataacagcatcaccttggatattcgtttccctccctgctgttacaagaaattattgagccctcccatcattcctagtgatcaaaatataccagtaggcatctgcaatgttaccgtggacgacttatgtcaaattatgcctgagttggcccatggattaagtgaactcttatcacatgaaggcaatgttgaagaagatttctattcaacatttcaggtttttcaagaagaatttggaataatcaagtcctataatttaaagcccggtggtgataaaatttcagttaccaatcaaaatagaaaagaatatgtacagctttatactgacttccttctgaacaaatccatctataagcagtttgctgcattttattatggatttcatagtgtgtgtgcttcaaatgccctaatgctgcttcgtccagaagaggttgaaattttggtctgtggaagtcctgacctggatatgcatgctctgcagagaagtactcagtatgatggctatgcaaaaacggacttaactataaaatacttttgggatgttgtgcttggatttcctcttgatcttcaaaagaagttgctacattttactacagggagtgacagagtacctgtaggagggatggctgatttgaactttaaaatctcaaagaatgaaacttctactaactgcttacctgtggcccatacctgcttcaatcaactttgccttcccccctacaagagcaaaaaggatctgaaacagaaattgatcattggaatttcaaattcagaaggttttggacttgagtaacctagaagacttgaaatataatcttttatatgtagcattcacttccctcttactgtgcctttagccttttcatgtttctgtctcaaaacactttgacaaagctcaccaactttaaaatattaagtttttaaaaaatcaaatatgaagtatgttcagcaaaggcataattttctaaaaacacacacagaaatcgcttgagtgaggaaaagtccacatggcagagacaggtatggtccagttcctcttttatatagcactttatcattctccacaagtagtttgtcacaggcattccactgggaaagcaaagtacagtgaagaatgaatttatggtatagttgaacccagtggcagattgtacactgctagcactgctagcacacagtagcaaagcaaacagctacattatctttaacataaggcatgtagccatattttcatatagtggtatacaacacagtatcattgcaaatgcagtttacagggatttttgatatactggcttgggacctataagattcttctcagcagttgctgaaaagcatgtaaataactacataatagcctgagaataatgggattttgatagtgccatttattgttaaagatttatttttacaaagtaaattcagggttttagatgtgtacacagcttttacaaatcaataaagatgattgtacaagagtattttcagactaattggattcaaggttatattcttttaagtgttgttagtctgcatgcacattggcagtaaactagttacttgtgtactctgtaatatttgtataatgatcatttcttcttaaggctcaagatattagaaaagaaatcagacctaaataatcattgatgaagtatgtcagttacaagcacaaaagaatataactgcttttataaatcttttgaatcatgtacaagacttatatctacattttttgatcaccagttgtaccaaaacactaatttttgaaaaagataggttaaagtatttgacaaaagtgaatacaataataacacttgtgtcaaaatgatatagcttagtataaaaataaaattcaacgttttggccaaaatgtttgtttttcactggattctgaatataataaattcaaagtaccctttttttagagtttctaataaagtagtatgtaaaaagaaactgcattttaagtcagacagtaaatgttttttttaatttacagcaaatgaagcagttttattagcatgttacaaatattgccaaaccaagacttctctaccatactttaacagctttccttcagaaaactctgaagttatatttgcaataataatgaaaccagcatttagtaccagcatatggttcatatgcaaataatactttccccaaaatctttctgggctaggctattttcttgctatgcttcctgcacccaaccagcagaattcttccagggtggaggaactaatcagcttgttctccaacagttctgaagccaacccacaaatctttgaggaaaaggggtcactttgtttactattctcttggagatggaagtgattctgctcttccatttgggtatattatttcaagggtatttcttcttaaaaatcttggaaagcctaagagagttaaaggcatcctggttttgtttcattttgctctgttttaaatccatatgcaaataaaactgcttctctcttacactgcttgaactagaaaatcagctttttaatgtaggttaccacttataagcacaaaagaaacatgtataagaaaccagatttaagtgttttaaataaaatgtaaacagtttttatttggtagagatgactcatggaaaaattgtgttggcttggtctgcatgtttaatgatgtgcttgtatatcgattagctgtgtcacttttaaataagaagtccacacaagcaagccaaatttttagatgacgaagtccataaataactagagaatttttgttatctgttgttaagttgaaatgtataatcatttatcactaaattgcacattgcctttatttatttgtgctctgtttttggtttacagtgtaataatacctcatttaaaaaataaaaaccactactgttacattttattaatttaaaaagctagaaaattcatgtagttactttttttacatatataatctgttaatgaattattgatttttgtatctgccacagtaaattaaagcattacacagtatttatcagtattttttaaacatcctgtccttttttaaaatctttgcttagtcagtcatatttttgtctgtatgattagaagtttttacgtccttccttttttgtacaaatctgtattgtattaatttctggatgcaatttttcaaatattaaaattatacagtcagtcaggcttcagtttattttttgaacacttgggcaattaattaaagccatatgtttaaaatattttat

SEQ ID NO: 139976 - DNA, 395 bp, Homo sapiens
  Payload ID: 7451
  Gene Symbol: HECTD2
  Gene Name: HECT domain containing E3 ubiquitin protein ligase 2
  ENST ID: ENST00000631422
  CDS Start-End: 326-395
aaaggaaaggaaattgtctaggtgtcctggtggtggaggtggggggtattttaatttcataattaaaagctctcttcttcggctttcaagtttttactcctatttgtaatgatttgattgaggactgtgcagcagagtttggggtttggacagaggagccaaaggccaaatttccactttcagcagttttatttcagctgttagcccgaagaaagaagctgctgaaaacagaagttcacctgcacatcttgttttccctaacatcaagaatgtgagagaaccaccaccaatttgccttgatgttagacaaaaacagcgtacatctatggatgcatcatcatccgaaatgaaggccccagtccttccagaacctattcttcctatccagcccaaaa

SEQ ID NO: 139977 - DNA, 2530 bp, Homo sapiens
  Payload ID: 7452
  Gene Symbol: HECTD3
  Gene Name: HECT domain containing E3 ubiquitin protein ligase 3
  Uniprot ID: Q5T447
  ENST ID: ENST00000372168
  CDS Start-End: 163-1578
ctgtcctcctgcagaggtggctgtggtcctggacctatgggcccttcccttcccccaacattgagccttgtgtgtctgcatggaggaggttcccaaggtctcatagtataagctgttcaagggtcagagaagcccccaggtcctgccttttcctgtccctttatgttggggagttgggggtgttacaggtatgctaaactctttagctgcagtctatctacccatgccagattcatcaagatcctcgatagtgtcctgcaccacctggtacctgcctgggaccacacactgggcaccttcagtgagattaagcaagtgaagcagttcctactgctgtcccgccagcggccaggcctggtggctcagtgcctgcgtgactctgagagcagcaagcccagcttcatgccacgcctatacatcaaccgccgtcttgccatggaacaccgtgcctgcccctctcgagaccctgcctgcaagaatgcagtcttcacccaggtatatgaaggcctcaagccctctgacaaatatgaaaagcccctggactacaggtggcccatgcgctatgaccagtggtgggagtgtaaatttattgcagaaggcatcattgaccaagggggtggtttccgggacagcctggcagatatgtcagaagagctgtgccctagctcagcggatacccccgtgcccctgcccttctttgtacgcacagccaaccagggcaatggcactggtgaggctcgggacatgtatgtacccaacccctcctgccgagactttgccaagtatgaatggatcggacagctgatgggggctgcccttcggggtaaggagttcctggtcctggccctgcctggttttgtgtggaagcagctttctggtgaggaggtgagctggagcaaggacttcccagctgtggactctgtgctggtgaagctcctggaagtgatggaaggaatggacaaggagacgtttgagttcaagtttgggaaggaactaacattcaccactgtactgagtgaccaacaggtggtggagctgatccctgggggtgcaggcatcgtcgtgggatatggggaccgttctcgtttcatccaactggtccagaaggcacggctagaggagagcaaggagcaggtggcagctatgcaggcaggtctgctgaaggtggtaccacaggctgtgctggacttgctgacctggcaagagttggagaagaaagtgtgtggggatccagaggtcactgtggatgctctgcgcaagctcacccggtttgaggacttcgagccatctgactcgcgggtgcagtatttctgggaggcactgaacaacttcaccaacgaggaccggagccgcttcctgcgctttgtcacgggccgcagtcgcctgccagcacggatctacatctacccagacaagctgggctacgagaccacagacgcgctgcccgagtcttccacttgctccagcaccctcttcctgccacactatgccagtgccaaggtatgcgaggagaagctccgctatgcggcctacaactgcgtggccatcgacactgacatgagcccttgggaggagtgaggcgtgccgccggctgtgggaccagcaagactgcacgtgtccctcttggccttgcccagggcgaagacaccttccctgccctggtttggctgacgtgctcagcaaaaccccatgtgccctgctcctgtgtgcagttggggtaggggcagctggcatggtcaggtaacactagtggcccagccccgcagacccacaagccctacccgtgctggggcttgcttcccgaggtatttcacctcttaagagggaatcttccacaagcccagcacaagctgccaggcctgagctacttgaagggggccatctaggtccccaacccatggactttgcctccattttcagctccgccttttttctcctattttctctctggctttcttcagccatgactcacaactaaaaacataaaacactggaggttagtggaggcccctccccaagcagggagcctgggatgggcagggagtgatagccaaactccttggtcacctgctccaagaaggaagcagtagctgagcacctgccctcacattctgctcttttcccctctccctccataccagagatgtggtgagctctgttcttctaccaacccagtctcaacacacaaagtgccaccaccttccctgactcagaacccacatccactcaatgtgaactctactaccacgacctccccatattcctcacttctccatcacctccagcctgactccctgtctgccctttcacccccaagattttgcacaggttaaggccagttatggcctttttgaaatctgtaatagctcccctttccccaactctaaagcctagaccttaaacctgttcctagagctatgcacacccctgccccagtttaccgttcctccctcagggcctccgtgacactccatgaaaagaagttcttgcataccggaaagttgaataaatggatgaattcattccttca

SEQ ID NO: 139978 - DNA, 3610 bp, Homo sapiens
  Payload ID: 7452
  Gene Symbol: HECTD3
  Gene Name: HECT domain containing E3 ubiquitin protein ligase 3
  Uniprot ID: Q5T447
  ENST ID: ENST00000372172
  CDS Start-End: 73-2658
gctctgtccgcggtcgcgccagctgttccccgggcagggtcgcctctaggtgctcacctccgccacttcgccatggcgggtcctggcccgggcgcggtgctggagtccccccggcagctgctgggccgcgtgcgcttcttggcagaggcagcgcggagcctccgcgccgggcggccgctgccagcagcgctggctttcgtgccgcgagaggtgctctacaagctttacaaggacccagcgggaccgtcgcgcgtgcttctgccggtgtgggaggcagagggcctggggctgcgtgtgggcgccgcaggcccagcccccggtaccggctccgggcccctccgcgccgcccgcgacagcattgagctccggcgcggcgcctgcgtgcgcaccacgggcgaggagctgtgcaatggccacgggctctgggtgaagctgacaaaggagcagctggcagagcacctgggcgactgcgggctgcaggaaggctggctgctggtgtgccgcccggcggagggcggagcccgcctggtacccatcgacactcccaaccacctccagcggcagcagcagctctttggcgtggattatcggccggtgctcaggtgggaacaggtggtggacctgacatactcacatcgcctgggatcgagacctcagccggcagaggcatacgcagaagctgtacaaaggctactctatgtacccccgacatggacctacgagtgcgacgaggacctgatccacttcttgtatgaccacctgggcaaggaggatgagaacctgggtagcgtgaagcagtatgtggagagcatagacgtttcctcctacacggaggagttcaacgtgtcctgcctgacagacagcaatgccgatacctactgggagagcgatgggtcccagtgccaacactgggtacggcttactatgaagaagggcaccattgtcaagaagctgctactcacagtggataccacagatgacaactttatgccaaagcgggtggtggtctatgggggtgaaggggacaacctgaagaagctgagtgacgtgagcattgacgagaccctcatcggggatgtctgtgtcctggaggacatgaccgtccacctcccgatcatcgagatccgcatcgtggagtgccgagatgatgggattgatgttcgtctccgaggggtcaagatcaagtcatctagacagcgggaactagggttgaatgcagacctgttccagccaactagtctggtgcgatatccacgcctagaaggcaccgaccctgaagtactgtaccgcagagctgtcctcctgcagagattcatcaagatcctcgatagtgtcctgcaccacctggtacctgcctgggaccacacactgggcaccttcagtgagattaagcaagtgaagcagttcctactgctgtcccgccagcggccaggcctggtggctcagtgcctgcgtgactctgagagcagcaagcccagcttcatgccacgcctatacatcaaccgccgtcttgccatggaacaccgtgcctgcccctctcgagaccctgcctgcaagaatgcagtcttcacccaggtatatgaaggcctcaagccctctgacaaatatgaaaagcccctggactacaggtggcccatgcgctatgaccagtggtgggagtgtaaatttattgcagaaggcatcattgaccaagggggtggtttccgggacagcctggcagatatgtcagaagagctgtgccctagctcagcggatacccccgtgcccctgcccttctttgtacgcacagccaaccagggcaatggcactggtgaggctcgggacatgtatgtacccaacccctcctgccgagactttgccaagtatgaatggatcggacagctgatgggggctgcccttcggggtaaggagttcctggtcctggccctgcctggttttgtgtggaagcagctttctggtgaggaggtgagctggagcaaggacttcccagctgtggactctgtgctggtgaagctcctggaagtgatggaaggaatggacaaggagacgtttgagttcaagtttgggaaggaactaacattcaccactgtactgagtgaccaacaggtggtggagctgatccctgggggtgcaggcatcgtcgtgggatatggggaccgttctcgtttcatccaactggtccagaaggcacggctagaggagagcaaggagcaggtggcagctatgcaggcaggtctgctgaaggtggtaccacaggctgtgctggacttgctgacctggcaagagttggagaagaaagtgtgtggggatccagaggtcactgtggatgctctgcgcaagctcacccggtttgaggacttcgagccatctgactcgcgggtgcagtatttctgggaggcactgaacaacttcaccaacgaggaccggagccgcttcctgcgctttgtcacgggccgcagtcgcctgccagcacggatctacatctacccagacaagctgggctacgagaccacagacgcgctgcccgagtcttccacttgctccagcaccctcttcctgccacactatgccagtgccaaggtatgcgaggagaagctccgctatgcggcctacaactgcgtggccatcgacactgacatgagcccttgggaggagtgaggcgtgccgccggctgtgggaccagcaagactgcacgtgtccctcttggccttgcccagggcgaagacaccttccctgccctggtttggctgacgtgctcagcaaaaccccatgtgccctgctcctgtgtgcagttggggtaggggcagctggcatggtcaggtaacactagtggcccagccccgcagacccacaagccctacccgtgctggggcttgcttcccgaggtatttcacctcttaagagggaatcttccacaagcccagcacaagctgccaggcctgagctacttgaagggggccatctaggtccccaacccatggactttgcctccattttcagctccgccttttttctcctattttctctctggctttcttcagccatgactcacaactaaaaacataaaacactggaggttagtggaggcccctccccaagcagggagcctgggatgggcagggagtgatagccaaactccttggtcacctgctccaagaaggaagcagtagctgagcacctgccctcacattctgctcttttcccctctccctccataccagagatgtggtgagctctgttcttctaccaacccagtctcaacacacaaagtgccaccaccttccctgactcagaacccacatccactcaatgtgaactctactaccacgacctccccatattcctcacttctccatcacctccagcctgactccctgtctgccctttcacccccaagattttgcacaggttaaggccagttatggcctttttgaaatctgtaatagctcccctttccccaactctaaagcctagaccttaaacctgttcctagagctatgcacacccctgccccagtttaccgttcctccctcagggcctccgtgacactccatgaaaagaagttcttgcataccggaaagttgaataaatggatgaattcattccttca

SEQ ID NO: 139979 - DNA, 15759 bp, Homo sapiens
  Payload ID: 7453
  Gene Symbol: HECTD4
  Gene Name: HECT domain containing E3 ubiquitin protein ligase 4
  ENST ID: ENST00000377560
  CDS Start-End: 312-13562
atgccgggagccccgcccccaacatggcgtctcactgacagttggttgccgagcggcagaggcggatcctgctcctgagggcggcggcggcggcggcggcggcggcggcggcagggccggggtctcccgggccggggtcgggggtatggcgactcggaccgcctagggcggagttgcacgggcgaggcagcaagtggggcgccgctggcgggcgcggcggccgctgccatggactggtgatcgcggcggctcctgctccgtttcccccggccgggcgtctgctcctcagcgccaagccttcagccggggccatgggctcgtcggcggccgcggcggcggcggcggcggcggccgctgactcggcgcagtggctctcggtgaaggaagagaccatcttcctgcacgacgggctgatccgggtcaccgacctggccgagctgcccagcgagatcctcggggccccagaggccgcggacaccgacctggagattttaacctttgagaccaagaacccgtcggaattagcagaacgtttgcgctctgtttgtgggaatcagagcaatgcctatgcccggctgctggaataccgcctgaatgccttgcgaggactgtggaatgcccagcgccagctggccttagaagaacagcatgaaagggaaagttcaggtgatgaggaaactttggccctgctcaaacgccagggcttgttgcagcaacctgagcaagcgcccttcacatcgaggatggggctcctgctggtcttcccccttattcagtcccagagtagaacagacccctctctctgtaacataactgctgaggtgctattgaactgccttcgtgactgccagcctttgagcttgaccaaggagcctgctgactgtctcaatggaattgaaactttgctgtgctcttggctagaggagacttctgacacaggccgacacatcccacataagcaaaaagaaaatgctgctgctgccctggtggctttggcttgtgccaggggatcattgaaaactttcgtccacacagtccatctattacagaaacagacggatctagggtccctgcctgtagctgatgtgctatataggctgttgcttttggaaggggggcctggatctccctcctgtttgcttgggggcaaacacatagtatcatggggttatgaagacatgttgcctgcgccggatagcaacactggctccagttctgaaaataaagatgctgacttgggacgctgtctcacggcagatggtctttacctgtatactactaactcagttggaagaggagtaagcaaattgggatctggattacatggtactctcagaggttttgtgtactgccggaacgaggagttggaaccaggatgggtggcttttggcagcggcagtcttctccaccggcctgtctctttcgataataaacctcactcccttttccaggtcattgaccagaacacccttcaggtgtgccaggtggtgccaatgccagccaatcacctccccattggcagcaccatgagcactgtgcacctgtcttcagatggcacttacttctattggatctggtctcctgccagcctgaatgagaaaacaccgaagggacattctgtcttcatggacatttttgaacttgtggttgaaaatggtgtatttgtagccaacccacttcaggaacgtacaattctaatgagaaaagagggcgaatctgccaaaagcattaatgagatgcttctaagtagactttctcggtatagagcctccccgtcagcaacgcttgctgccctgactggttccaccatctccaacacactgaaagaggatcaagcagcaaatactagctgtgggctgcctctaaaaatgctgcggaagacacccatatatacctgtggcacctacttggtgatgctggtgcctcctccagggggatcaggcagctctgccacccgatctctttttggtggaacaagtggtttgtcatctttaaaaatcctagcctccagcttggtgtataatatttcggatggtcagtttacaagtcgtgcagatctcatagatgctgctggaagctcactggggcgtggtgctctcgtaccaggattgggagcgtgttatgacacagtgaacaacatgctatggacatgctcaaatgactatatcgatcagtggtgtaaccctgggaatcaagccttccattatgtctgccagagacttggagtcagtcacattatcactgagcccaaagaagaggctataaccacgaatgaggttataaaccaattattgcaccacgttggtgcgatgtgcatacaccaactcaatcttcttgccaccaaccccaatcttccaatcacaagtgtcttgggcaagcagcatccaattgaagcacatcatcttagcagtatttgtgacattatggagaaggccatggttaatggagatacctgtattatacgctgcattctcgttgtctttcaggtggtatttaaatttttcttcagcccacaaactgaaaggaatcgagacatcattcgacggtcgggattgcttctttggcagttgttgatggctccaaaagatcaaatttgccctgaaattcagaaggaagtctgccttgccatcagctctggtttaaatatcttgtacccaggtgaaactgaaatcaataacttacttaaactggtcttaacagaaggagagagaaacagtggactctcccagctacgggatgtgatcctaaccaacctggctgaacagctccaaaacaaccgatttggcagtgatgaggatgatcattacagactaaatgatgaacttttacactacattctgaagattgttgtacgagaatcctgtatcttaatcaccaagtgccaaactgtctctaaagatgattttcaaaagctcctttcaactgtgcctgctgcatcctcctgcctgcgctatctgatggcagttcagaatcaccttctcagtaacactattttgattaaacctgatgagaatgatgacagtgacagctccttgcagggagagacattgaaggagctaaaagtcagtattttggctcttgccacccaaatcctgactggatgtgatgaagtgttggaaatgctacagcaggtcacaactgccctcataaatagtgacatagcagaccgtgagcagaggttaaaaggcttggaacaagttactaaggctactatgcttggtcaccttcttccagtgttactgacctccttgatgcatccaaatttacagactctgatcatggcggatgccctgatgcctcagctagtgcagctggtactctataccagccagacggcgttgctgcttaaaacccagtgtccggtttttgctgaggtgggctgttccccgtgtggtgcaccagaccagaagtgcaggctgttccctgatgagagaatgttagaagagaaggaagagccaggatttctcactggtttaaagattcctgccccatgggctgctggaaagactgtggaaacagtccaccccgtcagagacaactataaatttaaagaaacggtccatatcccaggagctcgctgcctgtaccttagatttgatagcagatgctcttcgcaatatgactatgacaaattggtgatatatgcggggcctaacacaaacagtaggaaggttgctgaatatggaggcaacacactgggatatggcagccgtagtgtcttaggaactggttggccgaaagacttggtgaaggtggaaggagatacagtcaccttctcctttgaaatgagaagtggccgtgaacacaacactcctgataaagccatgtggggctttgcttgcacagttcgcgctcaggagtcttcggaggatgtctcaggaggcttgccctttctggtagacctggctttaggtctgtctgtgttagcttgttccatgttaagaatcctgtacaatggaccagaaattaccaaagaagaagaagcctgtcaggagctattgcggtccaaacttttacaaaggtgccagtggcaggtggaggccaatggcgtgatctcccctgcccttactccgagcccctctccactgcctctgaccatagaggaagacagagaattcacctacccctctgatgtcctcgtgcctcctgttggaaactactttgatctgcctcggatcagactgcctccaggaatcatgataaagctcagggaaatttctgggcgtgctagacctcaatttagaccaagtataaaagaagtgattcagccagacgtgatggaggaaatggtggtatcttgtgttattaagcacttgaacttggttgatgcactgcagtctctaataaatttccaatatcaagaagaacatgctgaagaatatgatttattatgtaaaattatgggagagacctttaagaaactcaatgccatggagagacagctgcagagtgttgcagaactggaacaaaaatggcaaagtgaagttgatgatgccatgcaggggaaactggagaacaacatgcctttcttttatgattaccattttaatgagaacaaaatgaaagaactagaacttttatgttcaatgaaggaagtctcctttgatgggaatgatcttgaaaacatggtcctatcactgagggagaagttcctacaagaagtgaattctcttattcagaaaccctcacacccactggctaaaacaaagacgttagtgaagagtttaatgaaccgagccgagctgttgctgcatgtcaccatcgcagcccagtcgggcctcacgagaagcatctctgggacccctgctgaaacaccagcttgtaaatcagcttctgaaacaaaagtgatatctcacgctgtcaggcagcctgtttttcttcgcagcatgtcagctccttctgacctggaaatgattggtaatgaagatttggaatttactagagcaaatcagaggcgtcgccacgtgaccagccaccgcagcagctcctttacactcctgcagtcgctggccattgaggacagcagggacaagcccacctacagtgtcctgctagggcagctgtttgctttcatcggcaccaaccctgaccaagctgtgtccagcagcagtttccttttggctgcacagacaaggtggcggcggggaaacactcgcaagcaggcactggtgcacatgcgggaattgctgacagctgccgtacgagtcgggggagtgacgcatcttgtgggtccagtgacgatggtccttcagggaggacccagaattgaagaactcacatgtggtgggatggtcgagcaggtccaggaagcctttggcgagaccatgacctctgttgtgtctctgtgtgctcgttaccctatcgcttgcgcaaatagcattggactcttatgtaccataccttacaccaggagcgaagagaagtgcctggtacgcagtggccttgtgcagctcatggatcgactgtgtagcttgagcaatcagaccgagtccagctccagtgagaaacagaccaagaagcagaaggtggccaccatggcctgggctgccttccaggtgcttgccaaccgctgtgttgagtgggaaaaagaggaaggtggctccacagaggctgtgcactcaggtctggcccggcaggtgtccagccttctcactaaccatcttgcccgagccacagagtgctgtggcaaccaggctgctgggaatgacgcgctccaggatgtccttagtcttctcaatgatctctcaaggagccacataggtaaagccatcctgagccagccagcttgtgtgtccaaactcctctccctgctgcttgaccaacgcccgtctccaaagctagtccttattattctccagctgtgccgggcggcgctgcccctgatgagcgtagaagactgtggaaacgtggagctcccaccctggagctactctgtcccctccttaaacagtgagcaggaggatcccagcgacccagcttccaagatcgcctccctgctcttagcaaagctggcagattatgtggttccaggatgtcagacagttctttctccaaccgcttctgaacctgacaccacattgacaaaaaccagtcccaagaattccttgaaaggagataaagatcctggagaagagagtgaggctgtggatggcaagctctcgatatttatccacaagcgggaagaccagtcatcccatgaagtcctccagccattgctaagtagttcagaaggacggcccttccgacttggtactggcgccaacatggagaaagttgtgaagatggatcgagacatgaccaagggtggctgttgcgaagtgattacagaagaggctgcagccgccctgcggaaagccaccaagtgggcacagtcaggcctcatcgtcagcattgggccacctgtagagtctatcaacccagagactgtgagtggactatccacaggcgacaaaaagaaaactgcccaaacttccatttgccgagagaggaactcggagcttgcaaggactgatcctgtgcgtcccttcatcagtgggcatgtggcaaacagcatggctgcagaagtgatcgccttgctacatagcttgctcatggcacctgaatcaaatgctgctcaaatatggaccacaacagcagagaaggttctgtctagagcactgatgtacattccacaattggggaaatacgcagaaagcattctggaaaatggcagcagcagtggcaggaaacttgccaaacttcagagaattgcacgccaggccgttgccgcactgtgtgcacttggaggcttcaaagagacaatcaagataggatccgaggttcaggttttaggtagaggaatttcaggaagcattggagtagtggcttctatcaatgaacaggaaggtatagctacagtcagattcccacccatagactgtagaaagacttcgcaagcgtcagacacattgactattccattgtctagactttgtgttccaagatcagaggcattgcctcttcataaactgtccattactgagaaggtagtacaggcagtccagtccatgttgcttcctcaggagggaagtctctctattcacacctcacttcctgcaacaggagatgggtcagctcctgtgatggcagtcgttcggctccttgctgaaataaggacaagagcatgcctggtcatggcccagcttttagaagacagcttattttgtgaagaattcatacaacaatgtccagcagctgttgaagttcttaacctagtagcccaggaatgtagtgctggagagcgacttgcagttgtggaggtacagtgtgaacggctgaggatgctctaccgggactgtgctcggcccccaccacctcctttgcaggctgaccgaagacagcccaaagagattacttggagcccctcgcgagtgtttccgcctgttcgagcctgcatgttctcatctcaccttacctcagtcaccttcctggctgaccccagcgctgggggaggcctgccccggggcacttttatctatgccacttcaccactgccagttcaggccccgtctttttactgggaaattgaaatcgtttcctatggagacaccgatgatgacaccggacccatagtttcctttggcttcactacagaagcagagaagcgagatggggcttggactaatccagtgggcacttgtcttttccataacaacggccgagccgtgcactataatggctccagtttgttacagtggaagagcgttcgcttagacgtgactctctcccccggtgacgtggcaggaattggctgggagagaactgaggggactccacctcctccgggacagccagccaagggccgggtgtacttcacatactgcgggcagcgcctctcaccatatcttgaagacgtctctggtggcatgtggccagtggttcacattcagaaaaagaacaccaaaacccgagctaactttggctcccggccgtttgcctacgcggaagggcaggcccaccgcaatgctgctgacctgtgcactgacctagcagaagagatcagcgctaactttgaggccctgcctttcgccatggcatctgacagtgacaatgatgctggcaccagtattgcatcagacccaggcactcatgggccaccatgccggattgctgccgtggccaccgctcagcaacaatatgatagtgacacctcctgtcattataaagtcgagctcagctatgagaatttcatcacctctggcccagaccctcacccgcctcccattgcagatgatgaaagcgatgatgatgacgatgatgacatccctcaggaggaccactacgccctgctggtgaaagcatgggagaccaaggtttttcctaccatccgaagacgcttccgcaatgaagcagagcggaaatcgggcctggaccagataaagggggccttacaactaggtatggtggatattgcccgacagacggttgaatttctctacgaagagaatggtggcatcccaagagacctttatcttcccaccattgaagacattaaagacgaagcaaacaagttcacaattgataaagttcgaaaaggtctcacagtagtaacccgctctccagacagcaataatgtagccagcagtgctgttggaactgctctgccaaaatttgccatccgagggatgctgaaaacctttgggcttcatggagtcgtcttagatgttgattcagtgaatgaactggtgcaggtagaaacgtacctccgcagtgaaggtgtgctggtgcgatactggtatcctattgacatgttggaaaggcccccagcaggctaccgaaggactgccaccaatgggctggtcacactggacaataccaaccttcaaattcacagggagctgctgcgctgcgaggctgcgctggccaggctgtactgccgcatggccctgctcaatatcttcgccccgaagttgcctcacttgttcactcgcctcttccacatccctgccatccgggacattaccctggagcacctgcaactgctgtccaatcagctcctcgcacctcctctcccagacggcaccatcagctccagctcgatcctcctggcgcagtctttacagcattgcatccattcccagaactgctccgccacggacctcttttaccagggcaactcccagacagtgagagagtggctcaacgtggccatcacccggaccctgcaccagggcgaggagagccttttagagctgacgaaacagatctgctctttcctgcagacagcaccagagcagttcccctccgaagagttcccaatttccgaatccaaagtcaacatggacgtgaatttccccggggcagcttttgttgttgtgtcttgtaaagaaagtcaatctggattccgcaaagactcctctctgtacaaggcaccgtgggcacgggtgctcgtatatggcctcggccacaaagtgaagcgaaatggccagctgaacctcatcgaggccgcctgttacccgcgggacgcgtccccagccaacactgggcttgcacctccccccaccgctgaccagtacccctctgtggtcctctccacagacagggtccacatcaaactgggggtgtctccacctcctggagcagtcctggtgttacattccctgcccctggagttcccactggctatggccttcgcagagcagctgctgtcctggaaatcagaggacagtgaagggaagtccgaagatgagcctgacaccattccgacatccgtcctcctgcaggtggtggagctgctaggaaacttcttgtggaccacggacatggcagcctgcgtgaaggagcttgttttccatctcctggcagagctcctgcgcacggtgcacaccctggagcagaggcggcaccccgctggcctgtcctcctcaatcgccctccagctgaacccctgcctggccatgctgatggccttgcagtcggagctccacaagctgtacgacgaggagacgcagaactgggtctcaggcggcgcctgcgggggctccgggggggcggcggccggtgaccagggcaggttctctacgtattttcatgcactcatggaagggtgcctggctgtggccgaagtgaccctgcctactaacatgagtgtcacagccagtggggtgacctcagcgaccgccccaaatctcagtgactcgtcctcctcctcctcgtcctccccaggacagaccccacagagtcccagcctcctctccaagaggaaaaaagtcaagatgaagcgggaaaaggcctcctcgtcgggcaagcgccagtcttcccgcaccgtggactcggaccccaccgtgctcagcatcggaggcagcaagcccgaggacatgctgtggttccaccgcgcactcaccctgctcatcatcctccgccacctcaccaggaaggacccacaggggctgggcgtgacgagtgacgccatcgccgatgcctgccaggccctggtgggccccaccgcccacagccgcttgctggtgatctccgggatccccacccacctggacgagggcgtagtcagaggcgccatccgcaaggcctgcaacgcccacggcggggtcttcaaagacgagatctacatcccgctgcaggaagaagacaccaagaagccaaaagacaaggccgagggcggggacgggaaagttgagcccgagaagacactggccttccccggcacagacagcatggaggtcagcacgtccagcagcctgacccccgccatgagcatcagcgcctccgcctccaccagccaggcctccatctgcagctcgcagggcatctcccaaaccgtcagcgacctctctgtggatccgctgcctgccggcctcgagctgcccatccctccgggcctgttggagccccacgcggtgtccagccaggaaagcctggacatttccctgtgcagcaccggcagcctgggcagcctgggcagcctgggggagcccctggacaatgcagagacggcctcggtgtcggacatgggctccatgtacacagtcacttccctggacaaccagcccctcgccgcccgccccatcaaaggcttcgcagtcgtggagataagatcccgagccaaaattgagaaaattcgagcaagtttatttaacaataatgacttgattggtttgtcaagtttggatggtgaagatgaattgatggaaatgtcaacagaagagattctaaccgtgtctgtagtaaatcagagtctctttgatactcaagggagcccagggttagaagattatttcaatgataagtcaattaaaggggagaagctggtgcccggagccagagaggttctgacggagatatttaagagttgtgcccattcagagcagacgctgagcctgacaccagcgaagcccatcagagtctctgacatttatcttagcaaagagcagatcaactcccagaccccaggcaacctcctccacctcttcttcaccaatgtccggccgccaaaaaaggtgctggaggatcagctcacccagatcctgaggaagtatggcgtgccaaagcccaagtttgacaagagcaagtacagcaaggccgggaaggagcagcaccccgtgaaggtggtgagcaccaagcggcctatcaccaagccgcccgccaaggacaaggctgtgctcaacagcgtcagcaggactgccttaagtgagaagaagccaactgtgaagccaaaatcaccagaaaagagcaaaccagatgaaaaggacccagaaaagtcacctaccaaaaaacaagaagtccctgaggaaaaatacctgacgctggaaggatttcacaaatttgttattgaccgagccaggcaagatatccgtagcgtctggagggcgatcttgtcctgtggttacgatcttcactttgagaggtgcgcatgcatcgatgtccgacatgcacagaaggcctcaagaaagtggaccctggagatggacgtggcacttgtgcagtacatcaaccagctatgccgccacctcgccatcacacccgcacggctccatccccatgaggtgtacctggaccccgcggatgctgctgaccccagagtggcctgtctcctgaacgtgcccatcgagagcctgcgcctgcgcttcgccttgctgcagtccctcaacaccacactggagaccttcttcctgcccctggtggagctgcgccagacacccatgtatacccacagcatcgccgccctgctgaaggaggccaaagggctgatcttctatgacacgaaggtgaccgtgatgaatcgagtgctgaatgccactgtgcagaggacagcggaccacgcggcccctgagatcaccttggacccactggaaattgtgggaggggaaatcagagcttctgaaaactcctacttctgtcaggctgccaggcagctggcctcagtgccgtcgtctcagctctgcgtcaagctggccagtggcggtgaccccacatatgccttcaacatccgcttcactggcgaggaggtccatggcaccagcggctctttccgccacttcctgtggcaggtgtgtaaggagctgcagagttcctcgctgtcgctgctgctgctgtgccccagctcagctgtcaataagaacaagggcaagtatatcctgaccccgagccccatcacctacggggaggagcagctgctgcacttcctggggcagctgctggggattgcaattcgggcagacgtcccgctgcccctggacctcctgccctccttctggaagacgctggtgggcgagcccttggaccctgagcaagacctgcaggaagcggatatcctcacctacaattacgtcaagaagtttgagagcatcaatgatgagaccgagctggaggccctgtgcgctgagatcgcctcccagcacctggccacggagagccctgacagccccaacaagccctgctgcaggttcacctacctgaccatgacgggcgaggaggtggagctgtgcagccggggccggcacatccttgtggcgtgggagaacaaggacatctacgcggcagccatccggagcctgcggctgcgggagctgcagaatgtggagtgcgtgacggccgtgcgggccggcctgggctccatcatccccctgcagctgctgaccatgctcagcccactggagatggagctgcgcacctgcggcctcccctacatcaacctcgagttcctcaaggcccacaccatgtaccaagtggggctgatggagacggaccagcacatcgagttcttctggggggccctggagatgttcacccaggaggagctgtgcaagttcatcaagtttgcctgcaaccaggagcgcatcccgttcacctgcccctgcaaagatgggggtcccgacactgcccatgtgcccccgtaccccatgaagatcgcccccccagatggcacagcaggttccccagactctcgctacatccgcgtggagacctgcatgttcatgatcaagcttccccagtactcctctctggaaatcatgctggagaaacttcgttgtgccattcactaccgtgaagaccccctcagtggctgatgggagggagccccagaattaggctgtcactgaggcacccactctgctggcttgggaagccaccactgcggcccgtccctccagggccctgcgtgaggagttggcaacattttgcttttccaaactttcgtccacattccagggcctcctggaagacttaaccttttgtctttgtacgtttcgtgatgggttggttcttttgctgcctgtttgtggtctatttgtaggatagtttagttcccagacagtttgtgtctaatttgatcttcttggacattgtccctcatggccaccagattctaatgccataaggccccagctggttccccatcacagaaccacccagcaggaagccgggggtacaatgacctcggccacacagagcgctcgtgctttcagcagagcgcctccacagacaagcctgtggccagccctgccctccagcctcgagctggagttgctccagaggcagccccagcaggcctccctccacatagaggtggctgggccaattgcccaaacacgtgagacacacagggagctttatgtgttcatcttcctgctttagaacttgctcccggtcttggtttttctgaggaaaagcccacagtggttcccctgcccctcccatacctccctatctgccgtctgtctctttgggccctggtctgacagttttcatctgaggcctcctcgggagcaggagacttaagggttcatcccgaccttagttcacagagcctagctgggtgcatcccagccgcagggggtgagaagacacccagagatgggggacaatgctcaggtgggggcctcctccgagactctggttgagaggaaagcacatgattcaagcctaccccacaaaaaaggagcacaaaatgctcagaaatggcccttcctccctgcagtgacgtaggacaagggaaagggccacacccattttcaaaagagtggactgaggtgctctgctcaatttggggtctgctttagtgacccagacactcaagtccagatggagactccaggggggtccttctgcccctctggccagccccacccagcactccccatcaccccatgtaagtgtgtatgccagggctgagctgcctccaggctcacccactgcatctttgccccaaataggtctttgtccagtggtactttgttcatgagcagcacaggccatcttgttggacactgtcactttgggccttgccaggtctcacagaatcacatcgctgtatttattgtataatattgtgaatattggaagttttgagtgagtgctgtctagaaggttttggagtgtggatgctggtccaagaaagaagatgtgccctggcctgctggaaagattgtgaattctagagatagagccgttagcatccatctcctccctgtaactcttaggaaatgcatcaaggaccattatagaaaggatcccctgacctaaggatgaaatcgacctagggttaatcatgacagctgcatcagttgtattggatgcaagtcaactctggaggtgagtgcccgcaagcagttcccctgctttgaaagaagatggtcagcccgctgcctccccagcggccacagctcctttgagtgtggggggtcacagccaggatgtattcctgacaataaggatccttttattttcatttctgcataatgaaagagcctttcgatttattagaagtggtttttcctccctacatctttaaattcttggttctctttagtcctcatcccttgaatggacttgtcagctacctccccaggaggagttcagaagcttctgttggccatcacttgagtagatgacaagctgtaaggtatctgctgctaacgtggctgcttctccgagagcacattgaggtccagacagatccaaaccttggccctaaaaaatgtgtgctgtaaagttacttgatgtatatttattataattatttatggttgcatttaacaaacttttcattcaatctgatgctatttacaccatgctgtgtaaaggaagctcactaaaggaaaaaagtcacaccaataaataaccttcatctaattttgatttaccttaagagttgtgtgatcatctactcttgctgagcaagttcaaaggctggcatgcttggatggctctgatatttaagtgctgccaagtggctaggaattaaagtgtttctaattattatgg

SEQ ID NO: 139980 - DNA, 587 bp, Homo sapiens
  Payload ID: 7453
  Gene Symbol: HECTD4
  Gene Name: HECT domain containing E3 ubiquitin protein ligase 4
  ENST ID: ENST00000550724
  CDS Start-End: 1-330
gcggccgctgactcggcgcagtggctctcggtgaaggaagagaccatcttcctgcacgacgggctgatccgggtcaccgacctggccgagctgcccagcgagatcctcggggccccagaggccgcggacaccgacctggagattttaacctttgagaccaagaacccgtcggaattagcagaacgtttgcgctctgtttgtgggaatcagagcaatgcctatgcccggctgctggaataccgcctgaatgccttgcgaggactgtggaatgcccagcgccagctggccttagaagaacagcatgaaagggaaagttcaggtggtatttaaatttttcttcagcccacaaactgaaaggaatcgagacatcattcgacggtcgggattgcttctttggcagttgttgatggctccaaaagatcaaatttgccctgaaattcagaaggaagtctgccttgccatcagctctggtttaaatatcttgtacccaggtgaaactgaaatcaataacttacttaaactggtcttaacagaaggagagagaaacagtggactctcccagctacgggatgtgatcctaaccaacc

SEQ ID NO: 139981 - DNA, 15450 bp, Homo sapiens
  Payload ID: 7453
  Gene Symbol: HECTD4
  Gene Name: HECT domain containing E3 ubiquitin protein ligase 4
  ENST ID: ENST00000550722
  CDS Start-End: 397-13251
gcggccgctgactcggcgcagtggctctcggtgaaggaagagaccatcttcctgcacgacgggctgatccgggtcaccgacctggccgagctgcccagcgagatcctcggggccccagaggccgcggacaccgacctggagattttaacctttgagaccaagaacccgtcggaattagcagaacgtttgcgctctgtttgtgggaatcagagcaatgcctatgcccggctgctggaataccgcctgaatgccttgcgaggactgtggaatgcccagcgccagctggccttagaagaacagcatgaaagggaaagttcaggtgatgaggaaactttggccctgctcaaacgccagggcttgttgcagcaacctgagcaagcgcccttcacatcgaggatggggctcctgctggtcttcccccttattcagtcccagagtagaacagacccctctctctgtaacataactgctgaggtgctattgaactgccttcgtgactgccagcctttgagcttgaccaaggagcctgctgactgtctcaatggaattgaaactttgctgtgctcttggctagaggagacttctgacacaggccgacacatcccacataagcaaaaagaaaatgctgctgctgccctggtggctttggcttgtgccaggggatcattgaaaactttcgtccacacagtccatctattacagaaacagacggatctagggtccctgcctgtagctgatgtgctatataggctgttgcttttggaaggggggcctggatctccctcctgtttgcttgggggcaaacacatagtatcatggggttatgaagacatgttgcctgcgccggatagcaacactggctccagttctgaaaataaagatgctgacttgggacgctgtctcacggcagatggtctttacctgtatactactaactcagttggaagaggagtaagcaaattgggatctggattacatggtactctcagaggttttgtgtactgccggaacgaggagttggaaccaggatgggtggcttttggcagcggcagtcttctccaccggcctgtctctttcgataataaacctcactcccttttccaggtcattgaccagaacacccttcaggtgtgccaggtggtgccaatgccagccaatcacctccccattggcagcaccatgagcactgtgcacctgtcttcagatggcacttacttctattggatctggtctcctgccagcctgaatgagaaaacaccgaagggacattctgtcttcatggacatttttgaacttgtggttgaaaatggtgtatttgtagccaacccacttcaggaacgtacaattctaatgagaaaagagggcgaatctgccaaaagcattaatgagatgcttctaagtagactttctcggtatagagcctccccgtcagcaacgcttgctgccctgactggttccaccatctccaacacactgaaagaggatcaagcagcaaatactagctgtgggctgcctctaaaaatgctgcggaagacacccatatatacctgtggcacctacttggtgatgctggtgcctcctccagggggatcaggcagctctgccacccgatctctttttggtggaacaagtggtttgtcatctttaaaaatcctagcctccagcttggtgtataatatttcggatggtcagtttacaagtcgtgcagatctcatagatgctgctggaagctcactggggcgtggtgctctcgtaccaggattgggagcgtgttatgacacagtgaacaacatgctatggacatgctcaaatgactatatcgatcagtggtgtaaccctgggaatcaagccttccattatgtctgccagagacttggagtcagtcacattatcactgagcccaaagaagaggctataaccacgaatgaggttataaaccaattattgcaccacgttggtgcgatgtgcatacaccaactcaatcttcttgccaccaaccccaatcttccaatcacaagtgtcttgggcaagcagcatccaattgaagcacatcatcttagcagtatttgtgacattatggagaaggccatggttaatggagatacctgtattatacgctgcattctcgttgtctttcaggtggtatttaaatttttcttcagcccacaaactgaaaggaatcgagacatcattcgacggtcgggattgcttctttggcagttgttgatggctccaaaagatcaaatttgccctgaaattcagaaggaagtctgccttgccatcagctctggtttaaatatcttgtacccaggtgaaactgaaatcaataacttacttaaactggtcttaacagaaggagagagaaacagtggactctcccagctacgggatgtgatcctaaccaacctggctgaacagctccaaaacaaccgatttggcagtgatgaggatgatcattacagactaaatgatgaacttttacactacattctgaagattgttgtacgagaatcctgtatcttaatcaccaagtgccaaactgtctctaaagatgattttcaaaagctcctttcaactgtgcctgctgcatcctcctgcctgcgctatctgatggcagttcagaatcaccttctcagtaacactattttgattaaacctgatgagaatgatgacagtgacagctccttgcagggagagacattgaaggtacaggagctaaaagtcagtattttggctcttgccacccaaatcctgactggatgtgatgaagtgttggaaatgctacagcaggtcacaactgccctcataaatagtgacatagcagaccgtgagcagaggttaaaaggcttggaacaagttactaaggctactatgcttggtcaccttcttccagtgttactgacctccttgatgcatccaaatttacagactctgatcatggcggatgccctgatgcctcagctagtgcagctggtactctataccagccagacggcgttgctgcttaaaacccagtgtccggtttttgctgaggtgggctgttccccgtgtggtgcaccagaccagaagtgcaggctgttccctgatgagagaatgttagaagagaaggaagagccaggatttctcactggtttaaagattcctgccccatgggctgctggaaagactgtggaaacagtccaccccgtcagagacaactataaatttaaagaaacggtccatatcccaggagctcgctgcctgtaccttagatttgatagcagatgctcttcgcaatatgactatgacaaattggtgatatatgcggggcctaacacaaacagtaggaaggttgctgaatatggaggcaacacactgggatatggcagccgtagtgtcttaggaactggttggccgaaagacttggtgaagtgcatttcccccccttccttaaattttaaggtggaaggagatacagtcaccttctcctttgaaatgagaagtggccgtgaacacaacactcctgataaagccatgtggggctttgcttgcacagttcgcgctcaggagtcttcggaggatgtctcaggaggcttgccctttctggtagacctggctttaggtctgtctgtgttagcttgttccatgttaagaatcctgtacaatggaccagaaattaccaaagaagaagaagcctgtcaggagctattgcggtccaaacttttacaaaggtgccagtggcaggtggaggccaatggcgtgatctcccctgcccttactccgagcccctctccactgcctctgaccatagaggaagacagagaattcacctacccctctgatgtcctcgtgcctcctgttggaaactactttgatctgcctcggatcagactgcctccaggaatcatgataaagctcagggaaatttctgggcgtgctagacctcaatttagaccaagtataaaagaagtgattcagccagacgtgatggaggaaatggtggtatcttgtgttattaagcacttgaacttggttgatgcactgcagtctctaataaatttccaatatcaagaagaacatgctgaagaatatgatttattatgtaaaattatgggagagacctttaagaaactcaatgccatggagagacagctgcagagtgttgcagaactggaacaaaaatggcaaagtgaagttgatgatgccatgcaggggaaactggagaacaacatgcctttcttttatgattaccattttaatgagaacaaaatgaaagaactagaacttttatgttcaatgaaggaagtctcctttgatgggaatgatcttgaaaacatggtcctatcactgagggagaagttcctacaagaagtgaattctcttattcagaaaccctcacacccactggctaaaacaaagacgttagtgaagagtttaatgaaccgagccgagctgttgctgcatgtcaccatcgcagcccagtcgggcctcacgagaagcatctctgggacccctgctgaaacaccagcttgtaaatcagcttctgaaacaaaagtgatatctcacgctgtcaggcagcctgtttttcttcgcagcatgtcagctccttctgacctggaaatgattggtaatgaagatttggaatttactagagcaaatcagaggcgtcgccacgtgaccagccaccgcagcagctcctttacactcctgcagtcgctggccattgaggacagcagggacaagcccacctacagtgtcctgctagggcagctgtttgctttcatcggcaccaaccctgaccaagctgtgtccagcagcagtttccttttggctgcacagacaaggtggcggcggggaaacactcgcaagcaggcactggtgcacatgcgggaattgctgacagctgccgtacgagtcgggggagtgacgcatcttgtgggtccagtgacgatggtccttcagggaggacccagaattgaagaactcacatgtggtgggatggtcgagcaggtccaggaagcctttggcgagaccatgacctctgttgtgtctctgtgtgctcgttaccctatcgcttgcgcaaatagcattggactcttatgtaccataccttacaccaggagcgaagagaagtgcctggtacgcagtggccttgtgcagctcatggatcgactgtgtagcttgagcaatcagaccgagtccagctccagtgagaaacagaccaagaagcagaaggtggccaccatggcctgggctgccttccaggtgcttgccaaccgctgtgttgagtgggaaaaagaggaaggtggctccacagaggctgtgcactcaggtctggcccggcaggtgtccagccttctcactaaccatcttgcccgagccacagagtgctgtggcaaccaggctgctgggaatgacgcgctccaggatgtccttagtcttctcaatgatctctcaaggagccacataggtaaagccatcctgagccagccagcttgtgtgtccaaactcctctccctgctgcttgaccaacgcccgtctccaaagctagtccttattattctccagctgtgccgggcggcgctgcccctgatgagcgtagaagactgtggaaacgtggagctcccaccctggagctactctgtcccctccttaaacagtgagcaggaggatcccagcgacccagcttccaagatcgcctccctgctcttagcaaagctggcagattatgtggttccaggatgtcagacagttctttctccaaccgcttctgaacctgacaccacattgacaaaaaccagtcccaagaattccttgaaaggagataaagatcctggagaagagagtgaggctgtggatggcaagctctcgatatttatccacaagcgggaagaccagtcatcccatgaagtcctccagccattgctaagtagttcagaaggacggcccttccgacttggtactggcgccaacatggagaaagttgtgaagatggatcgagacatgaccaagggtggctgttgcgaagtgattacagaagaggctgcagccgccctgcggaaagccaccaagtgggcacagtcaggcctcatcgtcagcattgggccacctgtagagtctatcaacccagagactgtgagtggactatccacaggcgacaaaaagaaaactgcccaaacttccatttgccgagagaggaactcggagcttgcaaggactgatcctgtgcgtcccttcatcagtgggcatgtggcaaacagcatggctgcagaagtgatcgccttgctacatagcttgctcatggcacctgaatcaaatgctgctcaaatatggaccacaacagcagagaaggttctgtctagagcactgatgtacattccacaattggggaaatacgcagaaagcattctggaaaatggcagcagcagtggcaggaaacttgccaaacttcagagaattgcacgccaggccgttgccgcactgtgtgcacttggaggcttcaaagagacaatcaagataggatccgaggttcaggttttaggtagaggaatttcaggaagcattggagtagtggcttctatcaatgaacaggaaggtatagctacagtcagattcccacccatagactgtagaaagacttcgcaagcgtcagacacattgactattccattgtctagactttgtgttccaagatcagaggcattgcctcttcataaactgtccattactgagaaggtagtacaggcagtccagtccatgttgcttcctcaggagggaagtctctctattcacacctcacttcctgcaacaggagatgggtcagctcctgtgatggcagtcgttcggctccttgctgaaataaggacaagagcatgcctggtcatggcccagcttttagaagacagcttattttgtgaagaattcatacaacaatgtccagcagctgttgaagttcttaacctagtagcccaggaatgtagtgctggagagcgacttgcagttgtggaggtacagtgtgaacggctgaggatgctctaccgggactgtgctcggcccccaccacctcctttgcaggctgaccgaagacagcccaaagagattacttggagcccctcgcgagtgtttccgcctgttcgagcctgcatgttctcatctcaccttacctcagtcaccttcctggctgaccccagcgctgggggaggcctgccccggggcacttttatctatgccacttcaccactgccagttcaggccccgtctttttactgggaaattgaaatcgtttcctatggagacaccgatgatgacaccggacccatagtttcctttggcttcactacagaagcagagaagcgagatggggcttggactaatccagtgggcacttgtcttttccataacaacggccgagccgtgcactataatggctccagtttgttacagtggaagagcgttcgcttagacgtgactctctcccccggtgacgtggcaggaattggctgggagagaactgaggggactccacctcctccgggacagccagccaagggccgggtgtacttcacatactgcgggcagcgcctctcaccatatcttgaagacgtctctggtggcatgtggccagtggttcacattcagaaaaagaacaccaaaacccgagctaactttggctcccggccgtttgcctacgcggaagggcaggcccaccgcaatgctgctgacctgtgcactgacctagcagaagagatcagcgctaactttgaggccctgcctttcgccatggcatctgacagtgacaatgatgctggcaccagtattgcatcagacccaggcactcatgggccaccatgccggattgctgccgtggccaccgctcagcaacaatatgatagtgacacctcctgtcattataaagtcgagctcagctatgagaatttcatcacctctggcccagaccctcacccgcctcccattgcagatgatgaaagcgatgatgatgacgatgatgacatccctcaggaggaccactacgccctgctggtgaaagcatgggagaccaaggtttttcctaccatccgaagacgcttccgcaatgaagcagagcggaaatcgggcctggaccagataaagggggccttacaactaggtatggtggatattgcccgacagacggttgaatttctctacgaagagaatggtggcatcccaagagacctttatcttcccaccattgaagacattaaagacgaagcaaacaagttcacaattgataaagttcgaaaaggtctcacagtagtaacccgctctccagacagcaataatgtagccagcagtgctgttggaactgctctgccaaaatttgccatccgagggatgctgaaaacctttgggcttcatggagtcgtcttagatgttgattcagtgaatgaactggtgcaggtagaaacgtacctccgcagtgaaggtgtgctggtgcgatactggtatcctattgacatgttggaaaggcccccagcaggctaccgaaggactgccaccaatgggctggtcacactggacaataccaaccttcaaattcacagggagctgctgcgctgcgaggctgcgctggccaggctgtactgccgcatggccctgctcaatatcttcgccccgaagttgcctcacttgttcactcgcctcttccacatccctgccatccgggacattaccctggagcacctgcaactgctgtccaatcagctcctcgcacctcctctcccagacggcaccatcagctccagctcgatcctcctggcgcagtctttacagcattgcatccattcccagaactgctccgccacggacctcttttaccagggcaactcccagacagtgagagagtggctcaacgtggccatcacccggaccctgcaccagggcgaggagagccttttagagctgacgaaacagatctgctctttcctgcagacagcaccagagcagttcccctccgaagagttcccaatttccgaatccaaagtcaacatggacgtgaatttccccggggcagcttttgttgttgtgtcttgtaaagaaagtcaatctggattccgcaaagactcctctctgtacaaggcaccgtgggcacgggtgctcgtatatggcctcggccacaaagtgaagcgaaatggccagctgaacctcatcgaggccgcctgttacccgcgggacgcgtccccagccaacactgggcttgcacctccccccaccgctgaccagtacccctctgtggtcctctccacagacagggtccacatcaaactgggggtgtctccacctcctggagcagtcctggtgttacattccctgcccctggagttcccactggctatggccttcgcagagcagctgctgtcctggaaatcagaggacagtgaagggaagtccgaagatgagcctgacaccattccgacatccgtcctcctgcaggtggtggagctgctaggaaacttcttgtggaccacggacatggcagcctgcgtgaaggagcttgttttccatctcctggcagagctcctgcgcacggtgcacaccctggagcagaggcggcaccccgctggcctgtcctcctcaatcgccctccagctgaacccctgcctggccatgctgatggccttgcagtcggagctccacaagctgtacgacgaggagacgcagaactgggtctcaggcggcgcctgcgggggctccgggggggcggcggccggtgaccagggcaggttctctacgtattttcatgcactcatggaagggtgcctggctgtggccgaagtgaccctgcctactaacatgagtgtcacagccagtggggtgacctcagcgaccgccccaaatctcagtgactcgtcctcctcctcctcgtcctccccaggacagaccccacagagtcccagcctcctctccaagaggaaaaaagtcaagatgaagcgggaaaaggcctcctcgtcgggcaagcgccagtcttcccgcaccgtggactcggaccccaccgtgctcagcatcggaggcagcaagcccgaggacatgctgtggttccaccgcgcactcaccctgctcatcatcctccgccacctcaccaggaaggacccacaggggctgggcgtgacgagtgacgccatcgccgatgcctgccaggccctggtgggccccaccgcccacagccgcttgctggtgatctccgggatccccacccacctggacgagggcgtagtcagaggcgccatccgcaaggcctgcaacgcccacggcggggtcttcaaagacgagatctacatcccgctgcaggaagaagacaccaagaagccaaaagacaaggccgagggcggggacgggaaagttgagcccgagaagacactggccttccccggcacagacagcatggaggtcagcacgtccagcagcctgacccccgccatgagcatcagcgcctccgcctccaccagccaggcctccatctgcagctcgcagggcatctcccaaaccgtcagcgacctctctgtggatccgctgcctgccggcctcgagctgcccatccctccgggcctgttggagccccacgcggtgtccagccaggaaagcctggacatttccctgtgcagcaccggcagcctgggcagcctgggcagcctgggggagcccctggacaatgcagagacggcctcggtgtcggacatgggctccatgtacacagtcacttccctggacaaccagcccctcgccgcccgccccatcaaaggcttcgcagtcgtggagataagatcccgagccaaaattgagaaaattcgagcaagtttatttaacaataatgacttgattggtttgtcaagtttggatggtgaagatgaattgatggaaatgtcaacagaagagattctaaccgtgtctgtagtaaatcagagtctctttgatactcaagggagcccagggttagaagattatttcaatgataagtcaattaaaggggagaagctggtgcccggagccagagaggttctgacggagatatttaagagttgtgcccattcagagcagacgctgagcctgacaccagcgaagcccatcagagtctctgacatttatcttagcaaagagcagatcaactcccagaccccaggcaacctcctccacctcttcttcaccaatgtccggccgccaaaaaaggtgctggaggatcagctcacccagatcctgaggaagtatggcgtgccaaagcccaagtttgacaagagcaagtacagcaaggccgggaaggagcagcaccccgtgaaggtggtgagcaccaagcggcctatcaccaagccgcccgccaaggacaaggctgtgctcaacagcgtcagcaggactgccttaagtgagaagaagccaactgtgaagccaaaatcaccagaaaagagcaaaccagatgaaaaggacccagaaaagtcacctaccaaaaaacaagaagtccctgaggaaaaatacctgacgctggaaggatttcacaaatttgttattgaccgagccaggcaagatatccgtagcgtctggagggcgatcttgtcctgtggttacgatcttcactttgagaggtgcgcatgcatcgatgtccgacatgcacagaaggcctcaagaaagtggaccctggagatggacgtggcacttgtgcagtacatcaaccagctatgccgccacctcgccatcacacccgcacggctccatccccatgaggtgtacctggaccccgcggatgctgctgaccccagagtggcctgtctcctgaacgtgcccatcgagagcctgcgcctgcgcttcgccttgctgcagtccctcaacaccacactggagaccttcttcctgcccctggtggagctgcgccagacacccatgtatacccacagcatcgccgccctgctgaaggaggccaaagggctgatcttctatgacacgaaggtgaccgtgatgaatcgagtgctgaatgccactgtgcagaggacagcggaccacgcggcccctgagatcaccttggacccactggaaattgtgggaggggaaatcagagcttctgaaaactcctacttctgtcaggctgccaggcagctggcctcagtgccgtcgtctcagctctgcgtcaagctggccagtggcggtgaccccacatatgccttcaacatccgcttcactggcgaggaggtccatggcaccagcggctctttccgccacttcctgtggcaggtgtgtaaggagctgcagagttcctcgctgtcgctgctgctgctgtgccccagctcagctgtcaataagaacaagggcaagtatatcctgaccccgagccccatcacctacggggaggagcagctgctgcacttcctggggcagctgctggggattgcaattcgggcagacgtcccgctgcccctggacctcctgccctccttctggaagacgctggtgggcgagcccttggaccctgagcaagacctgcaggaagcggatatcctcacctacaattacgtcaagaagtttgagagcatcaatgatgagaccgagctggaggccctgtgcgctgagatcgcctcccagcacctggccacggagagccctgacagccccaacaagccctgctgcaggttcacctacctgaccatgacgggcgaggaggtggagctgtgcagccggggccggcacatccttgtggcgtgggagaacaaggacatctacgcggcagccatccggagcctgcggctgcgggagctgcagaatgtggagtgcgtgacggccgtgcgggccggcctgggctccatcatccccctgcagctgctgaccatgctcagcccactggagatggagctgcgcacctgcggcctcccctacatcaacctcgagttcctcaaggcccacaccatgtaccaagtggggctgatggagacggaccagcacatcgagttcttctggggggccctggagatgttcacccaggaggagctgtgcaagttcatcaagtttgcctgcaaccaggagcgcatcccgttcacctgcccctgcaaagatgggggtcccgacactgcccatgtgcccccgtaccccatgaagatcgcccccccagatggcacagcaggttccccagactctcgctacatccgcgtggagacctgcatgttcatgatcaagcttccccagtactcctctctggaaatcatgctggagaaacttcgttgtgccattcactaccgtgaagaccccctcagtggctgatgggagggagccccagaattaggctgtcactgaggcacccactctgctggcttgggaagccaccactgcggcccgtccctccagggccctgcgtgaggagttggcaacattttgcttttccaaactttcgtccacattccagggcctcctggaagacttaaccttttgtctttgtacgtttcgtgatgggttggttcttttgctgcctgtttgtggtctatttgtaggatagtttagttcccagacagtttgtgtctaatttgatcttcttggacattgtccctcatggccaccagattctaatgccataaggccccagctggttccccatcacagaaccacccagcaggaagccgggggtacaatgacctcggccacacagagcgctcgtgctttcagcagagcgcctccacagacaagcctgtggccagccctgccctccagcctcgagctggagttgctccagaggcagccccagcaggcctccctccacatagaggtggctgggccaattgcccaaacacgtgagacacacagggagctttatgtgttcatcttcctgctttagaacttgctcccggtcttggtttttctgaggaaaagcccacagtggttcccctgcccctcccatacctccctatctgccgtctgtctctttgggccctggtctgacagttttcatctgaggcctcctcgggagcaggagacttaagggttcatcccgaccttagttcacagagcctagctgggtgcatcccagccgcagggggtgagaagacacccagagatgggggacaatgctcaggtgggggcctcctccgagactctggttgagaggaaagcacatgattcaagcctaccccacaaaaaaggagcacaaaatgctcagaaatggcccttcctccctgcagtgacgtaggacaagggaaagggccacacccattttcaaaagagtggactgaggtgctctgctcaatttggggtctgctttagtgacccagacactcaagtccagatggagactccaggggggtccttctgcccctctggccagccccacccagcactccccatcaccccatgtaagtgtgtatgccagggctgagctgcctccaggctcacccactgcatctttgccccaaataggtctttgtccagtggtactttgttcatgagcagcacaggccatcttgttggacactgtcactttgggccttgccaggtctcacagaatcacatcgctgtatttattgtataatattgtgaatattggaagttttgagtgagtgctgtctagaaggttttggagtgtggatgctggtccaagaaagaagatgtgccctggcctgctggaaagattgtgaattctagagatagagccgttagcatccatctcctccctgtaactcttaggaaatgcatcaaggaccattatagaaaggatcccctgacctaaggatgaaatcgacctagggttaatcatgacagctgcatcagttgtattggatgcaagtcaactctggaggtgagtgcccgcaagcagttcccctgctttgaaagaagatggtcagcccgctgcctccccagcggccacagctcctttgagtgtggggggtcacagccaggatgtattcctgacaataaggatccttttattttcatttctgcataatgaaagagcctttcgatttattagaagtggtttttcctccctacatctttaaattcttggttctctttagtcctcatcccttgaatggacttgtcagctacctccccaggaggagttcagaagcttctgttggccatcacttgagtagatgacaagctgtaaggtatctgctgctaacgtggctgcttctccgagagcacattgaggtccagacagatccaaaccttggccctaaaaaatgtgtgctgtaaagttacttgatgtatatttattataattatttatggttgcatttaacaaacttttcattcaatctgatgctatttacaccatgctgtgtaaaggaagctcactaaaggaaaaaagtcacaccaataaataaccttcatctaattttgatttaccttaagagttgtgtgatcatctactcttgctgagcaagttcaaaggctggcatgcttggatggctctgatatttaagtgctgccaagtggctaggaattaaagtgtttctaattattatggtc

SEQ ID NO: 139982 - DNA, 1030 bp, Homo sapiens
  Payload ID: 7453
  Gene Symbol: HECTD4
  Gene Name: HECT domain containing E3 ubiquitin protein ligase 4
  ENST ID: ENST00000548588
  CDS Start-End: 1-787
caggactgccttaagtgagaagaagccaactgtgaagccaaaatcaccagaaaagagcaaaccagatgaaaaggacccagaaaagtcacctaccaaaaaacaagaagtccctgaggaaaaatacctgacgctggaaggatttcacaaatttgttattgaccgagccaggcaagatatccgtagcgtctggagggcgatcttgtcctgtggttacgatcttcactttgagaggtgcgcatgcatcgatgtccgacatgcacagaaggcctcaagaaagtggaccctggagatggacgtggcacttgtgcagtacatcaaccagctatgccgccacctcgccatcacacccgcacggctccatccccatgaggtgtacctggaccccgcggatgctgctgaccccagagtggcctgtctcctgatgatagggttgcctgtgttgcctgtgagtcaggcatctcagccacctggccgagatctcagcctgactgctcctgcgccctcagacgtgcccatcgagagcctgcgcctgcgcttcgccttgctgcagtccctcaacaccacactggagaccttcttcctgcccctggtggagctgcgccagacacccatgtatacccacagcatcgccgccctgctgaaggaggccaaaggtcagtgcctgcacctgccctggccctgcaggaagagagaggtgacctgcaagacaccagggccagaatccacgggcagcgtccttgggcagccccgccaggaagatgccaccccacctcaacctttcatgtagcaggcagggctcctctggagcaacaggcccacccaagggaagttactttaattataaaagtaacatgctctgaaaaataaaattatttttaaggttttcaaattaattagaaatcatatatgaaggtctgtttactatctggcctccacatccctacatcccagaagtgacattgttaacagatgagtctctctccttccagacttttctcttgacatataaacagacacatgtgtgcacaca

SEQ ID NO: 139983 - DNA, 9501 bp, Homo sapiens
  Payload ID: 7454
  Gene Symbol: HECW1
  Gene Name: HECT, C2 and WW domain containing E3 ubiquitin protein ligase 1
  Uniprot ID: Q76N89
  ENST ID: ENST00000395891
  CDS Start-End: 606-5426
ggggatgcaagcgggaggataaagcgatgaagtgtgctgcgttaccgcgcatcaggcgctgttgttggagccggaacaccgtgcgactctgaccgaaccggccccctcctcgcgcacacactcgccgagccgcgcgcgcccctccgccgtgacagtggccgtggcctccgctctctcggggcacccggcagccagagcgcagcgagagcgggcggtcgccagggtcccctccccagccagtcccaggcgcccggtgcactatgcggggcacgtgcgccccccagctctaatctgcgcgctgacaggagcatgatctgtgcccaggccagggctgccaagatatcaatgctatgttcagcagaaacggatacagcaagagcagcatagttcaaaaattgagggaggcatcttctctcttttcctgggatttaaacgcgatttaggagggcagatgccctacccgaaaaggccaaccgttaaagaccccggcagtgttgtggtccaaggcgtctcaaagcaggtggccagatctgcgtttctcatcagcagactcactccggctgtggctattacggaattgatgcgcgtacacgtggtgggtcattatgctgctgcacctgtgtagtgtgaagaatctgtaccagaacaggtttttaggcctggccgccatggcgtctccttctagaaactcccagagccgacgccggtgcaaggagccgctccgatacagctacaaccccgaccagttccacaacatggacctcaggggcggcccccacgatggcgtcaccattccccgctccaccagcgacactgacctggtcacctcggacagccgctccacgctcatggtcagcagctcctactattccatcgggcactctcaggacctggtcatccactgggacataaaggaggaagtggacgctggggactggattggcatgtacctcattgatgaggtcttgtccgaaaactttctggactataaaaaccgtggagtcaatggttctcatcggggccagatcatctggaagatcgatgccagctcgtactttgtggaacctgaaactaagatctgcttcaaatactaccatggagtgagtggggccctgcgagcaaccacccccagtgtcacggtcaaaaactcggcagctcctatttttaaaagcattggtgctgatgagaccgtccaaggacaaggaagtcggaggctgatcagcttctctctctcagatttccaagccatggggttgaagaaagggatgtttttcaacccagacccttatctgaagatttccattcagcctgggaaacacagcatcttccccgccctccctcaccatggacaggagaggagatccaagatcataggcaacaccgtgaaccccatctggcaggccgagcaattcagttttgtgtccttgcccactgacgtgctggaaattgaggtgaaggacaagtttgccaagagccgccccatcatcaagcgcttcttgggaaagctgtcgatgcccgttcaaagactcctggagagacacgccataggggatagggtggtcagctacacacttggccgcaggcttccaacagatcatgtgagtggacagctgcaattccgatttgagatcacttcctccatccacccagatgatgaggagatttccctgagtaccgagcctgagtcagcccaaattcaggacagccccatgaacaacctgatggaaagcggcagtggggaacctcggtctgaggcaccagagtcctctgagagctggaagccagagcagctgggtgagggcagtgtccccgatggtccagggaaccaaagcatagagctttccagaccagctgaggaagcagcagtcatcacggaggcaggagaccagggcatggtctctgtgggacctgaaggggctggggagctcctggcccaggtgcaaaaggacatccagcctgcccccagtgcagaagagctggccgagcagctggacctgggtgaggaggcatcagcactgctgctggaagacggtgaagccccagccagcaccaaggaggagcccttggaggaggaagcaacgacccagagccgggctggaagggaagaagaggagaaggagcaggaggaggagggagatgtgtctaccctggagcagggagagggcaggctgcagctgcgggcctcggtgaagagaaaaagcaggccctgctccttgcctgtgtccgagctggagacggtgatcgcgtcagcctgcggggaccccgagaccccgcggacacactacatccgcatccacaccctgctgcacagcatgccctccgcccagggcggcagcgcggcagaggaggaggacggcgcggaggaggagtccaccctcaaggactcctcggagaaggatgggctcagcgaggtggacacggtggccgctgacccgtctgccctggaagaggacagagaagagcccgagggggctactccaggcacggcgcaccctggccactccgggggccacttccccagcctggccaatggcgcggcccaggatggcgacacgcaccccagcaccgggagcgagagcgactccagccccaggcaaggcggggaccacagttgcgagggctgtgacgcgtcctgctgcagcccctcgtgctacagctcctcgtgctacagcacgtcctgctacagcagctcgtgctacagcgcctcgtgctacagcccctcctgctacaacggcaacaggttcgccagccacacgcgcttctcctccgtggacagcgccaagatctccgagagcacggtcttctcctcgcaagacgacgaggaggaggagaacagcgcgttcgagtcggtacccgactccatgcagagccctgagctggacccggagtccacgaacggcgctgggccgtggcaagacgagctggccgcccctagcgggcacgtggaaagaagcccggaaggtctggaatcccccgtggcaggtccaagcaatcggagagaaggtgaatgtcctatactccataattcccagccagtaagccagcttccttccctgaggcctgaacatcatcactacccaacaatcgatgagcctcttccaccaaactgggaagctcgaattgacagccacgggcgggtcttttatgtggaccacgtgaaccgcacaaccacctggcagcgtccgacggcagcagccaccccggatggcatgcggagatcggggtccatccagcagatggagcaactcaacaggcggtatcaaaacattcagcgaaccattgcaacagagaggtccgaagaagattctggcagccaaagctgcgagcaagccccagcaggaggaggcggaggtggagggagtgactcagaagccgaatcttcccagtccagcttagatctaaggagagaagggtcactttctccagtgaactcacaaaaaatcaccttgctgctgcagtccccagcggtcaagttcatcaccaaccccgagttcttcactgtgctacatgccaattatagtgcctaccgagtcttcaccagtagcacctgcttaaagcacatgattctgaaagtccgacgggatgctcgcaattttgaacgctaccagcacaaccgggacttggtgaatttcatcaacatgttcgcagacactcggctggaactgccccggggctgggagatcaaaacggaccagcagggaaagtcttttttcgtggaccacaacagtcgagctaccactttcattgacccccgaatccctcttcagaacggtcgtcttcccaatcatctaactcaccgacagcacctccagaggctccgaagttacagcgctggagaggcctcagaagtttctagaaacagaggagcctctttactggccaggccaggacacagcttagtagctgctattcgaagccaacatcaacatgagtcattgccactggcatataatgacaagattgtggcatttcttcgccagccaaacatttttgaaatgctgcaagagcgtcagccaagcttagcaagaaaccacacactcagggagaaaatccattacattcggactgagggtaatcacgggcttgagaagttgtcctgtgatgcggatctggtcattttgctgagtctctttgaagaagagattatgtcctacgtccccctgcaggctgccttccaccctgggtatagcttctctccccgatgttcaccctgttcttcacctcagaactccccaggtttacagagagccagtgcaagagccccttccccctaccgaagagactttgaggccaagctccgcaatttctacagaaaactggaagccaaaggatttggtcagggtccggggaaaattaagctcattattcgccgggatcatttgttggagggaaccttcaatcaggtgatggcctattcgcggaaagagctccagcgaaacaagctctacgtcacctttgttggagaggagggcctggactacagtggcccctcgcgggagttcttcttccttctgtctcaggagctcttcaacccttactatggactctttgagtactcggcaaatgatacttacacggtgcagatcagccccatgtccgcatttgtagaaaaccatcttgagtggttcaggtttagcggtcgcatcctgggtctggctctgatccatcagtaccttcttgacgctttcttcacgaggcccttctacaaggcactcctgagactgccctgtgatttgagtgacctggaatatttggatgaggaattccaccagagtttgcagtggatgaaggacaacaacatcacagacatcttagacctcactttcactgttaatgaagaggtttttggacaggtcacggaaagggagttgaagtctggaggagccaacacacaggtgacggagaaaaacaagaaggagtacatcgagcgcatggtgaagtggcgggtggagcgcggcgtggtacagcagaccgaggcgctggtgcgcggcttctacgaggttgtagactcgaggctggtgtccgtgtttgatgccagggagctggagctggtgatagctggcaccgcggaaatcgacctaaatgactggcggaataacactgagtaccggggaggttaccacgatgggcatcttgtgatccgctggttctgggctgcggtggagcgcttcaataatgagcagaggctgagattactgcagtttgtcacgggaacatccagcgtgccctacgaaggcttcgcagccctccgtgggagcaatgggcttcggcgcttctgcatagagaaatgggggaaaattacttctctccccagggcacacacatgcttcaaccgactggatcttccaccgtatccctcgtactccatgttgtatgaaaagctgttaacagcagtagaggaaaccagcacctttggacttgagtgaggacatggaacctcgcctgacattttcctggccagtgacatcacccttcctgggatgatccccttttccctttcccttaatcaactctcctttgattttggtattccatgatttttattttcaaaccaaatcaggattgacaaaagctgtgcatgaagaactgccttcttctaagatctaaccttcaggcttctctcctctgttttcaatgaactgctagcctgtatgcaatattaaaaaacagctgtctcaaggtctgtgtatatctccacatacctccattactaacaatgaaatatgaatgcaagttaagctacacttgaccaaatggtaataaatgtttacttccatttctatcattgaagggaaaatgtgagcattaagcactccaggctttcatatgcccatgtcttctgagcagagccaccattttttataatttctaataaccaactccagaactaggagctgatcaactctttgttttcctctccatctacttttccctgtgcataatatccatccaaaggacaacagtggcaaagctgaaatttttatacattcaactcatgattcacatgtggcatcagtcccatcagccggaactagcctagacatacggtgcaaatatgacacttctaacgattaacaacagcaagaaaacacctgctgctgatgcaatgcaatgcatcccaatggttgtggggattgtgggctcaactcaagagaagtttaggagggggagcatccctagtgaatactcacaccacaagaaggacaaacttgtgcacatgtccaagaaagaaagcttcttgattgaggtagcatgaaggatgaggcttcagcccccattgtcttatgtagaatgtggcaatgccaactggagaaagggaagaaggacatattaccttggtttgaatccctgagttctgtactgttctgttttgtttagtctagccacagttcttcacaaaggaaaaaaaaatgtgtagatgataccatgacttttgttaaagccatgacttttgtttgcttggcagacaaaccctttttttaaaactttgatatttttttttcacatttttttttccttttcctttcttaatcatggagttcaagttcctttgcattcgattgtccatcgggaccacactaggaagctgcagagagtgatggtgcttgttagggatcaagggcaacatagtacttctccttcacccatagtaatcctcctggggcagaaacataacaccccaaaggcacgttgatttgtatcaaaataaatatccagtttcttttagcattcagtgaaaacatatctcagaaaacttcatgttgtcagaaaaacagctgcaggctccaaagacagcctaacctctcaactacatttgaaataaacccaaccataatggtcatttgctatttttctaacgttgttatccatgttgcctgaaataggtcataaatgaaagtgtttttcttcactgggaaaaagaagagctcaagagaccccactatttaaatgtcatttaattgttttccatattaaaacaagggagaaatgtaagacgaagtgaatttcatatgaagccaatggctcattataccagtttgtgtctggacagtgtgttatttgtgttcctacactctaaagcattccggccaggagcggtggctcatgcctgtaatcccagcactttgggaggccgaggtggggagatcgcttgaggtcaggagttcaagacaagcctggccaacatggtgaaaccccatctctactaaaaatacaaaaattagccgggcgtgatggcacatgccggtagtcccagctacttgggaggctgaggaaggagaatcgctcaaacctgagaagcagaggttgcagtgagccaagactgtgccactgcactccagcctggatgatcaagggagacaccatctaaaaaaaaaataaataaaaataaaagcatttttttagtaggaattatctacaatgcccagcaccccttgcagcgatgtgtccgttgtcaatcaaggagtatacattatagaaatttagacttttattgtctaaaaagaatatttactgagacaggatggaatctgtaagttatatgatatagaatttgagggatatgtaaaattcagtacacgttcagcatctgaaaaataatggattccaatggagctattgttttatttatgaaatcagagcataaggactatgcaaatcattgaaccataaccttattctaactcttgcaacaacatctctaatataggggcatcttttatctttagaacttggtgttatatatatgtaaatactcattaattcaagcactctctttctagtactcacattatttgtcaggcattggaaaaggagaaagctgtttacaagatggaccagctcctggagagctttgcaatttatataaattactaattaatctattaattagattaattaatatctaatctacccatatacaaaaggaatgcagtatctcagaaattatatatagataggtaactttggcatacatgatttttcaactaccgtttccttatccaccagtactactgatgtcacagctatagatctatcccacaaagcataacaggaacattctttcacaaaagtgcaaaatttcatgaagaaatgctgatgtcacggtcacctgaaagaagatgaagcttgtaatattttattgcaaccttgcatagaatccttaaggaagaaaaacaaagagaagaggaacacagaaacaagttatggaaattcatgtttaccttatttataaggctgatttttaaattatatataatttttcattcaatatgtatatgaaatgaaatagctatagaactaaatttcacttaggtggaggtataaaccaccttaaattatatagttcggcagaaagacagatctatttgttaccacctgtaatttttttttaagcatgagttttctccatggaggcaaattgcaaaattaatcacttataaatttataagccacaatctccctaaaacaattgattttagtaagagtgtaacgcctttaatcaggggacaaacaagaacaataaataagagaagatttatgttacaactttgaaaaatgcttttaaaattctataaagtgttataataatttcatggatatcacaaatgttttattctacagtgtgaagatgataatcctaaaaatggaaattgattctgtgaggtcaggagaagtattctaaatctactgaactctttgtaatttcctatgtatataaatgagtggaggttgtgaagatgccgagagagtggtgaaaaaattaagaaaaagagacatatgatttgggggagcaggcgttaaacatgcaagatctaaattttcttttaatacatgaccatatgtccttgaacagtaagtatatttgtgtggcaagccaatggctgagttttccagggtagttttaatattacatccatcatattttcagtccatgtgtcaaaccatgtgtccaaaatttgggttcggaaatttctcagttgccacaaatattttcccagtcaagatgaaacactttcaaatgaaagtagttagaactttacataacaaatgtggtgctttattattattattattattatttttattattattattattacgtacttcagtgttcattattaaaactaccgcaatactatatcataaaaatctgggatggatgttccagccatcataaggtccaaaagaaaagagaaagtgttattttcctgttagtgacatgtagtccctttgttctagtaggaaaaaaggtgcctagaggtagtatatagagtaaatattgttcctttagcctacttcctgcagcttccaatttatccaaggaaatgtctacaacaattttgttcaaaagtctgttctagtcaatagcaggagaagtccacgttattgggctgattttgcttacatcagcaagagaaatgtcacgtgatactcaggccgcgctttctcttccatcacaccatcttcaaggaatgtcaataaactcactttggtatggca

SEQ ID NO: 139984 - DNA, 5169 bp, Homo sapiens
  Payload ID: 7454
  Gene Symbol: HECW1
  Gene Name: HECT, C2 and WW domain containing E3 ubiquitin protein ligase 1
  Uniprot ID: Q76N89
  ENST ID: ENST00000453890
  CDS Start-End: 325-5043
gcgcatcaggcgctgttgttggagccggaacaccgtgcgactctgaccgaaccggccccctcctcgcgcacacactcgccgagccgcgcgcgcccctccgccgtgacagtggccgtggcctccgctctctcggggcacccggcagccagagcgcagcgagagcgggcggtcgccagggtcccctccccagccagtcccaggcgcccggtgcactatgcggggcacgtgcgccccccagctctaatctgcgcgctgacaggagcatgatctgtgcccaggccagggctgccaaggaattgatgcgcgtacacgtggtgggtcattatgctgctgcacctgtgtagtgtgaagaatctgtaccagaacaggtttttaggcctggccgccatggcgtctccttctagaaactcccagagccgacgccggtgcaaggagccgctccgatacagctacaaccccgaccagttccacaacatggacctcaggggcggcccccacgatggcgtcaccattccccgctccaccagcgacactgacctggtcacctcggacagccgctccacgctcatggtcagcagctcctactattccatcgggcactctcaggacctggtcatccactgggacataaaggaggaagtggacgctggggactggattggcatgtacctcattgatgaggtcttgtccgaaaactttctggactataaaaaccgtggagtcaatggttctcatcggggccagatcatctggaagatcgatgccagctcgtactttgtggaacctgaaactaagatctgcttcaaatactaccatggagtgagtggggccctgcgagcaaccacccccagtgtcacggtcaaaaactcggcagctcctatttttaaaagcattggtgctgatgagaccgtccaaggacaaggaagtcggaggctgatcagcttctctctctcagatttccaagccatggggttgaagaaagggatgtttttcaacccagacccttatctgaagatttccattcagcctgggaaacacagcatcttccccgccctccctcaccatggacaggagaggagatccaagatcataggcaacaccgtgaaccccatctggcaggccgagcaattcagttttgtgtccttgcccactgacgtgctggaaattgaggtgaaggacaagtttgccaagagccgccccatcatcaagcgcttcttgggaaagctgtcgatgcccgttcaaagactcctggagagacacgccataggggatagggtggtcagctacacacttggccgcaggcttccaacagatcatgtgagtggacagctgcaattccgatttgagatcacttcctccatccacccagatgatgaggagatttccctgagtaccgagcctgagtcagcccaaattcaggacagccccatgaacaacctgatggaaagcggcagtggggaacctcggtctgaggcaccagagtcctctgagagctggaagccagagcagctgggtgagggcagtgtccccgatggtccagggaaccaaagcatagagctttccagaccagctgaggaagcagcagtcatcacggaggcaggagaccagggcatggtctctgtgggacctgaaggggctggggagctcctggcccaggtgcaaaaggacatccagcctgcccccagtgcagaagagctggccgagcagctggacctgggtgaggaggcatcagcactgctgctggaagacggtgaagccccagccagcaccaaggaggagcccttggaggaggaagcaacgacccagagccgggctggaagggaagaagaggagaaggagcaggaggaggagggagatgtgtctaccctggagcagggagagggcaggctgcagctgcgggcctcggtgaagagaaaaagcaggccctgctccttgcctgtgtccgagctggagacggtgatcgcgtcagcctgcggggaccccgagaccccgcggacacactacatccgcatccacaccctgctgcacagcatgccctccgcccagggcggcagcgcggcagaggaggaggacggcgcggaggaggagtccaccctcaaggactcctcggagaaggatgggctcagcgaggtggacacggtggccgctgacccgtctgccctggaagaggacagagaagagcccgagggggctactccaggcacggcgcaccctggccactccgggggccacttccccagcctggccaatggcgcggcccaggatggcgacacgcaccccagcaccgggagcgagagcgactccagccccaggcaaggcggggaccacagttgcgagggctgtgacgcgtcctgctgcagcccctcgtgctacagctcctcgtgctacagcacgtcctgctacagcagctcgtgctacagcgcctcgtgctacagcccctcctgctacaacggcaacaggttcgccagccacacgcgcttctcctccgtggacagcgccaagatctccgagagcacggtcttctcctcgcaagacgacgaggaggaggagaacagcgcgttcgagtcggtacccgactccatgcagagccctgagctggacccggagtccacgaacggcgctgggccgtggcaagacgagctggccgcccctagcgggcacgtggaaagaagcccggaaggtctggaatcccccgtggcaggtccaagcaatcggagagaagactgggaagctcgaattgacagccacgggcgggtcttttatgtggaccacgtgaaccgcacaaccacctggcagcgtccgacggcagcagccaccccggatggcatgcggagatcggggtccatccagcagatggagcaactcaacaggcggtatcaaaacattcagcgaaccattgcaacagagaggtccgaagaagattctggcagccaaagctgcgagcaagccccagcaggaggaggcggaggtggagggagtgactcagaagccgaatcttcccagtccagcttagatctaaggagagaagggtcactttctccagtgaactcacaaaaaatcaccttgctgctgcagtccccagcggtcaagttcatcaccaaccccgagttcttcactgtgctacatgccaattatagtgcctaccgagtcttcaccagtagcacctgcttaaagcacatgattctgaaagtccgacgggatgctcgcaattttgaacgctaccagcacaaccgggacttggtgaatttcatcaacatgttcgcagacactcggctggaactgccccggggctgggagatcaaaacggaccagcagggaaagtcttttttcgtggaccacaacagtcgagctaccactttcattgacccccgaatccctcttcagaacggtcgtcttcccaatcatctaactcaccgacagcacctccagaggctccgaagttacagcgctggagaggcctcagaagtttctagaaacagaggagcctctttactggccaggccaggacacagcttagtagctgctattcgaagccaacatcaacatgagtcattgccactggcatataatgacaagattgtggcatttcttcgccagccaaacatttttgaaatgctgcaagagcgtcagccaagcttagcaagaaaccacacactcagggagaaaatccattacattcggactgagggtaatcacgggcttgagaagttgtcctgtgatgcggatctggtcattttgctgagtctctttgaagaagagattatgtcctacgtccccctgcaggctgccttccaccctgggtatagcttctctccccgatgttcaccctgttcttcacctcagaactccccaggtttacagagagccagtgcaagagccccttccccctaccgaagagactttgaggccaagctccgcaatttctacagaaaactggaagccaaaggatttggtcagggtccggggaaaattaagctcattattcgccgggatcatttgttggagggaaccttcaatcaggtgatggcctattcgcggaaagagctccagcgaaacaagctctacgtcacctttgttggagaggagggcctggactacagtggcccctcgcgggagttcttcttccttctgtctcaggagctcttcaacccttactatggactctttgagtactcggcaaatgatacttacacggtgcagatcagccccatgtccgcatttgtagaaaaccatcttgagtggttcaggtttagcggtcgcatcctgggtctggctctgatccatcagtaccttcttgacgctttcttcacgaggcccttctacaaggcactcctgagactgccctgtgatttgagtgacctggaatatttggatgaggaattccaccagagtttgcagtggatgaaggacaacaacatcacagacatcttagacctcactttcactgttaatgaagaggtttttggacaggtcacggaaagggagttgaagtctggaggagccaacacacaggtgacggagaaaaacaagaaggagtacatcgagcgcatggtgaagtggcgggtggagcgcggcgtggtacagcagaccgaggcgctggtgcgcggcttctacgaggttgtagactcgaggctggtgtccgtgtttgatgccagggagctggagctggtgatagctggcaccgcggaaatcgacctaaatgactggcggaataacactgagtaccggggaggttaccacgatgggcatcttgtgatccgctggttctgggctgcggtggagcgcttcaataatgagcagaggctgagattactgcagtttgtcacgggaacatccagcgtgccctacgaaggcttcgcagccctccgtgggagcaatgggcttcggcgcttctgcatagagaaatgggggaaaattacttctctccccagggcacacacatgcttcaaccgactggatcttccaccgtatccctcgtactccatgttgtatgaaaagctgttaacagcagtagaggaaaccagcacctttggacttgagtgaggacatggaacctcgcctgacattttcctggccagtgacatcacccttcctgggatgatccccttttccctttcccttaatcaactctcctttgattttggtattccatgatttttattttcaaac

SEQ ID NO: 139985 - DNA, 415 bp, Homo sapiens
  Payload ID: 7454
  Gene Symbol: HECW1
  Gene Name: HECT, C2 and WW domain containing E3 ubiquitin protein ligase 1
  ENST ID: ENST00000429529
  CDS Start-End: 1-415
acccccgaatccctcttcagaacggtcgtcttcccaatcatctaactcaccgacagcacctccagaggctccgaagttacagcgctggagaggctagagtgcaatggtgcgatcttggctcactgcaacctcctcctcccaggttcaagcaattctcctgcctcagcctctcaagtagctgggattacaggttcaggtttagcggtcgcatcctgggtctggctctgatccatcagtaccttcttgacgctttcttcacgaggcccttctacaaggcactcctgagactgccctgtgatttgagtgacctggaatatttggatgaggaattccaccagagtttgcagtggatgaaggacaacaacatcacagacatcttagacctcactttcactgttaatgaagaggtttttgg

SEQ ID NO: 139986 - DNA, 11809 bp, Homo sapiens
  Payload ID: 7455
  Gene Symbol: HECW2
  Gene Name: HECT, C2 and WW domain containing E3 ubiquitin protein ligase 2
  Uniprot ID: Q9P2P5
  ENST ID: ENST00000260983
  CDS Start-End: 184-4902
atttgagcatcagttgagggagaggacgcttcatttcctttttggttgggaatgtgccgtgaacatcctctgctggagcttggggcctggagcaaactggggctgcagatttagacgtagacgtttccgaggacgcgagactgcagagctttgtaggcagccaatcccagagaagcagacgggatggctagttcagcccgggagcacctgctttttgtgaggcgtcgaaatccccagatgcggtacacattgagcccagagaacctccagagccttgccgcccagagctccatgccagagaacatgaccctgcagcgggccaacagcgacaccgacctggtgacttctgagagccgctccagcttaactgccagcatgtacgagtacacgctggggcaagcccagaacctcattatcttctgggacattaaagaggaggtggaccccagtgattggattggactttatcatatagatgagaattctccagccaacttctgggattctaagaacaggggtgtgactggaacacaaaaagggcaaattgtatggagaattgagcctgggccctatttcatggaaccggagataaaaatctgttttaaatattaccacggcattagtggagccctgcgagccacgaccccctgcatcaccgtgaagaacccagctgtgatgatgggggcagaaggcatggagggaggtgcttcaggaaacctgcattctcgaaaacttgttagctttacattgtcagatcttagggcagttgggctaaagaaagggatgttcttcaatcctgacccttatcttaagatgtcaattcagccaggaaagaagagcagtttccccacctgtgcccaccacgggcaggagagacggtctactatcatcagtaacaccaccaatccaatttggcaccgagagaaatattccttttttgcacttcttactgatgtcttagaaattgaaattaaagacaaatttgccaagagccgtcccatcatcaagcgttttctggggaaactaaccattccagtccagaggctgctggagcgacaagccatcggtgatcaaatgctcagctacaaccttggcagaaggctcccagctgaccacgtgagtgggtacctccagtttaaagtggaggttacgtcttctgttcatgaagatgcctctccagaagctgttggcacaatacttggagtcaattctgtgaatggagacttaggtagcccttccgatgacgaggacatgccagggagccatcacgacagccaggtgtgctctaatgggccagtttctgaggacagtgctgccgatggaacccccaagcattcattcaggactagctccactctggaaatagacacagaggaattaacctctacgtcttcaaggacctcacctcccagaggacgtcaggattcactcaatgattacttagatgctatcgaacacaatggccactccaggccggggacagcgacctgctctgagaggtccatgggtgcctctccgaaactgaggagtagttttcccactgacacaagactcaatgccatgcttcatattgattcagatgaagaagatcacgagttccagcaagacctgggttacccatcttccttggaggaggagggaggcctgatcatgtttagcagggcatccagagctgatgatggaagcctgacatctcagacaaagctggaggacaaccctgttgagaatgaggaagcctccacacacgaagctgcttcctttgaggataagccagaaaatcttccagagcttgcagagagctccttacctgcaggcccagccccagaggaaggtgaaggcggcccagagcctcaacccagtgctgaccagggcagtgctgaactgtgtggctctcaagaggtagatcagcccacaagtggcgcagacacagggacttccgatgcatcaggaggaagccgaagagccgtcagtgagaccgagtctctcgatcagggctctgagccttcccaggtgtcctctgaaacagaacccagtgatcctgccaggacagagagtgtgagcgaagccagcaccaggcctgagggagagagtgacctggaatgcgctgacagctcctgcaatgagagtgtgaccacgcagctgtcctctgtggacacacggtgctcctctcttgagagcgcacggtttcctgaaaccccagccttttcttctcaggaggaggaagacggagcctgtgcagcagagcccaccagcagtggccctgccgaagggtcgcaggaatccgtgtgcactgctggttctttacctgtggtacaggtgcccagtggggaggatgaagggccaggggcagaatcggccactgtacctgaccaggaggagctgggggaggtctggcagcggagggggagcctggagggagctgcagctgctgccgagagcccaccgcaagaagaaggcagtgctggggaggcccaaggcacctgtgaaggggcaactgcccaggaggagggcgctactggaggttctcaagccaacggccaccagccactgcgatcactaccttcagtgcgccaggatgttagccggtaccagagggtggacgaggctctcccaccaaactgggaggcacgcattgacagccacggcaggatcttctacgtggatcacgtaaacagaaccacgacgtggcagcgaccgacagctcccccagccccgcaggtgctgcagagatctaactccatacagcaaatggagcagctgaaccggcgatatcagagtatccgcagaaccatgaccaatgagaggcctgaggaaaataccaatgctattgatggggcaggggaggaagctgactttcaccaagccagtgcagatttccgacgggagaacatcctgcctcactctacctccagatccaggatcacgttgctgttacagtctccccccgtgaagttcctcatcagcccagagttcttcaccgtgctgcattctaaccctagtgcctaccgcatgtttacaaacaacacgtgtttgaagcacatgatcaccaaagtccggagggacacccaccactttgaacgctaccagcataaccgcgaccttgtgggattcctcaacatgttcgcgaacaaacagctagagctgccgcggggatgggaaatgaaacatgatcaccagggcaaggcattctttgtggaccacaactcccgcaccaccactttcattgatccccggctcccacttcagagcagtagacccacaagtgcgctggttcatcggcaacacctgacaaggcaacgcagccacagtgcgggtgaggtaggagaagattctcgacatgcaggaccaccagttcttcccaggccatccagtacattcaatacagtcagtaggccacagtaccaggacatggttccagtggcttacaatgacaagattgttgcatttctacgtcaacccaatatctttgaaattctacaggagcgtcaacctgatcttaccaggaatcactcactcagggagaagatccaatttatccgaactgaagggactccaggattggtgcgcctttcaagcgatgcagaccttgttatgttgctgagcttatttgaagaagagataatgtcgtatgtgcctccacatgccttactccaccccagctactgtcagtccccacgtggctctcccgtgtcatctcctcagaactcgccaggtacccagcgtgccaatgcccgggctccagccccttacaagcgggatttcgaagccaaactgaggaacttttacaggaagttagagactaaaggatatggacaaggcccagggaagttaaagttaattatccgaagagatcacttactagaagatgcttttaatcagattatgggctactccagaaaagacctgcagagaaataagctatatgtcaccttcgttggggaggaagggctggattacagtgggccttctagagagtttttcttcctggtatccagagaactctttaacccatattatggcttatttgaatattcagccaatgacacatacacagtacaaataagtcctatgtctgcttttgtagacaatcaccatgaatggttccgattcagtggtaggatccttggtcttgcactaatacaccagtatttgttggatgccttcttcacacggcccttttataaggctcttctcagaattctatgtgacctgagtgacctagaataccttgatgaagagttccatcagagcctgcagtggatgaaagacaatgatatccatgacatcctagacctcacgttcactgtgaacgaagaagtatttgggcagataactgaacgagaattaaagccagggggtgccaatatcccagttacagagaagaacaagaaggagtacatcgagaggatggtgaagtggaggattgagaggggtgttgtacagcaaacagagagcttagtgcgtggcttctatgaggtggtggatgccaggctggtatctgtttttgatgcaagagaactggaattggtcatcgcaggcacagctgaaatagacctaagtgattggagaaacaacacagaatatagaggaggataccatgacaatcatattgtaattcggtggttctgggctgcagtggaaagattcaacaatgaacaacgactaaggttgttacagtttgttacaggcacatccagcattccctatgaaggatttgcttcactccgagggagtaacggcccaagaagattctgtgtggagaaatgggggaaaatcactgctcttcccagagcgcatacatgttttaaccgtctggatctgcctccctacccatccttttccatgctttatgaaaaactgttgacagcagttgaagaaaccagtacttttggacttgagtgacctggaagctgaatgcccatctctgtggacaggcaggttcagaagctgccttctagaagaatgattgaacattggaagtttcaagaggatgcttcctttaggataaagctatgtgctgttgttttccaggaacaagtgctctgtcacatttggggactggagatgagtcctcttggaaggatttgggtgagcttgatgcccagggaacaacccaaccgtctttcaatcaacagttcttgactgccaaactttttccatttgttatgttccaagacaaagatgaacccatacatgatcagctccacggtaatttttagggactcaggagaatcttgaaacttacccttgaacgtggttcaagccaaactggcagcatttggcccaatctccaaattagagcaagttaaataatataataaaagtaaatatatttcctgaaagtacattcatttaagccctaagttataacagaatattcatttcttgcttatgagtgcctgcatggtgtgcaccataggtttccgctttcatgggacatgagtgaaaatgaaaccaagtcaatatgaggtacctttacagatttgcaataagatggtctgtgacaatgtatatgcaagtggtatgtgtgtaattatggctaaagacaaaccattattcagtgaattactaatgacagattttatgctttataatgcatgaaaacaattttaaaataactagcaattaatcacagcatatcaggaaaaagtacacagtgagttctgtttattttttgtaggttcattatgtttatgttctttaagatgtatataagaacctacctatcatgctgtatgtatcactcattccattttcatgttccatgcatactcgggcatcatgctaatatgtatccttttaagcactctcaaggaaacaaaagggccttttatttttataaaggtaaaaaaaattccccaaatattttgcactgaatgtaccaaaggtgaagggacattacaatatgactaacagcaactccatcacttgagaagtataatagaaaatagcttctaaatcaaacttccttcacagtgccgtgtctaccactacaaggactgtgcatctaagtaataattttttaagattcactatatgtgatagtatgatatgcatttatttaaaatgcattagactctcttccatccatcaaatactttacaggatggcatttaatacagatatttcgtatttcccccactgctttttatttgtacagcatcattaaacactaagctcagttaaggagccatcagcaacactgaagagatcagtagtaagaattccattttccctcatcagtgaagacaccacaaattgaaactcagaactatatttctaagcctgcattttcactgatgcataattttcttattaatattaagagacagtttttctatggcatctccaaaactgcatgacatcactagtcttacttctgcttaattttatgagaaggtattcttcattttaattgcttttgggattactccacatctttgtttatttcttgactaatcagattttcaatagagtgaagttaaattgggggtcataaaagcattggattgacatatggtttgccagcctatgggtttacaggcattgcccaaacatttctttgagatctatatttataagcagccatggaattcctattatgggatgttggcaatcttacattttatagaggtcatatgcatagttttcataggtgttttgtaagaactgattgctctcctgtgagttaagctatgtttactactgggaccctcaagaggaataccacttatgttacactcctgcactaaaggcacgtactgcagtgtgaagaaatgttctgaaaaagggttatagaaatctggaaataagaaaggaagagctctctgtattctataattggaagagaaaaaaagaaaaacttttaactggaaatgttagtttgtacttattgatcatgaatacaagtatatatttaattttgcaaacttttcacttgtttgtattcttttcattataaggaaaagtagtataacacacttttttttaagtcacatatttgatggtatacaagatgtttcagggctggcattctccaagcagcagataaaggttgcatttctttcaaaaatacattcaaagaccatgttatccttcattttggtttgagacatttagttatggtatttcatattattaggtaaaagatatttgaaataaaatgtatctctttaattatttctaacaaatatatttctttattaaggcatccaactttttcccaaataacagtacactttaatgtatgtagacattcttaattagtataatcatctagttgatactgttctcagattgggaattatcaaagatgtacttatcatatcagaacaccatgctaacttatctattattctttcttagtaaaacaaaacagccagtaataactatataaaatattaaataacatttccacagaataaattagactttcatgtactctacaattagaaatatccataaatattttcttctggactgtgaacccagataactaggctttctggtcttattttaagtgatgctctttatactatagaagacactcttaatacatcatatatgtatgcagaacatctcttagatgagagaacaagcacatcattggcattccctctgtgccagtttgatgtttgtttgacgatggagctacaagagtctaaatctgcctttgaaaagctcagctcacagtgtagtagagtagactccaaggttcaaaaaagtgtttttaataaaatttggtaagttctacaatcaaggaatgaagagagaagagaacagctttttccatctgggagattcaataatggcttcatatatagatgatagtgtggctaaaaaaaattacatcaatgctgtttctattgggaagcaatggcaagtaatagtatgtcaatactggtcaagtgttgaagccaggatgcacttacacaacgagagtgtaaagtgtgtagggagctgatctgtgaaggagcaactcaaagattttgaaattatcagtgaaatgccaaaacagggaaagtttccctgtttcccttcatctattctacaatgcaccattggttttcagtgtgaaaaatcccaatccctgagcccaaaccacttctggggtcaaaacatttttcttgtgcacaaaatgaatggatcttggtcaaagaagtatggtcacaattttctagcatatattgcgtttataatttagcagaaattctgcaataaataaaggaaaatctgttttacctgtgcaacaatcagaaatggtaaaaatgcattcaagtgtttgaaagaaatggtagaatatgcttgcatagtgctttatagtttcaaagtgctgtcaggtacatcgtccgtttagctcctcacgcactttgtagggtacaagcatcatgttccatctgggttgtggctgattttcatggatggcttgtggcatcagtttcattacttcatagtcacaattctgtgtttcatcttgagaaatgtggagactaatgtttgtaccagtatattccacattcagtgaggtttccaagatgcttcctccaaactctcactttcttaaacagatacatttaaaatatgacaccttctgaaaagtccataaagaaattagtatattcatggaaaaaatttccccgtagacttatttgcatttcatgacttgacatgagaaatttaaaaaacagaaggcaaaatgtgattgcttttgatggatttatacagaatagtcatttaattttctcaagtattatttggaaacaagataatggaaaacattaatcagaagccttattttatttttaaatttttaatagggatggatctagtaagccctaatagctgagttccagtgataaaattcacaaattttatttatgattggaccacttctaacaaggcaaatatcttataatgaagataggagtctgttcaatttaaccttattcaggaaactccgtatttatgtgaaatgatgcaatgccattattaagaggtatctgtaaccctgcataataaaaacatgcataagaagaatgtggtctaatctccaaactgagtctcagtttcagggccttttgctttctttgtttgtttgtttgagacagtctggctctgtcatccaggctggagtgcagtggcacatgagctcactgcaacctccacctcccaggctcaagcgatcctcccacctcagcctcctgagtaactgggactacaggcgcataccaccacacctggctaatttttgtatttttgtagagacaaggcccaggcacgtctcaaactcttgagctcaagcgatccgcccgccttggcctcccaaagtgctaggagtaattataggtgtgagccaccatgctggcagttgtttttgtttatttgtgataaggtctggctgtcacccatgctggagtgcagtggcatgatcttggctcactgcaacctctgccttccaggctcaagccagcctcccacctcagcctccgagtagctaggactacaggcatgcaccaccatgcccagctaatttttttatattttttgtagacacagggttttgccacgttgcccaggctggtcttgaactcctgagctcaagcagtcctcccaccttggcctcccgaagtgctgggattacagacgtgagcctctgggccttgctctgttttgtctgctttctgatttagtaggtgagggacagcactctggaccttagccattttacttccatcttactgccgtgagtttgatgagaatgtcacttttagactctaattttcaaaaacttagtttctttcccattcatttgtgttttccaaattaatttgtttgtctagtatggatgcaaaggaatgctgaagacattaaagctttctgaattgtggcttaaggccagctactgcccactgaaaggatgataaaaataaaaaaggaggaaagaggagcccagcagttgtgccaccccgcaagaatataatgctaattattgaccaactgtcaagattcagagtggtaactgcattccgaggagctgtcaggaaggatgaccgtgtgtgtgctgtccatatcatagccatctgggtcagaaggagcgaaaggatggttaggacaggagtgtagtggagggaaagttaaaacaacggtagatggatcatcttagggcttgctggtgggggtaggaacatacttcaatttggtttcagactgagaagaagaaagctatgctccctgatgaaggcacagtttgatctactagatgggaaataccctcattttataacttcagtaatttaacattttctgtattgcaaagtggaatttagtcccaaagtattaaagctaaccatagcttgatcaggagatttgacaatttagcataaaattatgttgtggatttttttatttaagaattattgttactattattgaacaccatgtatgaaatgaaagaaagggtgcttttatttcattatacttatttggtttttttagcggacatcccttgacattagaatagcatttgagacattttcatgatttctaaagataacttaaatgctctctgttaatctggaaagtgaaatcctaagagtgaggttgcaaatggagactaaattagtgtttccaagtcaggaagttaatcaagaccggaaatagatttgcttagattttatctgcagagtcgtttatttggctttcgtaattgaacagctcagcagaataagatggccctagttgtatggtttctggggaacacaggagaattaaatttatatatgtgatttttatgtgtagtgcccttgggcaggtgatatctttctatatgacttttaagatattacaacctgaggagtgtggatagccgtgttgtgtgattcaaactgaatcagctattactgatgcaggtaaggaaccatcagtcaacttctggttactatcaccttcataaaaaagaatggatgatgttcaggaattaccttggaaggattaaccaggaattaacacagaatgggatgttcttttaggaccctaatgctctaaaagataaaattacaacctatttttctttatatgatagcataagtaaaatttggggctgttaatatgttggaaagtgcttaaaattacatgtttttataatagggatgcaggcattccaaaataaatgaataaaaatacatgcatctctctcgcctcttactgaaagtattaatctaattttatagtaatgattactttttaatattaaggctctgtaaaaaaattatttctaagatttcagtagaacacaggtggtgtatttttttaagcttttaatttctcttcaccaacctcagtcattacgttcaccacacagtgtgtcacagttaatagtggtatttcagtttttgcgttgatttaagcttcatatttatttaatgtgacttttgatggagaataataatgggagatgcttgctgttagcattaaggttatacagctctcacttcaccttatatgtaatttttttttcaaagtaaataatgcagattgttgacatcctagaaatggtttctgggtggtattatatggggcctaggactctgaactgggactagttgtttattttctgggaagtctgtattcttattctcaactgaacccctgactcttttgttgtattttttatgattccgaaatgctttgagggaaagatattttaatgtgtacaatttgttttattttcatactgatctctatttttgtttaaaaccatgttgcatcatgaaatcacttaatccaaaataaatcttctttaaaaaaaata

SEQ ID NO: 139987 - DNA, 6692 bp, Homo sapiens
  Payload ID: 7455
  Gene Symbol: HECW2
  Gene Name: HECT, C2 and WW domain containing E3 ubiquitin protein ligase 2
  Uniprot ID: Q9P2P5
  ENST ID: ENST00000409111
  CDS Start-End: 1016-4666
tgtggccacgactgcctcagccgaggggatgtgatacattttttcacttaggatgcctggacagtgataagtcttgatgaaaggcaggagtggcttttagtgtcattcatactggacaggagcctcttgttagagacctgccggaatcctgtctagtatttcatttctagaactttgggggaagaggaagagaagcaggagcatccgtgaagtggacctgcagagctttcacagccaccttagaactccagacccgccttgacttcagttcagctctggctgctcctatgaatgaaactgccacgtgggttggccaggtgtatgattttaaggaagaatgccatgtttcttcttgctgctgcctaagtctcatttgactgatggattttaaaacctttgggattatatgagatgagaattctccagccaacttctgggattctaagaacaggggtgtgactggaacacaaaaagggcaaattgtatggagaattgagcctgggccctatttcatggaaccggagataaaaatctgttttaaatattaccacggcattagtggagccctgcgagccacgaccccctgcatcaccgtgaagaacccagctgtgatgatgggggcagaaggcatggagggaggtgcttcaggaaacctgcattctcgaaaacttgttagctttacattgtcagccaggaaagaagagcagtttccccacctgtgcccaccacgggcaggagagacggtctactatcatcagtaacaccaccaatccaatttggcaccgagagaaatattccttttttgcacttcttactgatgtcttagaaattgaaattaaagacaaatttgccaagagccgtcccatcatcaagcgttttctggggaaactaaccattccagtccagaggctgctggagcgacaagccatcggatgcctctccagaagctgttggcacaatacttggagtcaattctgtgaatggagacttaggtagcccttccgatgacgaggacatgccagggagccatcacgacagccaggtgtgctctaatgggccagtttctgaggacagtgctgccgatggaacccccaagcattcattcaggactagctccactctggaaatagacacagaggaattaacctctacgtcttcaaggacctcacctcccagaggacgtcaggattcactcaatgattacttagatgctatcgaacacaatggccactccaggccggggacagcgacctgctctgagaggtccatgggtgcctctccgaaactgaggagtagttttcccactgacacaagactcaatgccatgcttcatattgattcagatgaagaagatcacgagttccagcaagacctgggttacccatcttccttggaggaggagggaggcctgatcatgtttagcagggcatccagagctgatgatggaagcctgacatctcagacaaagctggaggacaaccctgttgagaatgaggaagcctccacacacgaagctgcttcctttgaggataagccagaaaatcttccagagcttgcagagagctccttacctgcaggcccagccccagaggaaggtgaaggcggcccagagcctcaacccagtgctgaccagggcagtgctgaactgtgtggctctcaagaggtagatcagcccacaagtggcgcagacacagggacttccgatgcatcaggaggaagccgaagagccgtcagtgagaccgagtctctcgatcagggctctgagccttcccaggtgtcctctgaaacagaacccagtgatcctgccaggacagagagtgtgagcgaagccagcaccaggcctgagggagagagtgacctggaatgcgctgacagctcctgcaatgagagtgtgaccacgcagctgtcctctgtggacacacggtgctcctctcttgagagcgcacggtttcctgaaaccccagccttttcttctcaggaggaggaagacggagcctgtgcagcagagcccaccagcagtggccctgccgaagggtcgcaggaatccgtgtgcactgctggttctttacctgtggtacaggtgcccagtggggaggatgaagggccaggggcagaatcggccactgtacctgaccaggaggagctgggggaggtctggcagcggagggggagcctggagggagctgcagctgctgccgagagcccaccgcaagaagaaggcagtgctggggaggcccaaggcacctgtgaaggggcaactgcccaggaggagggcgctactggaggttctcaagccaacggccaccagccactgcgatcactaccttcagtgcgccaggatgttagccggtaccagagggtggacgaggctctcccaccaaactgggaggcacgcattgacagccacggcaggatcttctacgtggatcacgtaaacagaaccacgacgtggcagcgaccgacagctcccccagccccgcaggtgctgcagagatctaactccatacagcaaatggagcagctgaaccggcgatatcagagtatccgcagaaccatgaccaatgagaggcctgaggaaaataccaatgctattgatggggcaggggaggaagctgactttcaccaagccagtgcagatttccgacgggagaacatcctgcctcactctacctccagatccaggatcacgttgctgttacagtctccccccgtgaagttcctcatcagcccagagttcttcaccgtgctgcattctaaccctagtgcctaccgcatgtttacaaacaacacgtgtttgaagcacatgatcaccaaagtccggagggacacccaccactttgaacgctaccagcataaccgcgaccttgtgggattcctcaacatgttcgcgaacaaacagctagagctgccgcggggatgggaaatgaaacatgatcaccagggcaaggcattctttgtggaccacaactcccgcaccaccactttcattgatccccggctcccacttcagagcagtagacccacaagtgcgctggttcatcggcaacacctgacaaggcaacgcagccacagtgcgggtgaggtaggagaagattctcgacatgcaggaccaccagttcttcccaggccatccagtacattcaatacagtcagtaggccacagtaccaggacatggttccagtggcttacaatgacaagattgttgcatttctacgtcaacccaatatctttgaaattctacaggagcgtcaacctgatcttaccaggaatcactcactcagggagaagatccaatttatccgaactgaagggactccaggattggtgcgcctttcaagcgatgcagaccttgttatgttgctgagcttatttgaagaagagataatgtcgtatgtgcctccacatgccttactccaccccagctactgtcagtccccacgtggctctcccgtgtcatctcctcagaactcgccaggtacccagcgtgccaatgcccgggctccagccccttacaagcgggatttcgaagccaaactgaggaacttttacaggaagttagagactaaaggatatggacaaggcccagggaagttaaagttaattatccgaagagatcacttactagaagatgcttttaatcagattatgggctactccagaaaagacctgcagagaaataagctatatgtcaccttcgttggggaggaagggctggattacagtgggccttctagagagtttttcttcctggtatccagagaactctttaacccatattatggcttatttgaatattcagccaatgacacatacacagtacaaataagtcctatgtctgcttttgtagacaatcaccatgaatggttccgattcagtggtaggatccttggtcttgcactaatacaccagtatttgttggatgccttcttcacacggcccttttataaggctcttctcagaattctatgtgacctgagtgacctagaataccttgatgaagagttccatcagagcctgcagtggatgaaagacaatgatatccatgacatcctagacctcacgttcactgtgaacgaagaagtatttgggcagataactgaacgagaattaaagccagggggtgccaatatcccagttacagagaagaacaagaaggagtacatcgagaggatggtgaagtggaggattgagaggggtgttgtacagcaaacagagagcttagtgcgtggcttctatgaggtggtggatgccaggctggtatctgtttttgatgcaagagaactggaattggtcatcgcaggcacagctgaaatagacctaagtgattggagaaacaacacagaatatagaggaggataccatgacaatcatattgtaattcggtggttctgggctgcagtggaaagattcaacaatgaacaacgactaaggttgttacagtttgttacaggcacatccagcattccctatgaaggatttgcttcactccgagggagtaacggcccaagaagattctgtgtggagaaatgggggaaaatcactgctcttcccagagcgcatacatgttttaaccgtctggatctgcctccctacccatccttttccatgctttatgaaaaactgttgacagcagttgaagaaaccagtacttttggacttgagtgacctggaagctgaatgcccatctctgtggacaggcaggttcagaagctgccttctagaagaatgattgaacattggaagtttcaagaggatgcttcctttaggataaagctatgtgctgttgttttccaggaacaagtgctctgtcacatttggggactggagatgagtcctcttggaaggatttgggtgagcttgatgcccagggaacaacccaaccgtctttcaatcaacagttcttgactgccaaactttttccatttgttatgttccaagacaaagatgaacccatacatgatcagctccacggtaatttttagggactcaggagaatcttgaaacttacccttgaacgtggttcaagccaaactggcagcatttggcccaatctccaaattagagcaagttaaataatataataaaagtaaatatatttcctgaaagtacattcatttaagccctaagttataacagaatattcatttcttgcttatgagtgcctgcatggtgtgcaccataggtttccgctttcatgggacatgagtgaaaatgaaaccaagtcaatatgaggtacctttacagatttgcaataagatggtctgtgacaatgtatatgcaagtggtatgtgtgtaattatggctaaagacaaaccattattcagtgaattactaatgacagattttatgctttataatgcatgaaaacaattttaaaataactagcaattaatcacagcatatcaggaaaaagtacacagtgagttctgtttattttttgtaggttcattatgtttatgttctttaagatgtatataagaacctacctatcatgctgtatgtatcactcattccattttcatgttccatgcatactcgggcatcatgctaatatgtatccttttaagcactctcaaggaaacaaaagggccttttatttttataaaggtaaaaaaaattccccaaatattttgcactgaatgtaccaaaggtgaagggacattacaatatgactaacagcaactccatcacttgagaagtataatagaaaatagcttctaaatcaaacttccttcacagtgccgtgtctaccactacaaggactgtgcatctaagtaataattttttaagattcactatatgtgatagtatgatatgcatttatttaaaatgcattagactctcttccatccatcaaatactttacaggatggcatttaatacagatatttcgtatttcccccactgctttttatttgtacagcatcattaaacactaagctcagttaaggagccatcagcaacactgaagagatcagtagtaagaattccattttccctcatcagtgaagacaccacaaattgaaactcagaactatatttctaagcctgcattttcactgatgcataattttcttattaatattaagagacagtttttctatggcatctccaaaactgcatgacatcactagtcttacttctgcttaattttatgagaaggtattcttcattttaattgcttttgggattactccacatctttgtttatttcttgactaatcagattttcaatagagtgaagttaaattgggggtcataaaagcattggattgacatatggtttgccagcctatgggtttacaggcattgcccaaacatttctttgagatctatatttataagcagccatggaattcctattatgggatgttggcaatcttacattttatagaggtcatatgcatagttttcataggtgttttgtaagaactgattgctctcctgtgagttaagctatgtttactactgggaccctcaagaggaataccacttatgttacactcctgcactaaaggcacgtactgcagtgtgaagaaatgttctgaaaaagggttatagaaatctggaaataagaaaggaagagctctctgtattctataattggaagagaaaaaaagaaaaacttttaactggaaatgttagtttgtacttattgatcatgaatacaagtatatatttaattttgcaa

SEQ ID NO: 139988 - DNA, 568 bp, Homo sapiens
  Payload ID: 7455
  Gene Symbol: HECW2
  Gene Name: HECT, C2 and WW domain containing E3 ubiquitin protein ligase 2
  ENST ID: ENST00000427457
  CDS Start-End: 215-568
agatgccgccgaagcgtctagcgggaagggcgccggcgcggctggagggtctcagtacagggtctctgagcctgttgcccaatctggagtgcgatggtgcagtcacatctcactgcagccttgagctcctggactcaagtgattctccacctcagccttcctcatagctaggactacagctttgtaggcagccaatcccagagaagcagacgggatggctagttcagcccgggagcacctgctttttgtgaggcgtcgaaatccccagatgcggtacacattgagcccagagaacctccagagccttgccgcccagagctccatgccagagaacatgaccctgcagcgggccaacagcgacaccgacctggtgacttctgagagccgctccagcttaactgccagcatgtacgagtacacgctggggcaagcccagaacctcattatcttctgggacattaaagaggaggtggaccccagtgattggattggactttatcatatagatgagaattctccagccaacttctgggattctaagaacaggggtgtgactggaacacaaaaa

SEQ ID NO: 139989 - DNA, 620 bp, Homo sapiens
  Payload ID: 7455
  Gene Symbol: HECW2
  Gene Name: HECT, C2 and WW domain containing E3 ubiquitin protein ligase 2
  ENST ID: ENST00000452031
  CDS Start-End: 221-620
gttcttccgcaccttcctcagggaggtcccgctggccaaggtctggctgtccctcctgtcctctgcccccgcctcccttccaccggtccccgacgtgccgccagctcccagcccagcgtcccgcagggcggtgcgggcagatgccgccgaagcgtctagcgggaagggcgccggcgcggctggagctttgtaggcagccaatcccagagaagcagacgggatggctagttcagcccgggagcacctgctttttgtgaggcgtcgaaatccccagatgcggtacacattgagcccagagaacctccagagccttgccgcccagagctccatgccagagaacatgaccctgcagcgggccaacagcgacaccgacctggtgacttctgagagccgctccagcttaactgccagcatgtacgagtacacgctggggcaagcccagaacctcattatcttctgggacattaaagaggaggtggaccccagtgattggattggactttatcatatagatgagaattctccagccaacttctgggattctaagaacaggggtgtgactggaacacaaaaagggcaaattgtatggagaattgagcctgggccctatttcatggaac

SEQ ID NO: 139990 - DNA, 14739 bp, Homo sapiens
  Payload ID: 7456
  Gene Symbol: HUWE1
  Gene Name: HECT, UBA and WWE domain containing 1, E3 ubiquitin protein ligase
  Uniprot ID: Q7Z6Z7
  ENST ID: ENST00000262854
  CDS Start-End: 404-13528
ggaggctttcgactgagggctagcgaggggagcagggctggagcagggctggagcagggctggagcagggctgaagcagggctgaagcagggccgcggaccccgcacgctcctgcgggccccgcggagccattgcggccgaggcctcggcaggcgccagcggagagctagccgcatcttcgggggcagcccggcagctgccggcggcgcggcgagagagcggctgacagaggggatgcgaggtcctccagcagcctgacctgagtgggttagtgatccagagaaaccagcaggccaacttggtcaggaaggttcgggaagctgttggagcagtgtggggaatttcccaccaggatgagtatgattggctgtgattttagatcgtaaagctgaaaattgaaatcatgaaagtagacaggactaaactgaagaagacacctactgaggctcctgcagactgcagagccttaatagacaaactcaaagtttgtaatgatgagcaacttctcttggaactgcagcagatcaaaacatggaacattggaaagtgcgagttatatcactgggtggacctgttggaccgcttcgatggaatactggcagatgctggacagacagtggagaatatgtcatggatgctcgtatgtgataggccagaaagagagcaactgaaaatgcttctcttggctgtgttgaacttcacagccttgctcattgagtacagcttttcccggcatctgtacagttccatagagcatttgacaactttattggcttcctctgatatgcaagtggtgctggcagtcctcaatctcctatatgtatttagcaaaagatcaaactacatcactcgtctgggatctgacaagaggaccccgctgctaactcggctacaacatttggcagagagctggggtggaaaggagaatggctttggacttgcagaatgttgcagagacttgcatatgatgaaatatccacccagtgcaactacactacactttgaattctatgcagatcctggggccgaggtcaaaattgagaaaaggacaactagtaacacactacattatattcacatagagcaacttgacaagatttcagaaagcccttctgaaatcatggaatctcttaccaaaatgtacagcattcctaaggataagcagatgctgttatttacacacatacgactggcccatggcttttctaatcacaggaagcgattgcaggcagttcaggccagactgcatgcaatatctatattagtgtattccaatgccttgcaggaatcagcaaacagtatcttgtataatggcttgatagaggagttggtagatgtccttcagataacggataagcagcttatggagattaaagcagcttctttacgaacattaacatcaattgtccacttggagagaactcccaaactcagcagtattattgactgtactggaactgcctcctaccatggatttttgccagtgcttgtaaggaactgtatccaggccatgattgatccttccatggatccataccctcaccagtttgccactgctctcttctcttttttataccatctggccagctacgatgctggtggtgaagccttggtctcctgtggaatgatggaagccttattgaaggtcataaagtttcttggcgatgaacaggaccagataacatttgtcaccagagccgtcagagtggttgaccttatcaccaacctggatatggcagcttttcaatcccatagtggactttctatcttcatttatagacttgagcatgaagtagatttgtgccgaaaagaatgtccgtttgtgatcaagccaaagatccagagacccaatactacacaagaaggagaggaaatggaaactgatatggatggagtccagtgtattccacaacgagcagcacttctgaaatccatgttgaatttcctcaagaaggccatccaagaccctgctttctcagatggcatacgacatgtgatggatggttctctgcctacctccctgaaacacatcatcagcaatgcagaatactatggcccatcactcttcctcctagctactgaagtggtgactgtgtttgtatttcaagaaccatcactgctctcctcactccaggacaatggattgacagatgtcatgctgcatgcactgcttatcaaagatgttcctgctacccgtgaagtccttggctccctcccaaatgtattcagtgcactctgtttgaatgcccgaggtcttcagtcttttgttcagtgtcagccttttgaacgcctcttcaaagttcttctgtctccagattacctcccagccatgcggaggaggagaagttctgatccccttggggatactgcatccaacctggggagtgctgtcgatgagctcatgagacatcagcccacccttaaaacagatgcaacgactgccatcatcaagttacttgaagaaatctgtaatcttggaagggaccccaaatacatctgtcagaagccatcaatccagaaggcagatggcactgccactgctcctcccccaaggtctaatcatgccgcagaagaagcctctagtgaggatgaggaggaagaggaagtacaggccatgcagagctttaattctacccagcaaaatgaaactgagcctaatcagcaggttgttggtacagaggaacgtattcctattcccctcatggattacatccttaatgtgatgaaatttgtggaatctattctgagcaacaatacaacagatgaccactgccaggaatttgtgaatcagaaaggactgttgcctttggttaccattttgggtcttcccaatctgcccattgactttcccacatctgctgcctgtcaggctgttgcaggtgtctgcaaatccatattgacactgtcacatgaacccaaagtccttcaagagggtctccttcagttggactccatcctctcctccctggagcccttacaccgccccattgaatcccctgggggctcagtgttgttgcgagaactggcttgcgcaggcaatgttgctgatgctaccctctcagcccaggccacacctctgctgcatgcactcactgctgcccatgcctacatcatgatgtttgttcatacttgcagagttggacagagtgaaattcgttccatctccgtaaaccagtggggctctcaattgggtctgagtgttttgagcaagctgagccagttatactgttccctggtgtgggaaagcactgtcctcctctctctgtgtaccccaaacagcctaccatctgggtgtgaatttggccaggcagatatgcagaaactggttccaaaggatgagaaggcaggtacgacccagggcggaaaaagatcagatggggaacaggatggagcagctggaagtatggatgcttctacccagggcttattagaaggcattgggctagatggtgacacattggctcccatggagacagatgaacctactgcttcagactctaagggcaaatctaaaatcacaccagcaatggctgccagaattaagcaaatcaagcctttgttatcagcttcctccagattaggccgagcacttgctgagctatttggacttcttgttaaactttgtgtgggatctcctgtccgccagagaaggagccatcatgctgccagcaccactacagcaccgacacctgccgcgcgatcaacagcctcagctctcactaagctcttgactaaggggttatcttggcagcccccaccatatacacctactccccgattcaggctgacattcttcatctgttcagttggtttcacatccccaatgctgtttgatgagaggaagtatccctaccacctcatgctgcaaaaatttctctgctccggaggccacaatgctctttttgaaactttcaactgggctctgtccatgggaggtaaagttcctgtttctgagggattggaacactcagacttgcctgatggcacaggagaattcctagatgcctggcttatgctggtggagaagatggtgaatcccaccacggtgcttgaatctccacattcgctgcctgccaaattgcctggaggtgtccagaactttccccagttcagtgcactgcgcttccttgtggtaactcagaaagcagcctttacttgcatcaaaaacttatggaaccggaaacccctgaaggtatatggtggacgaatggctgaatcgatgctggccattctatgccacatcctccgaggagaacctgtgattcgagagagactaagcaaggagaaggaggggtctcgaggagaagaggatacagggcaagaggaaggtggctcccgccgggaacctcaagtcaaccagcaacaactgcaacagctcatggacatgggcttcacaagggaacatgcaatggaggcactgttgaacaccagcaccatggagcaggccacagagtaccttttaacccaccctcctccaatcatgggaggagttgttcgggatctcagcatgtctgaagaggaccagatgatgagagcaattgctatgtctctgggacaggatattccaatggatcaaagggcagagtcacctgaggaagttgcttgccggaaggaggaagaggaacggaaagctcgggaaaagcaggaggaggaagaggctaaatgtctagagaagttccaggatgctgacccgttggaacaagatgagctccacactttcacagatactatgttgccaggctgcttccaccttcttgatgagctgccagacacagtataccgtgtgtgtgacctgatcatgacagcaatcaaacgtaatggagcagattatcgtgacatgattctgaagcaagtagtcaatcaggtgtgggaagctgctgatgtattgatcaaagctgctcttcccctgacaacaagtgacacaaaaaccgtgtcagagtggataagtcagatggccacactgccccaggcctccaatttggctactagaatcttgcttttaacgctactttttgaggagttgaagctaccttgtgcttgggtggttgaatcaagtggcatccttaatgtcctaatcaaactcttggaagtggttcagccctgcctccaggcagccaaggagcagaaggaagtccagaccccaaagtggatcacaccagtgttgctcctgattgatttctatgaaaagacagccatctcctcaaaaaggagagcccagatgactaagtacctgcaatccaacagcaacaactggcgctggtttgatgatcgctctgggcgttggtgtagttacagtgcaagcaacaatagcactattgattctgcctggaaatctggagagacaagcgtgcgattcactgcaggccgaagaagatacacggtccaattcactacaatggtgcaggttaatgaggaaacagggaaccgacgccctgtgatgctgactctcctcagggtacctcggctgaataaaaattcaaaaaacagcaatggacaggaactagagaagacgctggaagaaagcaaagaaatggatatcaaacgtaaagaaaataaaggcaatgatacccctttggccctagagagtacaaacactgaaaaggagacaagcctggaggaaacaaaaatcggggagatcctgatccagggcttgacagaagatatggtgactgttttaatccgggcctgcgtgagcatgctgggagtccctgtggacccagatactttgcatgccacccttcgtctctgtctgaggctcacccgggaccacaaatatgccatgatgtttgcagaactgaagagtacccgcatgatcttgaatttgacccagagctcaggcttcaatgggtttactcccctggtcacccttctcttaagacacatcattgaggacccctgtacccttcgtcataccatggaaaaggttgttcgctcagcagctacaagtggagctggtagcactacctctggtgttgtgtctggcagcctcggctctcgggagatcaactacatccttcgtgtccttgggccagccgcatgccgcaatccagacatattcacagaagtggccaactgctgtatccgcatcgcccttcctgcccctcgaggctcaggaactgcttcagatgatgaatttgagaatcttagaattaaaggccctaatgctgtacagctggtgaagaccacccctttgaagccctcacctctgcctgtcatccctgatactatcaaggaagtgatctatgatatgctgaatgctctggctgcataccatgctccagaggaagcagataaatctgatcctaaacctggggttatgacccaagaggttggccagctcctgcaagacatgggtgatgatgtataccagcagtaccggtcacttacgcgtcagagcagtgactttgatacgcagtcaggtttttccattaatagtcaggtctttgctgcagatggtgcctccactgagacttccgcatctgggacctcccaaggagaggcttcaactccagaggagtctcgagatgggaagaaagataaagaaggggaccgggcctctgaggaaggcaaacagaaaggcaagggcagcaaacctttaatgcctacctccactatccttcgtcttctggcagagttggtgaggtcctatgttggtattgctaccctgattgccaactacagctacactgtgggccagtctgaactgatcaaagaggactgcagtgtgctagcttttgttctggaccacctgctcccacatacccagaatgcagaagacaaggacacccctgccttggcccgcctgttcctcgcaagcctggctgctgcagggagtggcacagatgcccaggtggccctagtgaatgaagtaaaagcagcccttggacgggcactggctatggctgagagtacagagaaacatgccaggcttcaggcagtgatgtgtatcatcagtactatcatggagtcctgcccctccacctccagcttctacagcagtgccacagcgaagacccagcacaatggcatgaacaacatcattcggcttttcctgaagaagggactggttaatgacctggccagagtacctcacagcttagacctgtccagtcccaacatggccaacacagtcaatgctgctctgaagcctttggaaacactttcccggattgtgaaccagcccagtagcctttttggcagcaagagtgcttctagcaagaacaagtctgagcaggatgcccaaggagcctctcaagattccagtagcaaccagcaggacccaggcgagcctggggaagcagaagtgcaggaggaggatcatgatgtcactcagacagaggtggcagatggggatatcatggatggggaggctgaaaccgactcagtggtgattgctgggcagcctgaggtgctcagttcacaagagatgcaggttgagaatgagctggaggacctgatagatgagttgcttgagagggatggcggatctgggaacagtacaattatagtgagcagaagtggagaggatgaatcacaagaggacgtgctgatggatgaagctccttccaacctcagccaagcttccaccttgcaggccaaccgagaagattccatgaatatcctggaccctgaggatgaggaggagcacactcaggaagaggacagcagtggcagtaacgaggatgaggatgatagtcaggatgaagaggaggaggaggaggaagatgaggaagatgatcaggaggatgatgaaggtgaagagggagatgaagacgatgacgacgatggctctgagatggaattggatgaggattatcctgatatgaacgcttctcccttggtccgatttgagcgctttgaccgggaggatgatctcatcattgagtttgacaacatgttctccagtgctacagacatccccccatccccaggaaatatccctaccacccatccactgatggtgcgccatgcagaccacagttctctgacactgggcagtggctcttcaacaactcgtctcacccagggcatcgggcgcagtcagaggaccctaaggcagctgacggccaatactggccacaccattcatgttcactaccctgggaatcgccagcccaaccctcctcttatactgcagaggttgcttggtccctcagctgctgctgacatccttcagctgagcagcagccttcccctacaaagccggggtcgggcccgcctcctggtaggcaacgatgacgtccacatcatcgcccgttctgatgatgagctgctggatgactttttccatgatcagagcacagctaccagccaagcaggaaccctgtccagcatccccacagccctgacccgctggacagaagaatgcaaagttctcgatgctgagagcatgcatgactgtgtttcagtggttaaagtgtccattgtcaatcacctggaattcctgagggatgaggagctggaagaaaggcgagagaagcgcaggaaacaactggctgaggaagaaacaaagataactgataaaggcaaagaagataaggagaacagggatcagagtgcacagtgtactgcatctaagtcaaatgactccactgaacagaatctctcagatgggacgcctatgcctgacagctacccaacaaccccatcttcaactgatgcagctacatctgagtccaaggagacccttggcactctgcaatcctcacaacagcaaccaacactcccaaccccaccagctttgggagaggttcctcaggagctgcagtctccagctggagaagggggcagctctacacagctattgatgcctgtagagccagaggaattgggtcccacaaggccaagtggggaagcagaaacaactcagatggagttatccccagctcccactataacctcactttccccagagagagctgaggattctgatgcactgacggctgtcagcagtcagctagaaggctctcctatggatacaagcagcctggcttcctgtaccttagaggaggctgtgggtgacacttcagcagctggcagttctgagcagcccagagcaggcagctccactcctggggatgccccaccagctgtggcggaagtgcaaggcaggagtgatgggtcaggggaatctgcccagccacctgaggacagctccccacctgcatcctctgagagctcttccaccagagattctgccgtggccatttctggagcagattcccgaggaatcctagaagagccgttgccttcaacaagcagtgaagaagaagatccccttgcgggtatcagtctccctgaaggtgtggacccctcttttctggctgccctgcctgatgacatccgtcgggaagttctacagaaccagctaggcattcgtccaccaacccggactgccccctccacaaatagctcagcgcctgcagtggtggggaatcctggtgtgactgaagtgagccctgagtttctggctgccctgcctccagccattcaggaggaagtactggcacagcagagagctgagcagcagcgacgagaactagcacagaatgccagctcagacacccctatggaccctgtgaccttcatccagactctgccctcagacctgcgccgtagtgtcctagaggatatggaggacagtgtgttagctgtgatgccacctgacattgcagctgaggctcaagccctgagacgagagcaagaagcccggcagcgacagctcatgcatgagcgtctgtttgggcacagtagcacctccgcactctctgctattctccgaagcccggctttcaccagtcgcttaagtggcaaccgtggggtccagtatactcgccttgctgtgcagagaggtggcaccttccagatggggggtagcagcagccataacaggccttctggcagtaatgtagatactctcctccgcctccgaggacggctccttctggaccacgaagccctttcttgtctcttggtcctactttttgtggatgagccaaagctcaatactagccgtctacaccgagtactgagaaatctctgctaccatgcccagacccgccactgggtcatccgcagtctgctctccatcttgcagcgcagcagtgagagtgagctatgcattgaaacacccaaactcactacaagtgaggaaaagggcaaaaagtcgagcaagagctgtgggtcaagtagccatgagaaccgtcccctggacctgctacacaagatggagtcaaagagctccaaccagctttcctggctctcagtatccatggatgcagccctaggctgcaggactaatatatttcagatccagcgttcaggggggcgtaaacataccgagaagcatgcaagcggtggctccaccgtccacatccatccccaagctgctcctgttgtctgcagacacgttttggatacactcattcaattggccaaggtatttcccagccacttcacacagcagcggaccaaagaaacaaactgtgagagtgatcgggaaaggggcaataaggcctgtagcccatgctcctcacagtcctccagcagtggcatttgcacagacttctgggacttattggtaaaactggacaacatgaatgtcagccggaaaggcaagaactccgtgaagtcagtgccagtgagcgctggcggtgagggggaaacctctccatacagcctcgaggcctctccactggggcagctcatgaacatgttgtcacacccagtcatccgccggagctctctcttaactgagaaactcctcagactcctttctctcatctcaattgctctcccagaaaacaaggtgtcagaagcacaggctaattctggcagcggtgcttcctccaccaccactgccacctcaaccacatctaccaccaccaccactgccgcctccaccacgcccacaccccctactgcacccacccctgtcacttctgctccagccctggttgctgccacggctatttccaccattgtcgtagctgcttcgaccacagtgactacccccacgactgctaccactactgtttcaatttctcccactactaagggcagcaaatctccagcgaaggtgagtgatgggggcagcagcagtacagactttaagatggtgtcctctggcctcactgaaaaccagctacagctctctgtagaggtgttgacatcccactcttgttctgaggaaggcttagaggatgcagccaacgtactactgcagctctcccggggggactctgggacccgggacactgttctcaagctgctactgaatggagcccgccatctgggttataccctttgtaaacaaataggtaccctgctggccgagctgcgggaatacaacctcgagcagcagcggcgagcccaatgtgaaaccctctctcctgatggcctgcctgaggagcagccacagaccaccaagctgaagggcaaaatgcagagcaggtttgacatggctgagaatgtggtaattgtggcatctcagaagcgacctttgggtggccgggagctccagctgccttctatgtccatgttgacatccaagacatctacccagaagttcttcttgagggtactacaggtcatcatccagctccgggacgacacgcgccgggctaacaagaaagccaagcagacaggcaggctaggttcctccggtttaggctcagctagcagcatccaggcagctgttcggcagctggaggctgaggctgatgccattatacaaatggtacgtgagggtcaaagggcgcggagacagcaacaagcagcaacgtcggagtctagccagtcagaggcgtctgtccggagggaggaatcacccatggatgtggaccagccatctcccagtgctcaagatactcaatccattgcctccgatggaaccccacagggggagaaggaaaaggaagaaagaccacctgagttacccctgctcagcgagcagctgagtttggacgagctgtgggacatgcttggggagtgtctaaaggaactagaggaatcccatgaccagcatgcggtgctagtgctacagcctgctgtcgaggccttctttctggtccatgccacagagcgggagagcaagcctcctgtccgagacacccgtgagagccagctggcacacatcaaggacgagcctcctccactctcccctgcccccttaaccccagccacgccttcctcccttgacccattcttctcccgggagccctcatctatgcacatctcctcaagcctgccccctgacacacagaagttccttcgctttgcagagactcaccgcactgtgttaaaccagatcctacggcagtccacgacccaccttgctgatgggccttttgctgtcctggtagactacattcgtgtcctcgactttgatgtcaagcgcaaatatttccgccaagagctggagcgtttagatgaggggctccggaaagaagacatggctgtgcatgtccgtcgtgaccatgtgtttgaagactcctatcgtgagctgcatcgcaaatcccccgaagaaatgaagaatcgattgtatatagtatttgaaggagaagaagggcaggatgctggtgggctcctgcgggagtggtatatgatcatctctcgagagatgtttaaccctatgtatgccttgttccgtacctcacctggtgatcgagtcacctacaccatcaatccatcttcccactgcaaccccaaccacctcagctacttcaagtttgtcggacgcattgtggccaaagctgtatatgacaaccgtcttctggagtgctactttactcgatccttttacaaacacatcttgggcaagtcagtcagatatacagatatggagagtgaagattaccacttctaccaaggtctggtttatctgctggaaaatgatgtctccacactaggctatgacctcaccttcagcactgaggtccaagagtttggagtttgtgaagttcgtgacctcaaacccaatggggccaacatcttggtaacagaggagaataagaaggagtatgtacacctggtatgccagatgagaatgacaggagccatccgcaagcagttggcggctttcttagaaggcttctatgagatcattccaaagcgcctcatttccatcttcactgagcaggagttagagctgcttatatcaggactgcccaccattgacatcgatgatctgaaatccaacactgaataccacaagtaccagtccaactctattcagatccagtggttctggagagcattgcgttctttcgatcaagctgaccgtgccaagttcctccagtttgtcacaggtacttccaaggtacccctgcaaggctttgctgccctcgaaggcatgaatggcattcagaagtttcagatccatcgagatgacaggtccacagatcgcctgccttcagctcacacatgttttaatcagctggatctgcctgcctatgagagctttgagaagctccgccacatgctactgttggctatccaggagtgctctgaaggctttgggctggcctaataaggccctgcccaactccgtggggttttttttaccattgttggacctggggaggggggagttaaaaaaagaaccagaaagaaattgtcaaaaaccaataaatgaaatccaccaactcaccgtgtgtgtcccagctgccccatcttccccagcgcatacctgttcctcttctcattctctccccgccgcctgtttcctcaccttctctcccctttccatgccgtccatgatccccaccccatgtgttttaaaaaggcagtagcctttgcagggacctgtctgtcccaactgtttgaacagtgtgctcctcagattctgtgttcagaaggatttgctgcattgagacttgaaacctttggataggggaaaaaattatatatatatatatttttttgttctgtttgcatttcttaatttgtgcttggaatgtgttgatgtgcacagctaatgattcaatgcgagacaagattggcgtctgtgttgtggaggtttcaaataaagagcactcttcataactcacttttcacaatggagtttttttcaaacttaaaaaaaaaaacaaaaaactcttaagcacatgctaggcatctggagaaaagatggattctccaggaaaccatccctgccctacccgcttgcccacctgcctccaccactggtgcaacttcctccttcagagtcagtttctgcagtcaggagagatgagcagttcaccaggaattgggggtgggggcatctgttttttttttttagaatgggagctgcacttggggatggtgatggtgttagagattgcagcccaggacaaagcatcaccttgctcaaggggaacaaactgcagcaggttgtacaaaacattcagagagctcacttgacccaaccgagggttttacttggtgagcctttctagtagtcttgagtctggggctcagttttagatttttatttcattaatgtttgtttatttctaataaattttaataagcgagtaatttaactaggtcgccagaagaccattatttttgtttgtctatttttgttgtcgtcactccctctctcgtcatctgtctgccagtctgttcacagatcaccttgtagtcccttgtggtttttactccatccagtgcttaaagctgatctaaggacttcgatggttccagccttcaaagaaaaaataatttaataaaaatttagttagaaaaaataacccc

SEQ ID NO: 139991 - DNA, 14796 bp, Homo sapiens
  Payload ID: 7456
  Gene Symbol: HUWE1
  Gene Name: HECT, UBA and WWE domain containing 1, E3 ubiquitin protein ligase
  Uniprot ID: Q7Z6Z7
  ENST ID: ENST00000342160
  CDS Start-End: 459-13583
tccgcccctcactgcttcgttaggttgtgcgtcatttgcttttcgcttcgcgtagggtgaagctgtagctacttcggctttggtgggagggaggaggggtctggaaagggctgggctcaggcttttcccgtccggtagaggttctcgcgggatcgcgcggaggcggcggtggctcggttactgactgcagtagccgcggaggcggcggcaaggtcttcggctcgtgccgttctaagccggagaattctcgcgggagcagggttacgtcctcgtgggattcgttggcggtggctgaggtcctccagcagcctgacctgagtgggttagtgatccagagaaaccagcaggccaacttggtcaggaaggttcgggaagctgttggagcagtgtggggaatttcccaccaggatgagtatgattggctgtgattttagatcgtaaagctgaaaattgaaatcatgaaagtagacaggactaaactgaagaagacacctactgaggctcctgcagactgcagagccttaatagacaaactcaaagtttgtaatgatgagcaacttctcttggaactgcagcagatcaaaacatggaacattggaaagtgcgagttatatcactgggtggacctgttggaccgcttcgatggaatactggcagatgctggacagacagtggagaatatgtcatggatgctcgtatgtgataggccagaaagagagcaactgaaaatgcttctcttggctgtgttgaacttcacagccttgctcattgagtacagcttttcccggcatctgtacagttccatagagcatttgacaactttattggcttcctctgatatgcaagtggtgctggcagtcctcaatctcctatatgtatttagcaaaagatcaaactacatcactcgtctgggatctgacaagaggaccccgctgctaactcggctacaacatttggcagagagctggggtggaaaggagaatggctttggacttgcagaatgttgcagagacttgcatatgatgaaatatccacccagtgcaactacactacactttgaattctatgcagatcctggggccgaggtcaaaattgagaaaaggacaactagtaacacactacattatattcacatagagcaacttgacaagatttcagaaagcccttctgaaatcatggaatctcttaccaaaatgtacagcattcctaaggataagcagatgctgttatttacacacatacgactggcccatggcttttctaatcacaggaagcgattgcaggcagttcaggccagactgcatgcaatatctatattagtgtattccaatgccttgcaggaatcagcaaacagtatcttgtataatggcttgatagaggagttggtagatgtccttcagataacggataagcagcttatggagattaaagcagcttctttacgaacattaacatcaattgtccacttggagagaactcccaaactcagcagtattattgactgtactggaactgcctcctaccatggatttttgccagtgcttgtaaggaactgtatccaggccatgattgatccttccatggatccataccctcaccagtttgccactgctctcttctcttttttataccatctggccagctacgatgctggtggtgaagccttggtctcctgtggaatgatggaagccttattgaaggtcataaagtttcttggcgatgaacaggaccagataacatttgtcaccagagccgtcagagtggttgaccttatcaccaacctggatatggcagcttttcaatcccatagtggactttctatcttcatttatagacttgagcatgaagtagatttgtgccgaaaagaatgtccgtttgtgatcaagccaaagatccagagacccaatactacacaagaaggagaggaaatggaaactgatatggatggagtccagtgtattccacaacgagcagcacttctgaaatccatgttgaatttcctcaagaaggccatccaagaccctgctttctcagatggcatacgacatgtgatggatggttctctgcctacctccctgaaacacatcatcagcaatgcagaatactatggcccatcactcttcctcctagctactgaagtggtgactgtgtttgtatttcaagaaccatcactgctctcctcactccaggacaatggattgacagatgtcatgctgcatgcactgcttatcaaagatgttcctgctacccgtgaagtccttggctccctcccaaatgtattcagtgcactctgtttgaatgcccgaggtcttcagtcttttgttcagtgtcagccttttgaacgcctcttcaaagttcttctgtctccagattacctcccagccatgcggaggaggagaagttctgatccccttggggatactgcatccaacctggggagtgctgtcgatgagctcatgagacatcagcccacccttaaaacagatgcaacgactgccatcatcaagttacttgaagaaatctgtaatcttggaagggaccccaaatacatctgtcagaagccatcaatccagaaggcagatggcactgccactgctcctcccccaaggtctaatcatgccgcagaagaagcctctagtgaggatgaggaggaagaggaagtacaggccatgcagagctttaattctacccagcaaaatgaaactgagcctaatcagcaggttgttggtacagaggaacgtattcctattcccctcatggattacatccttaatgtgatgaaatttgtggaatctattctgagcaacaatacaacagatgaccactgccaggaatttgtgaatcagaaaggactgttgcctttggttaccattttgggtcttcccaatctgcccattgactttcccacatctgctgcctgtcaggctgttgcaggtgtctgcaaatccatattgacactgtcacatgaacccaaagtccttcaagagggtctccttcagttggactccatcctctcctccctggagcccttacaccgccccattgaatcccctgggggctcagtgttgttgcgagaactggcttgcgcaggcaatgttgctgatgctaccctctcagcccaggccacacctctgctgcatgcactcactgctgcccatgcctacatcatgatgtttgttcatacttgcagagttggacagagtgaaattcgttccatctccgtaaaccagtggggctctcaattgggtctgagtgttttgagcaagctgagccagttatactgttccctggtgtgggaaagcactgtcctcctctctctgtgtaccccaaacagcctaccatctgggtgtgaatttggccaggcagatatgcagaaactggttccaaaggatgagaaggcaggtacgacccagggcggaaaaagatcagatggggaacaggatggagcagctggaagtatggatgcttctacccagggcttattagaaggcattgggctagatggtgacacattggctcccatggagacagatgaacctactgcttcagactctaagggcaaatctaaaatcacaccagcaatggctgccagaattaagcaaatcaagcctttgttatcagcttcctccagattaggccgagcacttgctgagctatttggacttcttgttaaactttgtgtgggatctcctgtccgccagagaaggagccatcatgctgccagcaccactacagcaccgacacctgccgcgcgatcaacagcctcagctctcactaagctcttgactaaggggttatcttggcagcccccaccatatacacctactccccgattcaggctgacattcttcatctgttcagttggtttcacatccccaatgctgtttgatgagaggaagtatccctaccacctcatgctgcaaaaatttctctgctccggaggccacaatgctctttttgaaactttcaactgggctctgtccatgggaggtaaagttcctgtttctgagggattggaacactcagacttgcctgatggcacaggagaattcctagatgcctggcttatgctggtggagaagatggtgaatcccaccacggtgcttgaatctccacattcgctgcctgccaaattgcctggaggtgtccagaactttccccagttcagtgcactgcgcttccttgtggtaactcagaaagcagcctttacttgcatcaaaaacttatggaaccggaaacccctgaaggtatatggtggacgaatggctgaatcgatgctggccattctatgccacatcctccgaggagaacctgtgattcgagagagactaagcaaggagaaggaggggtctcgaggagaagaggatacagggcaagaggaaggtggctcccgccgggaacctcaagtcaaccagcaacaactgcaacagctcatggacatgggcttcacaagggaacatgcaatggaggcactgttgaacaccagcaccatggagcaggccacagagtaccttttaacccaccctcctccaatcatgggaggagttgttcgggatctcagcatgtctgaagaggaccagatgatgagagcaattgctatgtctctgggacaggatattccaatggatcaaagggcagagtcacctgaggaagttgcttgccggaaggaggaagaggaacggaaagctcgggaaaagcaggaggaggaagaggctaaatgtctagagaagttccaggatgctgacccgttggaacaagatgagctccacactttcacagatactatgttgccaggctgcttccaccttcttgatgagctgccagacacagtataccgtgtgtgtgacctgatcatgacagcaatcaaacgtaatggagcagattatcgtgacatgattctgaagcaagtagtcaatcaggtgtgggaagctgctgatgtattgatcaaagctgctcttcccctgacaacaagtgacacaaaaaccgtgtcagagtggataagtcagatggccacactgccccaggcctccaatttggctactagaatcttgcttttaacgctactttttgaggagttgaagctaccttgtgcttgggtggttgaatcaagtggcatccttaatgtcctaatcaaactcttggaagtggttcagccctgcctccaggcagccaaggagcagaaggaagtccagaccccaaagtggatcacaccagtgttgctcctgattgatttctatgaaaagacagccatctcctcaaaaaggagagcccagatgactaagtacctgcaatccaacagcaacaactggcgctggtttgatgatcgctctgggcgttggtgtagttacagtgcaagcaacaatagcactattgattctgcctggaaatctggagagacaagcgtgcgattcactgcaggccgaagaagatacacggtccaattcactacaatggtgcaggttaatgaggaaacagggaaccgacgccctgtgatgctgactctcctcagggtacctcggctgaataaaaattcaaaaaacagcaatggacaggaactagagaagacgctggaagaaagcaaagaaatggatatcaaacgtaaagaaaataaaggcaatgatacccctttggccctagagagtacaaacactgaaaaggagacaagcctggaggaaacaaaaatcggggagatcctgatccagggcttgacagaagatatggtgactgttttaatccgggcctgcgtgagcatgctgggagtccctgtggacccagatactttgcatgccacccttcgtctctgtctgaggctcacccgggaccacaaatatgccatgatgtttgcagaactgaagagtacccgcatgatcttgaatttgacccagagctcaggcttcaatgggtttactcccctggtcacccttctcttaagacacatcattgaggacccctgtacccttcgtcataccatggaaaaggttgttcgctcagcagctacaagtggagctggtagcactacctctggtgttgtgtctggcagcctcggctctcgggagatcaactacatccttcgtgtccttgggccagccgcatgccgcaatccagacatattcacagaagtggccaactgctgtatccgcatcgcccttcctgcccctcgaggctcaggaactgcttcagatgatgaatttgagaatcttagaattaaaggccctaatgctgtacagctggtgaagaccacccctttgaagccctcacctctgcctgtcatccctgatactatcaaggaagtgatctatgatatgctgaatgctctggctgcataccatgctccagaggaagcagataaatctgatcctaaacctggggttatgacccaagaggttggccagctcctgcaagacatgggtgatgatgtataccagcagtaccggtcacttacgcgtcagagcagtgactttgatacgcagtcaggtttttccattaatagtcaggtctttgctgcagatggtgcctccactgagacttccgcatctgggacctcccaaggagaggcttcaactccagaggagtctcgagatgggaagaaagataaagaaggggaccgggcctctgaggaaggcaaacagaaaggcaagggcagcaaacctttaatgcctacctccactatccttcgtcttctggcagagttggtgaggtcctatgttggtattgctaccctgattgccaactacagctacactgtgggccagtctgaactgatcaaagaggactgcagtgtgctagcttttgttctggaccacctgctcccacatacccagaatgcagaagacaaggacacccctgccttggcccgcctgttcctcgcaagcctggctgctgcagggagtggcacagatgcccaggtggccctagtgaatgaagtaaaagcagcccttggacgggcactggctatggctgagagtacagagaaacatgccaggcttcaggcagtgatgtgtatcatcagtactatcatggagtcctgcccctccacctccagcttctacagcagtgccacagcgaagacccagcacaatggcatgaacaacatcattcggcttttcctgaagaagggactggttaatgacctggccagagtacctcacagcttagacctgtccagtcccaacatggccaacacagtcaatgctgctctgaagcctttggaaacactttcccggattgtgaaccagcccagtagcctttttggcagcaagagtgcttctagcaagaacaagtctgagcaggatgcccaaggagcctctcaagattccagtagcaaccagcaggacccaggcgagcctggggaagcagaagtgcaggaggaggatcatgatgtcactcagacagaggtggcagatggggatatcatggatggggaggctgaaaccgactcagtggtgattgctgggcagcctgaggtgctcagttcacaagagatgcaggttgagaatgagctggaggacctgatagatgagttgcttgagagggatggcggatctgggaacagtacaattatagtgagcagaagtggagaggatgaatcacaagaggacgtgctgatggatgaagctccttccaacctcagccaagcttccaccttgcaggccaaccgagaagattccatgaatatcctggaccctgaggatgaggaggagcacactcaggaagaggacagcagtggcagtaacgaggatgaggatgatagtcaggatgaagaggaggaggaggaggaagatgaggaagatgatcaggaggatgatgaaggtgaagagggagatgaagacgatgacgacgatggctctgagatggaattggatgaggattatcctgatatgaacgcttctcccttggtccgatttgagcgctttgaccgggaggatgatctcatcattgagtttgacaacatgttctccagtgctacagacatccccccatccccaggaaatatccctaccacccatccactgatggtgcgccatgcagaccacagttctctgacactgggcagtggctcttcaacaactcgtctcacccagggcatcgggcgcagtcagaggaccctaaggcagctgacggccaatactggccacaccattcatgttcactaccctgggaatcgccagcccaaccctcctcttatactgcagaggttgcttggtccctcagctgctgctgacatccttcagctgagcagcagccttcccctacaaagccggggtcgggcccgcctcctggtaggcaacgatgacgtccacatcatcgcccgttctgatgatgagctgctggatgactttttccatgatcagagcacagctaccagccaagcaggaaccctgtccagcatccccacagccctgacccgctggacagaagaatgcaaagttctcgatgctgagagcatgcatgactgtgtttcagtggttaaagtgtccattgtcaatcacctggaattcctgagggatgaggagctggaagaaaggcgagagaagcgcaggaaacaactggctgaggaagaaacaaagataactgataaaggcaaagaagataaggagaacagggatcagagtgcacagtgtactgcatctaagtcaaatgactccactgaacagaatctctcagatgggacgcctatgcctgacagctacccaacaaccccatcttcaactgatgcagctacatctgagtccaaggagacccttggcactctgcaatcctcacaacagcaaccaacactcccaaccccaccagctttgggagaggttcctcaggagctgcagtctccagctggagaagggggcagctctacacagctattgatgcctgtagagccagaggaattgggtcccacaaggccaagtggggaagcagaaacaactcagatggagttatccccagctcccactataacctcactttccccagagagagctgaggattctgatgcactgacggctgtcagcagtcagctagaaggctctcctatggatacaagcagcctggcttcctgtaccttagaggaggctgtgggtgacacttcagcagctggcagttctgagcagcccagagcaggcagctccactcctggggatgccccaccagctgtggcggaagtgcaaggcaggagtgatgggtcaggggaatctgcccagccacctgaggacagctccccacctgcatcctctgagagctcttccaccagagattctgccgtggccatttctggagcagattcccgaggaatcctagaagagccgttgccttcaacaagcagtgaagaagaagatccccttgcgggtatcagtctccctgaaggtgtggacccctcttttctggctgccctgcctgatgacatccgtcgggaagttctacagaaccagctaggcattcgtccaccaacccggactgccccctccacaaatagctcagcgcctgcagtggtggggaatcctggtgtgactgaagtgagccctgagtttctggctgccctgcctccagccattcaggaggaagtactggcacagcagagagctgagcagcagcgacgagaactagcacagaatgccagctcagacacccctatggaccctgtgaccttcatccagactctgccctcagacctgcgccgtagtgtcctagaggatatggaggacagtgtgttagctgtgatgccacctgacattgcagctgaggctcaagccctgagacgagagcaagaagcccggcagcgacagctcatgcatgagcgtctgtttgggcacagtagcacctccgcactctctgctattctccgaagcccggctttcaccagtcgcttaagtggcaaccgtggggtccagtatactcgccttgctgtgcagagaggtggcaccttccagatggggggtagcagcagccataacaggccttctggcagtaatgtagatactctcctccgcctccgaggacggctccttctggaccacgaagccctttcttgtctcttggtcctactttttgtggatgagccaaagctcaatactagccgtctacaccgagtactgagaaatctctgctaccatgcccagacccgccactgggtcatccgcagtctgctctccatcttgcagcgcagcagtgagagtgagctatgcattgaaacacccaaactcactacaagtgaggaaaagggcaaaaagtcgagcaagagctgtgggtcaagtagccatgagaaccgtcccctggacctgctacacaagatggagtcaaagagctccaaccagctttcctggctctcagtatccatggatgcagccctaggctgcaggactaatatatttcagatccagcgttcaggggggcgtaaacataccgagaagcatgcaagcggtggctccaccgtccacatccatccccaagctgctcctgttgtctgcagacacgttttggatacactcattcaattggccaaggtatttcccagccacttcacacagcagcggaccaaagaaacaaactgtgagagtgatcgggaaaggggcaataaggcctgtagcccatgctcctcacagtcctccagcagtggcatttgcacagacttctgggacttattggtaaaactggacaacatgaatgtcagccggaaaggcaagaactccgtgaagtcagtgccagtgagcgctggcggtgagggggaaacctctccatacagcctcgaggcctctccactggggcagctcatgaacatgttgtcacacccagtcatccgccggagctctctcttaactgagaaactcctcagactcctttctctcatctcaattgctctcccagaaaacaaggtgtcagaagcacaggctaattctggcagcggtgcttcctccaccaccactgccacctcaaccacatctaccaccaccaccactgccgcctccaccacgcccacaccccctactgcacccacccctgtcacttctgctccagccctggttgctgccacggctatttccaccattgtcgtagctgcttcgaccacagtgactacccccacgactgctaccactactgtttcaatttctcccactactaagggcagcaaatctccagcgaaggtgagtgatgggggcagcagcagtacagactttaagatggtgtcctctggcctcactgaaaaccagctacagctctctgtagaggtgttgacatcccactcttgttctgaggaaggcttagaggatgcagccaacgtactactgcagctctcccggggggactctgggacccgggacactgttctcaagctgctactgaatggagcccgccatctgggttataccctttgtaaacaaataggtaccctgctggccgagctgcgggaatacaacctcgagcagcagcggcgagcccaatgtgaaaccctctctcctgatggcctgcctgaggagcagccacagaccaccaagctgaagggcaaaatgcagagcaggtttgacatggctgagaatgtggtaattgtggcatctcagaagcgacctttgggtggccgggagctccagctgccttctatgtccatgttgacatccaagacatctacccagaagttcttcttgagggtactacaggtcatcatccagctccgggacgacacgcgccgggctaacaagaaagccaagcagacaggcaggctaggttcctccggtttaggctcagctagcagcatccaggcagctgttcggcagctggaggctgaggctgatgccattatacaaatggtacgtgagggtcaaagggcgcggagacagcaacaagcagcaacgtcggagtctagccagtcagaggcgtctgtccggagggaggaatcacccatggatgtggaccagccatctcccagtgctcaagatactcaatccattgcctccgatggaaccccacagggggagaaggaaaaggaagaaagaccacctgagttacccctgctcagcgagcagctgagtttggacgagctgtgggacatgcttggggagtgtctaaaggaactagaggaatcccatgaccagcatgcggtgctagtgctacagcctgctgtcgaggccttctttctggtccatgccacagagcgggagagcaagcctcctgtccgagacacccgtgagagccagctggcacacatcaaggacgagcctcctccactctcccctgcccccttaaccccagccacgccttcctcccttgacccattcttctcccgggagccctcatctatgcacatctcctcaagcctgccccctgacacacagaagttccttcgctttgcagagactcaccgcactgtgttaaaccagatcctacggcagtccacgacccaccttgctgatgggccttttgctgtcctggtagactacattcgtgtcctcgactttgatgtcaagcgcaaatatttccgccaagagctggagcgtttagatgaggggctccggaaagaagacatggctgtgcatgtccgtcgtgaccatgtgtttgaagactcctatcgtgagctgcatcgcaaatcccccgaagaaatgaagaatcgattgtatatagtatttgaaggagaagaagggcaggatgctggtgggctcctgcgggagtggtatatgatcatctctcgagagatgtttaaccctatgtatgccttgttccgtacctcacctggtgatcgagtcacctacaccatcaatccatcttcccactgcaaccccaaccacctcagctacttcaagtttgtcggacgcattgtggccaaagctgtatatgacaaccgtcttctggagtgctactttactcgatccttttacaaacacatcttgggcaagtcagtcagatatacagatatggagagtgaagattaccacttctaccaaggtctggtttatctgctggaaaatgatgtctccacactaggctatgacctcaccttcagcactgaggtccaagagtttggagtttgtgaagttcgtgacctcaaacccaatggggccaacatcttggtaacagaggagaataagaaggagtatgtacacctggtatgccagatgagaatgacaggagccatccgcaagcagttggcggctttcttagaaggcttctatgagatcattccaaagcgcctcatttccatcttcactgagcaggagttagagctgcttatatcaggactgcccaccattgacatcgatgatctgaaatccaacactgaataccacaagtaccagtccaactctattcagatccagtggttctggagagcattgcgttctttcgatcaagctgaccgtgccaagttcctccagtttgtcacaggtacttccaaggtacccctgcaaggctttgctgccctcgaaggcatgaatggcattcagaagtttcagatccatcgagatgacaggtccacagatcgcctgccttcagctcacacatgttttaatcagctggatctgcctgcctatgagagctttgagaagctccgccacatgctactgttggctatccaggagtgctctgaaggctttgggctggcctaataaggccctgcccaactccgtggggttttttttaccattgttggacctggggaggggggagttaaaaaaagaaccagaaagaaattgtcaaaaaccaataaatgaaatccaccaactcaccgtgtgtgtcccagctgccccatcttccccagcgcatacctgttcctcttctcattctctccccgccgcctgtttcctcaccttctctcccctttccatgccgtccatgatccccaccccatgtgttttaaaaaggcagtagcctttgcagggacctgtctgtcccaactgtttgaacagtgtgctcctcagattctgtgttcagaaggatttgctgcattgagacttgaaacctttggataggggaaaaaattatatatatatatatttttttgttctgtttgcatttcttaatttgtgcttggaatgtgttgatgtgcacagctaatgattcaatgcgagacaagattggcgtctgtgttgtggaggtttcaaataaagagcactcttcataactcacttttcacaatggagtttttttcaaacttaaaaaaaaaaacaaaaaactcttaagcacatgctaggcatctggagaaaagatggattctccaggaaaccatccctgccctacccgcttgcccacctgcctccaccactggtgcaacttcctccttcagagtcagtttctgcagtcaggagagatgagcagttcaccaggaattgggggtgggggcatctgttttttttttttagaatgggagctgcacttggggatggtgatggtgttagagattgcagcccaggacaaagcatcaccttgctcaaggggaacaaactgcagcaggttgtacaaaacattcagagagctcacttgacccaaccgagggttttacttggtgagcctttctagtagtcttgagtctggggctcagttttagatttttatttcattaatgtttgtttatttctaataaattttaataagcgagtaatttaactaggtcgccagaagaccattatttttgtttgtctatttttgttgtcgtcactccctctctcgtcatctgtctgccagtctgttcacagatcaccttgtagtcccttgtggtttttactccatccagtgcttaaagctgatctaaggacttcgatggttccagccttcaaagaaaaaataatttaataaaaatttagttagaaaaaataaccccaa

SEQ ID NO: 139992 - DNA, 4805 bp, Homo sapiens
  Payload ID: 7456
  Gene Symbol: HUWE1
  Gene Name: HECT, UBA and WWE domain containing 1, E3 ubiquitin protein ligase
  ENST ID: ENST00000426907
  CDS Start-End: 1-3592
gccttctggcagtaatgtagatactctcctccgcctccgaggacggctccttctggaccacgaagccctttcttgtctcttggtcctactttttgtggatgagccaaagctcaatactagccgtctacaccgagtactgagaaatctctgctaccatgcccagacccgccactgggtcatccgcagtctgctctccatcttgcagcgcagcagtgagagtgagctatgcattgaaacacccaaactcactacaagtgaggaaaagggcaaaaagtcgagcaagagctgtgggtcaagtagccatgagaaccgtcccctggacctgctacacaagatggagtcaaagagctccaaccagctttcctggctctcagtatccatggatgcagccctaggctgcaggactaatatatttcagatccagcgttcaggggggcgtaaacataccgagaagcatgcaagcggtggctccaccgtccacatccatccccaagctgctcctgttgtctgcagacacgttttggatacactcattcaattggccaaggtatttcccagccacttcacacagcagcggaccaaagaaacaaactgtgagagtgatcgggaaaggggcaataaggcctgtagcccatgctcctcacagtcctccagcagtggcatttgcacagacttctgggacttattggtaaaactggacaacatgaatgtcagccggaaaggcaagaactccgtgaagtcagtgccagtgagcgctggcggtgagggggaaacctctccatacagcctcgaggcctctccactggggcagctcatgaacatgttgtcacacccagtcatccgccggagctctctcttaactgagaaactcctcagactcctttctctcatctcaattgctctcccagaaaacaaggtgtcagaagcacaggctaattctggcagcggtgcttcctccaccaccactgccacctcaaccacatctaccaccaccaccactgccgcctccaccacgcccacaccccctactgcacccacccctgtcacttctgctccagccctggttgctgccacggctatttccaccattgtcgtagctgcttcgaccacagtgactacccccacgactgctaccactactgtttcaatttctcccactactaagggcagcaaatctccagcgaaggtgagtgatgggggcagcagcagtacagactttaagatggtgtcctctggcctcactgaaaaccagctacagctctctgtagaggtgttgacatcccactcttgttctgaggaaggcttagaggatgcagccaacgtactactgcagctctcccggggggactctgggacccgggacactgttctcaagctgctactgaatggagcccgccatctgggttataccctttgtaaacaaataggtaccctgctggccgagctgcgggaatacaacctcgagcagcagcggcgagcccaatgtgaaaccctctctcctgatggcctgcctgaggagcagccacagaccaccaagctgaagggcaaaatgcagagcaggtttgacatggctgagaatgtggtaattgtggcatctcagaagcgacctttgggtggccgggagctccagctgccttctatgtccatgttgacatccaagacatctacccagaagttcttcttgagggtactacaggtcatcatccagctccgggacgacacgcgccgggctaacaagaaagccaagcagacaggcaggctaggttcctccggtttaggctcagctagcagcatccaggcagctgttcggcagctggaggctgaggctgatgccattatacaaatgtcggagtctagccagtcagaggcgtctgtccggagggaggaatcacccatggatgtggaccagccatctcccagtgctcaagatactcaatccattgcctccgatggaaccccacagggggagaaggaaaaggaagaaagaccacctgagttacccctgctcagcgagcagctgagtttggacgagctgtgggacatgcttggggagtgtctaaaggaactagaggaatcccatgaccagcatgcggtgctagtgctacagcctgctgtcgaggccttctttctggtccatgccacagagcgggagagcaagcctcctgtccgagacacccgtgagagccagctggcacacatcaaggacgagcctcctccactctcccctgcccccttaaccccagccacgccttcctcccttgacccattcttctcccgggagccctcatctatgcacatctcctcaagcctgccccctgacacacagaagttccttcgctttgcagagactcaccgcactgtgttaaaccagatcctacggcagtccacgacccaccttgctgatgggccttttgctgtcctggtagactacattcgtgtcctcgactttgatgtcaagcgcaaatatttccgccaagagctggagcgtttagatgaggggctccggaaagaagacatggctgtgcatgtccgtcgtgaccatgtgtttgaagactcctatcgtgagctgcatcgcaaatcccccgaagaaatgaagaatcgattgtatatagtatttgaaggagaagaagggcaggatgctggtgggctcctgcgggagtggtatatgatcatctctcgagagatgtttaaccctatgtatgccttgttccgtacctcacctggtgatcgagtcacctacaccatcaatccatcttcccactgcaaccccaaccacctcagctacttcaagtttgtcggacgcattgtggccaaagctgtatatgacaaccgtcttctggagtgctactttactcgatccttttacaaacacatcttgggcaagtcagtcagatatacagatatggagagtgaagattaccacttctaccaaggtctggtttatctgctggaaaatgatgtctccacactaggctatgacctcaccttcagcactgaggtccaagagtttggagtttgtgaagttcgtgacctcaaacccaatggggccaacatcttggtaacagaggagaataagaaggagtatgtacacctggtatgccagatgagaatgacaggagccatccgcaagcagttggcggctttcttagaaggcttctatgagatcattccaaagcgcctcatttccatcttcactgagcaggagttagagctgcttatatcaggactgcccaccattgacatcgatgatctgaaatccaacactgaataccacaagtaccagtccaactctattcagatccagtggttctggagagcattgcgttctttcgatcaagctgaccgtgccaagttcctccagtttgtcacaggtacttccaaggtacccctgcaaggctttgctgccctcgaaggcatgaatggcattcagaagtttcagatccatcgagatgacaggtccacagatcgcctgccttcagctcacacatgttttaatcagctggatctgcctgcctatgagagctttgagaagctccgccacatgctactgttggctatccaggagtgctctgaaggctttgggctggcctaataaggccctgcccaactccgtggggttttttttaccattgttggacctggggaggggggagttaaaaaaagaaccagaaagaaattgtcaaaaaccaataaatgaaatccaccaactcaccgtgtgtgtcccagctgccccatcttccccagcgcatacctgttcctcttctcattctctccccgccgcctgtttcctcaccttctctcccctttccatgccgtccatgatccccaccccatgtgttttaaaaaggcagtagcctttgcagggacctgtctgtcccaactgtttgaacagtgtgctcctcagattctgtgttcagaaggatttgctgcattgagacttgaaacctttggataggggaaaaaattatatatatatatatttttttgttctgtttgcatttcttaatttgtgcttggaatgtgttgatgtgcacagctaatgattcaatgcgagacaagattggcgtctgtgttgtggaggtttcaaataaagagcactcttcataactcacttttcacaatggagtttttttcaaacttaaaaaaaaaaacaaaaaactcttaagcacatgctaggcatctggagaaaagatggattctccaggaaaccatccctgccctacccgcttgcccacctgcctccaccactggtgcaacttcctccttcagagtcagtttctgcagtcaggagagatgagcagttcaccaggaattgggggtgggggcatctgttttttttttttagaatgggagctgcacttggggatggtgatggtgttagagattgcagcccaggacaaagcatcaccttgctcaaggggaacaaactgcagcaggttgtacaaaacattcagagagctcacttgacccaaccgagggttttacttggtgagcctttctagtagtcttgagtctggggctcagttttagatttttatttcattaatgtttgtttatttctaataaattttaataagcgagtaatttaactaggtcgccagaagaccattatttttgtttgtctatttttgttgtcgtcactccctctctcgtcatctgtctgccagtctgttcacagatcaccttgtagtcccttgtggtttttactccatccagtgcttaaagctgatctaaggacttcgatggttccagccttcaaagaaaaaataatttaataaaaatttagttagaaaaaataaccccaa

SEQ ID NO: 139993 - DNA, 872 bp, Homo sapiens
  Payload ID: 7456
  Gene Symbol: HUWE1
  Gene Name: HECT, UBA and WWE domain containing 1, E3 ubiquitin protein ligase
  ENST ID: ENST00000446750
  CDS Start-End: 595-872
tccgcccctcactgcttcgttaggttgtgcgtcatttgcttttcgcttcgcgtagggtgaagctgtagctacttcggctttggtgggagggaggaggggtctggaaagggctgggctcaggcttttcccgtccggtagaggttctcgcgggatcgcgcggaggcggcggtggctcggttactgactgcagtagccgcggaggcggcggcaaggtcttcggctcgtgccgttctaagccggagaattctcgcgggagcagggttacgtcctcgtgggattcgttggcggtggctgaggtagatctctgagaagagaggaaggagtgacaataccaaataaaaactttgtctaaggttcaatggcaaagttcaacctgagttgccaggatgtttatcgtttgtctcccaatatggccaaaaagcatgtatgaaggtcctccagcagcctgacctgagtgggttagtgatccagagaaaccagcaggccaacttggtcaggaaggttcgggaagctgttggagcagtgtggggaatttcccaccaggatgagtatgattggctgtgattttagatcgtaaagctgaaaattgaaatcatgaaagtagacaggactaaactgaagaagacacctactgaggctcctgcagactgcagagccttaatagacaaactcaaagtttgtaatgatgagcaacttctcttggaactgcagcagatcaaaacatggaacattggaaagtgcgagttatatcactgggtggacctgttggaccgcttcgatggaatactggcagatgctggacagacagtggagaatatgtcatggatgctcgtatgtgataggccagaaagagagcaactgaaaatgcttct

SEQ ID NO: 139994 - DNA, 14311 bp, Homo sapiens
  Payload ID: 7456
  Gene Symbol: HUWE1
  Gene Name: HECT, UBA and WWE domain containing 1, E3 ubiquitin protein ligase
  Uniprot ID: Q7Z6Z7
  ENST ID: ENST00000612484
  CDS Start-End: 1-13098
atgaaagtagacaggactaaactgaagaagacacctactgaggctcctgcagactgcagagccttaatagacaaactcaaagtttgtaatgatgagcaacttctcttggaactgcagcagatcaaaacatggaacattggaaagtgcgagttatatcactgggtggacctgttggaccgcttcgatggaatactggcagatgctggacagacagtggagaatatgtcatggatgctcgtatgtgataggccagaaagagagcaactgaaaatgcttctcttggctgtgttgaacttcacagccttgctcattgagtacagcttttcccggcatctgtacagttccatagagcatttgacaactttattggcttcctctgatatgcaagtggtgctggcagtcctcaatctcctatatgtatttagcaaaagatcaaactacatcactcgtctgggatctgacaagaggaccccgctgctaactcggctacaacatttggcagagagctggggtggaaaggagaatggctttggacttgcagaatgttgcagagacttgcatatgatgaaatatccacccagtgcaactacactacactttgaattctatgcagatcctggggccgaggtcaaaattgagaaaaggacaactagtaacacactacattatattcacatagagcaacttgacaagatttcagaaagcccttctgaaatcatggaatctcttaccaaaatgtacagcattcctaaggataagcagatgctgttatttacacacatacgactggcccatggcttttctaatcacaggaagcgattgcaggcagttcaggccagactgcatgcaatatctatattagtgtattccaatgccttgcaggaatcagcaaacagtatcttgtataatggcttgatagaggagttggtagatgtccttcagataacggataagcagcttatggagattaaagcagcttctttacgaacattaacatcaattgtccacttggagagaactcccaaactcagcagtattattgactgtactggaactgcctcctaccatggatttttgccagtgcttgtaaggaactgtatccaggccatgattgatccttccatggatccataccctcaccagtttgccactgctctcttctcttttttataccatctggccagctacgatgctggtggtgaagccttggtctcctgtggaatgatggaagccttattgaaggtcataaagtttcttggcgatgaacaggaccagataacatttgtcaccagagccgtcagagtggttgaccttatcaccaacctggatatggcagcttttcaatcccatagtggactttctatcttcatttatagacttgagcatgaagtagatttgtgccgaaaagaatgtccgtttgtgatcaagccaaagatccagagacccaatactacacaagaaggagaggaaatggaaactgatatggatggagtccagtgtattccacaacgagcagcacttctgaaatccatgttgaatttcctcaagaaggccatccaagaccctgctttctcagatggcatacgacatgtgatggatggttctctgcctacctccctgaaacacatcatcagcaatgcagaatactatggcccatcactcttcctcctagctactgaagtggtgactgtgtttgtatttcaagaaccatcactgctctcctcactccaggacaatggattgacagatgtcatgctgcatgcactgcttatcaaagatgttcctgctacccgtgaagtccttggctccctcccaaatgtattcagtgcactctgtttgaatgcccgaggtcttcagtcttttgttcagtgtcagccttttgaacgcctcttcaaagttcttctgtctccagattacctcccagccatgcggaggaggagaagttctgatccccttggggatactgcatccaacctggggagtgctgtcgatgagctcatgagacatcagcccacccttaaaacagatgcaacgactgccatcatcaagttacttgaagaaatctgtaatcttggaagggaccccaaatacatctgtcagaagccatcaatccagaaggcagatggcactgccactgctcctcccccaaggtctaatcatgccgcagaagaagcctctagtgaggatgaggaggaagaggaagtacaggccatgcagagctttaattctacccagcaaaatgaaactgagcctaatcagcaggttgttggtacagaggaacgtattcctattcccctcatggattacatccttaatgtgatgaaatttgtggaatctattctgagcaacaatacaacagatgaccactgccaggaatttgtgaatcagaaaggactgttgcctttggttaccattttgggtcttcccaatctgcccattgactttcccacatctgctgcctgtcaggctgttgcaggtgtctgcaaatccatattgacactgtcacatgaacccaaagtccttcaagagggtctccttcagttggactccatcctctcctccctggagcccttacaccgccccattgaatcccctgggggctcagtgttgttgcgagaactggcttgcgcaggcaatgttgctgatgctaccctctcagcccaggccacacctctgctgcatgcactcactgctgcccatgcctacatcatgatgtttgttcatacttgcagagttggacagagtgaaattcgttccatctccgtaaaccagtggggctctcaattgggtctgagtgttttgagcaagctgagccagttatactgttccctggtgtgggaaagcactgtcctcctctctctgtgtaccccaaacagcctaccatctgggtgtgaatttggccaggcagatatgcagaaactggttccaaaggatgagaaggcagatggggaacaggatggagcagctggaagtatggatgcttctacccagggcttattagaaggcattgggctagatggtgacacattggctcccatggagacagatgaacctactgcttcagactctaagggcaaatctaaaatcacaccagcaatggctgccagaattaagcaaatcaagcctttgttatcagcttcctccagattaggccgagcacttgctgagctatttggacttcttgttaaactttgtgtgggatctcctgtccgccagagaaggagccatcatgctgccagcaccactacagcaccgacacctgccgcgcgatcaacagcctcagctctcactaagctcttgactaaggggttatcttggcagcccccaccatatacacctactccccgattcaggctgacattcttcatctgttcagttggtttcacatccccaatgctgtttgatgagaggaagtatccctaccacctcatgctgcaaaaatttctctgctccggaggccacaatgctctttttgaaactttcaactgggctctgtccatgggaggtaaagttcctgtttctgagggattggaacactcagacttgcctgatggcacaggagaattcctagatgcctggcttatgctggtggagaagatggtgaatcccaccacggtgcttgaatctccacattcgctgcctgccaaattgcctggaggtgtccagaactttccccagttcagtgcactgcgcttccttgtggtaactcagaaagcagcctttacttgcatcaaaaacttatggaaccggaaacccctgaaggtatatggtggacgaatggctgaatcgatgctggccattctatgccacatcctccgaggagaacctgtgattcgagagagactaagcaaggagaaggaggggtctcgaggagaagaggatacagggcaagaggaaggtggctcccgccgggaacctcaagtcaaccagcaacaactgcaacagctcatggacatgggcttcacaagggaacatgcaatggaggcactgttgaacaccagcaccatggagcaggccacagagtaccttttaacccaccctcctccaatcatgggaggagttgttcgggatctcagcatgtctgaagaggaccagatgatgagagcaattgctatgtctctgggacaggatattccaatggatcaaagggcagagtcacctgaggaagttgcttgccggaaggaggaagaggaacggaaagctcgggaaaagcaggaggaggaagaggctaaatgtctagagaagttccaggatgctgacccgttggaacaagatgagctccacactttcacagatactatgttgccaggctgcttccaccttcttgatgagctgccagacacagtataccgtgtgtgtgacctgatcatgacagcaatcaaacgtaatggagcagattatcgtgacatgattctgaagcaagtagtcaatcaggtgtgggaagctgctgatgtattgatcaaagctgctcttcccctgacaacaagtgacacaaaaaccgtgtcagagtggataagtcagatggccacactgccccaggcctccaatttggctactagaatcttgcttttaacgctactttttgaggagttgaagctaccttgtgcttgggtggttgaatcaagtggcatccttaatgtcctaatcaaactcttggaagtggttcagccctgcctccaggcagccaaggagcagaaggaagtccagaccccaaagtggatcacaccagtgttgctcctgattgatttctatgaaaagacagccatctcctcaaaaaggagagcccagatgactaagtacctgcaatccaacagcaacaactggcgctggtttgatgatcgctctgggcgttggtgtagttacagtgcaagcaacaatagcactattgattctgcctggaaatctggagagacaagcgtgcgattcactgcaggccgaagaagatacacggtccaattcactacaatggtgcaggttaatgaggaaacagggaaccgacgccctgtgatgctgactctcctcagggtacctcggctgaataaaaattcaaaaaacagcaatggacaggaactagagaagacgctggaagaaagcaaagaaatggatatcaaacgtaaagaaaataaaggcaatgatacccctttggccctagagagtacaaacactgaaaaggagacaagcctggaggaaacaaaaatcggggagatcctgatccagggcttgacagaagatatggtgactgttttaatccgggcctgcgtgagcatgctgggagtccctgtggacccagatactttgcatgccacccttcgtctctgtctgaggctcacccgggaccacaaatatgccatgatgtttgcagaactgaagagtacccgcatgatcttgaatttgacccagagctcaggcttcaatgggtttactcccctggtcacccttctcttaagacacatcattgaggacccctgtacccttcgtcataccatggaaaaggttgttcgctcagcagctacaagtggagctggtagcactacctctggtgttgtgtctggcagcctcggctctcgggagatcaactacatccttcgtgtccttgggccagccgcatgccgcaatccagacatattcacagaagtggccaactgctgtatccgcatcgcccttcctgcccctcgaggctcaggaactgcttcagatgatgaatttgagaatcttagaattaaaggccctaatgctgtacagctggtgaagaccacccctttgaagccctcacctctgcctgtcatccctgatactatcaaggaagtgatctatgatatgctgaatgctctggctgcataccatgctccagaggaagcagataaatctgatcctaaacctggggttatgacccaagaggttggccagctcctgcaagacatgggtgatgatgtataccagcagtaccggtcacttacgcgtcagagcagtgactttgatacgcagtcaggtttttccattaatagtcaggtctttgctgcagatggtgcctccactgagacttccgcatctgggacctcccaaggagaggcttcaactccagaggagtctcgagatgggaagaaagataaagaaggggaccgggcctctgaggaaggcaaacagaaaggcaagggcagcaaacctttaatgcctacctccactatccttcgtcttctggcagagttggtgaggtcctatgttggtattgctaccctgattgccaactacagctacactgtgggccagtctgaactgatcaaagaggactgcagtgtgctagcttttgttctggaccacctgctcccacatacccagaatgcagaagacaaggacacccctgccttggcccgcctgttcctcgcaagcctggctgctgcagggagtggcacagatgcccaggtggccctagtgaatgaagtaaaagcagcccttggacgggcactggctatggctgagagtacagagaaacatgccaggcttcaggcagtgatgtgtatcatcagtactatcatggagtcctgcccctccacctccagcttctacagcagtgccacagcgaagacccagcacaatggcatgaacaacatcattcggcttttcctgaagaagggactggttaatgacctggccagagtacctcacagcttagacctgtccagtcccaacatggccaacacagtcaatgctgctctgaagcctttggaaacactttcccggattgtgaaccagcccagtagcctttttggcagcaagagtgcttctagcaagaacaagtctgagcaggatgcccaaggagcctctcaagattccagtagcaaccagcaggacccaggcgagcctggggaagcagaagtgcaggaggaggatcatgatgtcactcagacagaggtggcagatggggatatcatggatggggaggctgaaaccgactcagtggtgattgctgggcagcctgaggtgctcagttcacaagagatgcaggttgagaatgagctggaggacctgatagatgagttgcttgagagggatggcggatctgggaacagtacaattatagtgagcagaagtggagaggatgaatcacaagaggacgtgctgatggatgaagctccttccaacctcagccaagcttccaccttgcaggccaaccgagaagattccatgaatatcctggaccctgaggatgaggaggagcacactcaggaagaggacagcagtggcagtaacgaggatgaggatgatagtcaggatgaagaggaggaggaggaggaagatgaggaagatgatcaggaggatgatgaaggtgaagagggagatgaagacgatgacgacgatggctctgagatggaattggatgaggattatcctgatatgaacgcttctcccttggtccgatttgagcgctttgaccgggaggatgatctcatcattgagtttgacaacatgttctccagtgctacagacatccccccatccccaggaaatatccctaccacccatccactgatggtgcgccatgcagaccacagttctctgacactgggcagtggctcttcaacaactcgtctcacccagggcatcgggcgcagtcagaggaccctaaggcagctgacggccaatactggccacaccattcatgttcactaccctgggaatcgccagcccaaccctcctcttatactgcagaggttgcttggtccctcagctgctgctgacatccttcagctgagcagcagccttcccctacaaagccggggtcgggcccgcctcctggtaggcaacgatgacgtccacatcatcgcccgttctgatgatgagctgctggatgactttttccatgatcagagcacagctaccagccaagcaggaaccctgtccagcatccccacagccctgacccgctggacagaagaatgcaaagttctcgatgctgagagcatgcatgactgtgtttcagtggttaaagtgtccattgtcaatcacctggaattcctgagggatgaggagctggaagaaaggcgagagaagcgcaggaaacaactggctgaggaagaaacaaagataactgataaaggcaaagaagataaggagaacagggatcagagtgcacagtgtactgcatctaagtcaaatgactccactgaacagaatctctcagatgggacgcctatgcctgacagctacccaacaaccccatcttcaactgatgcagctacatctgagtccaaggagacccttggcactctgcaatcctcacaacagcaaccaacactcccaaccccaccagctttgggagaggttcctcaggagctgcagtctccagctggagaagggggcagctctacacagctattgatgcctgtagagccagaggaattgggtcccacaaggccaagtggggaagcagaaacaactcagatggagttatccccagctcccactataacctcactttccccagagagagctgaggattctgatgcactgacggctgtcagcagtcagctagaaggctctcctatggatacaagcagcctggcttcctgtaccttagaggaggctgtgggtgacacttcagcagctggcagttctgagcagcccagagcaggcagctccactcctggggatgccccaccagctgtggcggaagtgcaaggcaggagtgatgggtcaggggaatctgcccagccacctgaggacagctccccacctgcatcctctgagagctcttccaccagagattctgccgtggccatttctggagcagattcccgaggaatcctagaagagccgttgccttcaacaagcagtgaagaagaagatccccttgcgggtatcagtctccctgaaggtgtggacccctcttttctggctgccctgcctgatgacatccgtcgggaagttctacagaaccagctaggcattcgtccaccaacccggactgccccctccacaaatagctcagcgcctgcagtggtggggaatcctggtgtgactgaagtgagccctgagtttctggctgccctgcctccagccattcaggaggaagtactggcacagcagagagctgagcagcagcgacgagaactagcacagaatgccagctcagacacccctatggaccctgtgaccttcatccagactctgccctcagacctgcgccgtagtgtcctagaggatatggaggacagtgtgttagctgtgatgccacctgacattgcagctgaggctcaagccctgagacgagagcaagaagcccggcagcgacagctcatgcatgagcgtctgtttgggcacagtagcacctccgcactctctgctattctccgaagcccggctttcaccagtcgcttaagtggcaaccgtggggtccagtatactcgccttgctgtgcagagaggtggcaccttccagatggggggtagcagcagccataacaggccttctggcagtaatgtagatactctcctccgcctccgaggacggctccttctggaccacgaagccctttcttgtctcttggtcctactttttgtggatgagccaaagctcaatactagccgtctacaccgagtactgagaaatctctgctaccatgcccagacccgccactgggtcatccgcagtctgctctccatcttgcagcgcagcagtgagagtgagctatgcattgaaacacccaaactcactacaagtgaggaaaagggcaaaaagtcgagcaagagctgtgggtcaagtagccatgagaaccgtcccctggacctgctacacaagatggagtcaaagagctccaaccagctttcctggctctcagtatccatggatgcagccctaggctgcaggactaatatatttcagatccagcgttcaggggggcgtaaacataccgagaagcatgcaagcggtggctccaccgtccacatccatccccaagctgctcctgttgtctgcagacacgttttggatacactcattcaattggccaaggtatttcccagccacttcacacagcagcggaccaaagaaacaaactgtgagagtgatcgggaaaggggcaataaggcctgtagcccatgctcctcacagtcctccagcagtggcatttgcacagacttctgggacttattggtaaaactggacaacatgaatgtcagccggaaaggcaagaactccgtgaagtcagtgccagtgagcgctggcggtgagggggaaacctctccatacagcctcgaggcctctccactggggcagctcatgaacatgttgtcacacccagtcatccgccggagctctctcttaactgagaaactcctcagactcctttctctcatctcaattgctctcccagaaaacaaggtgtcagaagcacaggctaattctggcagcggtgcttcctccaccaccactgccacctcaaccacatctaccaccaccaccactgccgcctccaccacgcccacaccccctactgcacccacccctgtcacttctgctccagccctggttgctgccacggctatttccaccattgtcgtagctgcttcgaccacagtgactacccccacgactgctaccactactgtttcaatttctcccactactaagggcagcaaatctccagcgaaggtgagtgatgggggcagcagcagtacagactttaagatggtgtcctctggcctcactgaaaaccagctacagctctctgtagaggtgttgacatcccactcttgttctgaggaaggcttagaggatgcagccaacgtactactgcagctctcccggggggactctgggacccgggacactgttctcaagctgctactgaatggagcccgccatctgggttataccctttgtaaacaaataggtaccctgctggccgagctgcgggaatacaacctcgagcagcagcggcgagcccaatgtgaaaccctctctcctgatggcctgcctgaggagcagccacagaccaccaagctgaagggcaaaatgcagagcaggtttgacatggctgagaatgtggtaattgtggcatctcagaagcgacctttgggtggccgggagctccagctgccttctatgtccatgttgacatccaagacatctacccagaagttcttcttgagggtactacaggtcatcatccagctccgggacgacacgcgccgggctaacaagaaagccaagcagacaggcaggctaggttcctccggtttaggctcagctagcagcatccaggcagctgttcggcagctggaggctgaggctgatgccattatacaaatggtacgtgagggtcaaagggcgcggagacagcaacaagcagcaacgtcggagtctagccagtcagaggcgtctgtccggagggaggaatcacccatggatgtggaccagccatctcccagtgctcaagatactcaatccattgcctccgatggaaccccacagggggagaaggaaaaggaagaaagaccacctgagttacccctgctcagcgagcagctgagtttggacgagctgtgggacatgcttggggagtgtctaaaggaactagaggaatcccatgaccagcatgcggtgctagtgctacagcctgctgtcgaggccttctttctggtccatgccacagagcgggagagcaagcctcctgtccgagacacccgtgagagccagctggcacacatcaaggacgagcctcctccactctcccctgcccccttaaccccagccacgccttcctcccttgacccattcttctcccgggagccctcatctatgcacatctcctcaagcctgccccctgacacacagaagttccttcgctttgcagagactcaccgcactgtgttaaaccagatcctacggcagtccacgacccaccttgctgatgggccttttgctgtcctggtagactacattcgtgtcctcgactttgatgtcaagcgcaaatatttccgccaagagctggagcgtttagatgaggggctccggaaagaagacatggctgtgcatgtccgtcgtgaccatgtgtttgaagactcctatcgtgagctgcatcgcaaatcccccgaagaaatgaagaatcgattgtatatagtatttgaaggagaagaagggcaggatgctggtgggctcctgcgggagtggtatatgatcatctctcgagagatgtttaaccctatgtatgccttgttccgtacctcacctggtgatcgagtcacctacaccatcaatccatcttcccactgcaaccccaaccacctcagctacttcaagtttgtcggacgcattgtggccaaagctgtatatgacaaccgtcttctggagtgctactttactcgatccttttacaaacacatcttgggcaagtcagtcagatatacagatatggagagtgaagattaccacttctaccaaggtctggtttatctgctggaaaatgatgtctccacactaggctatgacctcaccttcagcactgaggtccaagagtttggagtttgtgaagttcgtgacctcaaacccaatggggccaacatcttggtaacagaggagaataagaaggagtatgtacacctggtatgccagatgagaatgacaggagccatccgcaagcagttggcggctttcttagaaggcttctatgagatcattccaaagcgcctcatttccatcttcactgagcaggagttagagctgcttatatcaggactgcccaccattgacatcgatgatctgaaatccaacactgaataccacaagtaccagtccaactctattcagatccagtggttctggagagcattgcgttctttcgatcaagctgaccgtgccaagttcctccagtttgtcacaggtacttccaaggtacccctgcaaggctttgctgccctcgaaggcatgaatggcattcagaagtttcagatccatcgagatgacaggtccacagatcgcctgccttcagctcacacatgttttaatcagctggatctgcctgcctatgagagctttgagaagctccgccacatgctactgttggctatccaggagtgctctgaaggctttgggctggcctaataaggccctgcccaactccgtggggttttttttaccattgttggacctggggaggggggagttaaaaaaagaaccagaaagaaattgtcaaaaaccaataaatgaaatccaccaactcaccgtgtgtgtcccagctgccccatcttccccagcgcatacctgttcctcttctcattctctccccgccgcctgtttcctcaccttctctcccctttccatgccgtccatgatccccaccccatgtgttttaaaaaggcagtagcctttgcagggacctgtctgtcccaactgtttgaacagtgtgctcctcagattctgtgttcagaaggatttgctgcattgagacttgaaacctttggataggggaaaaaattatatatatatatatttttttgttctgtttgcatttcttaatttgtgcttggaatgtgttgatgtgcacagctaatgattcaatgcgagacaagattggcgtctgtgttgtggaggtttcaaataaagagcactcttcataactcacttttcacaatggagtttttttcaaacttaaaaaaaaaaacaaaaaactcttaagcacatgctaggcatctggagaaaagatggattctccaggaaaccatccctgccctacccgcttgcccacctgcctccaccactggtgcaacttcctccttcagagtcagtttctgcagtcaggagagatgagcagttcaccaggaattgggggtgggggcatctgttttttttttttagaatgggagctgcacttggggatggtgatggtgttagagattgcagcccaggacaaagcatcaccttgctcaaggggaacaaactgcagcaggttgtacaaaacattcagagagctcacttgacccaaccgagggttttacttggtgagcctttctagtagtcttgagtctggggctcagttttagatttttatttcattaatgtttgtttatttctaataaattttaataagcgagtaatttaactaggtcgccagaagaccattatttttgtttgtctatttttgttgtcgtcactccctctctcgtcatctgtctgccagtctgttcacagatcaccttgtagtcccttgtggtttttactccatccagtgcttaaagctgatctaaggacttcgatggttccagccttcaaagaaaaaataatttaataaaaatttagttagaaaaaataaccccaa

SEQ ID NO: 139995 - DNA, 729 bp, Homo sapiens
  Payload ID: 7456
  Gene Symbol: HUWE1
  Gene Name: HECT, UBA and WWE domain containing 1, E3 ubiquitin protein ligase
  ENST ID: ENST00000468322
  CDS Start-End: 1-574
cacgcccacaccccctactgcacccacccctgtcacttctgctccagccctggttgctgccacggctatttccaccattgtcgtagctgcttcgaccacagtgactacccccacgactgctaccactactgtttcaatttctcccactactaagggcagcaaatctccagcgaaggtgagtgatgggggcagcagcagtacagactttaagatggtgtcctctggcctcactgaaaaccagctacagctctctgtagaggtgttgacatcccactcttgttctgaggaaggcttagaggatgcagccaacgtactactgcagctctcccggggggactctgggacccgggacactgttctcaagctgctactgaatggagcccgccatctgggttataccctttgtaaacaaataggtaccctgctggccgagctgcgggaatacaacctcgagcagcagcggcgagcccaatgtgaaaccctctctcctgatggcctgcctgaggagcagccacagaccaccaagctgaagggcaaaatgcagagcaggttcctccggtttaggctcagctagcagcatccaggcagctgttcggcagctggaggctgaggctgatgccattatacaaatgtcggagtctagccagtcagaggcgtctgtccggagggaggaatcacccatggatgtggaccagccatctcccagtgctcaagatactcaatccattg

SEQ ID NO: 139996 - DNA, 688 bp, Homo sapiens
  Payload ID: 7456
  Gene Symbol: HUWE1
  Gene Name: HECT, UBA and WWE domain containing 1, E3 ubiquitin protein ligase
  ENST ID: ENST00000622887
  CDS Start-End: 1-688
ggtctcctgtggaatgatggaagccttattgaaggtcataaagtttcttggcgatgaacaggaccagataacatttgtcaccagagccgtcagagtggttgaccttatcaccaacctggatatggcagcttttcaatcccatagtggactttctatcttcatttatagacttgagcatgaagtagatttgtgccgaaaagaatgtccgtttgtgatcaagccaaagatccagagacccaatactacacaagaaggagaggaaatggaaactgatatggatgttgcagatgtggctatggaaagcagtccaggctcatccatctctatggagcacaggctggatgttgaattaagggcatcaggttccagcagcagcactaacatctcttctggccccagccctggtcccagtcccggccccggcaccggccctggccccggccccggccccggccccggccctggccccggccccggccccggtcctggtcccggccctggccccggccctggccctggcccccgtcctggagtccagtgtattccacaacgagcagcacttctgaaatccatgttgaatttcctcaagaaggccatccaagaccctgctttctcagatggcatacgacatgtgatggatggttctctgcctacctccctgaaacacatcatcagcaatgcagaatac

SEQ ID NO: 139997 - DNA, 3594 bp, Homo sapiens
  Payload ID: 7457
  Gene Symbol: HHAT
  Gene Name: hedgehog acyltransferase
  Uniprot ID: Q5VTY9
  ENST ID: ENST00000261458
  CDS Start-End: 196-1677
aaagggcagctccgggggaaagagggtggcgtcccggggaagcccgcagccgccgccgatgtcgctgggactcggaagtgccgaaagaggggtgttgggaactcgcggcgcgcgtgaacgttgccgtcgccgccgcccgggacagcccggagaaactctcagcgtaggcatcgggaaccttcgtgccaaggagccatgctgccccgatgggaactggcactttacctacttgcctcactaggcttccacttctattccttctatgaagtttacaaagtctccagagaacacgaagaggagctggaccaggaatttgagctggagactgacactttatttggaggattaaagaaggatgcgaccgactttgagtggagcttctggatggaatgggggaagcagtggctggtgtggcttctccttggccacatggtagtgtctcaaatggccacactgctggcaagaaagcacagaccctggattctcatgctctatgggatgtgggcctgctggtgtgtgctggggacccctggtgtggctatggttttgctccataccaccatctctttctgcgtggcccagttccggtctcagctcctgacgtggctctgttctctcctcctcctctccacactgaggctgcagggtgtggaagaagttaagagaaggtggtacaagacagaaaacgagtactacctgctgcagttcacgctgaccgttcgctgcctgtactacaccagcttcagcctggagctctgctggcagcagctgcctgctgcatcgacctcctactcctttccctggatgctggcctatgtcttttattatccagtcttacacaatgggcccatcctcagcttctcggagttcatcaaacagatgcagcagcaggagcatgactccctgaaggccagcctgtgtgtcctggccctggggctgggccgccttctttgctggtggtggctggccgagctgatggctcacctgatgtacatgcatgccatctacagcagcatccccctcctggagactgtctcttgttggaccttaggaggactggcgttagcccaggtgctctttttctacgtgaagtacttggtgctctttggcgtgcctgctctgctcatgcgcctggatggactcactccacccgccctcccccgctgcgtgagcaccatgttcagtttcaccgggatgtggaggtattttgatgttggactgcataatttcttaatcaggtatgtgtacattccagtgggcgggtcccagcatggcctgctggggacactgttttccacggcgatgacatttgcatttgtgagctactggcatggcggctacgactacctctggtgctgggcagcgctcaactggctgggagtcactgtggagaatggagtccggaggctggtggagactccctgcatccaggacagtctggcccgatacttctccccacaagctcgccgtcgattccacgctgcccttgcttcttgttccacctcgatgctgatcctgtccaacctggtatttcttgggggcaatgaggttgggaaaacctactggaataggatcttcatacaaggctggccttgggtgaccctctctgtcctgggattcctgtactgctactcccacgtgggcattgcctgggcccagacctacgccacggactaatgctgttgggcccaggccagtccttgttgctggcctccaaggcaaatagtgcttcaccctgacctctcactccaggacagcctctaagggatttgatctgctcatcttcagttgaatgccctcactccaagactggatgctggatctcatagaaaattcacagccagacaatcttctaatctggagtctttgagatcttctaccccaactcatcattttcctattgaggaaacgggtccagggcagtcgtgtgtcttacccagctacacagggtgacattttggtctagaacctagtctcatgagccctttgcattctttccccttaagcaagaatagaatgtagtggaaatttattgattgagacacagaaatcctgattagtgataggcctgtcttctgggcaatatttctaaaatatttgagtgacattgatgtttaagtgacctccttcatcacatcctgcagtatctccagaagcagcactagggtttgagtttcatgcttcagcccctctgtaggaatgagaccaagccacagctgtcttttgaattacgtagtcgaagaagacggtagcagccctgtagcattctaaggcatctatacccaaggagtcctgtgatctgagcttcagcagggtgatctacatttgggtgcttgtttctgagatttgcagagaagtataacatggtagttcctctaccttacagttaatcgtttcttaataaagaagcagaatttagaaaccacaggatagtgtacccacagatgggtgttatcaaggccagtcatgaggatggtgtcctggagtcttgtccaccctctccatacaagtctcaaaagtcatcctcctactcagtgattcacgtttagtggtttatattattaaggtttgattcaaacagagccttttctgtcctgtagataatctacatgtttgtagaattattttgaatatgtttgaggaaaatgtttaaaatctaaatatactcacataacttgattattcactcctctgaaaagatgctggataggctaccaaagttcccaagtggtagataattcagaagacttgtttgaatttggattttttttttttttggagtggggaagggtataaaggaggcttaaaatttgaatccataatatatctaattacaggagaatttacaacatctcaagtacgtaaattaagttgtcattgagtgaaaggttcacttggacctagtgctgcctcctgtttattacatagcatggcccttatgtcttgagttgaggttatcatctcaatgaggctttagctcctagagtacaggaccattttgttgattgtctttcttcatagcttctctgcttggcaaagagatgggagggggccagatactgactacctggggtaggcacattatgtgttaaagcaagacagaggccagagaggggcaggtagacctgcatagcagcagcctcagcagctgtcttggtaaaggagagagagagacatggggccagtaattccggggtgctcagaagttttaggaggggatgagcctcagggaggagtgagcacctaaatgaacgcagtaaaccttcatggaccaacagtgattgaggatttgtgggcagccagagggagtctgactgaagtttacttggaaagaaagggcttgctaagaaaaaagggagtaaaaatgatgatagggaagtgtctaatgtatgtgcacatataagtaatacaaaagttttgagctcttccaagtataccatttatatacaaacaaataggtttattcattcattaaactactttggaagcgtcagtggatatatttgaaagtggtaatcctgaatctcttttaaactattatatgattcataatggttctcaggaattaataaatgattactgtgtttagctctg

SEQ ID NO: 139998 - DNA, 2714 bp, Homo sapiens
  Payload ID: 7457
  Gene Symbol: HHAT
  Gene Name: hedgehog acyltransferase
  ENST ID: ENST00000367009
  CDS Start-End: 246-797
aaagtagaaaaaccttgtggttcttttggagtgaaagccttgtaataggccccttggggcatgctggggctcatttctagacagtgaggcgtgatgagcaggagagatgaagaaaatctgcttctcttgcaaagtaattccttcatgagacttcattaaaagggtcttcaggaggactggcgttagcccaggtgctctttttctacgtgaagtacttggtgctctttggcgtgcctgctctgctcatgcgcctggatggactcactccacccgccctcccccgctgcgtgagcaccatgttcagtttcaccgggatgtggaggtattttgatgttggactgcataatttcttaatcaggtatgtgtacattccagtgggcgggtcccagcatggcctgctggggacactgttttccacggcgatgacatttgcatttgtgagctactggcatggcggctacgactacctctggtgctgggcagcgctcaactggctgggagtcactgtggagaatggagtccggaggctggtggagactccctgcatccaggacagtctggcccgatacttctccccacaagctcgccgtcgattccacgctgcccttgcttcttgttccacctcgatgctgatcctgtccaacctggtatttcttgggggcaatgaggttgggaaaacctactggaataggatcttcatacaaggctggccttgggtgaccctctctgtcctgggattcctgtactgctactcccacgtgggcattgcctgggcccagacctacgccacggactaatgctgttgggcccaggccagtccttgttgctggcctccaaggcaaatagtgcttcaccctgacctctcactccaggacagcctctaagggatttgatctgctcatcttcagttgaatgccctcactccaagactggatgctggatctcatagaaaattcacagccagacaatcttctaatctggagtctttgagatcttctaccccaactcatcattttcctattgaggaaacgggtccagggcagtcgtgtgtcttacccagctacacagggtgacattttggtctagaacctagtctcatgagccctttgcattctttccccttaagcaagaatagaatgtagtggaaatttattgattgagacacagaaatcctgattagtgataggcctgtcttctgggcaatatttctaaaatatttgagtgacattgatgtttaagtgacctccttcatcacatcctgcagtatctccagaagcagcactagggtttgagtttcatgcttcagcccctctgtaggaatgagaccaagccacagctgtcttttgaattacgtagtcgaagaagacggtagcagccctgtagcattctaaggcatctatacccaaggagtcctgtgatctgagcttcagcagggtgatctacatttgggtgcttgtttctgagatttgcagagaagtataacatggtagttcctctaccttacagttaatcgtttcttaataaagaagcagaatttagaaaccacaggatagtgtacccacagatgggtgttatcaaggccagtcatgaggatggtgtcctggagtcttgtccaccctctccatacaagtctcaaaagtcatcctcctactcagtgattcacgtttagtggtttatattattaaggtttgattcaaacagagccttttctgtcctgtagataatctacatgtttgtagaattattttgaatatgtttgaggaaaatgtttaaaatctaaatatactcacataacttgattattcactcctctgaaaagatgctggataggctaccaaagttcccaagtggtagataattcagaagacttgtttgaatttggattttttttttttttggagtggggaagggtataaaggaggcttaaaatttgaatccataatatatctaattacaggagaatttacaacatctcaagtacgtaaattaagttgtcattgagtgaaaggttcacttggacctagtgctgcctcctgtttattacatagcatggcccttatgtcttgagttgaggttatcatctcaatgaggctttagctcctagagtacaggaccattttgttgattgtctttcttcatagcttctctgcttggcaaagagatgggagggggccagatactgactacctggggtaggcacattatgtgttaaagcaagacagaggccagagaggggcaggtagacctgcatagcagcagcctcagcagctgtcttggtaaaggagagagagagacatggggccagtaattccggggtgctcagaagttttaggaggggatgagcctcagggaggagtgagcacctaaatgaacgcagtaaaccttcatggaccaacagtgattgaggatttgtgggcagccagagggagtctgactgaagtttacttggaaagaaagggcttgctaagaaaaaagggagtaaaaatgatgatagggaagtgtctaatgtatgtgcacatataagtaatacaaaagttttgagctcttccaagtataccatttatatacaaacaaataggtttattcattcattaaactactttggaagcgtcagtggatatatttgaaagtggtaatcctgaatctcttttaaactattatatgattcataatggttctcaggaattaataaatgattactgtgtttagctctg

SEQ ID NO: 139999 - DNA, 3626 bp, Homo sapiens
  Payload ID: 7457
  Gene Symbol: HHAT
  Gene Name: hedgehog acyltransferase
  Uniprot ID: Q5VTY9
  ENST ID: ENST00000367010
  CDS Start-End: 228-1709
agtgcgcccgggcaaaggcggggatctaggcgccgggacaagtccgcgcacggccctgcccacgtcctctctccttggcttcgtccccagcttccggaactgctgcggggagttgcgaactctggtcctcttggcagtatcggcggtgcgcctgcctgcctgctgtgactccagggactctaaaaaactctcagcgtaggcatcgggaaccttcgtgccaaggagccatgctgccccgatgggaactggcactttacctacttgcctcactaggcttccacttctattccttctatgaagtttacaaagtctccagagaacacgaagaggagctggaccaggaatttgagctggagactgacactttatttggaggattaaagaaggatgcgaccgactttgagtggagcttctggatggaatgggggaagcagtggctggtgtggcttctccttggccacatggtagtgtctcaaatggccacactgctggcaagaaagcacagaccctggattctcatgctctatgggatgtgggcctgctggtgtgtgctggggacccctggtgtggctatggttttgctccataccaccatctctttctgcgtggcccagttccggtctcagctcctgacgtggctctgttctctcctcctcctctccacactgaggctgcagggtgtggaagaagttaagagaaggtggtacaagacagaaaacgagtactacctgctgcagttcacgctgaccgttcgctgcctgtactacaccagcttcagcctggagctctgctggcagcagctgcctgctgcatcgacctcctactcctttccctggatgctggcctatgtcttttattatccagtcttacacaatgggcccatcctcagcttctcggagttcatcaaacagatgcagcagcaggagcatgactccctgaaggccagcctgtgtgtcctggccctggggctgggccgccttctttgctggtggtggctggccgagctgatggctcacctgatgtacatgcatgccatctacagcagcatccccctcctggagactgtctcttgttggaccttaggaggactggcgttagcccaggtgctctttttctacgtgaagtacttggtgctctttggcgtgcctgctctgctcatgcgcctggatggactcactccacccgccctcccccgctgcgtgagcaccatgttcagtttcaccgggatgtggaggtattttgatgttggactgcataatttcttaatcaggtatgtgtacattccagtgggcgggtcccagcatggcctgctggggacactgttttccacggcgatgacatttgcatttgtgagctactggcatggcggctacgactacctctggtgctgggcagcgctcaactggctgggagtcactgtggagaatggagtccggaggctggtggagactccctgcatccaggacagtctggcccgatacttctccccacaagctcgccgtcgattccacgctgcccttgcttcttgttccacctcgatgctgatcctgtccaacctggtatttcttgggggcaatgaggttgggaaaacctactggaataggatcttcatacaaggctggccttgggtgaccctctctgtcctgggattcctgtactgctactcccacgtgggcattgcctgggcccagacctacgccacggactaatgctgttgggcccaggccagtccttgttgctggcctccaaggcaaatagtgcttcaccctgacctctcactccaggacagcctctaagggatttgatctgctcatcttcagttgaatgccctcactccaagactggatgctggatctcatagaaaattcacagccagacaatcttctaatctggagtctttgagatcttctaccccaactcatcattttcctattgaggaaacgggtccagggcagtcgtgtgtcttacccagctacacagggtgacattttggtctagaacctagtctcatgagccctttgcattctttccccttaagcaagaatagaatgtagtggaaatttattgattgagacacagaaatcctgattagtgataggcctgtcttctgggcaatatttctaaaatatttgagtgacattgatgtttaagtgacctccttcatcacatcctgcagtatctccagaagcagcactagggtttgagtttcatgcttcagcccctctgtaggaatgagaccaagccacagctgtcttttgaattacgtagtcgaagaagacggtagcagccctgtagcattctaaggcatctatacccaaggagtcctgtgatctgagcttcagcagggtgatctacatttgggtgcttgtttctgagatttgcagagaagtataacatggtagttcctctaccttacagttaatcgtttcttaataaagaagcagaatttagaaaccacaggatagtgtacccacagatgggtgttatcaaggccagtcatgaggatggtgtcctggagtcttgtccaccctctccatacaagtctcaaaagtcatcctcctactcagtgattcacgtttagtggtttatattattaaggtttgattcaaacagagccttttctgtcctgtagataatctacatgtttgtagaattattttgaatatgtttgaggaaaatgtttaaaatctaaatatactcacataacttgattattcactcctctgaaaagatgctggataggctaccaaagttcccaagtggtagataattcagaagacttgtttgaatttggattttttttttttttggagtggggaagggtataaaggaggcttaaaatttgaatccataatatatctaattacaggagaatttacaacatctcaagtacgtaaattaagttgtcattgagtgaaaggttcacttggacctagtgctgcctcctgtttattacatagcatggcccttatgtcttgagttgaggttatcatctcaatgaggctttagctcctagagtacaggaccattttgttgattgtctttcttcatagcttctctgcttggcaaagagatgggagggggccagatactgactacctggggtaggcacattatgtgttaaagcaagacagaggccagagaggggcaggtagacctgcatagcagcagcctcagcagctgtcttggtaaaggagagagagagacatggggccagtaattccggggtgctcagaagttttaggaggggatgagcctcagggaggagtgagcacctaaatgaacgcagtaaaccttcatggaccaacagtgattgaggatttgtgggcagccagagggagtctgactgaagtttacttggaaagaaagggcttgctaagaaaaaagggagtaaaaatgatgatagggaagtgtctaatgtatgtgcacatataagtaatacaaaagttttgagctcttccaagtataccatttatatacaaacaaataggtttattcattcattaaactactttggaagcgtcagtggatatatttgaaagtggtaatcctgaatctcttttaaactattatatgattcataatggttctcaggaattaataaatgattactgtgtttagctctg

SEQ ID NO: 140000 - DNA, 721 bp, Homo sapiens
  Payload ID: 7457
  Gene Symbol: HHAT
  Gene Name: hedgehog acyltransferase
  ENST ID: ENST00000426968
  CDS Start-End: 99-721
aacacgaagaggagctggaccaggaatttgagctggagactgacactttatttggaggattaaagaaggatgcgaccgactttgagtggagcttctggatggaatgggggaagcagtggctggtgtggcttctccttggccacatggtagtgtctcaaatggccacactgctggcaagaaagagaaggtggtacaagacagaaaacgagtactacctgctgcagttcacgctgaccgttcgctgcctgtactacaccagcttcagcctggagctctgctggcagcagctgcctgctgcatcgacctcctactcctttccctggatgctggcctatgtcttttattatccagtcttacacaatgggcccatcctcagcttctcggagttcatcaaacagatgcagcagcaggagcatgactccctgaaggccagcctgtgtgtcctggccctggggctgggccgccttctttgctggtggtggctggccgagctgatggctcacctgatgtacatgcatgccatctacagcagcatccccctcctggagactgtctcttgttggaccttaggaggactggcgttagcccaggtgctctttttctacgtgaagtacttggtgctctttggcgtgcctgctctgctcatgcgcctggatggactcactccacccgccctcccccgctgcgtgagcaccatgttcagtttcaccgggatgtggag

SEQ ID NO: 140001 - DNA, 3575 bp, Homo sapiens
  Payload ID: 7457
  Gene Symbol: HHAT
  Gene Name: hedgehog acyltransferase
  Uniprot ID: Q5VTY9
  ENST ID: ENST00000413764
  CDS Start-End: 177-1658
ctcttggctcaggcttggaggcctccgagcagcaacatcgtcccaattataccccgttggagcatcttcagatcttccactcttttcacaacgcaatcaaaatcttcgtacccattttgcagtagtgatctctaaactctcagcgtaggcatcgggaaccttcgtgccaaggagccatgctgccccgatgggaactggcactttacctacttgcctcactaggcttccacttctattccttctatgaagtttacaaagtctccagagaacacgaagaggagctggaccaggaatttgagctggagactgacactttatttggaggattaaagaaggatgcgaccgactttgagtggagcttctggatggaatgggggaagcagtggctggtgtggcttctccttggccacatggtagtgtctcaaatggccacactgctggcaagaaagcacagaccctggattctcatgctctatgggatgtgggcctgctggtgtgtgctggggacccctggtgtggctatggttttgctccataccaccatctctttctgcgtggcccagttccggtctcagctcctgacgtggctctgttctctcctcctcctctccacactgaggctgcagggtgtggaagaagttaagagaaggtggtacaagacagaaaacgagtactacctgctgcagttcacgctgaccgttcgctgcctgtactacaccagcttcagcctggagctctgctggcagcagctgcctgctgcatcgacctcctactcctttccctggatgctggcctatgtcttttattatccagtcttacacaatgggcccatcctcagcttctcggagttcatcaaacagatgcagcagcaggagcatgactccctgaaggccagcctgtgtgtcctggccctggggctgggccgccttctttgctggtggtggctggccgagctgatggctcacctgatgtacatgcatgccatctacagcagcatccccctcctggagactgtctcttgttggaccttaggaggactggcgttagcccaggtgctctttttctacgtgaagtacttggtgctctttggcgtgcctgctctgctcatgcgcctggatggactcactccacccgccctcccccgctgcgtgagcaccatgttcagtttcaccgggatgtggaggtattttgatgttggactgcataatttcttaatcaggtatgtgtacattccagtgggcgggtcccagcatggcctgctggggacactgttttccacggcgatgacatttgcatttgtgagctactggcatggcggctacgactacctctggtgctgggcagcgctcaactggctgggagtcactgtggagaatggagtccggaggctggtggagactccctgcatccaggacagtctggcccgatacttctccccacaagctcgccgtcgattccacgctgcccttgcttcttgttccacctcgatgctgatcctgtccaacctggtatttcttgggggcaatgaggttgggaaaacctactggaataggatcttcatacaaggctggccttgggtgaccctctctgtcctgggattcctgtactgctactcccacgtgggcattgcctgggcccagacctacgccacggactaatgctgttgggcccaggccagtccttgttgctggcctccaaggcaaatagtgcttcaccctgacctctcactccaggacagcctctaagggatttgatctgctcatcttcagttgaatgccctcactccaagactggatgctggatctcatagaaaattcacagccagacaatcttctaatctggagtctttgagatcttctaccccaactcatcattttcctattgaggaaacgggtccagggcagtcgtgtgtcttacccagctacacagggtgacattttggtctagaacctagtctcatgagccctttgcattctttccccttaagcaagaatagaatgtagtggaaatttattgattgagacacagaaatcctgattagtgataggcctgtcttctgggcaatatttctaaaatatttgagtgacattgatgtttaagtgacctccttcatcacatcctgcagtatctccagaagcagcactagggtttgagtttcatgcttcagcccctctgtaggaatgagaccaagccacagctgtcttttgaattacgtagtcgaagaagacggtagcagccctgtagcattctaaggcatctatacccaaggagtcctgtgatctgagcttcagcagggtgatctacatttgggtgcttgtttctgagatttgcagagaagtataacatggtagttcctctaccttacagttaatcgtttcttaataaagaagcagaatttagaaaccacaggatagtgtacccacagatgggtgttatcaaggccagtcatgaggatggtgtcctggagtcttgtccaccctctccatacaagtctcaaaagtcatcctcctactcagtgattcacgtttagtggtttatattattaaggtttgattcaaacagagccttttctgtcctgtagataatctacatgtttgtagaattattttgaatatgtttgaggaaaatgtttaaaatctaaatatactcacataacttgattattcactcctctgaaaagatgctggataggctaccaaagttcccaagtggtagataattcagaagacttgtttgaatttggattttttttttttttggagtggggaagggtataaaggaggcttaaaatttgaatccataatatatctaattacaggagaatttacaacatctcaagtacgtaaattaagttgtcattgagtgaaaggttcacttggacctagtgctgcctcctgtttattacatagcatggcccttatgtcttgagttgaggttatcatctcaatgaggctttagctcctagagtacaggaccattttgttgattgtctttcttcatagcttctctgcttggcaaagagatgggagggggccagatactgactacctggggtaggcacattatgtgttaaagcaagacagaggccagagaggggcaggtagacctgcatagcagcagcctcagcagctgtcttggtaaaggagagagagagacatggggccagtaattccggggtgctcagaagttttaggaggggatgagcctcagggaggagtgagcacctaaatgaacgcagtaaaccttcatggaccaacagtgattgaggatttgtgggcagccagagggagtctgactgaagtttacttggaaagaaagggcttgctaagaaaaaagggagtaaaaatgatgatagggaagtgtctaatgtatgtgcacatataagtaatacaaaagttttgagctcttccaagtataccatttatatacaaacaaataggtttattcattcattaaactactttggaagcgtcagtggatatatttgaaagtggtaatcctgaatctcttttaaactattatatgattcataatggttctcaggaattaataaatgattactgtgtttagctctg

SEQ ID NO: 140002 - DNA, 3507 bp, Homo sapiens
  Payload ID: 7457
  Gene Symbol: HHAT
  Gene Name: hedgehog acyltransferase
  Uniprot ID: Q5VTY9
  ENST ID: ENST00000545154
  CDS Start-End: 106-1590
acggcggcaggggcgtgctcggaggacgcgcgctgcgctgctcctccaaagggcagctccgggggaaagagggtggcgtcccggggaagcccgcagccgccgccgatgtcgctgggactcggaagtgccgaaagaggggtgttgggaactcgcggcgcgcgtgaacgttgccgtcgccgccgcccgggacagcccggagaacacgaagaggagctggaccaggaatttgagctggagactgacactttatttggaggattaaagaaggatgcgaccgactttgagtggagcttctggatggaatgggggaagcagtggctggtgtggcttctccttggccacatggtagtgtctcaaatggccacactgctggcaagaaagcacagaccctggattctcatgctctatgggatgtgggcctgctggtgtgtgctggggacccctggtgtggctatggttttgctccataccaccatctctttctgcgtggcccagttccggtctcagctcctgacgtggctctgttctctcctcctcctctccacactgaggctgcagggtgtggaagaagttaagagaaggtggtacaagacagaaaacgagtactacctgctgcagttcacgctgaccgttcgctgcctgtactacaccagcttcagcctggagctctgctggcagcagctgcctgctgcatcgacctcctactcctttccctggatgctggcctatgtcttttattatccagtcttacacaatgggcccatcctcagcttctcggagttcatcaaacagatgcagcagcaggagcatgactccctgaaggccagcctgtgtgtcctggccctggggctgggccgccttctttgctggtggtggctggccgagctgatggctcacctgatgtacatgcatgccatctacagcagcatccccctcctggagactgtctcttgttggaccttaggaggactggcgttagcccaggtgctctttttctacgtgaagtacttggtgctctttggcgtgcctgctctgctcatgcgcctggatggactcactccacccgccctcccccgctgcgtgagcaccatgttcagtttcaccgggatgtggaggtattttgatgttggactgcataatttcttaatcaggtatgtgtacattccagtgggcgggtcccagcatggcctgctggggacactgttttccacggcgatgacatttgcatttgtgagctactggcatggcggctacgactacctctggtgctgggcagcgctcaactggctgggagtcactgtggagaatggagtccggaggctggtggagactccctgcatccaggacagtctggcccgatacttctccccacaagctcgccgtcgattccacgctgcccttgcttcttgttccacctcgatgctgatcctgtccaacctggtatttcttgggggcaatgaggttgggaaaacctactggaataggatcttcatacaaggctggccttgggtgaccctctctgtcctgggattcctgtactgctactcccacgtgggcattgcctgggcccagacctacgccacggactaatgctgttgggcccaggccagtccttgttgctggcctccaaggcaaatagtgcttcaccctgacctctcactccaggacagcctctaagggatttgatctgctcatcttcagttgaatgccctcactccaagactggatgctggatctcatagaaaattcacagccagacaatcttctaatctggagtctttgagatcttctaccccaactcatcattttcctattgaggaaacgggtccagggcagtcgtgtgtcttacccagctacacagggtgacattttggtctagaacctagtctcatgagccctttgcattctttccccttaagcaagaatagaatgtagtggaaatttattgattgagacacagaaatcctgattagtgataggcctgtcttctgggcaatatttctaaaatatttgagtgacattgatgtttaagtgacctccttcatcacatcctgcagtatctccagaagcagcactagggtttgagtttcatgcttcagcccctctgtaggaatgagaccaagccacagctgtcttttgaattacgtagtcgaagaagacggtagcagccctgtagcattctaaggcatctatacccaaggagtcctgtgatctgagcttcagcagggtgatctacatttgggtgcttgtttctgagatttgcagagaagtataacatggtagttcctctaccttacagttaatcgtttcttaataaagaagcagaatttagaaaccacaggatagtgtacccacagatgggtgttatcaaggccagtcatgaggatggtgtcctggagtcttgtccaccctctccatacaagtctcaaaagtcatcctcctactcagtgattcacgtttagtggtttatattattaaggtttgattcaaacagagccttttctgtcctgtagataatctacatgtttgtagaattattttgaatatgtttgaggaaaatgtttaaaatctaaatatactcacataacttgattattcactcctctgaaaagatgctggataggctaccaaagttcccaagtggtagataattcagaagacttgtttgaatttggattttttttttttttggagtggggaagggtataaaggaggcttaaaatttgaatccataatatatctaattacaggagaatttacaacatctcaagtacgtaaattaagttgtcattgagtgaaaggttcacttggacctagtgctgcctcctgtttattacatagcatggcccttatgtcttgagttgaggttatcatctcaatgaggctttagctcctagagtacaggaccattttgttgattgtctttcttcatagcttctctgcttggcaaagagatgggagggggccagatactgactacctggggtaggcacattatgtgttaaagcaagacagaggccagagaggggcaggtagacctgcatagcagcagcctcagcagctgtcttggtaaaggagagagagagacatggggccagtaattccggggtgctcagaagttttaggaggggatgagcctcagggaggagtgagcacctaaatgaacgcagtaaaccttcatggaccaacagtgattgaggatttgtgggcagccagagggagtctgactgaagtttacttggaaagaaagggcttgctaagaaaaaagggagtaaaaatgatgatagggaagtgtctaatgtatgtgcacatataagtaatacaaaagttttgagctcttccaagtataccatttatatacaaacaaataggtttattcattcattaaactactttggaagcgtcagtggatatatttgaaagtggtaatcctgaatctcttttaaactattatatgattcataatggttctcaggaattaataaatgattactgtgtttagctctg

SEQ ID NO: 140003 - DNA, 2864 bp, Homo sapiens
  Payload ID: 7457
  Gene Symbol: HHAT
  Gene Name: hedgehog acyltransferase
  ENST ID: ENST00000545781
  CDS Start-End: 284-532
agagacagagggtgcagagaaccccagcggcagggactgaagggaggtgatggctgggagacgggaaaggatgcgaccgactttgagtggagcttctggatggaatgggggaagcagtggctggtgtggcttctccttggccacatggtagtgtctcaaatggccacactgctggcaagaaaggtattttgatgttggactgcataatttcttaatcaggtatgtgtacattccagtgggcgggtcccagcatggcctgctggggacactgttttccacggcgatgacatttgcatttgtgagctactggcatggcggctacgactacctctggtgctgggcagcgctcaactggctgggagtcactgtggagaatggagtccggaggctggtggagactccctgcatccaggacagtctggtgagcaggatccttgctgctgtgttaggggacagtggaactaggcagatcaggtttattagggatggggccatcagattccctgcccccactatgggccctttctactaggttggttcaaagtccatatgcctagaggcaagacagctggaaaagaagcttctgtagtgcatatatgtgtgtttgtgcatgggtgtgtgtgtgtatatataactataaaaaatgtattatgtaaaaattagaacatttaaacaagaaaataacctctcaacagaaaccatgttaagatccattcttctaaattttttccatgtgtatatacaaacagacatatgtatataacattaaaacaaatgctattacagagagatgattgtatcgggaccacctttttaagtcactgagtccatacctaaccaccctttttaatggctacatagaattcccttacgtggatatgccataatttattttagtctcctattattagtaatcatattattctaaagattttttgcaactatcaactgtattaagatgaatatcataaccaggatgaattctcgtaagtgaaatttccaggttcaaggtttttctcatctttaatgttcattatgtatattgcttattaactcttaactgccctgtagacaaaagtacactaatttgtatttctaccaatggtgcataagaatgaccttgctaatactgagtataactggaattttaaatccttgataggtattgtatatagtagtataaaaaacagctaaggtttttaagaagcagttcaactttacaggaaaatgatttggaaaatcaattaagcatttctctttacacatatattttaagtgattttaaactatgggcatagcttttatcttgcgaatgtgatatatgatatattacaatcttgtaggaaatcatcagttctgaagatgtagcaatattcctctaaccccgaaaaaagtagctaaaaagaaatgtgctggcatcagtgttcatggcaggcaatcacacacagaaaatttgaaaaatgattaatgtggctacattccacccagtgtgaataactaaagcaaatgcactttaaaaagccctgtcaaaacagaatacatttacatatgtttttataaagatagccatagtacaagtggacagttatttcaataaaaactgaaataaaccgagtagtcaaacaacacattggaggggatttaaatatgctcatgtatgtataaagataaatatttttccagccatcagcaggaaagaaatgccagtggattctaacagaaaatgttatttcagtgaaagccatggctatgtaacacacaggaaaaccaaaaaggatggtatcataaagattttaatcttcatcctcaaatctgagcattctgctccaaagcctgaaaacacagttaccacctttgaaagtcagaaggttcttttcagcccagtctgtagccctgcaacacatttctgtgctctttcatgaagcaagtaacattaaccttgaacttaatgttaagcagtgctctgtggcctttgagccatagcttatgctagtaataattttagaaatctaaaacattcgagtaacccaactgtgccatgtagcctgtgacctgttcattttggttcaaaataaatcaaggcatcaagcacacttactcacaggatgaagctcttgcttgtctaccttgctccatcacaccttgctccaggactcactcattcacctcacttgaccttccatctacaattcaggtaccttggtacatagtaatttttgatatgcatttttttggcaaaatatttgtcttatatgttgcaagtatgatgtttggcttgcatatttattgagcaagaatatatgaaacttatttttatcacctacaagcctggtaggcagttacagctatttagacgatggactccttgagtacatggccaggttcccattactctgtttatccccattgtctgagtgagcctcagtgttaaatcagtgcacaattagtgctttcatatcaggttgattatttagttcttcctccacttgcccagacatagaatcttcctccagtaccctgtttcttatgtagttccacacaacatccaaatgcacacaattttttgagtaaactatttccccacttaggttacccttcttccctctcttttcatgaatcaatttcctgttcttctgtcaaaatccaaatgaagacttactggctttgtgagttaattatgcatgcccctcacatcctcagtagtattcagagttctccagagaaacagatcaataggatgtgtgtgtattttggtagggggatagggatgacggtaaagaaatttagtatacagaattagaccatgtgattttgtaggctgagaaattcagacccaggagagctgatggtgtaagttccagtcc

SEQ ID NO: 140004 - DNA, 3446 bp, Homo sapiens
  Payload ID: 7457
  Gene Symbol: HHAT
  Gene Name: hedgehog acyltransferase
  Uniprot ID: Q5VTY9
  ENST ID: ENST00000537898
  CDS Start-End: 243-1529
acggcggcaggggcgtgctcggaggacgcgcgctgcgctgctcctccaaagggcagctccgggggaaagagggtggcgtcccggggaagcccgcagccgccgccgatgtcgctgggactcggaagtgccgaaagaggggtgttgggaactcgcggcgcgcgtgaacgttgccgtcgccgccgcccgggacagcccggagaaactctcagcgtaggcatcgggaaccttcgtgccaaggagccatgctgccccgatgggaactggcactttacctacttgcctcactaggcttccacttctattccttctatgaagtttacaaagtctccagagaacacgaagaggagctggaccaggaatttgagctggagactgacactttatttggaggattaaagaaggatgcgaccgactttgagtggagcttctggatggaatgggggaagcagtggctggtgtggcttctccttggccacatggtagtgtctcaaatggccacactgctggcaagaaagagaaggtggtacaagacagaaaacgagtactacctgctgcagttcacgctgaccgttcgctgcctgtactacaccagcttcagcctggagctctgctggcagcagctgcctgctgcatcgacctcctactcctttccctggatgctggcctatgtcttttattatccagtcttacacaatgggcccatcctcagcttctcggagttcatcaaacagatgcagcagcaggagcatgactccctgaaggccagcctgtgtgtcctggccctggggctgggccgccttctttgctggtggtggctggccgagctgatggctcacctgatgtacatgcatgccatctacagcagcatccccctcctggagactgtctcttgttggaccttaggaggactggcgttagcccaggtgctctttttctacgtgaagtacttggtgctctttggcgtgcctgctctgctcatgcgcctggatggactcactccacccgccctcccccgctgcgtgagcaccatgttcagtttcaccgggatgtggaggtattttgatgttggactgcataatttcttaatcaggtatgtgtacattccagtgggcgggtcccagcatggcctgctggggacactgttttccacggcgatgacatttgcatttgtgagctactggcatggcggctacgactacctctggtgctgggcagcgctcaactggctgggagtcactgtggagaatggagtccggaggctggtggagactccctgcatccaggacagtctggcccgatacttctccccacaagctcgccgtcgattccacgctgcccttgcttcttgttccacctcgatgctgatcctgtccaacctggtatttcttgggggcaatgaggttgggaaaacctactggaataggatcttcatacaaggctggccttgggtgaccctctctgtcctgggattcctgtactgctactcccacgtgggcattgcctgggcccagacctacgccacggactaatgctgttgggcccaggccagtccttgttgctggcctccaaggcaaatagtgcttcaccctgacctctcactccaggacagcctctaagggatttgatctgctcatcttcagttgaatgccctcactccaagactggatgctggatctcatagaaaattcacagccagacaatcttctaatctggagtctttgagatcttctaccccaactcatcattttcctattgaggaaacgggtccagggcagtcgtgtgtcttacccagctacacagggtgacattttggtctagaacctagtctcatgagccctttgcattctttccccttaagcaagaatagaatgtagtggaaatttattgattgagacacagaaatcctgattagtgataggcctgtcttctgggcaatatttctaaaatatttgagtgacattgatgtttaagtgacctccttcatcacatcctgcagtatctccagaagcagcactagggtttgagtttcatgcttcagcccctctgtaggaatgagaccaagccacagctgtcttttgaattacgtagtcgaagaagacggtagcagccctgtagcattctaaggcatctatacccaaggagtcctgtgatctgagcttcagcagggtgatctacatttgggtgcttgtttctgagatttgcagagaagtataacatggtagttcctctaccttacagttaatcgtttcttaataaagaagcagaatttagaaaccacaggatagtgtacccacagatgggtgttatcaaggccagtcatgaggatggtgtcctggagtcttgtccaccctctccatacaagtctcaaaagtcatcctcctactcagtgattcacgtttagtggtttatattattaaggtttgattcaaacagagccttttctgtcctgtagataatctacatgtttgtagaattattttgaatatgtttgaggaaaatgtttaaaatctaaatatactcacataacttgattattcactcctctgaaaagatgctggataggctaccaaagttcccaagtggtagataattcagaagacttgtttgaatttggattttttttttttttggagtggggaagggtataaaggaggcttaaaatttgaatccataatatatctaattacaggagaatttacaacatctcaagtacgtaaattaagttgtcattgagtgaaaggttcacttggacctagtgctgcctcctgtttattacatagcatggcccttatgtcttgagttgaggttatcatctcaatgaggctttagctcctagagtacaggaccattttgttgattgtctttcttcatagcttctctgcttggcaaagagatgggagggggccagatactgactacctggggtaggcacattatgtgttaaagcaagacagaggccagagaggggcaggtagacctgcatagcagcagcctcagcagctgtcttggtaaaggagagagagagacatggggccagtaattccggggtgctcagaagttttaggaggggatgagcctcagggaggagtgagcacctaaatgaacgcagtaaaccttcatggaccaacagtgattgaggatttgtgggcagccagagggagtctgactgaagtttacttggaaagaaagggcttgctaagaaaaaagggagtaaaaatgatgatagggaagtgtctaatgtatgtgcacatataagtaatacaaaagttttgagctcttccaagtataccatttatatacaaacaaataggtttattcattcattaaactactttggaagcgtcagtggatatatttgaaagtggtaatcctgaatctcttttaaactattatatgattcataatggttctcaggaattaataaatgattactgtgtttagctctg

SEQ ID NO: 140005 - DNA, 3164 bp, Homo sapiens
  Payload ID: 7457
  Gene Symbol: HHAT
  Gene Name: hedgehog acyltransferase
  Uniprot ID: Q5VTY9
  ENST ID: ENST00000541565
  CDS Start-End: 177-1247
ctcttggctcaggcttggaggcctccgagcagcaacatcgtcccaattataccccgttggagcatcttcagatcttccactcttttcacaacgcaatcaaaatcttcgtacccattttgcagtagtgatctctaaactctcagcgtaggcatcgggaaccttcgtgccaaggagccatgctgccccgatgggaactggcactttacctacttgcctcactaggcttccacttctattccttctatgaagtttacaaagtctccagagaacacgaagaggagctggaccaggaatttgagctggagactgacactttatttggaggattaaagaaggatgcgaccgactttgagtggagcttctggatggaatgggggaagcagtggctggtgtggcttctccttggccacatggtagtgtctcaaatggccacactgctggcaagaaagatgcagcagcaggagcatgactccctgaaggccagcctgtgtgtcctggccctggggctgggccgccttctttgctggtggtggctggccgagctgatggctcacctgatgtacatgcatgccatctacagcagcatccccctcctggagactgtctcttgttggaccttaggaggactggcgttagcccaggtgctctttttctacgtgaagtacttggtgctctttggcgtgcctgctctgctcatgcgcctggatggactcactccacccgccctcccccgctgcgtgagcaccatgttcagtttcaccgggatgtggaggtattttgatgttggactgcataatttcttaatcaggtatgtgtacattccagtgggcgggtcccagcatggcctgctggggacactgttttccacggcgatgacatttgcatttgtgagctactggcatggcggctacgactacctctggtgctgggcagcgctcaactggctgggagtcactgtggagaatggagtccggaggctggtggagactccctgcatccaggacagtctggcccgatacttctccccacaagctcgccgtcgattccacgctgcccttgcttcttgttccacctcgatgctgatcctgtccaacctggtatttcttgggggcaatgaggttgggaaaacctactggaataggatcttcatacaaggctggccttgggtgaccctctctgtcctgggattcctgtactgctactcccacgtgggcattgcctgggcccagacctacgccacggactaatgctgttgggcccaggccagtccttgttgctggcctccaaggcaaatagtgcttcaccctgacctctcactccaggacagcctctaagggatttgatctgctcatcttcagttgaatgccctcactccaagactggatgctggatctcatagaaaattcacagccagacaatcttctaatctggagtctttgagatcttctaccccaactcatcattttcctattgaggaaacgggtccagggcagtcgtgtgtcttacccagctacacagggtgacattttggtctagaacctagtctcatgagccctttgcattctttccccttaagcaagaatagaatgtagtggaaatttattgattgagacacagaaatcctgattagtgataggcctgtcttctgggcaatatttctaaaatatttgagtgacattgatgtttaagtgacctccttcatcacatcctgcagtatctccagaagcagcactagggtttgagtttcatgcttcagcccctctgtaggaatgagaccaagccacagctgtcttttgaattacgtagtcgaagaagacggtagcagccctgtagcattctaaggcatctatacccaaggagtcctgtgatctgagcttcagcagggtgatctacatttgggtgcttgtttctgagatttgcagagaagtataacatggtagttcctctaccttacagttaatcgtttcttaataaagaagcagaatttagaaaccacaggatagtgtacccacagatgggtgttatcaaggccagtcatgaggatggtgtcctggagtcttgtccaccctctccatacaagtctcaaaagtcatcctcctactcagtgattcacgtttagtggtttatattattaaggtttgattcaaacagagccttttctgtcctgtagataatctacatgtttgtagaattattttgaatatgtttgaggaaaatgtttaaaatctaaatatactcacataacttgattattcactcctctgaaaagatgctggataggctaccaaagttcccaagtggtagataattcagaagacttgtttgaatttggattttttttttttttggagtggggaagggtataaaggaggcttaaaatttgaatccataatatatctaattacaggagaatttacaacatctcaagtacgtaaattaagttgtcattgagtgaaaggttcacttggacctagtgctgcctcctgtttattacatagcatggcccttatgtcttgagttgaggttatcatctcaatgaggctttagctcctagagtacaggaccattttgttgattgtctttcttcatagcttctctgcttggcaaagagatgggagggggccagatactgactacctggggtaggcacattatgtgttaaagcaagacagaggccagagaggggcaggtagacctgcatagcagcagcctcagcagctgtcttggtaaaggagagagagagacatggggccagtaattccggggtgctcagaagttttaggaggggatgagcctcagggaggagtgagcacctaaatgaacgcagtaaaccttcatggaccaacagtgattgaggatttgtgggcagccagagggagtctgactgaagtttacttggaaagaaagggcttgctaagaaaaaagggagtaaaaatgatgatagggaagtgtctaatgtatgtgcacatataagtaatacaaaagttttgagctcttccaagtataccatttatatacaaacaaataggtttattcattcattaaactactttggaagcgtcagtggatatatttgaaagtggtaatcctgaatctcttttaaactattatatgattcataatggttctcaggaattaataaatgattactgtgtttagctctg

SEQ ID NO: 140006 - DNA, 1750 bp, Homo sapiens
  Payload ID: 7458
  Gene Symbol: HHATL
  Gene Name: hedgehog acyltransferase-like
  Uniprot ID: Q9HCP6
  ENST ID: ENST00000310417
  CDS Start-End: 148-1662
agggcctgaatacacagagcgctgagagagtggggcagtgtggtcacggacacaggtcatgggggccttggcaggagcggttttggcagagggtggggccggtgcctctggaaggtatgaagatgtaaatgaagccctgtccaggctatgggcatcaagacagcattgccggcggctgagctgggcctctactctctggtgctgagtggggccctggcctatgctggccggggcctccttgaggcttcacaagatggggcccacaggaaggccttccgggagtctgtgcgacctggctgggagtacattggccggaagatggatgtggctgacttcgagtgggtgatgtggttcacctcctttcgcaacgtcatcatctttgccctctccggacatgtgctgtttgctaaactctgcacgatggttgccccaaagctccgctcctggatgtatgctgtgtacggggccttggctgtgatgggcacaatgggcccttggtacctgctgctgctgcttggtcactgtgtgggcctctatgtggcctcgcttttgggccagccctggctctgtcttggccttggcttggccagcctggcctccttcaagatggaccccctaatctcttggcagagcgggtttgtaacaggcacttttgatcttcaagaggtgctgtttcatgggggcagcagcttcacagtgctgcgttgcaccagctttgcactggagagctgtgcccaccctgaccgccactactccttagctgacctgctcaagtacaacttctacctgcccttcttcttcttcgggcccatcatgacctttgatcgcttccatgctcaggtgagccaggtggagccagtgagacgcgagggtgagctgtggcacatccgagcccaggcaggcctaagcgtggtggccatcatggccgtcgacatcttctttcacttcttctacatcctcactatccccagcgacctcaagttcgccaaccgcctcccagacagtgccctcgctggcctagcctattcaaacctggtgtatgactgggtgaaggcggccgtcctctttggtgttgtcaacactgtggcatgcctcgaccacctggacccaccccagcctcccaagtgcatcaccgcactctacgtctttgcggaaacgcactttgaccgtggcatcaacgactggctttgcaaatatgtgtataaccacattggtggggagcattccgctgtgatcccagagctggcagccacagtggccacatttgccatcaccacactgtggcttgggccttgtgacattgtctacctgtggtcattccttaactgctttggcctcaactttgagctctggatgcaaaaactggcagagtgggggcccctagcacgaattgaggcctctctgtcagtgcagatgtcccgtagggtccgggccctgtttggagccatgaacttctgggccatcatcatgtacaaccttgtgagcctgaacagcctcaaattcacagagctggttgcccggcgcctgctactcacagggttcccccagaccacgctgtccatcctgtttgtcacctactgtggcgtccagctggtaaaggagcgtgagcgaaccttggcactggaggaggagcagaagcaggacaaagagaagccggagtaggagggagcgggtagagggatgggctctgctcagctattcttgggccagatggggcctgaccgatagaataaaagacttttctacaaca

SEQ ID NO: 140007 - DNA, 915 bp, Homo sapiens
  Payload ID: 7458
  Gene Symbol: HHATL
  Gene Name: hedgehog acyltransferase-like
  ENST ID: ENST00000416756
  CDS Start-End: 222-915
agctctgcagcactcggctctgctccactctgctcagctccgctccaggaaggccacctcctcctccccctcctcctcccgctgtcaccactcaccgctcataacctcaagggggtggggaccccagggctggacacaccccaccgtggccccagagctcagccggtcgcacggacggacagttggaagccggaccccagagcctgagccctgtccaggctatgggcatcaagacagcattgccggcggctgagctgggcctctactctctggtgctgagtggggccctggcctatgctggccggggcctccttgaggcttcacaagatggggcccacaggaaggccttccgggagtctgtgcgacctggctgggagtacattggccggaagatggatgtggctgacttcgagtgggtgatgtggttcacctcctttcgcaacgtcatcatctttgccctctccggacatgtgctgtttgctaaactctgcacgatggttgccccaaagctccgctcctggatgtatgctgtgtacggggccttggctgtgatgggcacaatgggcccttggtacctgctgctgctgcttggtcactgtgtgggcctctatgtggcctcgcttttgggccagccctggctctgtcttggccttggcttggccagcctggcctccttcaagatggaccccctaatctcttggcagagcgggtttgtaacaggcacttttgatcttcaagaggtgctgtttcatgggggcagcagcttcacagtgctgcgttgcaccagctttgcactggagagctgtgcccaccctgaccgccactactccttagctgacctgctcaagtacaacttctacctgcccttcttcttcttcgggcccatcatgacctttgatcgcttccatgctcagg

SEQ ID NO: 140008 - DNA, 461 bp, Homo sapiens
  Payload ID: 7458
  Gene Symbol: HHATL
  Gene Name: hedgehog acyltransferase-like
  ENST ID: ENST00000426666
  CDS Start-End: 1-373
cgtcctctttggtgttgtcaacactgtggcatgcctcgaccacctggacccaccccagcctcccaagtgcatcaccgcactctacgtctttgcggaaacgcactttgaccgtggcatcaacgactggctttgcaaggtccgggccctgtttggagccatgaacttctgggccatcatcatgtacaaccttgtgagcctgaacagcctcaaattcacagagctggttgcccggcgcctgctactcacagggttcccccagaccacgctgtccatcctgtttgtcacctactgtggcgtccagctggtaaaggagcgtgagcgaaccttggcactggaggaggagcagaagcaggacaaagagaagccggagtaggagggagcgggtagagggatgggctctgctcagctattcttgggccagatggggcctgaccgatagaataaaagacttttctacaaca

SEQ ID NO: 140009 - DNA, 996 bp, Homo sapiens
  Payload ID: 7458
  Gene Symbol: HHATL
  Gene Name: hedgehog acyltransferase-like
  ENST ID: ENST00000457462
  CDS Start-End: 214-996
aggaaggccacctcctcctccccctcctcctcccgctgtcaccactcaccgctcataacctcaagggggtggggaccccagggctggacacaccccaccgtggccccagagctcagccggtcgcacggacggacagttggaagccggaccccagagcctgaggtgggcagtgtgccagggtcccttgcggcctcctcaagccctgtccaggctatgggcatcaagacagcattgccggcggctgagctgggcctctactctctggtgctgagtggggccctggcctatgctggccggggcctccttgaggcttcacaagatggggcccacaggaaggccttccgggagtctgtgcgacctggctgggagtacattggccggaagatggatgtggctgacttcgagtgggtgatgtggttcacctcctttcgcaacgtcatcatctttgccctctccggacatgtgctgtttgctaaactctgcacgatggttgccccaaagagcgggtttgtaacaggcacttttgatcttcaagaggtgctgtttcatgggggcagcagcttcacagtgctgcgttgcaccagctttgcactggagagctgtgcccaccctgaccgccactactccttagctgacctgctcaagtacaacttctacctgcccttcttcttcttcgggcccatcatgacctttgatcgcttccatgctcaggtgagccaggtggagccagtgagacgcgagggtgagctgtggcacatccgagcccaggcaggcctaagcgtggtggccatcatggccgtcgacatcttctttcacttcttctacatcctcactatccccagcgacctcaagttcgccaaccgcctcccagacagtgccctcgctggcctagcctattcaaacctggtgtatgactgggtgaaggcggccgtcctctttggtgttgtcaacactgtggcatgcctcgaccacctggacccaccccagcctcccaag

SEQ ID NO: 140010 - DNA, 1865 bp, Homo sapiens
  Payload ID: 7458
  Gene Symbol: HHATL
  Gene Name: hedgehog acyltransferase-like
  Uniprot ID: Q9HCP6
  ENST ID: ENST00000441594
  CDS Start-End: 263-1777
agcagctctgcagcactcggctctgctccactctgctcagctccgctccaggaaggccacctcctcctccccctcctcctcccgctgtcaccactcaccgctcataacctcaagggggtggggaccccagggctggacacaccccaccgtggccccagagctcagccggtcgcacggacggacagttggaagccggaccccagagcctgaggtgggcagtgtgccagggtcccttgcggcctcctcaagccctgtccaggctatgggcatcaagacagcattgccggcggctgagctgggcctctactctctggtgctgagtggggccctggcctatgctggccggggcctccttgaggcttcacaagatggggcccacaggaaggccttccgggagtctgtgcgacctggctgggagtacattggccggaagatggatgtggctgacttcgagtgggtgatgtggttcacctcctttcgcaacgtcatcatctttgccctctccggacatgtgctgtttgctaaactctgcacgatggttgccccaaagctccgctcctggatgtatgctgtgtacggggccttggctgtgatgggcacaatgggcccttggtacctgctgctgctgcttggtcactgtgtgggcctctatgtggcctcgcttttgggccagccctggctctgtcttggccttggcttggccagcctggcctccttcaagatggaccccctaatctcttggcagagcgggtttgtaacaggcacttttgatcttcaagaggtgctgtttcatgggggcagcagcttcacagtgctgcgttgcaccagctttgcactggagagctgtgcccaccctgaccgccactactccttagctgacctgctcaagtacaacttctacctgcccttcttcttcttcgggcccatcatgacctttgatcgcttccatgctcaggtgagccaggtggagccagtgagacgcgagggtgagctgtggcacatccgagcccaggcaggcctaagcgtggtggccatcatggccgtcgacatcttctttcacttcttctacatcctcactatccccagcgacctcaagttcgccaaccgcctcccagacagtgccctcgctggcctagcctattcaaacctggtgtatgactgggtgaaggcggccgtcctctttggtgttgtcaacactgtggcatgcctcgaccacctggacccaccccagcctcccaagtgcatcaccgcactctacgtctttgcggaaacgcactttgaccgtggcatcaacgactggctttgcaaatatgtgtataaccacattggtggggagcattccgctgtgatcccagagctggcagccacagtggccacatttgccatcaccacactgtggcttgggccttgtgacattgtctacctgtggtcattccttaactgctttggcctcaactttgagctctggatgcaaaaactggcagagtgggggcccctagcacgaattgaggcctctctgtcagtgcagatgtcccgtagggtccgggccctgtttggagccatgaacttctgggccatcatcatgtacaaccttgtgagcctgaacagcctcaaattcacagagctggttgcccggcgcctgctactcacagggttcccccagaccacgctgtccatcctgtttgtcacctactgtggcgtccagctggtaaaggagcgtgagcgaaccttggcactggaggaggagcagaagcaggacaaagagaagccggagtaggagggagcgggtagagggatgggctctgctcagctattcttgggccagatggggcctgaccgatagaataaaagacttttctacaaca

SEQ ID NO: 140011 - DNA, 491 bp, Homo sapiens
  Payload ID: 7458
  Gene Symbol: HHATL
  Gene Name: hedgehog acyltransferase-like
  ENST ID: ENST00000442469
  CDS Start-End: 139-491
agttggaagccggaccccagagcctgaggtgggcagtgtgccagggtcccttgcggcctcctcaaggtcatgggggccttggcaggagcggttttggcagagggtggggccggtgcctctggaagccctgtccaggctatgggcatcaagacagcattgccggcggctgagctgggcctctactctctggtgctgagtggggccctggcctatgctggccggggcctccttgaggcttcacaagatggggcccacaggaaggccttccgggagtctgtgcgacctggctgggagtacattggccggaagatggatgtggctgacttcgagtgggtgatgtggttcacctcctttcgcaacgtcatcatctttgccctctccggacatgtgctgtttgctaaactctgcacgatggttgccccaaagctccgctcctggatgtatgctgtgtacggggccttggctgtgatgggcacaatgggcccttggta

SEQ ID NO: 140012 - DNA, 487 bp, Homo sapiens
  Payload ID: 7458
  Gene Symbol: HHATL
  Gene Name: hedgehog acyltransferase-like
  ENST ID: ENST00000417472
  CDS Start-End: 139-487
agttggaagccggaccccagagcctgaggtgggcagtgtgccagggtcccttgcggcctcctcaaggtcatgggggccttggcaggagcggttttggcagagggtggggccggtgcctctggaagccctgtccaggctatgggcatcaagacagcattgccggcggctgagctgggcctctactctctggtgctgagtggggccctggcctatgctggccggggcctccttgaggcttcacaagatggggcccacaggaaggccttccgggagtctgtgcgacctggctgggagtacattggccggaagatggatgtggctgacttcgagtgggtgatgtggttcacctcctttcgcaacgtcatcatctttgccctctccggacatgtgctgtttgctaaactctgcacgatggttgccccaaagagcgggtttgtaacaggcacttttgatcttcaagaggtgctgtttcatgggggcagcagct

SEQ ID NO: 140013 - DNA, 690 bp, Homo sapiens
  Payload ID: 7458
  Gene Symbol: HHATL
  Gene Name: hedgehog acyltransferase-like
  ENST ID: ENST00000455195
  CDS Start-End: 80-690
cacgcaggtcatgggggccttggcaggagcggttttggcagagggtggggccggtgcctctggaagccctgtccaggctatgggcatcaagacagcattgccggcggctgagctgggcctctactctctggtgctgagtggggccctggcctatgctggccggggcctccttgaggcttcacaagatggggcccacaggaaggccttccgggagtctgtgcgacctggctgggagtacattggccggaagatggatgtggctgacttcgagtgggtgatgtggttcacctcctttcgcaacgtcatcatctttgccctctccggacatgtgctgtttgctaaactctgcacgatggttgccccaaagctccgctcctggatgtatgctgtgtacggggccttggctgtgatgggcacaatgggcccttggtacctgctgctgctgcttggtcactgtgtgggcctctatgtggcctcgcttttgggccagccctggctctgtcttggccttggcttggccagcctggcctccttcaagatggaccccctaatctcttggcagagcgggtttgtaacaggcacttttgatcttcaagaggtgctgtttcatgggggcagcagcttcacagtgctgcgttgcaccagctttgcactggagagctgtgcccaccctgaccgccactactcctt

SEQ ID NO: 140014 - DNA, 10072 bp, Homo sapiens
  Payload ID: 7459
  Gene Symbol: HHIP
  Gene Name: hedgehog interacting protein
  Uniprot ID: Q96QV1
  ENST ID: ENST00000296575
  CDS Start-End: 656-2758
tcgcgcgggggccgccccctccccttccctccaccctgggcgggggcgcgcgagaagcggtgacgtcaaggggcgcgctgtggcagcacctccccgcgcgctagttaaaaagaagaagaaaagagggaacgaaacatgagaggctgtgtgagaagctgcagccgccggcagaggagacctcagcatcatctagagcccagcgctggccctgcctccgcctgccccgccgccgccgtcgccgtttctgttcctgctactgtcccacctaaacaactcccgttacacggacaagtgaacatctgtggctgtcctctccttttcttcctcctcttccaactccttctcctcctcccacttcccagccgcagcagaaagcccccaacccaactgacactggcacaactgcaaacggtgtcatccgcacaactttatctcgctcctcgggctcccctaaggcattggacccatcgccgcgtcttttattttttgcaaagttgcatcgctgtacatatttttgtccccgccacctccctctgtctctggagtgccctacagccccgcaaactcctcctggagctgcgccctagtgcccctgctgggcagtggcgttcccccccatcctcccgcgcccagcccctgctgctctgggcagacgatgctgaagatgctctcctttaagctgctgctgctggccgtggctctgggcttctttgaaggagatgctaagtttggggaaagaaacgaagggagcggagcaaggaggagaaggtgcctgaatgggaaccccccgaagcgcctgaaaaggagagacaggaggatgatgtcccagctggagctgctgagtgggggagagatgctgtgcggtggcttctaccctcggctgtcctgctgcctgcggagtgacagcccggggctagggcgcctggagaataagatattttctgttaccaacaacacagaatgtgggaagttactggaggaaatcaaatgtgcactttgctctccacattctcaaagcctgttccactcacctgagagagaagtcttggaaagagacctagtacttcctctgctctgcaaagactattgcaaagaattcttttacacttgccgaggccatattccaggtttccttcaaacaactgcggatgagttttgcttttactatgcaagaaaagatggtgggttgtgctttccagattttccaagaaaacaagtcagaggaccagcatctaactacttggaccagatggaagaatatgacaaagtggaagagatcagcagaaagcacaaacacaactgcttctgtattcaggaggttgtgagtgggctgcggcagcccgttggtgccctgcatagtggggatggctcgcaacgtctcttcattctggaaaaagaaggttatgtgaagatacttacccctgaaggagaaattttcaaggagccttatttggacattcacaaacttgttcaaagtggaataaagggaggagatgaaagaggactgctaagcctcgcattccatcccaattacaagaaaaatggaaagttgtatgtgtcctataccaccaaccaagaacggtgggctatcgggcctcatgaccacattcttagggttgtggaatacacagtatccagaaaaaatccacaccaagttgatttgagaacagccagagtctttcttgaagttgcagaactccacagaaagcatctgggaggacaactgctctttggccctgacggctttttgtacatcattcttggtgatgggatgattacactggatgatatggaagaaatggatgggttaagtgatttcacaggctcagtgctacggctggatgtggacacagacatgtgcaacgtgccttattccataccaaggagcaacccacacttcaacagcaccaaccagccccccgaagtgtttgctcatgggctccacgatccaggcagatgtgctgtggatagacatcccactgatataaacatcaatttaacgatactgtgttcagactccaatggaaaaaacagatcatcagccagaattctacagataataaaggggaaagattatgaaagtgagccatcacttttagaattcaagccattcagtaatggtcctttggttggtggatttgtataccggggctgccagtcagaaagattgtatggaagctacgtgtttggagatcgtaatgggaatttcctaactctccagcaaagtcctgtgacaaagcagtggcaagaaaaaccactctgtctcggcactagtgggtcctgtagaggctacttttccggtcacatcttgggatttggagaagatgaactaggtgaagtttacattttatcaagcagtaaaagtatgacccagactcacaatggaaaactctacaaaattgtagatcccaaaagacctttaatgcctgaggaatgcagagccacggtacaacctgcacagacactgacttcagagtgctccaggctctgtcgaaacggctactgcacccccacgggaaagtgctgctgcagtccaggctgggagggggacttctgcagaactgcaaaatgtgagccagcatgtcgtcatggaggtgtctgtgttagaccgaacaagtgcctctgtaaaaaaggatatcttggtcctcaatgtgaacaagtggacagaaacatccgcagagtgaccagggcaggtattcttgatcagatcattgacatgacatcttacttgctggatctaacaagttacattgtatagtttctgggactgtttgaatattctattccaatgggcatttattttttatcctgtcattaaaaaaaaaagactgttatcctgctacacactcctgtgatttcattctcttttattaatttaaaaataatttccagaaatgtgcagatcctctgtgtgtatgtcagcatgtttgttcacatatgcacatacacatactcataacccctatatgcgttgttgcataacagatgattttttaaaatatatacttccttatgcaaagtaatttacacagaaattccattgtaaattgataatggattttttatgttactagaagagattatttgacttcccaggaattttctgtctgtaatcactaaagtcaactttaatagagttttgaaacagtactgtgcaatccgatggatctaattaaaaaaaaggcaatatttttatattaaagtactatactaggagagaatgtttcagaactccctgatgaatttctaagtgagcaacttgatataaaattgtaatcttcatttttgtcagtgtatccagttacagaatgctacacacttacctttttattggctgagaaatctggttatttcatcttaatctcaagattgttttcaagtgttttataattaaatcataatagcatattttaaaatcaatcttcctaaaaggtctgcttttattgtatattttatttaacaataggcactgggtttgtgttacatatttatatattttattttatttttataatatagacatcacctagatgaaacacctttaccctgtcctgtaaaacactaaagttacatttttcaccaacttaattggaaagaaggggagtgagaaagcaaacagtctttaatgtgctgtggatctaatctagcaaggtatccttgtgccaacatgtaatcattaacgacggatgaaaaagcaagaaaacagccaatccttataaaattccagcattaaacatttgtaaagtgcttttcaccatagcaagactgtcagagtctatgttattagaatgttgcagatttccactgaatcgaacctcactggagaagagctcacttgtttttaaaaatcttggctatgtaagctgtcacctgtacaaatttttaacataataattcttgccaaatatgactttaaatgtacgtgttccttcagaactcaatgaaaatactctttggctaatgtatcaataaattttctgtaaatgttctgttcagggttttacagagatgacatgttctgacttaaaactgcaaaaagtctagtagatatttttcttcatggttttcaaagccagctctccacgtttggattttaacaaaatataaggcctctttgcactagtgaaaaaacacgtctactcatgacaagtgcacacccactatggctgtccttcttctgtaaacatccattcctctagaatctaaattgtagagcagtatagattatgcagcgccagctgactttctaaaccttctccttacctttaggaatacaagcctcaatttaaaaaatatattgtagctagtatttctctattgttttaaggtgagagatttgcaattaaagcccagtaagcatttatatagaagccacaatgtagaaagattggttaagtacactgctcttgtcttccatatatgattacttaagtttcaagtgacctcatgccaaatggaaatgggttgagaaatcttggttcagtgcttagtgaacaatagcctgcattaaaaagtgcatgcataattttgcacaatttagattcaattgacagtctattcaaagaagtctcaggattaaatgagcatggagaccaaattgccctcttaccccagaaaaggggtggtcccttctagtcacactaacacttcattggcccaacagtgtgacaaatcttgcaatgaaccatgcagtagcctgcatctgtaggttaatagcaatcttttgtctccattgctttctcttcatagcccttttactgaattccatcacagaaagttttacaattaaaaaaaaatgtcctgacaaccatttttgtaaatggaccttaccatctaattgtcccttattcaacgtgggtgacattaacaaaatgtgaacttcttgtgagggagccagctgtctaaatctgtcaaatcgtgcagttttattacacattctccaattcttcctagtttccctgaaaacaataaggatactgctatatattcagtaaaatctaaaaaaatcaagcattacttcttacatctttaaactttccatctcctccccaaaataaaaggtgttctattgccattagttctactgttttaaaatatctatattaagttgaccaggcccagattttttatacagctttttcccaagtgaaagattttcaagtgacttagaaaaacatatgtgccccaggtgtcattgccttttcttttgtgagtcattagaatgaaaggccaagttcttctcaagagaagatagcaagatccacggatattaagccaagcaaagaaagtaaaatcattggagtcatttctttctgttcttaggagaaaagtagatagcactggctaattgatggcaacatattttaaattaagtggtcaattcaaaaattctctttgaccttttctttcaagtagatttttttaaatgcatgactggagaattatcttcaatgattcatgatgagaggcaggtaggaattggttaagaagtatgagcaggaaaaaattattgtttaatcacatgaaaggcaacatctgttcagttcataaagcacacagtctcgaatggaagaaaaaaaggtccttcgtaagaatactgatgcataagataaagacgaaataatgaaaaagaaaaatgtatattattattcccttgtccattctcaagtttaagctgcggttgtcagttgaatgtgaaatgatgttatagttgttttaaatggttggaaataacctttctactactgtttctgccacactgttgtcctggttcatagaaccttgttttcttgacagttatttaaggtaataaaaggaacacaatttggcagatctttaagtgaaagagagaaaaaatttaagaaattgagtgatggctaaaagtaagtgcttccatccataacttttcttcttggatttttttcaatgtaattattgtaaaatatatttttttattttatcatgaagaatactcggaaggtttctcagattaatgagtatctcataaagagtagagaaaccaacacatacaatatatacacacaacctaaatagaaaactattttctttgtcatttgcatgccccagagaagttacttcttccctatttatttctttgaaaataattacaaaatagtatactaacaattttaatccatttgctgttttttttttttttttggtttctttttttttttttttgagacggagccttgctatgttgcccaggctgcagagcagcacaatctcagctcactacaacctccgcctcccgggttcaagcaattctcctgcctcagcctcccaagtagctgggattacaggtgcccgccaccacacccggctaatttttttgtgtttttagtagagacagggtttcaccatgttggccaggctgatttcaaactccagacttcaagtgatccagccccccaggcctcccaaagtgctaggattacaggcgtgagccaccatgcccagcttccatttgcttttgatattgtttttatctctgagttacaaactatacaagcttaccaggtataaggttagatgctacatctaggagcattcaagatatacattaatttaaacttttattagtctaactttctgttaagtctcttagctttgaaacataaaagagaaatcaagcccaaatttttagaggaaggctaaggtatactattggcagttgtagttttaattgtaattgactgattaaccaagtaatttataaaatgttacctatactgtcagtgttcacctcctctccctccctccttctctctctctctccccctctcgctctctcggctaatatatatgtgtatgtgtatatatatatgtatgtatatatatacacacacacacacacatacatacatacatacatatattctttttccttttaaccacttccctctcctacattttctattggttttgcctaaatagacatgttctcaatacacccatgttgaaggtatcctgggctagattgctgttgattttgctggttatgatcttttctttgtttttctgaaaaatagcctctcttgattccacattttctcaaattctatataacaaataatagtggatagtaaacaaatgacatactaggctgatctattacaatcattgaaagaaataaggaagagcagaaatcactaacagtccagaggctccaattcagctgctctagcatagatacaggaaagacatggagaataacactggggttagctaacagcagggaaagttagtagctatttcctagccaaggaacaaccttctctatggaataattttaagaaaattattccaaatctgtgaggaaaaaataagaagcagttcctcaatggagactttataaatcttaatttcctcacccctgggatgagatttgaagttgcagaggactcagaccaaagtcccatggcagaaaatgtacatatttttaaactactcccaggaagtaaactagtactgtgaatgctggcaataccatcagaaagtttatctttaaaatacctaaaaataaatatatatttgctatcttatcctctttttgtcacacaaacataaattggtcatatatatatttatatatatggttatatatatttggttatatatatatctttatatatatatcttatatatatatctttttatatatatcttatatatatatctttttatatatatcttatatatatatctttatatatatcttatatatatatcttatacatataagatatatgtatatatatatacattatatatatataatatatatatattatatatatataatatatatcttatatatatatatatcttaatacatatatataaccatggaacctgccaaacactaatcctagccaacttcaatccttctttctcttaactatcttctctgaataagttctggacttcaccttaaaataagtttttaggagagtaatatatattcatgggattgtgagggagcattgtagagctgttttcttctcagtcatagtggtggttttcctagctgctatggaaaggtttgttcacttatgagattaggacttttcttaaattcctcattaaatatgaacctaaggcatacccatcatttaccttgattcccatataatttgtataagtcatatataagtccattgacaaaataaaaaaataaataattggattccttgtatcaacagaaagccttgtgcttaaaacctgttattcttctttgagccagactaaacagtaacatttacaaaatggtatcagctcaacattaaatctaaggttacttctcacatacatcataaagtcagccatcatctttcatttaggatttcttggggttttctttttgcatatatagattatgtattacttaaatccaaaatacatgtgtgtatatatatacatatatatgtaacttaatataaatgtttgatgagttatctcaattgactataatcttctaagtcaaaaagaaaacatttaagtacataatataaaaagaactgaacattaacagtaatgggaaattcataatggctaaatatgaaataagctttgtctttgcagttacaaactaattcttgtacattttccttttcactaaaaaaataactaattgatagtttccattcacatgaacaagttataatcaggtttgggatagtatgcccaaaacctatgtttctttactttatattcttaaaatctgagacatgatttttctggaacaaattaagatttcatgtacaatagagtccctttcctaatactgttatgaagaaaccaagttgactaccttatgagagatcagatatttcccttatctcattatattcacagcatatgtttggacatgcgtttcaccaagaaccatgtagtaataagataaatggtaactgaggtactatggaatttttagaacttgattccccaggacatgctacagtaaactaaactatttattcaaaagtaacccaactaattaaagtgaaaaaaaattgttgaatcacaatgaacaaacataaaacaatacttaaatgagaattctgtgtcttttttggttttatctgtgatttattttgtccagtattaaggaatggttatctttatcattcttctaacatgttttggtttctctaatggttcattttcctttagcttgtgaaaattagggcagtttgtccagagccttactcgcaggagacaccagacccaacccatgcttagatttctgttaataaaagggagaagggtatttgaataggtagtaaaggcaggtacaagtttaagggagcagggctatcatatgtactaggtgagatttctataaatgtctgaaaagttacatgcatagtcattggctcaggtaatttctctgaatttgaacttatttgatttatttaaccaagttattataatatgcagttctctttaatcaatcttctattattcaatcatctatccatttattaattcaacaaatatttattaaagtgcctaccatgattatgtgctgtagaaaagacaaggacatttactagggggggattgtgggcccaatcggcatcataagcatgtctgaagcaaaagacaataatcacatccaacggcaccagttcagctcaactttagaattcagcagtaacagtacagatggcctaaagtacatctgtgtgtatctgtacgtgtgcacacacccatgtatatatatttatctatctgtacaaacactacatatgtatacacactatctatgtaaaatataatatatgtataatgcatataaattctaacaagtgtatttgtgttatctttaaaatagaacaattgtatcttgaagtggtaaatgcagagaattggttttattgttgatctgtggatttaatgatttctaggtgaaaaggacgtttaagtgtacaatttcttttcttaatttaatatatttatgtaaatgcatgcctgaaatttggttagattggctgtgttttgtgtcttttaacatgatcaaatgattaaactttatcttatgacttga

SEQ ID NO: 140015 - DNA, 1770 bp, Homo sapiens
  Payload ID: 7459
  Gene Symbol: HHIP
  Gene Name: hedgehog interacting protein
  Uniprot ID: Q96QV1
  ENST ID: ENST00000434550
  CDS Start-End: 505-1467
gaagctgcagccgccggcagaggagacctcagcatcatctagagcccagcgctggccctgcctccgcctgccccgccgccgccgtcgccgtttctgttcctgctactgtcccacctaaacaactcccgttacacggacaagtgaacatctgtggctgtcctctccttttcttcctcctcttccaactccttctcctcctcccacttcccagccgcagcagaaagcccccaacccaactgacactggcacaactgcaaacggtgtcatccgcacaactttatctcgctcctcgggctcccctaaggcattggacccatcgccgcgtcttttattttttgcaaagttgcatcgctgtacatatttttgtccccgccacctccctctgtctctggagtgccctacagccccgcaaactcctcctggagctgcgccctagtgcccctgctgggcagtggcgttcccccccatcctcccgcgcccagcccctgctgctctgggcagacgatgctgaagatgctctcctttaagctgctgctgctggccgtggctctgggcttctttgaaggagatgctaagtttggggaaagaaacgaagggagcggagcaaggaggagaaggtgcctgaatgggaaccccccgaagcgcctgaaaaggagagacaggaggatgatgtcccagctggagctgctgagtgggggagagatgctgtgcggtggcttctaccctcggctgtcctgctgcctgcggagtgacagcccggggctagggcgcctggagaataagatattttctgttaccaacaacacagaatgtgggaagttactggaggaaatcaaatgtgcactttgctctccacattctcaaagcctgttccactcacctgagagagaagtcttggaaagagacctagtacttcctctgctctgcaaagactattgcaaagaattcttttacacttgccgaggccatattccaggtttccttcaaacaactgcggatgagttttgcttttactatgcaagaaaagatggtgggttgtgctttccagattttccaagaaaacaagtcagaggaccagcatctaactacttggaccagatggaagaatatgacaaagtggaagagatcagcagaaagcacaaacacaactgcttctgtattcaggaggttgtgagtgggctgcggcagcccgttggtgccctgcatagtggggatggctcgcaacgtctcttcattctggaaaaagaaggttatgtgaagatacttacccctgaaggagaaattttcaaggagccttatttggacattcacaaacttgttcaaagtggaataaaggttggctttttaaattttatttatttttgtgctggctacgttaattttattttagtgttaccttcctcactgaaggtatttctttgtaataaaagaaagaatcttgcaggagaaaataagggggcaacataagaaacaataattatggcacctgaattaggacagtgacattaaatttctgttatttgttgactattgtgcgctgcaatcgaattgatatttgacatgctttccccatgtaattgacacatttaaaggaatctttggctttataaagtattgtttaaatattgtttaatgggcataacacaggactgtacatcagcatttgctagtagaaacaaagaggtcttttggttattttggcaattgcaaatcattctttcaccatctctgtttttgagtctgtctcataaaaaatactacttatactac

SEQ ID NO: 140016 - DNA, 12866 bp, Homo sapiens
  Payload ID: 7460
  Gene Symbol: HELB
  Gene Name: helicase (DNA) B
  Uniprot ID: Q8NG08
  ENST ID: ENST00000247815
  CDS Start-End: 60-3323
catgaccatgcagttagccagggttttcccgagttgtttgggttgagttcaggagaagcatggccaggtcgagtccgtacctgcgccaacttcagggacctctgctcccacccagggatctggtggaggaggacgacgactacctaaacgacgacgtggaggaggatgaagagtccgtgttcatcgacgccgaggagctctgcagtgggggcgtaaaggctggcagcctccccgggtgcctccgcgtttctatttgtgatgaaaacacacaagagacatgtaaagtgtttggacgttttccgataacaggtgcttggtggagagtgaaggtacaagtaaagcctgtggtgggatcaaggagctatcaatatcaagttcaaggatttccgtcttactttttgcagtctgatatgtcaccaccaaatcaaaaacatatctgtgctctctttcttaaagagtgtgaggtctccagtgatgatgttaataaatttttaacatgggtaaaggaggtatcaaactacaaaaacctaaactttgaaaatcttagggaaacactaagaactttccacaaggaaactggaaggaaagatcaaaagcagcctacacagaatggtcaggaagagttgttcctagacaatgagatgagtcttcctctggaaaacacaattccatttagaaatgtaatgacagctttgcagtttccgaagataatggaattccttccagttcttctgcctcgacactttaaatggatcatagggtcaggttctaaagagatgttgaaagagatagaagagattttaggtacacatccgtggaaacttggatttagtaaaataacctacagagagtggaaactcctgcgatgtgaggcaagttggatagcattttgtcagtgtgagtctcttctccagctgatgactgatttggagaagaatgcattaataatgtattccagactgaagcagatatgtagagaagatgggcacacatatgttgaagtgaatgacttaactttgacattgtcaaatcatatgtcatttcatgctgcttcagagtctctgaagtttttgaaggatattggtgtggtgacatatgagaagtcctgtgtcttcccttatgacctttaccatgctgaaagagccatcgccttttcaatttgtgacctgatgaagaaacctccttggcatttatgtgtcgatgtcgaaaaggtgcttgcctctattcacaccacaaaacctgagaattcaagcgatgatgcattgaatgagagcaaacctgatgaagtaagattagaaaatcctgtggatgttgtggacacacaggacaatggtgaccatatttggactaatggtgaaaatgaaattaatgcagaaataagtgaagttcagctggatcaggatcaggttgaagttccactggatcgggatcaggtggctgctttggaaatgatttgctccaatcctgtgacagtcataagtgggaaaggtggatgtgggaagaccacaatcgttagccgtctttttaagcatatagagcagttggaagaaagagaagtaaaaaaagcctgtgaagattttgaacaagaccagaatgcttcagaagaatggattacctttactgagcaaagtcaactagaggcggacaaggctatagaagttttgctcacagcacctacagggaaagcagctggcttactaagacagaaaactggtcttcatgcctacacactgtgtcaggtcaattatagcttctattcatggactcaaacaatgatgaccacaaacaaaccatggaaattttcttcggttagagttctggttgtggatgaagggagtttggtatctgtaggaatcttcaaatcggtcttaaatttattgtgtgagcactccaaactttctaagcttattatccttggtgacattagacagttacccagtattgaacctggtaacttgctgaaagatctttttgagactcttaagtcaagaaattgtgctattgagctaaagacaaaccatagagcagaatctcagctcattgtggacaatgctacaagaatctcaagacgccaatttccaaaatttgatgcagaactaaatatctctgataatccaacattacccatctcaattcaagataagacatttatttttgtcaggctcccagaagaggatgccagttctcagtcatctaaaactaatcatcactcttgtttatattctgcagttaaaactttactacaagaaaataacttacaaaatgcaaaaacatcacaatttattgcatttagaaggcaagactgtgatctaattaatgactgctgctgcaaacactacacaggccacctcaccaaagaccatcagagtagacttgtttttggaattggtgataaaatttgttgtaccaggaatgcatacctctcagacttactacctgaaaatatctctggaagtcagcaaaataatgatctagatgccagtagtgaagacttttctggtacgcttcctgattttgctaaaaataagcgtgactttgaaagtaacgttcgactgtgcaatggagagatatttttcataacaaatgatgtaactgatgtaacttttggaaagagaagatctttgaccattaataatatggctggcctggaagtaactgtggattttaagaaactaatgaaatattgtcgcataaaacatgcatgggcaagaactattcacacttttcaggggtccgaggagcaaacagttgtctatgtggtggggaaggcgggccgccagcactggcagcatgtctacaccgccgtgaccaggggccgctgccgagtgtatgtgattgcagaggagtctcagctccggaatgccattatgaaaaacagttttcctagaaaaactcgtttgaaacatttcttgcaaagtaagctctcctctagcggcgcacctccagcagattttccgtccccacggaagagctctggagacagtggaggacccagcacaccgtcagcatctccactccctgtagtcacagaccacgccatgacaaatgatgtcacctggagcgaggcctcttcgcctgatgagaggacactcacctttgctgaaagatggcaattatcttcacctgatggagtagatacagatgatgatttaccaaaatcgcgagcatccaaaagaacctgtggtgtgaatgatgatgaaagtccaagcaaaatttttatggtgggagaatctccacaagtgtcttccagacttcagaatttgagactgaataatttaattcccaggcaacttttcaagcccaccgataatcaagaaacttagttttatttcaaattgttccgagtaactatgtttttctattggagacaaaatgaacatcgtaacgtcaaagtaccaagataaaaaaagtttcctataactggagttttaaggtatttgtgttagcaaatgttttaaatccatttcatcaaagtattaatgatttcaacacgtcatcatgagaactggtagcactggacataagtgaagagattagatattttatatacatatatatttttatacaattatgtacattaagccaggcacggtggctcatgcctgtaatcccagcactttgggaggctgaggcaggtggatcaccagaggccaggagtttgagaccagcctgaccaacatggtgaaaccccatctctactaaaaatgcaaaaattatatgggtgtggtagcacatgcctgtaatctcagctactcaggaggctgaggcaggagaatcgcttgaacccgggaggcggaggttgcagtgagctgagattgcaccattgcactccatcctgggtggcagagcgagactccgtctccaaaaaaaaaacaaacaaacaaacaaacaaaaaaaaacaaacaattatgtacattaaaacattgtatttttaggataatgcctcgtaactttgatgatcgttgtgtgttacctttgccaatgggttgaagcagtggcaaagaaaaggtgtaattacatctgttgatgttattgacatgcctcctaggatgttgaaatgtggtcattttacaagactgctgctcacttcatcactgctgcctggggcccagcctacctgggacttttccttggaagtgctttctgagttgggagcacattgttttgaatatgttccacttaggaaggttttttctctctcagaatgatttgatttttaaatttttatttatgttaaatggtaaaagaaaaagtcaagatgaaaaatatatctgttaacccatttatgcctagtggtccattattgggacactaaacatgtgagagttatttatatcccactgctcaaagtcctcaccaacgtctgattgcaaaaattcagaaagttgcaacctcaggcataaatggttaatagctttattgagatataattcacatacatttcacccattttaagtatataattcagtggcttttagtatattcatcaaattggacaactaccattattatcaattttagaacttttttttttttttaatgatagagacaaggtctcactatgtttcccaggttggtctcgaactcctgagctcaagtgatcctcccaccttggcctcccaaagtgttaggattacaagtgtgagccagtgtgcccaacctggaacattttcataccctacaaagaaacctcacactctggccgggcgtggtggctcatgcctgtaatcccagcactttgggaggctgaggtgagcagatcacctgaggtcgggagttcgagaccagcctgaccaacatggagaaaccccgtctctactaaaaatacaaaattagctgggaatggtggcgcatgcctgtaatcccagctacttgggaggctgaggcatgagaatcgcttgaacccaggaggtggaggttgcggtgagctgagtcacgccattgcactccagcccggacaataagagcaaaactccgtctcaaaaaaaagagaaacctcacactccttagcagtaatcccctgacttcccccatccctaggtaacctgatttacctagtcccaatagacttgcctattgcagacatgtggttctttgttccggacttatttgactagcataatgttttcagactccatccgtgttgtaccagtgatgtgtcagtgcttcgtctcttttattgccaaataatatcccagtatatggataaaggatattgaatttgtccattcatcagttgatggacatttatttgggttatttcctaatttttggctattatgaaatgctgctatgaacatctgtgtataagtttttatgtggacatatgctttcacttcttttgggtatataactaggagtagaattgatgggtcatatggtaactctatgtttaacattttgaggcactgccagactttttccaaactagctgcaccaatttatattctcaccagcagtgtatgagagttccagtttctccctattctctccaacgtttattattatctgacttcttgattatagccatcctagtgggtatgaagtagtatttcattgtggttttgatttgcatttttcttatggctagtgatgttaaatagctttcgtgtgactattggccatttgtatgtcccctagagaaatgtatattcagatcttttgcacagttttaaattggatattttttctttctgtcactgaaatctgtattagtgagggttctccagagggatggaaccaataggatatatgtggatataaaagggactttattagtgtattagttagggtaccctagagggatacaactaataggatatatatatgtggggggggggcggggagtttattaagtattaacttacatgatcacaaggtcccacaataggttgtctgcaagcctgaggagcaaggatagccagttggagtctcagaactgaagaacttggagtctgatgtttaagggcagaaagcatccagcacaggagaaggatgtaggctgggagcctaggccagtctcgccttttcatgtttttctgcctgctttatatttgctggcagctggttagattgtgcccaccagattaagggtggttctgccctccccagcccactgactcaaatgttaatctcctttggcaacaccctcacagacacacccaggatcaacactttgcatccttcaatccaatcaagttgacactcagtattaaccatcacaataagagagaattggctcacacgattataaagcaaagtcccacgataggccatctgcaagctggggaaggagagaagctgatagcatggctcagtccaagtctgaaagcctcaaaaccagggacgctgacagtgcagccctcagtctgaggccaaaggcccaggagcctctgggaagcaattggtgcaagtcccagagtccaaaggtggaaaaacctggagtctggtgtccaagggcagaaggagaggaagtcaagcattctgcacagcacaggaagaaagagagggagcagactcagcaagcacgctgcttatctccattcgtccacctgctgtgttctagcctcactggcagccaactcgatggtgcccacccacactgagggtgggtcttcctctcccactccactgactccaatgtcagtctctgtcagcaacaccctcacagacacacaggggaacaatgcttcatcagccatccaggtatctctcaatctagttgacacctaatattaaccatcacaaaatgtaagaattctttacattttcaacatttaagtccattatcagaaacataatttgcaaaattttcctcccattctgtgaattttattttaattaacctgatagtatctgatatggtttggctctctgtccccacccaaatctcatctcacattgtaatacctatgtgttgaggaaggatcctggtgggaggtgattggatcatgggggtggtttcccccacgctgttctggtgatggtgagttctcatgatagctggtggttttaaagtatggcactcctgccccaacccccttctgccaccttgtaaagaaggtgcttgcttctcctttaccttttgccatgattgtggttttctgaggcctccccagccatgtggaactgtgagtcaattaaacctcttttctttataaattactcagtctcaggtgtgaaaatggactactaagtgtcctttgaggcccaagttttaaattctgatgatgaccagtgtatctgtttttgttgttgctgctgcttgtgcttttggtgttatatccaagaaactattgcctatccaaagtcatgatgatttactacaattttttcttctaataatttacaagttttggctcttatacttagatctttgattcacttttagttaatttttgtatatggtgtgaggtagggatcccacattattcctttgcatgtgacaattcaattgttcagctccatttattgaagagattattctttccccattgaattatcttggtacccttctcaaaaattagttgactgtaaatgtgagggtgtatttatggattttaaattctattcaattgattcatgcatcttttttttttttttttttcttcttcgagacggagtcttgccctgttgcctaggctggagtgtggtggctcgatctcagctcactgcaagttccgcctctcaggttcatgccattctcctgcctcagcctcccaagtagctgggactacaggcgcccaccaccatgcctggctaatttttttttgtatttttagtagagacggggtttcgccgtgttagccagaatggtctcgatctcctgaccttgtgatctgcccaccttggcctcccaaagtgctgggattacaggcatgagccactgtgcccagcccgattcatgcctcttttttctttttcttttttttttgagatggagtcttactctgtcacccaggctggagtgcaatggtgccatctcagctcactgcaaccaccacctccttgtttcaagcaattctcatgcctcaccctcccgagtagcaggcattacaggtgcttgccaccacgcctggctgattttttgtatttttagtagagacggggtttcaccatgttggccaggctggtctcaaactcctgacctcagatgatccgcttaccttggcctcccaaagtgctggcattatagtcatgagccactgcgcccggcccatatgtctattctaatgccagcaccatattgtctttattattgtagctttgtagaaagttttgaaattaagaagtgtgagtccttcaactttgttcttctttttcaagtttgttttggctattatgggtccctacatttccatatgaattttaggatctacttgtcagtttctgcaaagaagcaaactggaattttgttcaggagtgtgttaaacctacagatttgggaactattgccattttaacagtattaaatcttctgactcatgaacacagatgtctttccatttgcttaggaaagacaggctggagtgcagtggtgcaatcacagctcactgcagcctctacctctcaggctcaagcagtccaacctctttaaccaccccacctcaaccactcttgtagctgtgactacaggcctgcaccacctcacctggctaacttttgtattttttgcagagataggggttcaccatggtgcccaggctggtctcgaactcctggactcaggcagtctgcccacctcgacctcccaaagtgctgggattacaggtgtgagccatcatgcttggttcttctttaattctttgtagttttcagagtataagttttgtatttcttttattaaatttacaatgctctttgttaaatttatttcaaaatatttaattttttatcctgttgtaaatggattttcttaatttattttggttcattactgctactgtatagaaatgcagtcgatttttatatattgatcttgtatcttccaaccttgctgcacttgtttattagttacagtgggtttttagtggattccttaggattttctatataagtgatcatatcatctgcaaatagagatgcttttagtgcttcctttttcatctgtaggcctttaatttcattttcttgctaattgccctggttagagcccctagtatattgttgaatagaagtggcaagagtgaatatccttgtcttgttcatcatattagggagaaagcattaaatctgccaccattaactgtgtttgctgtggatctttcttttaagtcctttattgagatgaagaaattctcttttgttcctaggttgttgtgtatgaagggacattgaatttcgtcaaatcctttctctatgtattgagatcattgtgtagttttgtcctttattgatgcagtgtggtaatttttggatgttaaatcaatcttgtgtccctggagtaaatctcacttggtcatagtatacaatcctttgtatgtgctgctggatttggcttgctggttttttgttggggacttttgcatctaaattcatgaaagatattggtctgtagtttctttttcttgtgatgcctttgtttggttttggtatcagagtaatagtgaccacatagaatgagttgtgaagtgtccccttgtcttctattttggaagagtttgtgaagaattggtattaactcttctttaaattaatctggccctgggcttttctttgtggggagtttttgttttgttttgtttttgttttttgagatggagtttcgctcttgttgtccaggctggagtgcaatggcacgatctcggctcaccccaacctccacctcccaggttcaagcgattctcctgcctcagcctcccaagtagctgggattatatgcatgtgctaccatgcccagctaattttgtatttttaatagagacagggtttctccacgttggtcaggctggtctcaaactcccaaactcaagtgatccacctgcctcagcctcccaaagtgctgggattacaagcatgagccactgcacccggcatgggaagttttaaagctactgattaaatttctttacttgttataggtgtatttagcttttctatttcttcttgagtcagttttgacagtttttctctagaaatttgctcatttaatctatattttttaattttctgacatacagttgatcatagtattcctttatggttttttaaatttctgtaaggctggtagtaaagcctctgtttcattcctgattttagtaatttgagtctctttttttcttggtttagctaaaagtttatgaattttaatctttttaaaggaccaacttttggtttcattgattttctttactgtcttcctattctctatttcattaattttaactcttgtcctattacttttaggagggcctcttaaggaggggtcgtatgctgacttaaattgagggttggtcaaagttcaaaagcctgggggaaggaagcttaatattttctctagatcagtaagtacaagcaattcagctaagaatttgcttcatttatgaagcaaagaatggtaattttcaggacagtctgtgtctgattttgttataagtaaatgggggaagggagataaacatctgtgagtcttatctaagtcacccggggaaggatggttctttataataagccatttcctggaacacgcaggcgatgggcaggggggttactacaaccttatagaaataaaatttctttaactctgcctatatttcagggtatagtcctcaggtaaagcttcacattgtcaagaagaacttgaaaataccttttttccataaaaacacaatgaaactaatactatgtaacggaatattccaaagcactagttcttataaataactattggccaaaatacaaataactgacccaattcaaaattctctaagatttcattaagatccttttgtagttcataagcctgatgcatgggtgttcacacgcatgtgtgagatgtgcctccctcaaaccttgttatggcgccagcccattaccggtctgtcatgaaaaaaaaaatatttcagtaaaagaggatacttctagtatcctttttaaaatttgaattggaagcaaatagtatttcatcccagcatgttaaaattgcaagggtcacctaccccagcttaccatttgctaaacacgcatcagtcaccagtggaacacacatttccaatgctaaaggtcttgactgcttggtgaaaaccactttgcaacactggtgttggaaattactttcttatattaagctgaaatctacctcattggaacctctgctcataagtcctgagtctcatgtagttcagaccttgtctcttctgccccatctggctacttatctccagtttctcctgccagtcttccggtggcatagccccaaaccctttcatttcatagtttgtcactgccctttttaagaggactggggtgctcagaacttattggctgaccctagctcttcctttggcctggtcactatatttgaaaagtgctacctgaaatcataagagcttttttgttttgtttttaacagccattttctattgttgattcattttagttttggttacaactgaaatatctgtctttcacatgaaatatagcttctcatttgcctttcttcacaaagtctgttctaactacacatttccttggcttcagcctcatgcttgatgcagaagtgaggagagtgcaataaaaatttgaacagttgcttggatttttgcaataatagattgtcagttggggtcatatgactctcaggtgctagaaaatactctgcctttcagaacgtaaccgtgggcacactgaatgcaactgtataaaaatgaatgtgaatttttaaaggtagcataattaaagtttgtacattttaacagtttatgtaaatctgtctcatagaatacatgtaattttctctgaggtggatgttgtgatacttgatcaatatttgtcacctacagtaaatgtaccattggtcttggaggtatttctgtgtgtgtttttagcccattctcatatatttcactcctcatcttccgaatgatcctgtggtacagacatgaccttcagtttcaggtagagaagctgactcgtggtgactaaatgtcatactaccaataagtactggagcctgaaatcaaacctggactcaatttcaatacacaggttcctactcttcagtggtgcttctcaggttgataggaaaacctctcacctttagaaaattatacaaaaataaacattgtggccggatgcggtggctcacgcctgtaatcccagcactttgggaggccaaggcgggtggatcacttgaggtcacgaggagtttgagaccagcctggccaacatggtgaaaccccatgtctactaaaaaaatacaaaaactagccaggtgtggtggcgggtgcctgtaatcccagatacttgggaaactgaggtaggagaatcacttgagccccggaggcaggggttgcagtgagctgagattgtgccactgcactccagcctgggcaacagagtgaaactccatcatcatctcaaaacaaaacaaaacaaaaaaaaattgtgtaggactcaggctagaacattgaaatatattcaaaacaacaccaataatgcatatcctctttatttggctttttaaaatcactgtttattccatttggtagagggttttatttttttccatacaaatatttgaacaattttgaattccccaaaaccatacatagacgataaataccatgctattaaagtattaaatttgtacaaaaatactttacagtttaatacttgtttgttacaaataaaaatacatatttaagtga

SEQ ID NO: 140017 - DNA, 3167 bp, Homo sapiens
  Payload ID: 7460
  Gene Symbol: HELB
  Gene Name: helicase (DNA) B
  Uniprot ID: Q8NG08
  ENST ID: ENST00000440906
  CDS Start-End: 26-1750
tgtttgggttgagttcaggagaagcatggccaggtcgagtccgtacctgcgccaacttcagggacctctgctcccacccagggatctggtggaggaggacgacgactacctaaacgacgacgtggaggaggatgaagagtccgtgttcatcgacgccgaggagctctgcagtgggggcgtaaaggctggcagcctccccgggtgcctccgcgtttctatttgtgatgaaaacacacaagagacatgtaaagtgtttggacgttttccgataacaggtgcttggtggagagtgaaggtacaagtaaagcctgtggtgggatcaaggagctatcaatatcaagttcaaggatttccgtcttactttttgcagtctgatatgtcaccaccaaatcaaaaacatatctgtgctctctttcttaaagagtgtgaggtctccagtgatgatgttaataaatttttaacatgggtaaaggaggtatcaaactacaaaaacctaaactttgaaaatcttagggaaacactaagaactttccacaaggaaactggaaggaaagatcaaaagcagcctacacagaatggtcaggaagagttgttcctagacaatgagatgagtcttcctctggaaaacacaattccatttagaaatgtaatgacagctttgcagtttccgaagataatggaattccttccagttcttctgcctcgacactttaaatggatcatagggtcaggttctaaagagatgttgaaagagatagaagagattttaggtacacatccgtggaaacttggatttagtaaaataacctacagagagtggaaactcctgcgatgtgaggcaagttggatagcattttgtcagtgtgagtctcttctccagctgatgactgatttggagaagaatgcattaataatgtattccagactgaagcagatatgtagagaagatgggcacacatatgttgaagtgaatgacttaactttgacattgtcaaatcatatgtcatttcatgctgcttcagagtctctgaagtttttgaaggatattggtgtggtgacatatgagaagtcctgtgtcttcccttatgacctttaccatgctgaaagagccatcgccttttcaatttgtgacctgatgaagaaacctccttggcatttatgtgtcgatgtcgaaaaggtgcttgcctctattcacaccacaaaacctgagaattcaagcgatgatgcattgaatgagagcaaacctgatgaagtaagattagaaaatcctgtggatgttgtggacacacaggacaatggtgaccatatttggactaatggtgaaaatgaaattaatgcagaaataagtgaagttcagctggatcaggatcaggttgaagttccactggatcgggatcaggtggctgctttggaaatgatttgctccaatcctgtgacagtcataagtgggaaaggtggatgtgggaagaccacaatcgttagccgtctttttaagcatatagagcagttggaagaaagagaagtaaaaaaagcctgtgaagattttgaacaagaccagaatgcttcagaagaatggattacctttactgagcaaagtcaactagaggcggacaaggctatagaagttttgctcacagcacctacagggaaagcagctggcttactaagacagaaaactggtcttcatgcctacacactgtgtcaggtgacattagacagttacccagtattgaacctggtaacttgctgaaagatctttttgagactcttaagtcaagaaattgtgctattgagctaaagacaaaccatagagcagaatctcagctcattgtggacaatgctacaagaatctcaagacgccaatttccaaaatttgatgcagaactaaatatctctgataatccaacattacccatctcaattcaagataagacatttatttttgtcaggctcccagaagaggatgccagttctcagtcatctaaaactaatcatcactcttgtttatattctgcagttaaaactttactacaagaaaataacttacaaaatgcaaaaacatcacaatttattgcatttagaaggcaagactgtgatctaattaatgactgctgctgcaaacactacacaggccacctcaccaaagaccatcagagtagacttgtttttggaattggtgataaaatttgttgtaccaggaatgcatacctctcagacttactacctgaaaatatctctggaagtcagcaaaataatgatctagatgccagtagtgaagacttttctggtacgcttcctgattttgctaaaaataagcgtgactttgaaagtaacgttcgactgtgcaatggagagatatttttcataacaaatgatgtaactgatgtaacttttggaaagagaagatctttgaccattaataatatggctggcctggaagtaactgtggattttaagaaactaatgaaatattgtcgcataaaacatgcatgggcaagaactattcacacttttcaggggtccgaggagcaaacagttgtctatgtggtggggaaggcgggccgccagcactggcagcatgtctacaccgccgtgaccaggggccgctgccgagtgtatgtgattgcagaggagtctcagctccggaatgccattatgaaaaacagttttcctagaaaaactcgtttgaaacatttcttgcaaagtaagctctcctctagcggcgcacctccagcagattttccgtccccacggaagagctctggagacagtggaggacccagcacaccgtcagcatctccactccctgtagtcacagaccacgccatgacaaatgatgtcacctggagcgaggcctcttcgcctgatgagaggacactcacctttgctgaaagatggcaattatcttcacctgatggagtagatacagatgatgatttaccaaaatcgcgagcatccaaaagaacctgtggtgtgaatgatgatgaaagtccaagcaaaatttttatggtgggagaatctccacaagtgtcttccagacttcagaatttgagactgaataatttaattcccaggcaacttttcaagcccaccgataatcaagaaacttagttttatttcaaattgttccgagtaactatgtttttctattggagacaaaatgaaca

SEQ ID NO: 140018 - DNA, 3432 bp, Homo sapiens
  Payload ID: 7460
  Gene Symbol: HELB
  Gene Name: helicase (DNA) B
  ENST ID: ENST00000542394
  CDS Start-End: 26-2566
tgtttgggttgagttcaggagaagcatggccaggtcgagtccgtacctgcgccaacttcagggacctctgctcccacccagggatctggtggaggaggacgacgactacctaaacgacgacgtggaggaggatgaagagtccgtgttcatcgacgccgaggagctctgcagtgggggcgtaaaggctggcagcctccccgggtgcctccgcgtttctatttgtgatgaaaacacacaagagacatgtaaagtgtttggacgttttccgataacaggtgcttggtggagagtgaaggtacaagtaaagcctgtggtgggatcaaggagctatcaatatcaagttcaaggatttccgtcttactttttgcagtctgatatgtcaccaccaaatcaaaaacatatctgtgctctctttcttaaagagtgtgaggtctccagtgatgatgttaataaatttttaacatgggtaaaggaggtatcaaactacaaaaacctaaactttgaaaatcttagggaaacactaagaactttccacaaggaaactggaaggaaagatcaaaagcagcctacacagaatggtcaggaagagttgttcctagacaatgagatgagtcttcctctggaaaacacaattccatttagaaatgtaatgacagctttgcagtttccgaagataatggaattccttccagttcttctgcctcgacactttaaatggatcatagggtcaggttctaaagagatgttgaaagagatagaagagattttaggtacacatccgtggaaacttggatttagtaaaataacctacagagagtggaaactcctgcgatgtgaggcaagttggatagcattttgtcagtgtgagtctcttctccagctgatgactgatttggagaagaatgcattaataatgtattccagactgaagcagatatgtagagaagatgggcacacatatgttgaagtgaatgacttaactttgacattgtcaaatcatatgtcatttcatgctgcttcagagtctctgaagtttttgaaggatattggtgtggtgacatatgagaagtcctgtgtcttcccttatgacctttaccatgctgaaagagccatcgccttttcaatttgtgacctgatgaagaaacctccttggcatttatgtgtcgatgtcgaaaaggtgcttgcctctattcacaccacaaaacctgagaattcaagcgatgatgcattgaatgagagcaaacctgatgaagtaagattagaaaatcctgtggatgttgtggacacacaggacaatggtgaccatatttggactaatggtgaaaatgaaattaatgcagaaataagtgaagttcagctggatcaggatcaggttgaagttccactggatcgggatcaggtggctgctttggaaatgatttgctccaatcctgtgacagtcataagtgggaaaggtggatgtgggaagaccacaatcgttagccgtctttttaagcatatagagcagttggaagaaagagaagtaaaaaaagcctgtgaagattttgaacaagaccagaatgcttcagaagaatggattacctttactgagcaaagtcaactagaggcggacaaggctatagaagttttgctcacagcacctacagggaaagcagctggcttactaagacagaaaactggtcttcatgcctacacactgtgtcaggtcaattatagcttctattcatggactcaaacaatgatgaccacaaacaaaccatggaaattttcttcggttagagttctggttgtggatgaagggagtttggtatctgtaggaatcttcaaatcggtcttaaatttattgtgtgagcactccaaactttctaagcttattatccttggtgacattagacagttacccagtattgaacctggtaacttgctgaaagatctttttgagactcttaagtcaagaaattgtgctattgagctaaagacaaaccatagagcagaatctcagctcattgtggacaatgctacaagaatctcaagacgccaatttccaaaatttgatgcagaactaaatatctctgataatccaacattacccatctcaattcaagataagacatttatttttgtcaggctcccagaagaggatgccagttctcagtcatctaaaactaatcatcactcttgtttatattctgcagttaaaactttactacaagaaaataacttacaaaatgcaaaaacatcacaatttattgcatttagaaggcaagactgtgatctaattaatgactgctgctgcaaacactacacaggccacctcaccaaagaccatcagagtagacttgtttttggaattggtgataaaatttgttgtaccaggaatgcatacctctcagacttactacctgaaaatatctctggaagtcagcaaaataatgatctagatgccagtagtgaagacttttctggtacgcttcctgattttgctaaaaataagcgtgactttgaaagtaacgttcgactgtgcaatggagagatatttttcataacaaatatagaatatctttgaacgtatttgaacgtagaacatatttgaaggtatgcaaaatagttctttggtttggtgacaggatgtaactgatgtaacttttggaaagagaagatctttgaccattaataatatggctggcctggaagtaactgtggattttaagaaactaatgaaatattgtcgcataaaacatgcatgggcaagaactattcacacttttcaggggtccgaggagcaaacagttgtctatgtggtggggaaggcgggccgccagcactggcagcatgtctacaccgccgtgaccaggggccgctgccgagtgtatgtgattgcagaggagtctcagctccggaatgccattatgaaaaacagttttcctagaaaaactcgtttgaaacatttcttgcaaagtaagctctcctctagcggcgcacctccagcagattttccgtccccacggaagagctctggagacagtggaggacccagcacaccgtcagcatctccactccctgtagtcacagaccacgccatgacaaatgatgtcacctggagcgaggcctcttcgcctgatgagaggacactcacctttgctgaaagatggcaattatcttcacctgatggagtagatacagatgatgatttaccaaaatcgcgagcatccaaaagaacctgtggtgtgaatgatgatgaaagtccaagcaaaatttttatggtgggagaatctccacaagtgtcttccagacttcagaatttgagactgaataatttaattcccaggcaacttttcaagcccaccgataatcaagaaacttagttttatttcaaattgttccgagtaactatgtttttctattggagacaaaatgaacatcgtaacgtca

SEQ ID NO: 140019 - DNA, 3586 bp, Homo sapiens
  Payload ID: 7460
  Gene Symbol: HELB
  Gene Name: helicase (DNA) B
  Uniprot ID: Q8NG08
  ENST ID: ENST00000545134
  CDS Start-End: 25-3288
gtttgggttgagttcaggagaagcatggccaggtcgagtccgtacctgcgccaacttcagggacctctgctcccacccagggatctggtggaggaggacgacgactacctaaacgacgacgtggaggaggatgaagagtccgtgttcatcgacgccgaggagctctgcagtgggggcgtaaaggctggcagcctccccgggtgcctccgcgtttctatttgtgatgaaaacacacaagagacatgtaaagtgtttggacgttttccgataacaggtgcttggtggagagtgaaggtacaagtaaagcctgtggtgggatcaaggagctatcaatatcaagttcaaggatttccgtcttactttttgcagtctgatatgtcaccaccaaatcaaaaacatatctgtgctctctttcttaaagagtgtgaggtctccagtgatgatgttaataaatttttaacatgggtaaaggaggtatcaaactacaaaaacctaaactttgaaaatcttagggaaacactaagaactttccacaaggaaactggaaggaaagatcaaaagcagcctacacagaatggtcaggaagagttgttcctagacaatgagatgagtcttcctctggaaaacacaattccatttagaaatgtaatgacagctttgcagtttccgaagataatggaattccttccagttcttctgcctcgacactttaaatggatcatagggtcaggttctaaagagatgttgaaagagatagaagagattttaggtacacatccgtggaaacttggatttagtaaaataacctacagagagtggaaactcctgcgatgtgaggcaagttggatagcattttgtcagtgtgagtctcttctccagctgatgactgatttggagaagaatgcattaataatgtattccagactgaagcagatatgtagagaagatgggcacacatatgttgaagtgaatgacttaactttgacattgtcaaatcatatgtcatttcatgctgcttcagagtctctgaagtttttgaaggatattggtgtggtgacatatgagaagtcctgtgtcttcccttatgacctttaccatgctgaaagagccatcgccttttcaatttgtgacctgatgaagaaacctccttggcatttatgtgtcgatgtcgaaaaggtgcttgcctctattcacaccacaaaacctgagaattcaagcgatgatgcattgaatgagagcaaacctgatgaagtaagattagaaaatcctgtggatgttgtggacacacaggacaatggtgaccatatttggactaatggtgaaaatgaaattaatgcagaaataagtgaagttcagctggatcaggatcaggttgaagttccactggatcgggatcaggtggctgctttggaaatgatttgctccaatcctgtgacagtcataagtgggaaaggtggatgtgggaagaccacaatcgttagccgtctttttaagcatatagagcagttggaagaaagagaagtaaaaaaagcctgtgaagattttgaacaagaccagaatgcttcagaagaatggattacctttactgagcaaagtcaactagaggcggacaaggctatagaagttttgctcacagcacctacagggaaagcagctggcttactaagacagaaaactggtcttcatgcctacacactgtgtcaggtcaattatagcttctattcatggactcaaacaatgatgaccacaaacaaaccatggaaattttcttcggttagagttctggttgtggatgaagggagtttggtatctgtaggaatcttcaaatcggtcttaaatttattgtgtgagcactccaaactttctaagcttattatccttggtgacattagacagttacccagtattgaacctggtaacttgctgaaagatctttttgagactcttaagtcaagaaattgtgctattgagctaaagacaaaccatagagcagaatctcagctcattgtggacaatgctacaagaatctcaagacgccaatttccaaaatttgatgcagaactaaatatctctgataatccaacattacccatctcaattcaagataagacatttatttttgtcaggctcccagaagaggatgccagttctcagtcatctaaaactaatcatcactcttgtttatattctgcagttaaaactttactacaagaaaataacttacaaaatgcaaaaacatcacaatttattgcatttagaaggcaagactgtgatctaattaatgactgctgctgcaaacactacacaggccacctcaccaaagaccatcagagtagacttgtttttggaattggtgataaaatttgttgtaccaggaatgcatacctctcagacttactacctgaaaatatctctggaagtcagcaaaataatgatctagatgccagtagtgaagacttttctggtacgcttcctgattttgctaaaaataagcgtgactttgaaagtaacgttcgactgtgcaatggagagatatttttcataacaaatgatgtaactgatgtaacttttggaaagagaagatctttgaccattaataatatggctggcctggaagtaactgtggattttaagaaactaatgaaatattgtcgcataaaacatgcatgggcaagaactattcacacttttcaggggtccgaggagcaaacagttgtctatgtggtggggaaggcgggccgccagcactggcagcatgtctacaccgccgtgaccaggggccgctgccgagtgtatgtgattgcagaggagtctcagctccggaatgccattatgaaaaacagttttcctagaaaaactcgtttgaaacatttcttgcaaagtaagctctcctctagcggcgcacctccagcagattttccgtccccacggaagagctctggagacagtggaggacccagcacaccgtcagcatctccactccctgtagtcacagaccacgccatgacaaatgatgtcacctggagcgaggcctcttcgcctgatgagaggacactcacctttgctgaaagatggcaattatcttcacctgatggagtagatacagatgatgatttaccaaaatcgcgagcatccaaaagaacctgtggtgtgaatgatgatgaaagtccaagcaaaatttttatggtgggagaatctccacaagtgtcttccagacttcagaatttgagactgaataatttaattcccaggcaacttttcaagcccaccgataatcaagaaacttagttttatttcaaattgttccgagtaactatgtttttctattggagacaaaatgaacatcgtaacgtcaaagtaccaagataaaaaaagtttcctataactggagttttaagagataggggttcaccatggtgcccaggctggtctcgaactcctggactcaggcagtctgcccacctcgacctcccaaagtgctgggattacaggtgtgagccatcatgcttggttcttctttaattctttgtagttttcagagtataagttttgtatttcttttattaaatttacaatgctctttgtt

SEQ ID NO: 140020 - DNA, 13810 bp, Homo sapiens
  Payload ID: 7461
  Gene Symbol: HELZ
  Gene Name: helicase with zinc finger
  Uniprot ID: P42694
  ENST ID: ENST00000358691
  CDS Start-End: 168-5996
caagtggatccaagatggcgtagaaagtaatgacaggatttggatgaagtaatggatcactaatgaactacagtgctggtgagatgtgtaagaaattataaagagctctgatgggctatttgggtgatacccagtgcagtgaactgcaggatttttgtccctgagtcatggaagacagaagagctgaaaagtcatgtgaacaagcatgtgaatcacttaagaggcaggactatgaaatggccctcaagcactgcacagaggcccttctttctcttggccagtactccatggcagacttcacagggccttgtccattggaaatagaacgcatcaaaatcgagagtcttctctacagaattgcctcatttttgcaactgaaaaattatgtgcaagctgatgaagattgtagacatgtgctgggagaaggactggccaagggagaagatgcctttcgggcagtgctttgctgcatgcagctgaaagggaagctccaacctgtatccaccattcttgccaagtcactcacaggagagtccctgaatgggatggtaacaaaggatttgacaagactaaaaacacttctctcagaaacagagacagcaactagtaacgccctctctggatatcacgtggaagacttagatgaggggtcttgtaatggttggcatttccgcccaccacctaggggaatcacaagcagcgaggaatatactttgtgtaaaagatttttagaacaaggaatctgtaggtatggtgcccagtgtacttcagcacattcccaggaagaactagcagaatggcagaaaagatatgcttcacggctgataaaattgaaacagcaaaatgagaataaacagctctcaggcagttacatggaaaccttgatagaaaagtggatgaattcattgtctcctgagaaagtgcttagtgaatgtatagaaggagtaaaggtagagcacaatcctgacctgtcagttactgtcagcaccaaaaaatcccaccagacatggacctttgctctcacttgtaagcctgcaagaatgctgtatcgtgtagcattgctttatgatgctcatcgtcctcattttagtatcattgcaatatctgccggagatagtactacccaggtatcacaagaagtcccagaaaactgtcaagaatggataggaggaaagatggcccaaaatggattagatcattacgtgtataaagtcgggatagcatttaacacagaaatatttggaacttttcgccaaaccatagttttcgactttggattggaaccagtactcatgcaaagagtaatgattgatgcagcttctacagaagatctcgaatacctgatgcatgcaaaacagcagctagtaaccacagctaaacgttgggattcttcctctaagactattatagattttgaacctaatgaaactactgatttggagaagagccttcttatcagataccaaattcccctctctgctgaccagctatttactcagtccgttttagacaaatcattgaccaagagcaactatcagtcacggttacatgaccttctttatattgaggagatagcccagtataaagaaatcagcaagttcaaccttaaagtgcaattgcagattctggcaagcttcatgctcactggtgtttctggaggtgcaaagtatgctcagaatggacaactttttggtcgctttaagcttactgaaacactttctgaagatactttggctggacgactggtgatgaccaaagtcaatgctgtttatttattaccagtccctaaacagaagttagtacagacccagggaaccaaagagaaggtttatgaagctactattgaagaaaaaacaaaggaatatatatttttaaggctatctagggaatgctgtgaagaacttaatcttcggcctgactgtgacacacaggttgaacttcagtttcaattaaatcgattacccctctgtgaaatgcactatgcactagacaggatcaaggacaatggggttttgtttccagacatcagtatgactcccaccataccatggagtcctaacagacaatgggatgaacagttggatcctcgactaaatgcaaaacagaaagaggctgttctggccattaccactccacttgcaatccagctgccgcctgtgcttatcatcggaccctatgggacaggcaaaacgttcactctagctcaggctgtcaaacatattctgcagcaacaggagactaggattctcatttgcacccattctaatagtgctgctgatctctacataaaggattatttacatccatatgtagaagcaggcaatccccaggcaagacctctcagggtatatttcagaaatcgctgggtaaagactgtccacccagttgtgcatcagtactgtttgatctcaagcgcacattccacctttcagatgccccagaaagaagatattcttaaacatcgagtggtggttgttaccttgaatacttcccagtacctctgtcagttggaccttgaacctgggttttttacacacattctattagatgaagctgcccaggccatggagtgtgaaaccattatgcctctagcattagcaactcaaaacactcggattgtcttggctggtgatcacatgcagctcagtccttttgtttacagcgagtttgccagggagagaaaccttcacgtttcattacttgaccgactctatgagcattaccctgctgagttcccatgtaggattctcctgtgtgagaactaccgctcccatgaagctatcatcaattatacctctgagcttttctatgagggcaaactgatggccagtgggaagcagccagcacacaaagatttctacccactaactttctttacagcacgaggagaagatgtacaagaaaaaaatagcacagctttttataataatgcagaggtgtttgaagtggtggaacgtgtagaagagttaagaaggaagtggccagtagcgtgggggaagttagatgatggcagtattggtgtggtgactccatatgctgatcaagtgtttagaatacgtgctgaacttcgaaaaaagagattatctgatgttaatgtagaaagggtgctaaatgttcaaggaaagcaattcagagttttgtttcttagcacagtacgtacaagacatacttgtaaacataaacagacaccaattaaaaagaaagagcaacttctggaagattccacagaggacttagattatggttttttatctaactacaagcttctcaatactgccatcacaagagcacaatccctggttgctgtggtgggtgatcccattgctctgtgctctattggaagatgcaggaaattttgggaacggtttattgccctgtgtcatgaaaacagtagcctacatggaatcacttttgaacagatcaaagcccagttagaggctttagaactaaagaagacatatgtgttgaatccgctggcacctgaatttatcccccgggctctaagactgcagcattcaggaagtaccaacaaacagcagcaatcaccacccaaggggaaaagtcttcatcatacccagaatgatcacttccagaatgatggaattgttcagcccaatccttctgtacttattggcaatcctattagagcatatactcctccaccccctcttggacctcacccaaatttgggaaaatctccaagccctgttcaaagaatagatcctcacactgggacaagtattctttatgtacctgctgtctatggagggaatgtagttatgtcggtgcctttacctgtaccatggacaggataccagggtaggtttgcagttgatcctcgaattattacacatcaggcagcaatggcctataacatgaacctattacagacacatggacgaggatctcctattccttatggccttggacatcacccacctgtcaccataggccagccacaaaatcagcatcaggagaaggatcaacatgagcaaaatcgaaatggtaaaagtgatacaaataattccggacctgaaattaataagattcgaacaccagagaaaaagccaacagaaccaaaacaggttgatttggaatcaaatccacagaacagaagtcctgaatcacgtcctagtgttgtttatcccagtaccaaatttcctcgcaaagataatctcaacccaagacacataaatcttccccttcctgctccccacgcacagtatgcaatccctaatcgccactttcatccccttccccagctaccaagaccaccctttccaattccacagcagcacaccttgttaaatcagcagcagaataatttgcctgaacaaccaaatcagataccacctcagccaaatcaggtagtccagcagcaaagtcagttgaatcagcagcctcagcagccacctcctcagctttctcctgcatatcaggcgggacccaacaatgctttttttaatagtgcagttgctcatcggccacagtctcctcctgcagaagctgtaattccggagcagcagccccctcccatgctgcaagaaggccacagtcctctgagagccattgcacaacccggccccattcttccttcacatctgaatagcttcattgatgagaacccctcgggattacctataggggaggctttagatcgtatacatgggagtgtcgctctggaaacattaaggcagcagcaggcacggttccagcagtggagcgagcatcatgcctttctcagtcagggcagcgctccatacccacaccatcaccatcctcacctccagcatcttcctcagccgcccctgggattacatcagccgccagtgagggcagactggaagctcaccagcagtgccgaagatgaagtggagaccacatactcaaggtttcaagacttaatcagagaactgtctcatcgtgatcaaagtgaaacacgggaactagctgaaatgccaccacctcaatcaagacttttgcaatatagacaagtacagagtagaagcccaccagcagtcccatctcccccatccagtacagaccacagtagccacttttctaactttaatgataacagcagagacattgaagtagccagcaacccagcatttccacagcgcctcccaccccagatattcaactcacctttctcgttgccatctgaacaccttgcccctcctcccttgaaatacctggcacctgatggagcatggacttttgctaacttgcaacagaatcacctaatggggccaggttttccctatggcctacctccattgcctcacaggccaccgcagaacccttttgtacaaatacagaatcatcaacatgctattggtcaagagccatttcacccattgtcatctcgaacagtatcttcttcttcgctccctagcttagaagagtatgagcccagaggacctggtcggcccttgtaccaaagaagaatctcatctagctcagttcaaccttgttctgaagaagtaagcactcctcaagacagtctggctcagtgtaaagagcttcaggaccacagtaaccaatcttctttcaacttttcatccccggagtcctgggtaaacaccacctcatctactccttatcagaacattccgtgcaatggatccagcaggacagctcagcccagagagttgatagcgccacccaagactgtcaaaccccctgaggatcaactgaagtcggagaacctcgaggtgtccagttccttcaactacagtgtgctgcagcatcttggccagtttccaccccttatgcctaacaagcagatcgcggagtcggccaatagcagtagcccccagagctctgcggggggcaagcccgccatgtcctatgccagcgctctgcgggcccctccaaagcccaggccccctcctgagcaggccaagaagagtagcgaccctctgtctctcttccaggaactgagcctagggagctcatctggcagcaatggcttttactcatattttaaataatcactttttttttccctcaagggagaatgttttaatttctgtttgtatcagtagaattaaggtagttggacttcatctatagatgcacagttccctttgttttaatattaaatatgttctcacttaattgctttgctgctagacttgcaactaatttttttaaagtatattccattattttgcatttttgatgtgtcaaaactttgacagcttttatgtagaataaaaaaatttttaaatttgtgtattgttacatatgtttgcatcaagctagcagccaagaggttaattgtgcaactataaaaaaaaaaaaaaaaagaaaagtttgtctaaaatgtatttaaaaagaaaaaaaaattgtaagtagcatttacatttattcaataatattaccacatgctgggtttctgtaccagaaatggccagttgatgtacaaatgtatgttatttttgcttaaattcatttaaattttttttaaaataaaggggcagcatcttctaaataagttttatcagctttttttttttttttggtgacacgatgctgcattctaaaacttttatagttttagactatgtatgatgtgttgttgtaatctccatccaccataggatagagttaaaggcattctttgcaggcatattttgtatgccactgttttttgaaatgtgaaaaaaacgttggcatacttagttattttttggacaagctacacttcaagcttgtttttaatgttaatttgatagtgtgtgtttttttttttaaacaaatcaagaagctgaaaaatttttaggattgttggtgcttagtagacttgataactattttaaaaatgcgtgaatttagtaaaattctttttttctcactatgcatgtgtaaatgtttgtaacctggcttccctcttctccagtggtataaagaattgtgccgctttaaggtttgggtttttttctctccagtaaaaattttggtaccttatttgatgtttacattaaaatgtgacattatacgtggcaattcaaatattttgctagctgtcttgtttgaggaacaccattaaagaagaaatataatgtttgtcaaaaatgtatcaaaattcatcagaatctggggcagaaaactacccttgtttttcatgtctttcaattcttctaaaataccccttattgaacttgtacacaatataaaatttaaatagccatcttaaatattctaccatctaaaaattgctttgaatgaattttggtaaaatccaaaggaagatgtttaccctcttgaaacttatggtcttgtcacacatttaaagcaatatatgtccttattttcctgaccttgtaatactacttttatatttcagaggtatctcgaaactacaatataaacttttaaaaaaaaataagatgaggctggggaacctttcgaatgaacccaatcttcctgatgatccattcaaaaacaggtttttggaagaccactttcgataggcaatcctataatcaaagtacatttttaaaatcaggttgtaaaatggcaaaggtaaagaaaaattactgacatttcttctatgattggagtttagtttatgttggccagctacaaccccttttaatcctcagacagtttgggataaaagagtgcctttggttaatggttagcaagctccaggataagcgctgcgtgcctcttgtattcagctctacctttctgctaagagtgcggttcatttgtgtgtggctttgcgttccaggctgtgggtctctgtgtaaggtggcagacatagacttgtaaactgcagacgtgttaatggttagcataaatcacagctggaaaactgagccggcaagttacagcaccactctttctctgtatgatgtcagatcaccacatttagcaatgtcaaattttactcaacattctttagtaggaagaaaagaagaaaaagttttgccacgtagctatgtgcttttaagtctgtgacaaaactcaagacatatccgaatgaaaattagatctctctgatgtgaggatgttatggaaaataattttcccatcagtgattatccaccccccagcccccatatacaggactacaacgcaagctagataaatgttcaaaagcaatctgataatatgaagacagaattgtcaagtcagggctttcagttgaccccttgtcatgaggttattgcctaattttctgttttctatacttgaatctttaaaaaatatcagtttttaaattatttatatttatatttagttaagggtcatggggtcgtgtatgcaccccatcaccttatataaatatgttgatgatggaagctttggataaggaagctattaagttgtcatgacatccttgttctaagcagttatttctaaaaactaaaaataatagctacttattggcccaccgctctgctgtgagtatatgagtacttctcattccttatttccatagccagtcaaggattctaacgctgcttccatctgatactcttcttagattctgcatcaaatgcttattttgacttacaacaagcttactcttcctcagcattacataatgccatctttccaaccatgctttaaagaacctgctctttacgcatagtatcttataacattttgaacacgtcttgtgtaagaatcattgcaagtttccatcaaaatgaggcgtgtcttctgagtacagctgatgttctttgggtattacttgagtagtagtagcaagtacccataaatcagatttatgaaacataacttatatgctaggttcaacccttatatatgcatatatatgtatagtatatgtatataaaatttttttccagaaaacttgatgatagctctcagataataccaagtattaccagcttccatttcttcagagcagatttttttctaagtgaggttaattgttcacataatgtctttttacatctttgtcctttgtatcactctgaagttttctttttcttgccagaatatttgtttcactttttaatttcagtgctacttgagattttctttttttttaacctgaaagacgatattttggatgatagagtttgtaaagtgagccttcatgctgaaaaaattcttttcatgatctaaaaatggtcttttgttacgatttgaagaacctcattccgtgtaacatggatattttcttgtgtgtctttaaagggggttttggttgtcatttgggcatatgctttgccaaattgttatagcagaactttgtttttgattaatcagtagttaattattgaccatttaaactaacatgaccttaattttcctttcctcacacagatgtgctttctatccaggtcattttttacacgtgaaataacaaactgctttgtgtagattttttttttttttaaatcatcagattttagaataagtttaggtttaatgtaaacatcaactggtcttttcagttcagagaactgcagaataagtaaaataagcagaattcccactgaataagcattacctaattaaacatagcaacatctaagaccaatttatgaaaatactctccttttttatggaggcattggagctgctgagaaagctaatgaatttcccaactttgggataattaatatatagtattgtgttgctctagtgtagttgattttatgtgtttaatatttttcatgtcaagagcaaagctgcagacgtaaaagatgtttctctagcccccttagctagagcgagccacctttgttaagagtcagggtgtgaagaacaatttcaagataaattttagtatttcaaccattgttattaagaaaattagacttactgaaatactcatttaaaaacagacaccttctatagcattgttttatagtggagttatttttaaaaagggaatcccagaaagaatctataaaaatacaaggttaaaactttaaatgtattgaaagatacaaattggtgctttcaaatgtcatgtaagctagccattgtgtttttttttttccctccagctcctcaatggtagtaatttgtcttttatgatttaccgtacattatttcttgctcaccatccccttaacatatgaaaatccttaatttctactgccgcgctatatgtcttcctgaatctcaaggtataaatgtcttaatggatctgatttgtctccactctttgccatctgatccacattcaaaccgcctagaaattagaaagaataggtaatgttctatctacgatttcttgttcaaaatatcacgtagtggtgccaatcacttacaaagacaccatctccatcttgaaagagtaactggcatgttagtcttgaaaatgctcattatgatatgctcctcacatttcccatctgcttgaggatggacatttattagctgagactttaaagctgctaaattcacactttctactttcatacctttttaatcagtaatgtcaagaccattgttgcaaggagtgaatcttactaaacacatcctgttattactttaaactagaatatgagattcaagagatttaaaaacaattttaatgtaacgtttaaaatttttgaaccaattgagaatgtctactttggagtgaagtttaaggaaacagtcaccagagtttctaaaaattttttggagggaggtacctaatagaagaatctagacttagaaatgtgaactgtggttaaataccaaacccagttccgcagtggtcgtctaaagcgtctaaaactggagtgttaagaaaacccagagacattcatatagtttcagttatcagagtattagaccagactttatttgcaatttgttcaacagagagattttattttgatacagatattaagcataaagcatagtaagttttatataattctatgagttcattaaacaatattatgaaattttcattatgttcgtggggagtctttttaactgtttctacctcatatatgaggtctcttctgtattttactttgcatactagcatgtgattgcctgccttagaactatgtagaggaggggaaatcgatattaccttttaagaaatttttgattttatgaagtgttttcattaatacttttttaatgtttgagaagtaaaggggaaagggtggcaaattacataggttgcaacacagagtagaagtcacatagtactatttacagatctgtcctgttttaagatttgagaattgtgaacaggatggagcaatggttctcaaacttcagccagtatcagaattgcctcgaggtcttgttaaaattcagatagctggacccacccccagcatttctgattttggtctggagcctgatgatttgcatttccaacaagtttccaggcgatgctgatgctgccagtccaggaaccacactttgaaaatcactgggtctgattctcgcagtttgaaagtctcagagaccttcagagtctgaacgtcttttcaaccatgtatttatttactcagtgtaaaaaactgatctctggagacatttttataaatctggtgccatgactggaacatttgtggagaaaggtctccatggagcgacaggccctttggattggccaccacccctcctcactctcacccctgctggggtctgcactgctcttccgcagtagggtgaaggagctctttggttttagggtgagtttgcttttgtgtacgctgctgcctggacatcagtctggaagctgtgcatttgtttggtgtgcttagggtcaatcttgatccacatgcatggaagtgagaatcctggaaagaagccatcagaatgccatgagagtgcacctagcatgtatcgaggcactaagtgcaggagtccctgtcctaagatggcagtgacatggagcatcgaaaaccacagataatccttaaataataaaataatagttttgtttttttttcttcggggcagagtctcgctctgttgccctggctggagtacagtggcatgatctcggctcactgcaacctccgcctcccggcttcaagtgattctcctgcctcagcctcccaagtagttgggactacaggcatgcgccaccacgcccagctaatttttgtattttttagtagagacggggtttcaccgtgttggccaggatggtctccatctcttgacctcatgatctgcccgcctcgggctcccaaagtgttgggattacaggcatgagccactgcgcctggcaaatgttttagtttttatggttattattattttttttttttgtgggggagggtggtgagggcaaaggatttgtttttcaaattatgtgtttctcaggttaacaaagttattttagattctctgccatgccagcaggtgttagagagagcctgaagtgttacatatggcagaaaataaatgtctctgattactttgctacctttaaaaaaatctatatgtgtttgcaaaacagcctagggggatctaccacctacacagcatgaattattcataagtcataggtgcacatgtatgagcaagttatttttgagaaagaaactgcctataatataataaacctgtcaggtctttgggtattgtttaatttgtgtgttgttgctgttttatctggactgcatcttggggggtactgggctctgcttctggtttttagtttgcctttgaatttactgagctactagaaagacaaaaaaaagctatttttatggtaatagaatacagaatgacttaggtgtaaaagtacacgtgaagaccatcgtagaatatacagctttggagttttcttaagacacagtccttcctactgaaaaggcttgctcacctttggagaggattgtttatattttcagcctgggttcctttatgcagtcccaacttagaggggagcttcggtttatttacactttgctttgcacgataacttgtatgcgaagacctctttatatctttcagtaggtcagagggctctttgtcctggttgaagtcccaaagtgtcagtgcagctgagaatgtttctcagcctccccctttacagaggaagggtcctggattttcataaatccagaccatgcctgcttcctataaatccatgtatatgacattgtactgtatctgatttctgtgccagtcatctgacctgattctttaaaccccataaaggtactggctatatgtagtagttgtatcctaggtaaatatggtgattaaaatacttctcttctaaattataaagataatgagttttgcattttattaaagggtcctgttattagtgacacaggatttttttttaatgcttcatacatatagttcttatctaaacttgttcagctaacttcatagatcagttacttagcaaattcatactgagtcttattttgggaagtcttcctgagggaagctgtacaaaactgaggtggtcaggttcatctcttcaaagtaccagttatacagccatctaaataggcataacttatggcaaaattataacaattttttttctttgcagtaaatgatacctcatctaagaggctctaatacctaaagagtttatccttaaaagtaaaagtgactttgtaccataaaataaccccaaagccactctctagggtttttattttcttctttctttgtctttatcttttctaacttagttttggaattacgttagctactttggttccatagaacaagttttcaacttggggtctacagttcctacagtgtgctcattgtctcagtgaagttcttttgttttcaaagattcatggtaacaaaatgtattttactgctacaactaaaatgtatttataataaaatgcctttttaataatttgga

SEQ ID NO: 140021 - DNA, 1872 bp, Homo sapiens
  Payload ID: 7461
  Gene Symbol: HELZ
  Gene Name: helicase with zinc finger
  ENST ID: ENST00000417253
  CDS Start-End: 172-1872
ttgacaagtggatccaagatggcgtagaaagtaatgacaggatttggatgaagtaatggatcactaatgaactacagtgctggtgagatgtgtaagaaattataaagagctctgatgggctatttgggtgatacccagtgcagtgaactgcaggatttttgtccctgagtcatggaagacagaagagctgaaaagtcatgtgaacaagcatgtgaatcacttaagaggcaggactatgaaatggccctcaagcactgcacagaggcccttctttctcttggccagtactccatggcagacttcacagggccttgtccattggaaatagaacgcatcaaaatcgagagtcttctctacagaattgcctcatttttgcaactgaaaaattatgtgcaagctgatgaagattgtagacatgtgctgggagaaggactggccaagggagaagatgcctttcgggcagtgctttgctgcatgcagctgaaagggaagctccaacctgtatccaccattcttgccaagtcactcacaggagagtccctgaatgggatggtaacaaaggatttgacaagactaaaaacacttctctcagaaacagagacagcaactagtaacgccctctctggatatcacgtggaagacttagatgaggggtcttgtaatggttggcatttccgcccaccacctaggggaatcacaagcagcgaggaatatactttgtgtaaaagatttttagaacaaggaatctgtaggtatggtgcccagtgtacttcagcacattcccaggaagaactagcagaatggcagaaaagatatgcttcacggctgataaaattgaaacagcaaaatgagaataaacagctctcaggcagttacatggaaaccttgatagaaaagtggatgaattcattgtctcctgagaaagtgcttagtgaatgtatagaaggagtaaaggtagagcacaatcctgacctgtcagttactgtcagcaccaaaaaatcccaccagacatggacctttgctctcacttgtaagcctgcaagaatgctgtatcgtgtagcattgctttatgatgctcatcgtcctcattttagtatcattgcaatatctgccggagatagtactacccaggtatcacaagaagtcccagaaaactgtcaagaatggataggaggaaagatggcccaaaatggattagatcattacgtgtataaagtcgggatagcatttaacacagaaatatttggaacttttcgccaaaccatagttttcgactttggattggaaccagtactcatgcaaagagtaatgattgatgcagcttctacagaagatctcgaatacctgatgcatgcaaaacagcagctagtaaccacagctaaacgttgggattcttcctctaagactattatagattttgaacctaatgaaactactgatttggagaagagccttcttatcagataccaaattcccctctctgctgaccagctatttactcagtccgttttagacaaatcattgaccaagagcaactatcagtcacggttacatgaccttctttatattgaggagatagcccagtataaagaaatcagcaagttcaaccttaaagtgcaattgcagattctggcaagcttcatgctcactggtgtttctggaggtgcaaagtatgctcagaatggacaactttttggtcgctttaagcttactgaaacactttctgaagatactttggctggacgactggtgatgaccaaagtcaatgctgtttatttattaccagtccctaaacagaagttagtacagacccagggaaccaaagagaaggtttatgaagctactattgaagaaaaaacaaaggaatatata

SEQ ID NO: 140022 - DNA, 583 bp, Homo sapiens
  Payload ID: 7461
  Gene Symbol: HELZ
  Gene Name: helicase with zinc finger
  ENST ID: ENST00000579861
  CDS Start-End: 387-583
gtgctcttctttctctagctagtctaagtgacttattttccagataaggaaatataggcctgaagaaattaaatgagttgctcaaggtcacacagctcagtagtagcaacattaaaccaagcttgtttttaatctttggaggcttatctcaagactcttggtctagtgctggtcatgctacattttattgaactagtgtggaccaaaagaccatatgctgggaatattggatacaaatgctttggaactgatatcttggtgaatggtgttttctactatgtattaaaaaaactttcttctttgtctttcagaaattataaagagctctgatgggctatttgggtgatacccagtgcagtgaactgcaggatttttgtccctgagtcatggaagacagaagagctgaaaagtcatgtgaacaagcatgtgaatcacttaagaggcaggactatgaaatggccctcaagcactgcacagaggcccttctttctcttggccagtactccatggcagacttcacagggccttgtccattggaaatagaacgcatcaaaatcgagagtcttctctacagaattgcctc

SEQ ID NO: 140023 - DNA, 617 bp, Homo sapiens
  Payload ID: 7461
  Gene Symbol: HELZ
  Gene Name: helicase with zinc finger
  ENST ID: ENST00000581159
  CDS Start-End: 307-617
gcagccggcgccccggattacctgccccggagtcacagtccgcagcccggacgctcccagggtggctccgcggagcctggagccacattcctaggggaggggtccccacctagagggtcgcggatcacgttacccgcccggaggaggagaccgcgggacacagagtaaacaaggggatttggatgaagtaatggatcactaatgaactacagtgctggtgagatgtgtaagaaattataaagagctctgatgggctatttgggtgatacccagtgcagtgaactgcaggatttttgtccctgagtcatggaagacagaagagctgaaaagtcatgtgaacaagcatgtgaatcacttaagaggcaggactatgaaatggccctcaagcactgcacagaggcccttctttctcttggccagtactccatggcagacttcacagggccttgtccattggaaatagaacgcatcaaaatcgagagtcttctctacagaattgcctcatttttgcaactgaaaaattatgtgcaagctgatgaagattgtagacatgtgctgggagaaggactggccaagggagaagatgcctttcgggcagtgctttgctgcatgcagct

SEQ ID NO: 140024 - DNA, 6365 bp, Homo sapiens
  Payload ID: 7461
  Gene Symbol: HELZ
  Gene Name: helicase with zinc finger
  Uniprot ID: P42694
  ENST ID: ENST00000579953
  CDS Start-End: 55-3546
ggctatttgggtgatacccagtgcagtgaactgcaggatttttgtccctgagtcatggaagacagaagagctgaaaagtcatgtgaacaagcatgtgaatcacttaagaggcaggactatgaaatggccctcaagcactgcacagaggcccttctttctcttggccagtactccatggcagacttcacagggccttgtccattggaaatagaacgcatcaaaatcgagagtcttctctacagaattgcctcatttttgcaactgaaaaattatgtgcaagctgatgaagattgtagacatgtgctgggagaaggactggccaagggagaagatgcctttcgggcagtgctttgctgcatgcagctgaaagggaagctccaacctgtatccaccattcttgccaagtcactcacaggagagtccctgaatgggatggtaacaaaggatttgacaagactaaaaacacttctctcagaaacagagacagcaactagtaacgccctctctggatatcacgtggaagacttagatgaggggtcttgtaatggttggcatttccgcccaccacctaggggaatcacaagcagcgaggaatatactttgtgtaaaagatttttagaacaaggaatctgtaggtatggtgcccagtgtacttcagcacattcccaggaagaactagcagaatggcagaaaagatatgcttcacggctgataaaattgaaacagcaaaatgagaataaacagctctcaggcagttacatggaaaccttgatagaaaagtggatgaattcattgtctcctgagaaagtgcttagtgaatgtatagaaggagtaaaggtagagcacaatcctgacctgtcagttactgtcagcaccaaaaaatcccaccagacatggacctttgctctcacttgtaagcctgcaagaatgctgtatcgtgtagcattgctttatgatgctcatcgtcctcattttagtatcattgcaatatctgccggagatagtactacccaggtatcacaagaagtcccagaaaactgtcaagaatggataggaggaaagatggcccaaaatggattagatcattacgtgtataaagtcgggatagcatttaacacagaaatatttggaacttttcgccaaaccatagttttcgactttggattggaaccagtactcatgcaaagagtaatgattgatgcagcttctacagaagatctcgaatacctgatgcatgcaaaacagcagctagtaaccacagctaaacgttgggattcttcctctaagactattatagattttgaacctaatgaaactactgatttggagaagagccttcttatcagataccaaattcccctctctgctgaccagctatttactcagtccgttttagacaaatcattgaccaagagcaactatcagtcacggttacatgaccttctttatattgaggagatagcccagtataaagaaatcagcaagttcaaccttaaagtgcaattgcagattctggcaagcttcatgctcactggtgtttctggaggtgcaaagtatgctcagaatggacaactttttggtcgctttaagcttactgaaacactttctgaagatactttggctggacgactggtgatgaccaaagtcaatgctgtttatttattaccagtccctaaacagaagttagtacagacccagggaaccaaagagaaggtttatgaagctactattgaagaaaaaacaaaggaatatatatttttaaggctatctagggaatgctgtgaagaacttaatcttcggcctgactgtgacacacaggttgaacttcagtttcaattaaatcgattacccctctgtgaaatgcactatgcactagacaggatcaaggacaatggggttttgtttccagacatcagtatgactcccaccataccatggagtcctaacagacaatgggatgaacagttggatcctcgactaaatgcaaaacagaaagaggctgttctggccattaccactccacttgcaatccagctgccgcctgtgcttatcatcggaccctatgggacaggcaaaacgttcactctagctcaggctgtcaaacatattctgcagcaacaggagactagcaggattctcatttgcacccattctaatagtgctgctgatctctacataaaggattatttacatccatatgtagaagcaggcaatccccaggcaagacctctcagggtatatttcagaaatcgctgggtaaagactgtccacccagttgtgcatcagtactgtttgatctcaagcgcacattccacctttcagatgccccagaaagaagatattcttaaacatcgagtggtggttgttaccttgaatacttcccagtacctctgtcagttggaccttgaacctgggttttttacacacattctattagatgaagctgcccaggccatggagtgtgaaaccattatgcctctagcattagcaactcaaaacactcggattgtcttggctggtgatcacatgcagctcagtccttttgtttacagcgagtttgccagggagagaaaccttcacgtttcattacttgaccgactctatgagcattaccctgctgagttcccatgtaggattctcctgtgtgagaactaccgctcccatgaagctatcatcaattatacctctgagcttttctatgagggcaaactgatggccagtgggaagcagccagcacacaaagatttctacccactaactttctttacagcacgaggagaagatgtacaagaaaaaaatagcacagctttttataataatgcagaggtgtttgaagtggtggaacgtgtagaagagttaagaaggaagtggccagtagcgtgggggaagttagatgatggcagtattggtgtggtgactccatatgctgatcaagtgtttagaatacgtgctgaacttcgaaaaaagagattatctgatgttaatgtagaaagggtgctaaatgttcaaggaaagcaattcagagttttgtttcttagcacagtacgtacaagacatacttgtaaacataaacagacaccaattaaaaagaaagagcaacttctggaagattccacagaggacttagattatggttttttatctaactacaagcttctcaatactgccatcacaagagcacaatccctggttgctgtggtgggtgatcccattgctctgtgctctattggaagatgcaggaaattttgggaacggtttattgccctgtgtcatgaaaacagtagcctacatggaatcacttttgaacagatcaaagcccagttagaggctttagaactaaagaagacatatgtgttgaatccgctggcacctgaatttatcccccgggctctaagactgcagcattcaggaagtaccaacaaacagcagcaatcaccacccaaggtaaagcctctgttaatgaaattgaagaggttaaagggagaaaacttcgcagaagtgccaaaggtttattgggatgcaagttactttaagtgttggaattgaaggttacatttggcggcaagcggtttctgcaaggagcttgtttagtgtggacatgggaaaagtcttcatcatacccagaatgatcacttccagaatgatggaattgttcagcccaatccttctgtacttattggcaatcctattagagcatatactcctccaccccctcttggacctcacccaaatttgggaaaatctccaagccctgttcaaagaatagatcctcacactgggacaagtattctttatgtacctgctgtctatggagggaatgtagttatgtcggtgcctttacctgtaccatggacaggataccagggtaggtttgcagttgatcctcgaattattacacatcaggcagcaatggcctataacatgaacctattacagacacatggacgaggatctcctattccttatggccttggacatcacccacctgtcaccataggccagccacaaaatcagcatcaggagaaggatcaacatgagcaaaatcgaaatggtaaaagtgatacaaataattccggacctgaaattaataagattcgaacaccagagaaaaagccaacagaaccaaaacaggttgatttggaatcaaatccacagaacagaagtcctgaatcacgtcctagtgttgtttatcccagtaccaaatttcctcgcaaagataatctcaacccaagacacataaatcttccccttcctgctccccacgcacagtatgcaatccctaatcgccactttcatccccttccccagctaccaagaccaccctttccaattccacagcagcacaccttgttaaatcagcagcagaataatttgcctgaacaaccaaatcagataccacctcagccaaatcaggtagtccagcagcaaagtcagttgaatcagcagcctcagcagccacctcctcagctttctcctgcatatcaggcgggacccaacaatgctttttttaatagtgcagttgctcatcggccacagtctcctcctgcagaagctgtaattccggagcagcagccccctcccatgctgcaagaaggccacagtcctctgagagccattgcacaacccggccccattcttccttcacatctgaatagcttcattgatgagaacccctcgggattacctataggggaggctttagatcgtatacatgggagtgtcgctctggaaacattaaggcagcagcaggcacggttccagcagtggagcgagcatcatgcctttctcagtcagggcagcgctccatacccacaccatcaccatcctcacctccagcatcttcctcagccgcccctgggattacatcagccgccagtgagggcagactggaagctcaccagcagtgccgaagatgaagtggagaccacatactcaaggtttcaagacttaatcagagaactgtctcatcgtgatcaaagtgaaacacgggaactagctgaaatgccaccacctcaatcaagacttttgcaatatagacaagtacagagtagaagcccaccagcagtcccatctcccccatccagtacagaccacagtagccacttttctaactttaatgataacagcagagacattgaagtagccagcaacccagcatttccacagcgcctcccaccccagatattcaactcacctttctcgttgccatctgaacaccttgcccctcctcccttgaaatacctggcacctgatggagcatggacttttgctaacttgcaacagaatcacctaatggggccaggttttccctatggcctacctccattgcctcacaggccaccgcagaacccttttgtacaaatacagaatcatcaacatgctattggtcaagagccatttcacccattgtcatctcgaacagtatcttcttcttcgctccctagcttagaagagtatgagcccagaggacctggtcggcccttgtaccaaagaagaatctcatctagctcagttcaaccttgttctgaagaagtaagcactcctcaagacagtctggctcagtgtaaagagcttcaggaccacagtaaccaatcttctttcaacttttcatccccggagtcctgggtaaacaccacctcatctactccttatcagaacattccgtgcaatggatccagcaggacagctcagcccagagagttgatagcgccacccaagactgtcaaaccccctgaggatcaactgaagtcggagaacctcgaggtgtccagttccttcaactacagtgtgctgcagcatcttggccagtttccaccccttatgcctaacaagcagatcgcggagtcggccaatagcagtagcccccagagctctgcggggggcaagcccgccatgtcctatgccagcgctctgcgggcccctccaaagcccaggccccctcctgagcaggccaagaagagtagcgaccctctgtctctcttccaggaactgagcctagggagctcatctggcagcaatggcttttactcatattttaaataatcactttttttttccctcaagggagaatgttttaatttctgtttgtatcagtagaattaaggtagttggacttcatctatagatgcacagttccctttgttttaatattaaatatgttctcacttaattgctttgctgctagacttgcaactaatttttttaaagtatattccattattttgcatttttgatgtgtcaaaactttgacagcttttatgtagaataaaaaaatttttaaatttgtgtattgttacatatgtttgcatcaagctagcagccaagaggttaattgtgcaactataaaaaaaaaaaaaaaaagaaaa

SEQ ID NO: 140025 - DNA, 577 bp, Homo sapiens
  Payload ID: 7461
  Gene Symbol: HELZ
  Gene Name: helicase with zinc finger
  ENST ID: ENST00000578783
  CDS Start-End: 1-577
ttttcgccaaaccatagttttcgactttggattggaaccagtactcatgcaaagagtaatgattgatgcagcttctacagaagttttcttttttaggtatatgtatgtttcactcaatagaaaagtaatacgcactacatatagagtgagccaacccagtgctcagagtttatgttactatggatttcatcttgtgctggtattgtgctactttttttcccctgatctcgaatacctgatgcatgcaaaacagcagctagtaaccacagctaaacgttgggattcttcctctaagactattatagattttgaacctaatgaaactactgatttggagaagagccttcttatcagataccaaattcccctctctgctgaccagctatttactcagtccgttttagacaaatcattgaccaagagcaactatcagtcacggttacatgaccttctttatattgaggagatagcccagtataaagaaatcagcaagttcaaccttaaagtgcaattgcagattctggcaagcttcatgctcactggtgtttctggaggtgcaaagtatgctcagaatgga

SEQ ID NO: 140026 - DNA, 6279 bp, Homo sapiens
  Payload ID: 7461
  Gene Symbol: HELZ
  Gene Name: helicase with zinc finger
  ENST ID: ENST00000580168
  CDS Start-End: 168-5999
caagtggatccaagatggcgtagaaagtaatgacaggatttggatgaagtaatggatcactaatgaactacagtgctggtgagatgtgtaagaaattataaagagctctgatgggctatttgggtgatacccagtgcagtgaactgcaggatttttgtccctgagtcatggaagacagaagagctgaaaagtcatgtgaacaagcatgtgaatcacttaagaggcaggactatgaaatggccctcaagcactgcacagaggcccttctttctcttggccagtactccatggcagacttcacagggccttgtccattggaaatagaacgcatcaaaatcgagagtcttctctacagaattgcctcatttttgcaactgaaaaattatgtgcaagctgatgaagattgtagacatgtgctgggagaaggactggccaagggagaagatgcctttcgggcagtgctttgctgcatgcagctgaaagggaagctccaacctgtatccaccattcttgccaagtcactcacaggagagtccctgaatgggatggtaacaaaggatttgacaagactaaaaacacttctctcagaaacagagacagcaactagtaacgccctctctggatatcacgtggaagacttagatgaggggtcttgtaatggttggcatttccgcccaccacctaggggaatcacaagcagcgaggaatatactttgtgtaaaagatttttagaacaaggaatctgtaggtatggtgcccagtgtacttcagcacattcccaggaagaactagcagaatggcagaaaagatatgcttcacggctgataaaattgaaacagcaaaatgagaataaacagctctcaggcagttacatggaaaccttgatagaaaagtggatgaattcattgtctcctgagaaagtgcttagtgaatgtatagaaggagtaaaggtagagcacaatcctgacctgtcagttactgtcagcaccaaaaaatcccaccagacatggacctttgctctcacttgtaagcctgcaagaatgctgtatcgtgtagcattgctttatgatgctcatcgtcctcattttagtatcattgcaatatctgccggagatagtactacccaggtatcacaagaagtcccagaaaactgtcaagaatggataggaggaaagatggcccaaaatggattagatcattacgtgtataaagtcgggatagcatttaacacagaaatatttggaacttttcgccaaaccatagttttcgactttggattggaaccagtactcatgcaaagagtaatgattgatgcagcttctacagaagatctcgaatacctgatgcatgcaaaacagcagctagtaaccacagctaaacgttgggattcttcctctaagactattatagattttgaacctaatgaaactactgatttggagaagagccttcttatcagataccaaattcccctctctgctgaccagctatttactcagtccgttttagacaaatcattgaccaagagcaactatcagtcacggttacatgaccttctttatattgaggagatagcccagtataaagaaatcagcaagttcaaccttaaagtgcaattgcagattctggcaagcttcatgctcactggtgtttctggaggtgcaaagtatgctcagaatggacaactttttggtcgctttaagcttactgaaacactttctgaagatactttggctggacgactggtgatgaccaaagtcaatgctgtttatttattaccagtccctaaacagaagttagtacagacccagggaaccaaagagaaggtttatgaagctactattgaagaaaaaacaaaggaatatatatttttaaggctatctagggaatgctgtgaagaacttaatcttcggcctgactgtgacacacaggttgaacttcagtttcaattaaatcgattacccctctgtgaaatgcactatgcactagacaggatcaaggacaatggggttttgtttccagacatcagtatgactcccaccataccatggagtcctaacagacaatgggatgaacagttggatcctcgactaaatgcaaaacagaaagaggctgttctggccattaccactccacttgcaatccagctgccgcctgtgcttatcatcggaccctatgggacaggcaaaacgttcactctagctcaggctgtcaaacatattctgcagcaacaggagactagcaggattctcatttgcacccattctaatagtgctgctgatctctacataaaggattatttacatccatatgtagaagcaggcaatccccaggcaagacctctcagggtatatttcagaaatcgctgggtaaagactgtccacccagttgtgcatcagtactgtttgatctcaagcgcacattccacctttcagatgccccagaaagaagatattcttaaacatcgagtggtggttgttaccttgaatacttcccagtacctctgtcagttggaccttgaacctgggttttttacacacattctattagatgaagctgcccaggccatggagtgtgaaaccattatgcctctagcattagcaactcaaaacactcggattgtcttggctggtgatcacatgcagctcagtccttttgtttacagcgagtttgccagggagagaaaccttcacgtttcattacttgaccgactctatgagcattaccctgctgagttcccatgtaggattctcctgtgtgagaactaccgctcccatgaagctatcatcaattatacctctgagcttttctatgagggcaaactgatggccagtgggaagcagccagcacacaaagatttctacccactaactttctttacagcacgaggagaagatgtacaagaaaaaaatagcacagctttttataataatgcagaggtgtttgaagtggtggaacgtgtagaagagttaagaaggaagtggccagtagcgtgggggaagttagatgatggcagtattggtgtggtgactccatatgctgatcaagtgtttagaatacgtgctgaacttcgaaaaaagagattatctgatgttaatgtagaaagggtgctaaatgttcaaggaaagcaattcagagttttgtttcttagcacagtacgtacaagacatacttgtaaacataaacagacaccaattaaaaagaaagagcaacttctggaagattccacagaggacttagattatggttttttatctaactacaagcttctcaatactgccatcacaagagcacaatccctggttgctgtggtgggtgatcccattgctctgtgctctattggaagatgcaggaaattttgggaacggtttattgccctgtgtcatgaaaacagtagcctacatggaatcacttttgaacagatcaaagcccagttagaggctttagaactaaagaagacatatgtgttgaatccgctggcacctgaatttatcccccgggctctaagactgcagcattcaggaagtaccaacaaacagcagcaatcaccacccaaggggaaaagtcttcatcatacccagaatgatcacttccagaatgatggaattgttcagcccaatccttctgtacttattggcaatcctattagagcatatactcctccaccccctcttggacctcacccaaatttgggaaaatctccaagccctgttcaaagaatagatcctcacactgggacaagtattctttatgtacctgctgtctatggagggaatgtagttatgtcggtgcctttacctgtaccatggacaggataccagggtaggtttgcagttgatcctcgaattattacacatcaggcagcaatggcctataacatgaacctattacagacacatggacgaggatctcctattccttatggccttggacatcacccacctgtcaccataggccagccacaaaatcagcatcaggagaaggatcaacatgagcaaaatcgaaatggtaaaagtgatacaaataattccggacctgaaattaataagattcgaacaccagagaaaaagccaacagaaccaaaacaggttgatttggaatcaaatccacagaacagaagtcctgaatcacgtcctagtgttgtttatcccagtaccaaatttcctcgcaaagataatctcaacccaagacacataaatcttccccttcctgctccccacgcacagtatgcaatccctaatcgccactttcatccccttccccagctaccaagaccaccctttccaattccacagcagcacaccttgttaaatcagcagcagaataatttgcctgaacaaccaaatcagataccacctcagccaaatcaggtagtccagcagcaaagtcagttgaatcagcagcctcagcagccacctcctcagctttctcctgcatatcaggcgggacccaacaatgctttttttaatagtgcagttgctcatcggccacagtctcctcctgcagaagctgtaattccggagcagcagccccctcccatgctgcaagaaggccacagtcctctgagagccattgcacaacccggccccattcttccttcacatctgaatagcttcattgatgagaacccctcgggattacctataggggaggctttagatcgtatacatgggagtgtcgctctggaaacattaaggcagcagcaggcacggttccagcagtggagcgagcatcatgcctttctcagtcagggcagcgctccatacccacaccatcaccatcctcacctccagcatcttcctcagccgcccctgggattacatcagccgccagtgagggcagactggaagctcaccagcagtgccgaagatgaagtggagaccacatactcaaggtttcaagacttaatcagagaactgtctcatcgtgatcaaagtgaaacacgggaactagctgaaatgccaccacctcaatcaagacttttgcaatatagacaagtacagagtagaagcccaccagcagtcccatctcccccatccagtacagaccacagtagccacttttctaactttaatgataacagcagagacattgaagtagccagcaacccagcatttccacagcgcctcccaccccagatattcaactcacctttctcgttgccatctgaacaccttgcccctcctcccttgaaatacctggcacctgatggagcatggacttttgctaacttgcaacagaatcacctaatggggccaggttttccctatggcctacctccattgcctcacaggccaccgcagaacccttttgtacaaatacagaatcatcaacatgctattggtcaagagccatttcacccattgtcatctcgaacagtatcttcttcttcgctccctagcttagaagagtatgagcccagaggacctggtcggcccttgtaccaaagaagaatctcatctagctcagttcaaccttgttctgaagaagtaagcactcctcaagacagtctggctcagtgtaaagagcttcaggaccacagtaaccaatcttctttcaacttttcatccccggagtcctgggtaaacaccacctcatctactccttatcagaacattccgtgcaatggatccagcaggacagctcagcccagagagttgatagcgccacccaagactgtcaaaccccctgaggatcaactgaagtcggagaacctcgaggtgtccagttccttcaactacagtgtgctgcagcatcttggccagtttccaccccttatgcctaacaagcagatcgcggagtcggccaatagcagtagcccccagagctctgcggggggcaagcccgccatgtcctatgccagcgctctgcgggcccctccaaagcccaggccccctcctgagcaggccaagaagagtagcgaccctctgtctctcttccaggaactgagcctagggagctcatctggcagcaatggcttttactcatattttaaataatcactttttttttccctcaagggagaatgttttaatttctgtttgtatcagtagaattaaggtagttggacttcatctatagatgcacagttccctttgttttaatattaaatatgttctcacttaattgctttgctgctagacttgcaactaatttttttaaagtatattccattattttgcatttttgatgtgtcaaaactttgacagcttttatgtagaataaaaaaatttttaaatttgtgtattgttacatatgtttgcatcaagctagcagcca

SEQ ID NO: 140027 - DNA, 7827 bp, Homo sapiens
  Payload ID: 7462
  Gene Symbol: HELZ2
  Gene Name: helicase with zinc finger 2, transcriptional coactivator
  Uniprot ID: Q9BYK8
  ENST ID: ENST00000427522
  CDS Start-End: 425-6667
gtttttcgtttttatagaaacacagatctttgtcctaaccacaaggttcccctttggtttatgtggtttcctctggttcctgccaccaccacctccccaggccggggccttcccatccctgcccagtggggagtgggaggaagagcctgggacagtggccatacgtcccgggctgatttctggattgggggttctggggaccagggaggtgcaggtgtctgcagtgtcagaggagccgctgggctcgcccaggtgttgcctgaagccctccgtggcctcttgccccttggactcctgacaggagggacaccagtgtttgctgctcacctctgacagccagacaagggctgtgctcaggggcagctcggctgggcacacagtaggtgctttagcggacagcactgaggcccccagcaagaagcccatgagctcctccccctcccgcagtgccgccgacatctacatccgggagtatttccacagccacgtcagcggcggccaccccgaggccactcctctccgtgtgatgtacacggaccggccgctgagccagacggacccagtcacgctgcagtactgttgcctgaccgacgaccgccaggctttccgcccgcccacacgggcagagctggcgcggcaccgcgtggtggtcaccaccacctcccaggcccgtgagctcagggtgccggtcggcttcttctcccacattctcatcgatgaggcggcccagatgctggagtgcgaggccctcaccccgctggcctatgcctcgcacggcacccgcctcgtgctggcgggcgaccacatgcaggtcacaccccggctgttcagtgtggccagggcccgggcggccgagcacacgctgctgcaccgcctcttcctgtgctaccagcaggagactcacgaggtggcgcggcagagccgcctggtcttccacgagaactaccgctgcacggacgccattgtcagcttcatctcgcggcacttctacgtggccaagggcaaccccatccacgccaggggcaaggttccgccccacccccggcactacccgctcatgttctgccacgtggcgggcagcccagaccgggacatgtccatggcgtcctggctgaatctggctgagattgcgcaggtcgtcgagaaggtgcaggaggcctacaacacctggcccagctgctggggcggccgcgagcagaggtgcatctgtgtcgtttcccacggtgcccaggtcagtgcactgaggcaggagctgaggaggcgggacctaggccaggtgtctgtcggcagttttgagatcctgccagggcggcagttccgggtcgtggtgctcagcactgtgcacacctgccagagcctgctcagccctggggcactggcccctgagttcttcaccgacgcccgcgtgctcaacaccgtcctgacccgcgcccagtcccagctggtggtagtgggggacgccgtggccctctgctccttcggggcctgcggcaagctctgggagagcttcatccgtgagtgcgtggagcggcacagtgtctgccccgagggcctgtccatggagcaggtcgagcagggtgtggcgcagagacggcgctggcctccccgaggcacacaggctggggcagcggggaactgggaggctgccccagagccagtaggggacctggccgaggagcaggcggctgtggtgacggccatggtgaaggcagagccgggagatgaggctctgagcccagcatcccgtgacatcacggcaaccacagcgcagacggaggctgcggcagcaccagcaggagacgcagtgaaggaagacgtggtgcccggggcctgtgcggcaggagcggctgctgcagcgggcgtggagtccacggaggctgaggatgcagaggctgacttctggccgtgggacggggagctcaacgctgacgacgccatcctacgggagcttctggacgagagccagaaggtgatggtgaccgtcggggaggacgggctgctggacactgtcgccaggcccgagtccctgcagcaggcccggctgtacgagaacctgcccccggctgcgctacggaagctgctgcacgcggagcccgagcggtaccgccactgctctttcgtgccagagaccttcgagcgggcgtcagccatcccgctggacgatgcctcctcgggccccatccaggtcaggggccgcctggactgtgggatggccttcgccggggatgaggtgctggtgcagctcctttcgggagacaaggcgcccgaggggcggcttcggggccgcgtgctgggcgtgctgaagaggaagaggcacgagctggcgtttgtgtgccgcatggacacgtgggacccgcgcatcatggtccccatcaatggctccgtgaccaagatcttcgtggccgagctgaaggacccatcgcaggtccccatctacagcctccggaagggccggctgcagcgtgtggggcttgagaggctcaccgccgaggcccggcacagccggctcttctgggtccaaattgtcctgtggcggcaaggcttctactacccgctgggcatcgtccgggaggtgctgcctgaggccagcacctgggagcagggcctccgcatcctcggcctggagtacagcttgagggtgcccccgtcggaccaggccaccatcaccaaggtgctgcagaaataccacacggagcttggccgggttgccggccgccgagaggactgccgcgccttcttgaccttcactgtggacccccagggcgcctgcaacctcgatgatgccctcagtgtccgagacctgggtcccaggtgcgaggtggctgtgcacatcactgatgtggccagcttcgtgcccagggacggggtgctggacgtggaggcgcgaaggcagggcgctgcgttctatgcccccggcagggagccagtgcccatgctgccggccagcctctgccaggacgtcctcagcctcctgcctggccgggaccgcctggccatctccctgttcctcaccatggagaaggccagtggccagctgaagagcctgcgctttgcaccctccgtggtccagtctgaccgccagctgtcctacgaggaggcggaggaggtgatcaggcagcacccgggtgccggccgtgagctgccggcccgcctggactccgtggacgcctgcgtcgtggccgcgtgctacttctctcggctgctgcgccggcaccgcctgcggtccgactgcttctatgagcagccggacgaggacggcaccctgggcttccgcgcggcccacatcatggtgaaggagtacatgattcagtttaataggctcgtggctgagttcctggtgggcagcgagtgcacgcggacggtcacgcctctgcggtggcagccagcaccccgcagccagcagctcaaggccctgtgtgagaagcatggggaccgggtgcccctgtcactgcacctcggccaccacctgcacggcggcgggggcagtccccccgacacgcggctgcacctcctggcctccctctggaagcaggtccagtttgctgcccgcacccaggactacgaacagatggtggacttggtcaccacggacgacatgcacccattcctggctcctgcaggccgcgacctccgcaaggccctggagcgctcggcgttcggccgctgcgcccggggccaccagcagcagggcggccactactcgctgcaggtggactggtacacgtgggccacctcgcccatccgcaggtacctggacgtggtgttgcagcggcagatcctgctggcgctgggccatgggggctctgcctactctgccagggacatcgatgggctctgccaggccttcagcctccagcacgcacttgcccagagctatcagcggcgggcgcgcagcctgcacctggccgtgcagctcaaggcccagcctctggacaagctgggcttcgtggtggacgtggaggcgggctcccgctgcttccggctgctcttccccagcaaccgggagacgctgcctgacccctgccccgtcccctacggctccctgcagctggccgagcacccccacgccctggcaggccggccgggcctgcggctcctgtggcggcgccgtgtctactcagcgcagggatccagcccgcccctgccactgcctggcactgtgccggacccacacaccctggccgtggagacggccctgtggaagcagctgctggagctggtggagctgcagcgctggccggaggcggctgctctcatccaggagaagggcgaggcgtcccagcggcgggagctggtgcaggtgcagcggagccactgtggccatttcctggaggtggcccgggagctgggcagtggggacaccctgcaggtgcagctcggcaccagcctgcagcacggcttcctggtaccgagccctcagctctggacggtggcaccgggcttcagcctctgcctggagcacgtggagcggcccggagactgcttctcaggccgtgtgtaccgggccccgagggaccggtaccgcgacgtggatgagtacgcctgcgtgtgggaaccattctgcgccctggagtcggccaccggcgcggttgccgagaatgactccgtcacacttcagcacctgagtgtctcctgggaggcgtcacggacgccgcaggggcagctgcagggcgccttccgcctggaggccgccttcctcgaggagaactgtgccgacatcaacttcagctgctgctacctctgcatccggctcgaggggctgccggctcccacggccagcccacgccctgggcccagcagcctcggccctggcctgaatgttgaccccggcacgtatacctgggtggcccacgggcagacgcaggactgggaccaggagcgccgggcagaccggcaggaggctcccagacgggtgcacctcttcgtccaccacatgggcatggagaaggttccggaagaggtgctgaggccgggcaccctgttcaccgttgagctgctgcccaagcagcttcctgatctccgcaaggaggaagccgtgcgtggactagaggaggcgtccccgctggtcaccagcatcgcactgggccggcctgtcccgcagcccctctgcagagtgatccccagcaggttcctggagcggcagacctacaacatccccggaggccgccacaagctgaaccccagccagaacgtggcggtcagggaggctctggagaagcctttcacggtcattcagggcccaccaggtacagggaagacgatcgtgggcctccacatcgtattctggtttcataaatcaaaccaggagcaggtgcagcccggaggccccccccgtggggagaagcggctggggggtccctgcatcttgtactgcggcccctccaacaagtcggtggatgtcctggcaggactgctcctgagaaggatggagctgaagcccctccgtgtgtacagtgagcaggctgaggccagcgagttcccagtgccgcgtgtgggcagcaggaagctgctcaggaagagcccccgggaggggaggccgaaccagagcctcaggagcatcaccctgcaccaccggatccggcaggcccccaacccttactcgtcggaaatcaaggcctttgacacccggctgcagagaggggagctcttctccagggaggacctggtctggtacaagaaggtcttgtgggaggctcggaagttcgagctggaccggcatgaggtcatcctctgcacctgctcctgtgcagcctctgccagcctcaaaatcctggacgtgaggcagatccttgttgacgaggcaggcatggccacggaacctgaaaccctcatccccctggtgcagttcccacaggccgagaaggtggttcttctcggagaccacaagcagctgcggcctgtggtcaagaatgagcggctgcaaaacctgggtctggaccggtctctgttcgagcggtaccacgaggacgcacatatgctggacactcagtaccgcatgcatgagggcatctgtgccttcccctctgtggcgttctacaagagcaagctgaagacgtggcagggcctgaggaggccgcccagtgtcctgggccacgctggcaaggagagctgccctgtcatctttggccacgtgcagggccacgagcggagcctgctggtgtccacggacgaagggaatgagaactccaaggccaacctggaggaggtggctgaggtggtccgtatcaccaagcagctgaccctggggaggaccgtagagccccaggacatcgccgtcctcacgccctacaacgcgcaggcctctgagatcagcaaggcccttcggcgagagggcatcgccggggtggccgtgtcctccatcaccaagagccaggggagcgagtggcgctatgtgctggtgagcaccgtccgcacctgtgccaagagcgacctggaccagcggcccaccaagagctggctcaagaagtttctgggcttcgttgtggaccccaaccaagtgaatgtggctgtcacgcgggcccaggaggggctctgcctgatcggagaccacctccttctgcgctgctgccccctctggcgtagcctcctggacttctgcgaggctcagcagaccctcgtgcctgccggccaggtgcgcgtctgcaggaggccaactatgccttcctgaagagccctctccacctgcaaggtgccaggactgggagggaaagtccagggcccccccaccctccccaccaccctccgccatcagcctgcctgggccagcctgcctcctggcctcaggatctccctggggcaggaagtgggtggacttggaggaggaacggcaagggccggtccccacactcttgctcctcctgggcatctggggacaggaacacctctcagggtggccaagaggggcttccttgggaccagtgcaaggaagttctgctgtccctgggaagtctcagaaccaggaaggaaaccctgtggaggctgccctttgacctttggacgccacctgtaatcactctggatggtgtctgtggagttcaggtttattttctatttaaatgaactaaaagccagcatcctgccgggcgtggtggctcacgcccataatccagcactttgggaagccgaggcgggcagatcacctgaggtcaggagttcgagaccatcctggccaacatggtgaaaccccgtctccactaaaaatacaaaattagctgggcgtggtggcgggcgcctgtaatcccagctacttgggaggctgaggcaggagaatcgcttgactccaggaggcgcaggctgcagtgagctctgatggtaccactgcactccagcctgggtgacagagcgagaccctgtcttaaaaaaaaaaacaaaacaaaaccagcatctgttactggaacagagacctcagcccaagctcaggacaaggaggcctccctgggagagggggcctttctcccaccatcaccgcctgtgtccttcaggggctgctggagggcagcccaaagccaggggcccaccccgccccaccccaccccaccccaccctctgaaatgtgaaaagcctgcactcttcctgtgggctgcgcagtgggctcgggggttggggggtgccggggcgatgcttccaccctggactgagtgttcggggcagcctgctcggctgtatgtttctcgcacgctcacccgcttcagtgcggctctgtccctgctgccgcctccagtcctgagggaggggcttgccccaccttctacattccaatttttatatctttgaattatgtgattagatattaatttaatgataaaaccactctgaaagctcttctca

SEQ ID NO: 140028 - DNA, 8064 bp, Homo sapiens
  Payload ID: 7462
  Gene Symbol: HELZ2
  Gene Name: helicase with zinc finger 2, transcriptional coactivator
  Uniprot ID: Q9BYK8
  ENST ID: ENST00000467148
  CDS Start-End: 71-8020
gtttgtggggcgtgggcagccgtgctggcgtggggagtcccgctgccagtttgcacacagcgccgtggagatggctgtgtgggaggccgagcagctgggtggcctccagcggggggacctgctcacaccccctgcccctgatggcgacgggcgcacggccccccttggccagccccctggggcccagctgtactgcccggcctgcttggtcacctgccactctcaggaggccttcgagaaccactgcgcatcctcggagcacgcacagatggtggccttcgaccaggccctgccctgggagcaccgttccccacccccgggactctccaagttcgagctctgcccaaagcctgacctctgtgagtatggggacgcctgcaccaaggcacactcagcacaggagctgcaggagtgggtccggcgcacgcaggctgtggagctgcgggggcaggcggcctggcaggacgggctggtgccctaccaggagcggctgctggccgagtaccagcgcagcagcagtgaggtccttgtgctggcagagacccttgatggagtgcgtgtcacctgcaaccagcccctgatgtaccaggcccaggagaggaagacccagtacagctggacgtttgccgtccactctgaggagcccctgctacacgtggccctgctgaagcaggagccaggagccgacttctctctggtggctcccggcctcccgccaggccggctctacgcacggggtgagcgcttccgtgtgcccagctccactgccgacttccaggtgggagtgcgtgtgcaggctgcctcgttcggcacctttgagcaatgggtggtcttcgactttggccgccggccggtgctgctacaaaagctggggctgcagctgggccaggggcgtcgcccaggaccctgcaggaatctggcgctcggccaccctgaggagatggagcgctggcacactggcaaccgccacgtggtgcctggcgtggagcggacggccgagcagacggccctgatggccaagtacaagggccctgccctggccctggagttcaaccgcagcagcgtggcctcgggccccatctcaccaaccaactatcggcagaggatgcaccagtttctctatgaggaggaggcggctcagcagcagctggtggccaagctgaccctgcggggccaggtgttcctgaagacggcattgcagacgccagcgctgaacatgctcttcgcgcctccgggagcactgtacgcagaggtccccgtcccctcctccctgatgccagacacagaccagggcttcctgctgggccgggcggtcagcacagccctggtggcccctgtacctgcacccgacaatacggtgttcgaggtgcggctggagaggcgggccagctcagagcaggcgctgtggctgctgcttccggcccgctgctgcttggccctggggctgcagcctgaggcccgcctggtcctggaggtgcagttccagattgacccgatgaccttccgcctctggcaccaggcagtggacacactgcctgaggagcagctggtggtgcccgacttgcccacctgcgccctgcccagaccttggtctgtcccacccttgcggcgtggcaaccgcaagcaggagctggccgtggcgctcatcgcgggctggggccctggggatgggaggcgtgtccccccgctactcatctatggcccctttggcaccggcaagacctacacgctggccatggcctccctggaggtcatccggaggcctgaaaccaaggtgctcatctgcacacacaccaacagtgccgccgacatctacatccgggagtatttccacagccacgtcagcggcggccaccccgaggccactcctctccgtgtgatgtacacggaccggccgctgagccagacggacccagtcacgctgcagtactgttgcctgaccgacgaccgccaggctttccgcccgcccacacgggcagagctggcgcggcaccgcgtggtggtcaccaccacctcccaggcccgtgagctcagggtgccggtcggcttcttctcccacattctcatcgatgaggcggcccagatgctggagtgcgaggccctcaccccgctggcctatgcctcgcacggcacccgcctcgtgctggcgggcgaccacatgcaggtcacaccccggctgttcagtgtggccagggcccgggcggccgagcacacgctgctgcaccgcctcttcctgtgctaccagcaggagactcacgaggtggcgcggcagagccgcctggtcttccacgagaactaccgctgcacggacgccattgtcagcttcatctcgcggcacttctacgtggccaagggcaaccccatccacgccaggggcaaggttccgccccacccccggcactacccgctcatgttctgccacgtggcgggcagcccagaccgggacatgtccatggcgtcctggctgaatctggctgagattgcgcaggtcgtcgagaaggtgcaggaggcctacaacacctggcccagctgctggggcggccgcgagcagaggtgcatctgtgtcgtttcccacggtgcccaggtcagtgcactgaggcaggagctgaggaggcgggacctaggccaggtgtctgtcggcagttttgagatcctgccagggcggcagttccgggtcgtggtgctcagcactgtgcacacctgccagagcctgctcagccctggggcactggcccctgagttcttcaccgacgcccgcgtgctcaacaccgtcctgacccgcgcccagtcccagctggtggtagtgggggacgccgtggccctctgctccttcggggcctgcggcaagctctgggagagcttcatccgtgagtgcgtggagcggcacagtgtctgccccgagggcctgtccatggagcaggtcgagcagggtgtggcgcagagacggcgctggcctccccgaggcacacaggctggggcagcggggaactgggaggctgccccagagccagtaggggacctggccgaggagcaggcggctgtggtgacggccatggtgaaggcagagccgggagatgaggctctgagcccagcatcccgtgacatcacggcaaccacagcgcagacggaggctgcggcagcaccagcaggagacgcagtgaaggaagacgtggtgcccggggcctgtgcggcaggagcggctgctgcagcgggcgtggagtccacggaggctgaggatgcagaggctgacttctggccgtgggacggggagctcaacgctgacgacgccatcctacgggagcttctggacgagagccagaaggtgatggtgaccgtcggggaggacgggctgctggacactgtcgccaggcccgagtccctgcagcaggcccggctgtacgagaacctgcccccggctgcgctacggaagctgctgcacgcggagcccgagcggtaccgccactgctctttcgtgccagagaccttcgagcgggcgtcagccatcccgctggacgatgcctcctcgggccccatccaggtcaggggccgcctggactgtgggatggccttcgccggggatgaggtgctggtgcagctcctttcgggagacaaggcgcccgaggggcggcttcggggccgcgtgctgggcgtgctgaagaggaagaggcacgagctggcgtttgtgtgccgcatggacacgtgggacccgcgcatcatggtccccatcaatggctccgtgaccaagatcttcgtggccgagctgaaggacccatcgcaggtccccatctacagcctccggaagggccggctgcagcgtgtggggcttgagaggctcaccgccgaggcccggcacagccggctcttctgggtccaaattgtcctgtggcggcaaggcttctactacccgctgggcatcgtccgggaggtgctgcctgaggccagcacctgggagcagggcctccgcatcctcggcctggagtacagcttgagggtgcccccgtcggaccaggccaccatcaccaaggtgctgcagaaataccacacggagcttggccgggttgccggccgccgagaggactgccgcgccttcttgaccttcactgtggacccccagggcgcctgcaacctcgatgatgccctcagtgtccgagacctgggtcccaggtgcgaggtggctgtgcacatcactgatgtggccagcttcgtgcccagggacggggtgctggacgtggaggcgcgaaggcagggcgctgcgttctatgcccccggcagggagccagtgcccatgctgccggccagcctctgccaggacgtcctcagcctcctgcctggccgggaccgcctggccatctccctgttcctcaccatggagaaggccagtggccagctgaagagcctgcgctttgcaccctccgtggtccagtctgaccgccagctgtcctacgaggaggcggaggaggtgatcaggcagcacccgggtgccggccgtgagctgccggcccgcctggactccgtggacgcctgcgtcgtggccgcgtgctacttctctcggctgctgcgccggcaccgcctgcggtccgactgcttctatgagcagccggacgaggacggcaccctgggcttccgcgcggcccacatcatggtgaaggagtacatgattcagtttaataggctcgtggctgagttcctggtgggcagcgagtgcacgcggacggtcacgcctctgcggtggcagccagcaccccgcagccagcagctcaaggccctgtgtgagaagcatggggaccgggtgcccctgtcactgcacctcggccaccacctgcacggcggcgggggcagtccccccgacacgcggctgcacctcctggcctccctctggaagcaggtccagtttgctgcccgcacccaggactacgaacagatggtggacttggtcaccacggacgacatgcacccattcctggctcctgcaggccgcgacctccgcaaggccctggagcgctcggcgttcggccgctgcgcccggggccaccagcagcagggcggccactactcgctgcaggtggactggtacacgtgggccacctcgcccatccgcaggtacctggacgtggtgttgcagcggcagatcctgctggcgctgggccatgggggctctgcctactctgccagggacatcgatgggctctgccaggccttcagcctccagcacgcacttgcccagagctatcagcggcgggcgcgcagcctgcacctggccgtgcagctcaaggcccagcctctggacaagctgggcttcgtggtggacgtggaggcgggctcccgctgcttccggctgctcttccccagcaaccgggagacgctgcctgacccctgccccgtcccctacggctccctgcagctggccgagcacccccacgccctggcaggccggccgggcctgcggctcctgtggcggcgccgtgtctactcagcgcagggatccagcccgcccctgccactgcctggcactgtgccggacccacacaccctggccgtggagacggccctgtggaagcagctgctggagctggtggagctgcagcgctggccggaggcggctgctctcatccaggagaagggcgaggcgtcccagcggcgggagctggtgcaggtgcagcggagccactgtggccatttcctggaggtggcccgggagctgggcagtggggacaccctgcaggtgcagctcggcaccagcctgcagcacggcttcctggtaccgagccctcagctctggacggtggcaccgggcttcagcctctgcctggagcacgtggagcggcccggagactgcttctcaggccgtgtgtaccgggccccgagggaccggtaccgcgacgtggatgagtacgcctgcgtgtgggaaccattctgcgccctggagtcggccaccggcgcggttgccgagaatgactccgtcacacttcagcacctgagtgtctcctgggaggcgtcacggacgccgcaggggcagctgcagggcgccttccgcctggaggccgccttcctcgaggagaactgtgccgacatcaacttcagctgctgctacctctgcatccggctcgaggggctgccggctcccacggccagcccacgccctgggcccagcagcctcggccctggcctgaatgttgaccccggcacgtatacctgggtggcccacgggcagacgcaggactgggaccaggagcgccgggcagaccggcaggaggctcccagacgggtgcacctcttcgtccaccacatgggcatggagaaggttccggaagaggtgctgaggccgggcaccctgttcaccgttgagctgctgcccaagcagcttcctgatctccgcaaggaggaagccgtgcgtggactagaggaggcgtccccgctggtcaccagcatcgcactgggccggcctgtcccgcagcccctctgcagagtgatccccagcaggttcctggagcggcagacctacaacatccccggaggccgccacaagctgaaccccagccagaacgtggcggtcagggaggctctggagaagcctttcacggtcattcagggcccaccaggtacagggaagacgatcgtgggcctccacatcgtattctggtttcataaatcaaaccaggagcaggtgcagcccggaggccccccccgtggggagaagcggctggggggtccctgcatcttgtactgcggcccctccaacaagtcggtggatgtcctggcaggactgctcctgagaaggatggagctgaagcccctccgtgtgtacagtgagcaggctgaggccagcgagttcccagtgccgcgtgtgggcagcaggaagctgctcaggaagagcccccgggaggggaggccgaaccagagcctcaggagcatcaccctgcaccaccggatccggcaggcccccaacccttactcgtcggaaatcaaggcctttgacacccggctgcagagaggggagctcttctccagggaggacctggtctggtacaagaaggtcttgtgggaggctcggaagttcgagctggaccggcatgaggtcatcctctgcacctgctcctgtgcagcctctgccagcctcaaaatcctggacgtgaggcagatccttgttgacgaggcaggcatggccacggaacctgaaaccctcatccccctggtgcagttcccacaggccgagaaggtggttcttctcggagaccacaagcagctgcggcctgtggtcaagaatgagcggctgcaaaacctgggtctggaccggtctctgttcgagcggtaccacgaggacgcacatatgctggacactcagtaccgcatgcatgagggcatctgtgccttcccctctgtggcgttctacaagagcaagctgaagacgtggcagggcctgaggaggccgcccagtgtcctgggccacgctggcaaggagagctgccctgtcatctttggccacgtgcagggccacgagcggagcctgctggtgtccacggacgaagggaatgagaactccaaggccaacctggaggaggtggctgaggtggtccgtatcaccaagcagctgaccctggggaggaccgtagagccccaggacatcgccgtcctcacgccctacaacgcgcaggcctctgagatcagcaaggcccttcggcgagagggcatcgccggggtggccgtgtcctccatcaccaagagccaggggagcgagtggcgctatgtgctggtgagcaccgtccgcacctgtgccaagagcgacctggaccagcggcccaccaagagctggctcaagaagtttctgggcttcgttgtggaccccaaccaagtgaatgtggctgtcacgcgggcccaggaggggctctgcctgatcggagaccacctccttctgcgctgctgccccctctggcgtagcctcctggacttctgcgaggctcagcagaccctcgtgcctgccggccaggtgcgcgtctgcaggaggccaactatgccttcctgaagagccctctccacctgcaaggtgccaggactgggagggaaagt

SEQ ID NO: 140029 - DNA, 2740 bp, Homo sapiens
  Payload ID: 7463
  Gene Symbol: HELLS
  Gene Name: helicase, lymphoid-specific
  ENST ID: ENST00000239026
  CDS Start-End: 120-2264
aaaaagaaaaaaaaaacctttaaagaacagaagaagaaataagactttcaaagagaacttaaattttaaaagttaaaaatggtaaaaattcaattgatgcaagtgaagagaagccagttatgaggaaaaaaagaggaagagaagatgaatcatacaatatttcagaggtcatgtcaaaagaggaaattttgtctgtggctaaaaaaaataaaaaggagaatgaggatgaaaactcctcctctactaatctctgtgtggaagatcttcagaaaaataaagattcgaatagtataattaaagatagattgtctgaaacggttaggcagaatactaaattcttttttgacccagtccggaagtgtaatggtcagccagtaccttttcaacaaccaaagcacttcactggaggagtgatgcgatggtaccaagtagaaggcatggaatggcttaggatgctttgggaaaatggaattaatggcattttagcagatgaaatgggattgggtaagacagttcagtgcattgctactattgcattgatgattcagagaggagtaccaggaccttttcttgtctgtggccctttgtctacacttcctaactggatggctgaattcaaaagatttacaccagatatccctacaatgttatatcatggaacccaggaggaacgtcaaaaattggtaagaaatatttacaaacggaaagggactttgcagattcatcctgtggtaatcacgtcatttgaaatagccatgagagaccgaaatgcgttacagcattgctattggaaatacttaatagtagatgaaggacacaggattaagaatatgaagtgccgtctaatcagggagttaaaacgattcaatgctgataacaaacttcttttgactggtactcccttgcaaaacaatttatcagaactttggtcattgctaaactttttgttgccagatgtatttgatgacttgaaaagctttgagtcttggtttgacatcactagtctttctgaaactgctgaagatattattgctaaagaaagagaacagaatgtattgcatatgctgcaccagattttaacacctttcttattgagaagactgaagtctgatgttgctcttgaagttcctcctaaacgagaagtagtcgtttatgctccactttcaaagaagcaggagatcttttatacagccattgtgaaccgtacaattgcaaacatgtttggatccagtgagaaagaaacaattgagttaagtcctactggtcgaccaaaacgacgaactagaaaatcaataaattacagcaaaatagatgatttccctaatgaattggaaaaactgatcagtcaaatacagccagaggtggaccgagaaagagctgttgtggaagtgaatatccctgtagaatctgaagttaatctgaagctgcagaatataatgatgctacttcgtaaatgttgtaatcatccatatttgattgaatatcctatagaccctgttacacaagaatttaagatcgatgaagaattggtaacaaattctgggaagttcttgattttggatcgaatgctgccagaactaaaaaaaagaggtcacaaggtgctgcttttttcacaaatgacaagcatgttggacattttgatggattactgccatctcagagatttcaacttcagcaggcttgatgggtccatgtcttactcagagagagaaaaaaacatgcacagcttcaacacggatccagaggtgtttatcttcttagtgagtacacgagctggtggcctgggcattaatctgactgcagcagatacagttatcatttatgatagtgattggaacccccagtcggatcttcaggcccaggatagatgtcatagaattggtcagacaaagccagttgttgtttatcgccttgttacagcaaatactatcgatcagaaaattgtggaaagagcagctgctaaaaggaaactggaaaagttgatcatccataaaaatcatttcaaaggtggtcagtctggattaaatctgtctaagaatttcttagatcctaaggaattaatggaattattaaaatctagagattatgaaagggaaataaaaggatcaagagagaaggtcattagtgataaagatctagagttgttgttagatcgaagtgatcttattgatcaaatgaatgcttcaggaccaattaaagagaagatggggatattcaagatattagaaaattctgaagattccagtcctgaatgtttgttttaaagtggagctcaagaatagcttttaaaagttcttatttacatctagtgatttccctgtattgggtttgaaatactgattgtccacttcaccttttttattatatcagttgacatgtaactagtaccatgcgtacttaaatagatggtaattttctgagccttaccaagaacaaagaagtatccatattaagtttagattttcagttaatttttgagactgagtagtattcttggatacaggctgatgtgtacttaaccacttccagatttatacagtcttcctgtggaagtttagtaaatgtctttttccctcctttcttctagtaatgcagttcatgggctttaggtacttcagttatgaagtaggcttttcatggggagagattgggattatgctctctgttgtttaagaaactgtttgattttagagtctatttctatgagatagtttaccaaataaatgttccttataagatg

SEQ ID NO: 140030 - DNA, 3099 bp, Homo sapiens
  Payload ID: 7463
  Gene Symbol: HELLS
  Gene Name: helicase, lymphoid-specific
  Uniprot ID: Q9NRZ9
  ENST ID: ENST00000348459
  CDS Start-End: 106-2622
ggggatttggctagaaggctgggccggcagcggttgtgaggagttagctcgcggcattgcaggctctgagaggaggggacccggttcccgggtgagtgtccaggcatgccagcggaacggcccgcgggcagcggcggctcggaggctccagcaatggttgaacaactggacactgctgtgattaccccggccatgctagaagaggaagaacagcttgaagctgctggactagagagagagcggaagatgctggaaaaggctcgcatgtcttgggatagagagtcgacagaaattcggtaccgtagacttcaacatttgcttgaaaaaagcaatatatactccaaatttttattgacgaaaatggaacagcaacaattagaggaacagaagaagaaagaaaaattggagagaaaaaaggagtctttaaaagttaaaaagggtaaaaattcaattgatgcaagtgaagagaagccagttatgaggaaaaaaagaggaagagaagatgaatcatacaatatttcagaggtcatgtcaaaagaggaaattttgtctgtggctaaaaaaaataaaaaggagaatgaggatgaaaactcctcctctactaatctctgtgtggaagatcttcagaaaaataaagattcgaatagtataattaaagatagattgtctgaaacggttaggcagaatactaaattcttttttgacccagtccggaagtgtaatggtcagccagtaccttttcaacaaccaaagcacttcactggaggagtgatgcgatggtaccaagtagaaggcatggaatggcttaggatgctttgggaaaatggaattaatggcattttagcagatgaaatgggattgggtaagacagttcagtgcattgctactattgcattgatgattcagagaggagtaccaggaccttttcttgtctgtggccctttgtctacacttcctaactggatggctgaattcaaaagatttacaccagatatccctacaatgttatatcatggaacccaggaggaacgtcaaaaattggtaagaaatatttacaaacggaaagggactttgcagattcatcctgtggtaatcacgtcatttgaaatagccatgagagaccgaaatgcgttacagcattgctattggaaatacttaatagtagatgaaggacacaggattaagaatatgaagtgccgtctaatcagggagttaaaacgattcaatgctgataacaaacttcttttgactggtactcccttgcaaaacaatttatcagaactttggtcattgctaaactttttgttgccagatgtatttgatgacttgaaaagctttgagtcttggtttgacatcactagtctttctgaaactgctgaagatattattgctaaagaaagagaacagaatgtattgcatatgctgcaccagattttaacacctttcttattgagaagactgaagtctgatgttgctcttgaagttcctcctaaacgagaagtagtcgtttatgctccactttcaaagaagcaggagatcttttatacagccattgtgaaccgtacaattgcaaacatgtttggatccagtgagaaagaaacaattgagttaagtcctactggtcgaccaaaacgacgaactagaaaatcaataaattacagcaaaatagatgatttccctaatgaattggaaaaactgatcagtcaaatacagccagaggtggaccgagaaagagctgttgtggaagtgaatatccctgtagaatctgaagttaatctgaagctgcagaatataatgatgctacttcgtaaatgttgtaatcatccatatttgattgaatatcctatagaccctgttacacaagaatttaagatcgatgaagaattggtaacaaattctgggaagttcttgattttggatcgaatgctgccagaactaaaaaaaagaggtcacaaggtgctgcttttttcacaaatgacaagcatgttggacattttgatggattactgccatctcagagatttcaacttcagcaggcttgatgggtccatgtcttactcagagagagaaaaaaacatgcacagcttcaacacggatccagaggtgtttatcttcttagtgagtacacgagctggtggcctgggcattaatctgactgcagcagatacagttatcatttatgatagtgattggaacccccagtcggatcttcaggcccaggatagatgtcatagaattggtcagacaaagccagttgttgtttatcgccttgttacagcaaatactatcgatcagaaaattgtggaaagagcagctgctaaaaggaaactggaaaagttgatcatccataaaaatcatttcaaaggtggtcagtctggattaaatctgtctaagaatttcttagatcctaaggaattaatggaattattaaaatctagagattatgaaagggaaataaaaggatcaagagagaaggtcattagtgataaagatctagagttgttgttagatcgaagtgatcttattgatcaaatgaatgcttcaggaccaattaaagagaagatggggatattcaagatattagaaaattctgaagattccagtcctgaatgtttgttttaaagtggagctcaagaatagcttttaaaagttcttatttacatctagtgatttccctgtattgggtttgaaatactgattgtccacttcaccttttttattatatcagttgacatgtaactagtaccatgcgtacttaaatagatggtaattttctgagccttaccaagaacaaagaagtatccatattaagtttagattttcagttaatttttgagactgagtagtattcttggatacaggctgatgtgtacttaaccacttccagatttatacagtcttcctgtggaagtttagtaaatgtctttttccctcctttcttctagtaatgcagttcatgggctttaggtacttcagttatgaagtaggcttttcatggggagagattgggattatgctctctgttgtttaagaaactgtttgattttagagtctatttctatgagatagtttaccaaataaatgttccttataagatga

SEQ ID NO: 140031 - DNA, 4987 bp, Homo sapiens
  Payload ID: 7463
  Gene Symbol: HELLS
  Gene Name: helicase, lymphoid-specific
  ENST ID: ENST00000371327
  CDS Start-End: 1-933
atgatgctacttcgtaaatgttgtaatcatccatatttgattgaatatcctatagaccctgttacacaagaatttaagatcgatgaagaattggtaacaaattctgggaagttcttgattttggatcgaatgctgccagaactaaaaaaaagaggtcacaaggtgctgcttttttcacaaatgacaagcatgttggacattttgatggattactgccatctcagagatttcaacttcagcaggcttgatgggtccatgtcttactcagagagagaaaaaaacatgcacagcttcaacacggatccagaggtgtttatcttcttagtgagtacacgagctggtggcctgggcattaatctgactgcagcagatacagttatcatttatgatagtgattggaacccccagtcggatcttcaggcccaggatagatgtcatagaattggtcagacaaagccagttgttgtttatcgccttgttacagcaaatactatcgatcagaaaattgtggaaagagcagctgctaaaaggaaactggaaaagttgatcatccataaaaatcatttcaaaggtggtcagtctggattaaatctgtctaagaatttcttagatcctaaggaattaatggaattattaaaatctagagattatgaaagggaaataaaaggatcaagagagaaggtcattagtgataaagatctagagttgttgttagatcgaagtgatcttattgatcaaatgaatgcttcaggaccaattaaagagaagatggggatattcaagatattagaaaattctgaagattccagtcctgaattagagacagggtttcaccatcttggcctgactggtcccgaactgatctcaggtgatctgcccacctcggcctcccaaagtgctgggattacaagcgtgagccactgcgtggcctgagcactagggcgcaagagaagccgtactggaatattacactactcagcacaagacaggtttaatctttttcttgggggacaagattggaaaattgaggtctgagcagacctgaagagaggcatccagcaactctgagattaaattcatcattgatcaattcgttattgtttggaattgacgtttagctgtgttcctcactcagatacgtgcatgatagctgcttgctaatttggtcttagctcacatttcacctagaatgtatggtctccctctcccctgcaaaatatcccactgttgctaatctgtctgcctcataatttccatgagattgagcatcttgtttgttttgtcaccactatataacagcatgttggaaacaaagcagtaataaagctagaaaaaccaagcgaatacactggattaaaaaaaatactgtttcctagaattaaagaaataaatgaggccgggcgcagtggtgcctgtaatcccagcagtttgggaggctgaggctagtggatcatgtggccgagatcgcgtcactgcactccagtctagcaacagagcgataccttgtttcttacttaaaaaaaaaaaaagacctcatttgttaactgttaaacagaaaacaagaaattccctatacctgtatgcattatagagcaaataagagcatcaaaaacaatcttagaaatctttcagagaaaggtcacctacaaaggaacattgatcagataatagatttttttttttttctcagatggagttctgctcttgtcgcccagactggagtgcaatggcacgatgttggctcactgcaatctccgcttcccaggttcaagcagttctccagccttagcctcccaagtagctgggattacaggctcccactaccattcccagaatttttgtattttaattagtagagacggggtttcgccatgttggccaggctagcctcgaactcctgaactcaggtgatctgcctgcctcggcctcacaaagtgctgtgattacagggtgtgagccactgcacctggccgataacagatgttttaatagtaagataaaaagtaaaatttccagtgtgtcgaaggaagaaaattacagcctagaattttatcttcatgtacattatttaagtgtgagggaatagtttcagtgacattatgtcattgaagaccttagaagatttccctcgctaaaggagataaagcgactggcacaacatgtatttctctgagtaattagaagtgttcttttctggctgtactgaagggactttcatgatttcttcgtttttgtactcttagttttataatattgcatagtagctaaggcctggctgtagcagttataaactgttctgcaagtgcgggaagtaatagttattcctatctcaaggatgtggggtttaaatgggttagtgcacaaaaggacatttattaaatttagtcataatcatctcaaggacatggtaagtgaaagagtgtacataaagtacttaatgtaatgtttgctacttaatgttcaataactcaaagagaccaccaccactactacattttacttttattagtaattaataataattaataattagtaattcagtggtaattagtatactaccaaagaaagtacttgagcagaagagccaaaattcaaaccatagaatcattttactgtgcttttattctacctcaaacactaatctccaggccttggataaagggattatttctctgaaggggaaagttatcctctttttgcccaagtcacacttgtgtcatttcttatactgtaaacatgtggttccaattctgaggtattttcccggtttgtaggacccaaaaagaagttaggcttgagaaattttaagtgaagagaacaattctagttcagagtgattggctcttcctaaaagctgacatttgactgaaaattttgaggggagggaaagaaacaataccttttacggcatgtaataggaagaagacctggattttagttgctgctctgatgtcccaacttgggtaaggcaacataacataaatgtcagtttcttcagatttgtgatgaagctgataatccatgctcagcttcctttatgggtctcttgcctatcaaataaggtacagtatgtgaagatacattgcagattatcttatgcattgcttcaggggatgattaaaccatcctttattatagccagagtctagtctaagggaagaaggtcattctctataccagtgaaggctccatccaaaccagtgtttgggggcatagtcataattgaaaaatgattgttttccttatctgtaagacaggtaaatggtattaatcctcaggtggttgtgaggattaagtgatacatgtaaaaaaaagaaagctttggatagtacctattataagaaactcagtgttgctgcaatgtatgtattataatggatttgaaatttgccctaaccaagagtcacagacagaaaaaaggaagttaatgtatctcttgatcactatcaagatgtggtattgaaccttcaagatccttttcagggaatatgtgagatcaaaatttttatactggcactatgatgttatttgccttttcctcatattcacaagtgaacagtggagttttacagaagctatataatgtcatgacatcactgatgggtaatagaatgtgtgcttgtatattccgaaactttcagttccaatttcttcgatcaatgtaatcctcataagtaaaagttatttgaggacctcagacatttttaaaaatgtaaagggggtggggtcaggctcagtggctcatgcctgtaatcccagcattttggaaggccgaggcgaacggatcacttgaggccaggagtttgaaactagtctggtcaacatggtgaaaccccgtctccactaaaacaaaaagttttctggatgtggtggcacacatacctgtaatcccagctactttggtggctgaggcatgagaatcacttgaacccagaagacaggttgcagtgagccaagattgtgcccctgcattctagcctgggtgacagtgagactgtctcaaaaaataaaggtgtacagggattgtatatttgacaacttggtatgtaggatgtgctacctctaatgttccatgctgttacttagttttcactcactactatattttggagatttgttcatattgctctgtgtacatttaattcttcagtgtgtatccaccacatttaacttattcacttacagaactatgcaagaatttctctggtaaatttcactaagtacttatgtacttttcagaacgattgtgagtttacacccctaccagcaggactgagttgagtacccatttcctcacatccttgccagtacttcatttgcctaatttttgccattctcataatgtggcaattgttcaattttgcatttcttccattttatttttttgcatctctgcttttcttttggttagctttgccagttctgcctattatattaatctcccagaatcagcttttagttttgttaaatctctgacatgtttcgttgattcctgctttcatcttaaacatttcttcgttgttaatttgtgtttgctataaaataagcaacatcttaaatgcttgatttgctttcgatgtttattctgtaataagatatttaaagatataattttttccctaaatgctttattagacttttctcataagttttgactggtactgttttcattgttatttaattttgtgttttttaacttctttcatgatttccttttaactgaaggttttcttagatatttagtttgctggtatattcttttaaaattgtatcattgctttctttctatattggattattgtcagagaacatgatttgcatgatattaactttttggagtatattgttgcatctttgtggcctagtacatagttaatttagtgaatgcttccagttgtacttgaaaagaatgtatattttctgattattgagggtaaatttctctatatatgttttcctgtttaataaatatgtagctatgtgctta

SEQ ID NO: 140032 - DNA, 2675 bp, Homo sapiens
  Payload ID: 7463
  Gene Symbol: HELLS
  Gene Name: helicase, lymphoid-specific
  ENST ID: ENST00000371332
  CDS Start-End: 97-2199
aaaaagaaaaaaaaaacctttaaagaacagaagaagaaataagactttcaaagagaacttaaattttaaaagttaaaaatggtaaaaattcaattgatgcaagtgaagagaagccaggaaattttgtctgtggctaaaaaaaataaaaaggagaatgaggatgaaaactcctcctctactaatctctgtgtggaagatcttcagaaaaataaagattcgaatagtataattaaagatagattgtctgaaacggttaggcagaatactaaattcttttttgacccagtccggaagtgtaatggtcagccagtaccttttcaacaaccaaagcacttcactggaggagtgatgcgatggtaccaagtagaaggcatggaatggcttaggatgctttgggaaaatggaattaatggcattttagcagatgaaatgggattgggtaagacagttcagtgcattgctactattgcattgatgattcagagaggagtaccaggaccttttcttgtctgtggccctttgtctacacttcctaactggatggctgaattcaaaagatttacaccagatatccctacaatgttatatcatggaacccaggaggaacgtcaaaaattggtaagaaatatttacaaacggaaagggactttgcagattcatcctgtggtaatcacgtcatttgaaatagccatgagagaccgaaatgcgttacagcattgctattggaaatacttaatagtagatgaaggacacaggattaagaatatgaagtgccgtctaatcagggagttaaaacgattcaatgctgataacaaacttcttttgactggtactcccttgcaaaacaatttatcagaactttggtcattgctaaactttttgttgccagatgtatttgatgacttgaaaagctttgagtcttggtttgacatcactagtctttctgaaactgctgaagatattattgctaaagaaagagaacagaatgtattgcatatgctgcaccagattttaacacctttcttattgagaagactgaagtctgatgttgctcttgaagttcctcctaaacgagaagtagtcgtttatgctccactttcaaagaagcaggagatcttttatacagccattgtgaaccgtacaattgcaaacatgtttggatccagtgagaaagaaacaattgagttaagtcctactggtcgaccaaaacgacgaactagaaaatcaataaattacagcaaaatagatgatttccctaatgaattggaaaaactgatcagtcaaatacagccagaggtggaccgagaaagagctgttgtggaagtgaatatccctgtagaatctgaagttaatctgaagctgcagaatataatgatgctacttcgtaaatgttgtaatcatccatatttgattgaatatcctatagaccctgttacacaagaatttaagatcgatgaagaattggtaacaaattctgggaagttcttgattttggatcgaatgctgccagaactaaaaaaaagaggtcacaaggtgctgcttttttcacaaatgacaagcatgttggacattttgatggattactgccatctcagagatttcaacttcagcaggcttgatgggtccatgtcttactcagagagagaaaaaaacatgcacagcttcaacacggatccagaggtgtttatcttcttagtgagtacacgagctggtggcctgggcattaatctgactgcagcagatacagttatcatttatgatagtgattggaacccccagtcggatcttcaggcccaggatagatgtcatagaattggtcagacaaagccagttgttgtttatcgccttgttacagcaaatactatcgatcagaaaattgtggaaagagcagctgctaaaaggaaactggaaaagttgatcatccataaaaatcatttcaaaggtggtcagtctggattaaatctgtctaagaatttcttagatcctaaggaattaatggaattattaaaatctagagattatgaaagggaaataaaaggatcaagagagaaggtcattagtgataaagatctagagttgttgttagatcgaagtgatcttattgatcaaatgaatgcttcaggaccaattaaagagaagatggggatattcaagatattagaaaattctgaagattccagtcctgaatgtttgttttaaagtggagctcaagaatagcttttaaaagttcttatttacatctagtgatttccctgtattgggtttgaaatactgattgtccacttcaccttttttattatatcagttgacatgtaactagtaccatgcgtacttaaatagatggtaattttctgagccttaccaagaacaaagaagtatccatattaagtttagattttcagttaatttttgagactgagtagtattcttggatacaggctgatgtgtacttaaccacttccagatttatacagtcttcctgtggaagtttagtaaatgtctttttccctcctttcttctagtaatgcagttcatgggctttaggtacttcagttatgaagtaggcttttcatggggagagattgggattatgctctctgttgtttaagaaactgtttgattttagagtctatttctatgagatagtttaccaaataaatgttccttataagatg

SEQ ID NO: 140033 - DNA, 3131 bp, Homo sapiens
  Payload ID: 7463
  Gene Symbol: HELLS
  Gene Name: helicase, lymphoid-specific
  ENST ID: ENST00000394036
  CDS Start-End: 1-2655
atgccagcggaacggcccgcgggcagcggcggctcggaggctccagcaatggttgaacaactggacactgctgtgattaccccggccatgctagaagaggaagaacagcttgaagctgctggactagagagagagcggaagatgctggaaaaggctcgcatgtcttgggatagagagtcgacagaaattcggtaccgtagacttcaacatttgcttgaaaaaagcaatatatactccaaatttttattgacgaaaatggaacagcaacaattagaggaacagaagaagaaagaaaaattggagagaaaaaaggagtctttaaaagttaaaaagggtaaaaattcaattgatgcaagtgaagagaagccagttatgaggaaaaaaagaggaagagaagatgaatcatacaatatttcagaggtcatgtcaaaagaggaaattttgtctgtggctaaaaaaaataaaaaggagaatgaggatgaaaactcctcctctactaatctctgtgtggaagatcttcagaaaaataaagattcgaatagtataattaaagatagattgtctgaaacggttaggcagaatactaaattcttttttgacccagtccggaagtgtaatggtcagccagtaccttttcaacaaccaaagcacttcactggaggagtgatgcgatggtaccaagtagaaggcatggaatggcttaggatgctttgggaaaatggaattaatggcattttagcagatgaaatgggattgggtaagacagttcagtgcattgctactattgcattgatgattcagagaggagtaccaggaccttttcttgtctgtggccctttgtctacacttcctaactggatggctgaattcaaaagatttacaccagatatccctacaatgttatatcatggaacccaggaggaacgtcaaaaattggtaagaaatatttacaaacggaaagggactttgcagattcatcctgtggtaatcacgtcatttgaaatagccatgagagaccgaaatgcgttacagcattgctattggaaatacttaatagtagatgaaggacacaggattaagaatatgaagtgccgtctaatcagggagttaaaacgattcaatgctgataacaaacttcttttgactggtactcccttgcaaaacaatttatcagaactttggtcattgctaaactttttgttgccagatgtatttgatgacttgaaaagctttgagtcttggtttgacatcactagtctttctgaaactgctgaagatattattgctaaagaaagagaacagaatgtattgcatatgctgcaccaggaaagaattcctagaatgtatgtgtcagagtttacagatgagggcttctttgaaggcaaattgccctccagaaaagatttatatgatatacgtccatatgaaaatacttatttactcaagcttcataccaattttgagattttaacacctttcttattgagaagactgaagtctgatgttgctcttgaagttcctcctaaacgagaagtagtcgtttatgctccactttcaaagaagcaggagatcttttatacagccattgtgaaccgtacaattgcaaacatgtttggatccagtgagaaagaaacaattgagttaagtcctactggtcgaccaaaacgacgaactagaaaatcaataaattacagcaaaatagatgatttccctaatgaattggaaaaactgatcagtcaaatacagccagaggtggaccgagaaagagctgttgtggaagtgaatatccctgtagaatctgaagttaatctgaagctgcagaatataatgatgctacttcgtaaatgttgtaatcatccatatttgattgaatatcctatagaccctgttacacaagaatttaagatcgatgaagaattggtaacaaattctgggaagttcttgattttggatcgaatgctgccagaactaaaaaaaagaggtcacaaggtgctgcttttttcacaaatgacaagcatgttggacattttgatggattactgccatctcagagatttcaacttcagcaggcttgatgggtccatgtcttactcagagagagaaaaaaacatgcacagcttcaacacggatccagaggtgtttatcttcttagtgagtacacgagctggtggcctgggcattaatctgactgcagcagatacagttatcatttatgatagtgattggaacccccagtcggatcttcaggcccaggatagatgtcatagaattggtcagacaaagccagttgttgtttatcgccttgttacagcaaatactatcgatcagaaaattgtggaaagagcagctgctaaaaggaaactggaaaagttgatcatccataaaaatcatttcaaaggtggtcagtctggattaaatctgtctaagaatttcttagatcctaaggaattaatggaattattaaaatctagagattatgaaagggaaataaaaggatcaagagagaaggtcattagtgataaagatctagagttgttgttagatcgaagtgatcttattgatcaaatgaatgcttcaggaccaattaaagagaagatggggatattcaagatattagaaaattctgaagattccagtcctgaatgtttgttttaaagtggagctcaagaatagcttttaaaagttcttatttacatctagtgatttccctgtattgggtttgaaatactgattgtccacttcaccttttttattatatcagttgacatgtaactagtaccatgcgtacttaaatagatggtaattttctgagccttaccaagaacaaagaagtatccatattaagtttagattttcagttaatttttgagactgagtagtattcttggatacaggctgatgtgtacttaaccacttccagatttatacagtcttcctgtggaagtttagtaaatgtctttttccctcctttcttctagtaatgcagttcatgggctttaggtacttcagttatgaagtaggcttttcatggggagagattgggattatgctctctgttgtttaagaaactgtttgattttagagtctatttctatgagatagtttaccaaataaatgttccttataagatg

SEQ ID NO: 140034 - DNA, 2699 bp, Homo sapiens
  Payload ID: 7463
  Gene Symbol: HELLS
  Gene Name: helicase, lymphoid-specific
  Uniprot ID: Q9NRZ9
  ENST ID: ENST00000394045
  CDS Start-End: 1-2223
atgccagcggaacggcccgcgggcagcggcggctcggaggctccagcaatggttgaacaactggacactgctgtgattaccccggccatgctagaagaggaagaacagcttgaagctgctggactagagagagagcggaagatgctggaaaaggctcgcatgtcttgggatagagagtcgacagaaattcggtaccgtagacttcaacatttgcttgaaaaaagcaatatatactccaaatttttattgacgaaaatggaacagcaacaattagaggaacagaagaagaaagaaaaattggagagaaaaaaggagtctttaaaagttaaaaagggtaaaaattcaattgatgcaagtgaagagaagccagttatgaggaaaaaaagaggaagagaagatgaatcatacaatatttcagaggtcatgtcaaaagaggaaattttgtctgtggctaaaaaaaataaaaaggagaatgaggatgaaaactcctcctctactaatctctgtgtggaagatcttcagaaaaataaagattcgaatagtataattaaagatagattgtctgaaacggttaggcagaatactaaattcttttttgacccagtccggaagtgtaatggtcagccagtaccttttcaacaaccaaagcacttcactggaggagtgatgcgatggtaccaagtagaaggcatggaatggcttaggatgctttgggaaaatggaattaatggcattttagcagatgaaatgggattgggtaagacagttcagtgcattgctactattgcattgatgattcagagaggagtaccaggaccttttcttgtctgtggccctttgtctacacttcctaactggatggctgaattcaaaagatttacaccagatatccctacaatgttatatcatggaacccaggaggaacgtcaaaaattggtaagaaatatttacaaacggaaagggactttgcagattcatcctgtggtaatcacgtcatttgaaatagccatgagagaccgaaatgcgttacagattttaacacctttcttattgagaagactgaagtctgatgttgctcttgaagttcctcctaaacgagaagtagtcgtttatgctccactttcaaagaagcaggagatcttttatacagccattgtgaaccgtacaattgcaaacatgtttggatccagtgagaaagaaacaattgagttaagtcctactggtcgaccaaaacgacgaactagaaaatcaataaattacagcaaaatagatgatttccctaatgaattggaaaaactgatcagtcaaatacagccagaggtggaccgagaaagagctgttgtggaagtgaatatccctgtagaatctgaagttaatctgaagctgcagaatataatgatgctacttcgtaaatgttgtaatcatccatatttgattgaatatcctatagaccctgttacacaagaatttaagatcgatgaagaattggtaacaaattctgggaagttcttgattttggatcgaatgctgccagaactaaaaaaaagaggtcacaaggtgctgcttttttcacaaatgacaagcatgttggacattttgatggattactgccatctcagagatttcaacttcagcaggcttgatgggtccatgtcttactcagagagagaaaaaaacatgcacagcttcaacacggatccagaggtgtttatcttcttagtgagtacacgagctggtggcctgggcattaatctgactgcagcagatacagttatcatttatgatagtgattggaacccccagtcggatcttcaggcccaggatagatgtcatagaattggtcagacaaagccagttgttgtttatcgccttgttacagcaaatactatcgatcagaaaattgtggaaagagcagctgctaaaaggaaactggaaaagttgatcatccataaaaatcatttcaaaggtggtcagtctggattaaatctgtctaagaatttcttagatcctaaggaattaatggaattattaaaatctagagattatgaaagggaaataaaaggatcaagagagaaggtcattagtgataaagatctagagttgttgttagatcgaagtgatcttattgatcaaatgaatgcttcaggaccaattaaagagaagatggggatattcaagatattagaaaattctgaagattccagtcctgaatgtttgttttaaagtggagctcaagaatagcttttaaaagttcttatttacatctagtgatttccctgtattgggtttgaaatactgattgtccacttcaccttttttattatatcagttgacatgtaactagtaccatgcgtacttaaatagatggtaattttctgagccttaccaagaacaaagaagtatccatattaagtttagattttcagttaatttttgagactgagtagtattcttggatacaggctgatgtgtacttaaccacttccagatttatacagtcttcctgtggaagtttagtaaatgtctttttccctcctttcttctagtaatgcagttcatgggctttaggtacttcagttatgaagtaggcttttcatggggagagattgggattatgctctctgttgtttaagaaactgtttgattttagagtctatttctatgagatagtttaccaaataaatgttccttataagatg

SEQ ID NO: 140035 - DNA, 711 bp, Homo sapiens
  Payload ID: 7463
  Gene Symbol: HELLS
  Gene Name: helicase, lymphoid-specific
  ENST ID: ENST00000419900
  CDS Start-End: 136-711
aggagaagcgcgcttttttccctggcgggggatttggctagaaggctgggccggcagcggttgtgaggagttagctcgcggcattgcaggctctgagaggaggggacccggttcccgggctcggaggctccagcaatggttgaacaactggacactgctgtgattaccccggccatgctagaagaggaagaacagcttgaagctgctggactagagagagagcggaagatgctggaaaaggctcgcatgtcttgggatagagagtcgacagaaattcggtaccgtagacttcaacatttgcttgaaaaaagcaatatatactccaaatttttattgacgaaaatggaacagcaacaattagaggaacagaagaagaaagaaaaattggagagaaaaaaggagtctttaaaagttaaaaagggtaaaaattcaattgatgcaagtgaagagaagccagttatgaggaaaaaaagaggaagagaagatgaatcatacaatatttcagaggtcatgtcaaaagaggaaattttgtctgtggctaaaaaaaataaaaaggagaatgaggatgaaaactcctcctctactaatctctgtgtggaagatcttcagaaaaataaagattcgaatagtataattaaagatagattgtctgaaacggttaggcagaatactaaattcttttttgacccagtccggaagtgtaatggtcag

SEQ ID NO: 140036 - DNA, 400 bp, Homo sapiens
  Payload ID: 7463
  Gene Symbol: HELLS
  Gene Name: helicase, lymphoid-specific
  ENST ID: ENST00000630929
  CDS Start-End: 107-400
gggggatttggctagaaggctgggccggcagcggttgtgaggagttagctcgcggcattgcaggctctgagaggaggggacccggttcccgggtgagtgtccaggcatgccagcggaacggcccgcgggcagcggcggctcggaggctccagcaatggttgaacaactggacactgctgtgattaccccggccatgctagaagaggaagaacagcttgaagctgctggactagagagagagcggaagatgctggaaaaggctcgcatgtcttgggatagagagtcgacagaaattcggtaccgtagacttcaacatttgcttgaaaaaagcaatatatactccaaatttttattgacgaaaatggaacagcaacaattagagactgttatgaagatttaa

SEQ ID NO: 140037 - DNA, 3579 bp, Homo sapiens
  Payload ID: 7464
  Gene Symbol: HELQ
  Gene Name: helicase, POLQ-like
  Uniprot ID: Q8TDG4
  ENST ID: ENST00000295488
  CDS Start-End: 164-3469
gaagtttatgcgtgcttccggtccgcgagccctgagagctaacttggggtcttttcccaaggtggatgtagaagcgggctccggcgtcccactctcccttccatatgggcttagcgtctgggtcactgagaacgacgtctgaatagggccctgggtccttgccatggatgaatgtggttcccgcatccgccggcgggtgtctctccccaaaaggaaccgtccaagcttggggtgtatttttggcgctcccaccgcggccgagctcgtgcccggagatgaggggaaagaggaggaggaaatggtggctgagaacaggaggcggaaaaccgcgggcgtactgccggttgaggtacagccccttctactctcagattccccggaatgtctcgtccttggaggtggtgatacaaacccggacctcctacgtcacatgcccactgacagaggggtgggagaccagcctaatgacagtgaagtggacatgtttggtgactatgatagctttactgaaaactcctttatagctcaagttgacgacctggaacaaaaatatatgcaactccctgaacataagaaacatgctacagactttgccactgaaaatctttgctcggaaagtatcaaaaacaaactcagcattactaccataggcaaccttactgaattacaaactgataagcacacagagaaccagagtggatatgaaggtgtcactattgaacctggagctgatcttttgtatgatgtaccttcctcacaggctatatactttgaaaatttgcagaactcttcaaatgatttgggtgatcattctatgaaagaaagggattggaagtcatcctctcacaacactgtgaatgaggaactgccccataattgcatagagcaaccccagcaaaatgatgagtcctcttccaaagtcagaactagttcagatatgaacaggagaaaaagtattaaagatcatctaaaaaatgccatgactggaaatgcgaaggcccagacaccaatattttctagaagtaaacagctcaaagacactctcctatctgaggaaattaatgttgctaagaaaacagttgagtcatcatcaaatgaccttggtcctttttattcattacccagcaaagtgagagacctttatgcccaattcaagggaattgaaaaattatatgaatggcaacatacttgtttaacattgaattctgtgcaagaaagaaaaaatttaatatattccttgccaacaagtggtggaaaaaccctcgtggctgagattttaatgctgcaagaactgctttgctgtcggaaagatgttttaatgattcttccatatgtggcaattgtccaagaaaagatttcaggtttgtcaagttttggtatagaactcggtttctttgttgaagaatatgctggaagcaaaggaagatttcctccaactaaaagaagggaaaagaaatcactctatattgccactattgaaaaaggacatagcttggtgaactccttgattgaaactggaagaattgacagtctgggtctggttgttgtagacgagttgcacatgattggtgaaggaagccgtggagctacactggaaatgaccctagcaaaaatcctctacactagcaaaacgactcaaattattggtatgagtgcaacattaaacaatgttgaagacctacaaaagtttcttcaagcagaatattataccagtcaatttagaccagttgagttaaaagaatatctgaaaataaatgatacaatatatgaagttgacagcaaagctgagaatggcatgactttttcacgtcttcttaattataagtattctgataccctaaaaaagatggatcctgatcacttggtagcattggtgacagaagttattcccaattattcctgcttagttttttgtcctagtaagaagaactgtgaaaatgtagcagaaatgatatgcaaatttttaagcaaggaatatctgaaacataaggagaaagaaaaatgtgaggtgattaagaacttgaagaatattggcaatggcaacctgtgtcctgttttaaagcgcactatcccatttggagttgcctatcaccacagtggcttaacaagtgatgaaaggaaactcttggaggaggcctactccacaggagtgctctgtctttttacctgcacatctaccctagcggcaggtgtcaacctaccagctcgaagagttattttaagagctccctatgttgctaaggaatttttaaagaggaatcaatataaacagatgattggcagagctggtcgtgctggaatagatactattggggagagtatcctcatattgcaagaaaaagacaaacaacaggtattggagttaataactaaaccattggaaaactgttacagccatcttgttcaggaattcaccaagggaatccaaacattatttctctctttgattggtttgaagattgcaacgaatcttgatgacatctatcatttcatgaatggtacattttttggtgttcagcaaaaggttttattgaaagaaaaaagtctctgggaaataactgttgaatcacttagatacctgacagaaaaaggactcctacaaaaagacactatttataagtctgaagaagaggtccaatataattttcatattacaaagttgggacgtgcttcatttaagggaactatagatttagcttattgtgacattctgtacagagacttgaagaaaggtcttgaaggacttgtgcttgaaagccttcttcatctaatctacctaacaaccccctatgatctggtttcacagtgtaaccctgattggatgatatacttcaggcagtttagccaactcagtccagcagaacaaaatgtagctgccattcttggagtctctgaaagctttattgggaagaaagcatcaggccaagccatcggaaagaaggtggacaagaacgttgtcaacaggctatatctgtcttttgttctttataccttgctcaaagagaccaacatttggactgtatctgaaaaatttaatatgcctcgaggatatatacaaaatcttctcactggaactgcctcattctcatcttgtgtgttacatttctgtgaggagcttgaggagttttgggtttacagagcccttttggtagaacttaccaagaagctgacttactgtgtaaaggcagaattaatccctctcatggaagttactggagttttagagggtcgagcaaaacagttatacagtgcaggttacaaaagtctaatgcacttagctaatgcaaatcctgaagtgctcgtaaggacaattgatcatttatcaagacgccaagccaagcaaattgtttcatcagcaaagatgctgttgcatgaaaaagcagaagccctgcaagaagaggtagaagagttactaagattgccttctgatttccctggtgctgtggcttcttccactgacaaagcatgaagctatctgatgagaattttcatatatgaattatttattgtacatgtgtgttattaaagataacttatactttataaatgaaaaaatacatttcagttatacattaagaa

SEQ ID NO: 140038 - DNA, 3429 bp, Homo sapiens
  Payload ID: 7464
  Gene Symbol: HELQ
  Gene Name: helicase, POLQ-like
  ENST ID: ENST00000508591
  CDS Start-End: 112-1581
tttcccaaggtggatgtagaagcgggctccggcgtcccactctcccttccatatgggcttagcgtctgggtcactgagaacgacgtctgaatagggccctgggtccttgccatggatgaatgtggttcccgcatccgccggcgggtgtctctccccaaaaggaaccgtccaagcttggggtgtatttttggcgctcccaccgcggccgagctcgtgcccggagatgaggggaaagaggaggaggaaatggtggctgagaacaggaggcggaaaaccgcgggcgtactgccggttgaggtacagccccttctactctcagattccccggaatgtctcgtccttggaggtggtgatacaaacccggacctcctacgtcacatgcccactgacagaggggtgggagaccagcctaatgacagtgaagtggacatgtttggtgactatgatagctttactgaaaactcctttatagctcaagttgacgacctggaacaaaaatatatgcaactccctgaacataagaaacatgctacagactttgccactgaaaatctttgctcggaaagtatcaaaaacaaactcagcattactaccataggcaaccttactgaattacaaactgataagcacacagagaaccagagtggatatgaaggtgtcactattgaacctggagctgatcttttgtatgatgtaccttcctcacaggctatatactttgaaaatttgcagaactcttcaaatgatttgggtgatcattctatgaaagaaagggattggaagtcatcctctcacaacactgtgaatgaggaactgccccataattgcatagagcaaccccagcaaaatgatgagtcctcttccaaagtcagaactagttcagatatgaacaggagaaaaagtattaaagatcatctaaaaaatgccatgactggaaatgcgaaggcccagacaccaatattttctagaagtaaacagctcaaagacactctcctatctgaggaaattaatgttgctaagaaaacagttgagtcatcatcaaatgaccttggtcctttttattcattacccagcaaagtgagagacctttatgcccaattcaagggaattgaaaaattatatgaatggcaacatacttgtttaacattgaattctgtgcaagaaagaaaaaatttaatatattccttgccaacaagtggtggaaaaaccctcgtggctgagattttaatgctgcaagaactgctttgctgtcggaaagatgttttaatgattcttccatatgtggcaattgtccaagaaaagatttcaggtttgtcaagttttggtatagaactcggtttctttgttgaagaatatgctggaagcaaaggaagatttcctccaactaaaagaagggaaaagaaatcactctatattgccactattgaaaaaggacatagcttggtgaactccttgattgaaactggaagaattgacagtctgggtctggttgttgtagacgagttgcacatgattggtgaaggaagccgtggagctacactggaaatgaccctagcaaaaatcctctacactagcagttgagttaaaagaatatctgaaaataaatgatacaatatatgaagttgacagcaaagctgagaatggcatgactttttcacgtcttcttaattataagtattctgataccctaaaaaagatggatcctgatcacttggtagcattggtgacagaagttattcccaattattcctgcttagttttttgtcctagtaagaagaactgtgaaaatgtagcagaaatgatatgcaaatttttaagcaaggaatatctgaaacataaggagaaagaaaaatgtgaggtgattaagaacttgaagaatattggcaatggcaacctgtgtcctgttttaaagcgcactatcccatttggagttgcctatcaccacagtggcttaacaagtgatgaaaggaaactcttggaggaggcctactccacaggagtgctctgtctttttacctgcacatctaccctagcggcaggtgtcaacctaccagctcgaagagttattttaagagctccctatgttgctaaggaatttttaaagaggaatcaatataaacagatgattggcagagctggtcgtgctggaatagatactattggggagagtatcctcatattgcaagaaaaagacaaacaacaggtattggagttaataactaaaccattggaaaactgttacagccatcttgttcaggaattcaccaagggaatccaaacattatttctctctttgattggtttgaagattgcaacgaatcttgatgacatctatcatttcatgaatggtacattttttggtgttcagcaaaaggttttattgaaagaaaaaagtctctgggaaataactgttgaatcacttagatacctgacagaaaaaggactcctacaaaaagacactatttataagtctgaagaagaggtccaatataattttcatattacaaagttgggacgtgcttcatttaagggaactatagatttagcttattgtgacattctgtacagagacttgaagaaaggtcttgaaggacttgtgcttgaaagccttcttcatctaatctacctaacaaccccctatgatctggtttcacagtgtaaccctgattggatgatatacttcaggcagtttagccaactcagtccagcagaacaaaatgtagctgccattcttggagtctctgaaagctttattgggaagaaagcatcaggccaagccatcggaaagaaggtggacaagaacgttgtcaacaggctatatctgtcttttgttctttataccttgctcaaagagaccaacatttggactgtatctgaaaaatttaatatgcctcgaggatatatacaaaatcttctcactggaactgcctcattctcatcttgtgtgttacatttctgtgaggagcttgaggagttttgggtttacagagcccttttggtagaacttaccaagaagctgacttactgtgtaaaggcagaattaatccctctcatggaagttactggagttttagagggtcgagcaaaacagttatacagtgcaggttacaaaagtctaatgcacttagctaatgcaaatcctgaagtgctcgtaaggacaattgatcatttatcaagacgccaagccaagcaaattgtttcatcagcaaagatgctgttgcatgaaaaagcagaagccctgcaagaagaggtagaagagttactaagattgccttctgatttccctggtgctgtggcttcttccactgacaaagcatgaagctatctgatgagaattttcatatatgaattatttattgtacatgtgtgttattaaagataacttatactttataaatgaaaaaatacatttcagttatacattaagaa

SEQ ID NO: 140039 - DNA, 3315 bp, Homo sapiens
  Payload ID: 7464
  Gene Symbol: HELQ
  Gene Name: helicase, POLQ-like
  ENST ID: ENST00000510985
  CDS Start-End: 131-3235
gagagctaacttggggtcttttcccaaggtggatgtagaagcgggctccggcgtcccactctcccttccatatgggcttagcgtctgggtcactgagaacgacgtctgaatagggccctgggtccttgccatggatgaatgtggttcccgcatccgccggcgggtgtctctccccaaaaggaaccgtccaagcttggggtgtatttttggcgctcccaccgcggccgagctcgtgcccggagatgaggggaaagaggaggaggaaatggtggctgagaacaggaggcggaaaaccgcgggcgtactgccggttgaggtacagccccttctactctcagattccccggaatgtctcgtccttggaggtggtgatacaaacccggacctcctacgtcacatgcccactgacagaggggtgggagaccagcctaatgacagtgaagtggacatgtttggtgactatgatagctttactgaaaactcctttatagctcaagttgacgacctggaacaaaaatatatgcaactccctgaacataagaaacatgctacagactttgccactgaaaatctttgctcggaaagtatcaaaaacaaactcagcattactaccataggcaaccttactgaattacaaactgataagcacacagagaaccagagtggatatgaaggtgtcactattgaacctggagctgatcttttgtatgatgtaccttcctcacaggctatatactttgaaaatttgcagaactcttcaaatgatttgggtgatcattctatgaaagaaagggattggaagtcatcctctcacaacactgtgaatgaggaactgccccataattgcatagagcaaccccagcaaaatgatgagtcctcttccaaagtcagaactagttcagatatgaacaggagaaaaagtattaaagatcatctaaaaaatgccatgactggaaatgcgaaggcccagacaccaatattttctagaagtaaacagctcaaagacactctcctatctgaggaaattaatgttgctaagaaaacagttgagtcatcatcaaatgaccttggtcctttttattcattacccagcaaagtgagagacctttatgcccaattcaagggaattgaaaaattatatgaatggcaacatacttgtttaacattgaattctgtgcaagaaagaaaaaatttaatatattccttgccaacaagtggtggaaaaaccctcgtggctgagattttaatgctgcaagaactgctttgctgtcggaaagatgttttaatgattcttccatatgtggcaattgtccaagaaaagttgcacatgattggtgaaggaagccgtggagctacactggaaatgaccctagcaaaaatcctctacactagcaaaacgactcaaattattggtatgagtgcaacattaaacaatgttgaagacctacaaaagtttcttcaagcagaatattataccagtcaatttagaccagttgagttaaaagaatatctgaaaataaatgatacaatatatgaagttgacagcaaagctgagaatggcatgactttttcacgtcttcttaattataagtattctgataccctaaaaaagatggatcctgatcacttggtagcattggtgacagaagttattcccaattattcctgcttagttttttgtcctagtaagaagaactgtgaaaatgtagcagaaatgatatgcaaatttttaagcaaggaatatctgaaacataaggagaaagaaaaatgtgaggtgattaagaacttgaagaatattggcaatggcaacctgtgtcctgttttaaagcgcactatcccatttggagttgcctatcaccacagtggcttaacaagtgatgaaaggaaactcttggaggaggcctactccacaggagtgctctgtctttttacctgcacatctaccctagcggcaggtgtcaacctaccagctcgaagagttattttaagagctccctatgttgctaaggaatttttaaagaggaatcaatataaacagatgattggcagagctggtcgtgctggaatagatactattggggagagtatcctcatattgcaagaaaaagacaaacaacaggtattggagttaataactaaaccattggaaaactgttacagccatcttgttcaggaattcaccaagggaatccaaacattatttctctctttgattggtttgaagattgcaacgaatcttgatgacatctatcatttcatgaatggtacattttttggtgttcagcaaaaggttttattgaaagaaaaaagtctctgggaaataactgttgaatcacttagatacctgacagaaaaaggactcctacaaaaagacactatttataagtctgaagaagaggtccaatataattttcatattacaaagttgggacgtgcttcatttaagggaactatagatttagcttattgtgacattctgtacagagacttgaagaaaggtcttgaaggacttgtgcttgaaagccttcttcatctaatctacctaacaaccccctatgatctggtttcacagtgtaaccctgattggatgatatacttcaggcagtttagccaactcagtccagcagaacaaaatgtagctgccattcttggagtctctgaaagctttattgggaagaaagcatcaggccaagccatcggaaagaaggtggacaagaacgttgtcaacaggctatatctgtcttttgttctttataccttgctcaaagagaccaacatttggactgtatctgaaaaatttaatatgcctcgaggatatatacaaaatcttctcactggaactgcctcattctcatcttgtgtgttacatttctgtgaggagcttgaggagttttgggtttacagagcccttttggtagaacttaccaagaagctgacttactgtgtaaaggcagaattaatccctctcatggaagttactggagttttagagggtcgagcaaaacagttatacagtgcaggttacaaaagtctaatgcacttagctaatgcaaatcctgaagtgctcgtaaggacaattgatcatttatcaagacgccaagccaagcaaattgtttcatcagcaaagatgctgttgcatgaaaaagcagaagccctgcaagaagaggtagaagagttactaagattgccttctgatttccctggtgctgtggcttcttccactgacaaagcatgaagctatctgatgagaattttcatatatgaattatttattgtacatgtgtgttattaaagataacttatactttataaatg

SEQ ID NO: 140040 - DNA, 5317 bp, Homo sapiens
  Payload ID: 7465
  Gene Symbol: HLTF
  Gene Name: helicase-like transcription factor
  Uniprot ID: Q14527
  ENST ID: ENST00000310053
  CDS Start-End: 195-3224
ttgttgcagaaggagacggcgtcgacgtctgactggactcgcggcgacttacctttcagtcgtgcgctcctgatccggcgctcggaatttgtccccggcttcagggctgcggggcctggaaggaggcgtatcgaggcggctcgaaaacgatccaggggagccgaggcgctcctcttgtcatcccactcagcgccatgtcctggatgttcaagagggatccagtttggaagtacttgcagactgtccagtatggagttcatggaaattttccacgcctctcatatccaactttctttccacgttttgaattccaagatgttatccctccagatgactttctaactagtgatgaagaagtagattccgttttatttggaagtttgagaggtcatgtggttggactacgctattacacgggagtagttaataataatgaaatggttgcattacaacgagatcctaataacccttatgataagaatgcaattaaagtaaacaatgtgaatggaaatcaagttggccatttaaagaaagagcttgcaggtgctttggcctatatcatggacaacaaattggcacaaattgaaggggtagttccttttggtgcaaacaatgcttttaccatgcctctgcatatgactttttggggaaaagaagaaaatagaaaagcggtttcagatcagttgaagaaacatggatttaaattgggtcctgcaccaaaaactttaggattcaatttggaaagtggttggggctctggaagagctggaccaagctatagtatgccagtgcatgctgcagtacagatgacaactgaacagcttaaaacagaatttgacaaattgtttgaagatttaaaagaagatgataaaacccatgaaatggaaccagctgaggctattgaaacaccactgcttccacatcaaaaacaagctctagcttggatggtgtcacgggaaaatagcaaagaacttccaccattctgggaacagcgaaatgacttatactataacacaataacaaatttttctgagaaggaccgaccagaaaatgtccatggaggaattttagctgatgatatgggtttgggtaaaactcttacggccattgcagtaatccttaccaacttccatgatggcagacctcttcctattgaaagagttaaaaagaatctactgaagaaggaatataatgttaacgatgactctatgaaacttggaggaaacaataccagtgaaaaggcagatggactaagcaaagacgcatctagatgtagtgaacaacccagtatttcagatatcaaggagaagagtaagtttcgcatgtcagaattgtctagctcccgccccaaaagaagaaaaactgctgtccagtacatagaaagcagtgattcagaggaaattgaaacaagtgaattgccgcagaaaatgaaaggcaaactgaaaaatgtacagtctgaaactaaaggcagggcgaaagcaggatcttctaaggttatagaagatgtggcatttgcatgtgcattaacttcatctgttcctacaacaaaaaagaaaatgttgaaaaagggagcttgtgcagtggaggggtcaaagaaaactgatgttgaggagagaccaagaacaacactgatcatctgtccgctttctgtgttaagcaactggattgaccagtttggacaacatataaaatcagatgtacacttgaatttttatgtttattatggtcctgatcgtattagagaaccggccttactttcaaaacaggatattgttttgactacgtataatattttaactcatgactatggaactaaaggagatagtccattacatagcataaggtggctaagagtgatcctggatgaaggacatgccatacgaaatccaaatgctcagcagacaaaagctgtacttgacttagaatcagaaagaagatgggttttgacaggtactccaatccagaattctttaaaggacttgtggtctcttctttcctttttaaaacttaaaccatttattgatagagaatggtggcatagaacaatacagcgtcctgtcacaatgggagatgaaggaggacttaggcgtttacagtccctaattaaaaatattacacttagaagaacaaagacaagcaaaattaaaggaaaacctgttttggagttaccagaacgtaaagtatttattcagcacattacactttcagatgaagagagaaagatttatcagtctgtgaaaaatgaaggcagagccactattggaaggtattttaatgaagggactgtcctggcacattatgcagatgtcctgggtcttttgcttagactgcggcaaatttgttgccatacttaccttcttacaaatgcagtgtcttccaatggcccctcaggaaatgatacacctgaagaactgagaaagaagttaataaggaagatgaagttaattctgagctcaggttcagatgaggaatgtgcaatttgcctggattctttaacagttcctgtgataacacattgtgcacatgtattttgtaaaccctgtatttgccaagtcattcagaatgagcagccacatgctaaatgccctttatgcagaaatgatatacatgaagataatttattagaatgtcctccagaagaattagcacgtgacagtgagaaaaagtctgatatggaatggacatccagttcaaagattaatgcgctaatgcacgcattgactgacttaagaaagaagaatcccaacataaaaagtttggttgtttctcagtttacaacattcctgtctttaatagaaataccacttaaagcctctggatttgtgtttactcgtttggatggttccatggcccaaaagaaaagagttgaatcaattcagtgttttcaaaacactgaagcaggatctccaactataatgcttctgtccttaaaagcaggtggagttggtttgaatctgtctgcagcttctcgagtgtttttaatggatccagcctggaatcctgctgctgaagatcagtgctttgacagatgccatagacttggtcagaagcaagaagttatcatcacaaaattcattgtaaaggactctgttgaagaaaatatgctgaaaatacaaaacaaaaagagagaacttgcagcaggagcctttggaactaaaaaaccaaatgctgacgaaatgaaacaagccaaaattaatgaaatcagaacattaattgacttataatttgtgggattttagtaaggtcagtttgattggatacttaagttttagaaatgagaaaaatacagagttttagaaatgagatctagagaacacgtcttctaaaaggggcatattttatattagtgaagaggtattactgacacaatttcttctatatatgaacctatttttaatgaaacttcaaatagcaataagttccgttatatactgtggcctgaaataatttgagaaaaaaggttactttgttattcagcttttcataatatctatgctgagtattttcacgtatcttccaagtactcagctttttcgtatttcaaataaggtcagaccttttatacttttgaccaaatagttattttctatgttggacacttagttatttaccaaagcctccgatttgtgatgcagtgtttgtagtccttgtaaacaatatatacagactatacaagaattaattttattgggctttcaaaaaccatatttgcattccagaaccaaatcttaaatgagaccaaagtccaggttagcacaggtttttatttttcctacagctacattgagatatagttcacataaatgacttggagttttatgttcatgaaaaaattagggattatgttaagagtactattttttccattttagttaagtagtactacactcattgtttaaatgtaacttgctgtgtctgaggtataaatatagtctgtgggagtgagaggcaaaccagtcctacccaatttgatttgaatattttaaattatggaactgctaaatagatatttctataaatagataatttttatttatgtagctttttttggaagtaactttataaatttttataattcagaagactactatatgtgagaggcgtgatatctggatggaagttgggctggatgatctccaaagtcgtttcaactcttaaagacatcttaatcctgaatgtaaacaattgttatgtgtttagaatcagaatttgattttgaacttgagtaattcatccttacagctatctgtagaattagtcatcttttttcttttcttttttttttacttttttgttaataagcaaacttatttgctgcagaatttgggttgactcctgagcatatttaaaacaaagaagctagaaatttagcagtcagattaggtaggtggttttatttcaaagggaaactttaatccaaagaaagattaattactctaacaaacaagagaagcttcatgtttgatgatacagatttaagaatacctgagacttaagagtgttggaagtcatttgatagaaagatgagatcggagacaatgttgtgttatagggcacacattgaaggtatatgccaaatctctcaccagataagtccttttctccctgtgccgttttcttgctcaaagggaacagtgaattagccagctagaatcttcctggtccctttttgaggcagtagcaggtaaggaaagggctgattttcatcaaaaccaagacctttctgcagggatgatagtggaataataatgtgggattagcccgctagcattaggagcagttgggaagttacctggtagatcaagcattacacacaaaaaatcaagttgatcagagtatgggttctccatatagcaatacttcagtgagattaagtataaacagtttttggcaaaaaacaacacagtctactctttctgcttacaaagacaaagccttacaaactcactatgaaggtaaagggaggacagcttgcttctttgcccagacatttacaaagttgtttttaaaacacactcataagtaagtttggcaagttgtttaaaaaatgtctctttgttttgtacagttctgttagatgttgttatattttaaaagtttaatttaaaaaatttaatttgtccttcctaagaaggataaatatataaaaaagccactggaatgaaaacttcctatatgctatgctgttgtcttattattatatagaaaaataactttagaaaaatattgaagacattgtattaccacttgtgattcaaacaattttgtggttaaaactggattttaaatttaaaaatcaataaaaatttcaaatgtt

SEQ ID NO: 140041 - DNA, 3896 bp, Homo sapiens
  Payload ID: 7465
  Gene Symbol: HLTF
  Gene Name: helicase-like transcription factor
  Uniprot ID: Q14527
  ENST ID: ENST00000392912
  CDS Start-End: 169-3198
gtctgactggactcgcggcgacttacctttcagtcgtgcgctcctgatccggcgctcggaatttgtccccggcttcagggctgcggggcctggaaggaggcgtatcgaggcggctcgaaaacgatccaggggagccgaggcgctcctcttgtcatcccactcagcgccatgtcctggatgttcaagagggatccagtttggaagtacttgcagactgtccagtatggagttcatggaaattttccacgcctctcatatccaactttctttccacgttttgaattccaagatgttatccctccagatgactttctaactagtgatgaagaagtagattccgttttatttggaagtttgagaggtcatgtggttggactacgctattacacgggagtagttaataataatgaaatggttgcattacaacgagatcctaataacccttatgataagaatgcaattaaagtaaacaatgtgaatggaaatcaagttggccatttaaagaaagagcttgcaggtgctttggcctatatcatggacaacaaattggcacaaattgaaggggtagttccttttggtgcaaacaatgcttttaccatgcctctgcatatgactttttggggaaaagaagaaaatagaaaagcggtttcagatcagttgaagaaacatggatttaaattgggtcctgcaccaaaaactttaggattcaatttggaaagtggttggggctctggaagagctggaccaagctatagtatgccagtgcatgctgcagtacagatgacaactgaacagcttaaaacagaatttgacaaattgtttgaagatttaaaagaagatgataaaacccatgaaatggaaccagctgaggctattgaaacaccactgcttccacatcaaaaacaagctctagcttggatggtgtcacgggaaaatagcaaagaacttccaccattctgggaacagcgaaatgacttatactataacacaataacaaatttttctgagaaggaccgaccagaaaatgtccatggaggaattttagctgatgatatgggtttgggtaaaactcttacggccattgcagtaatccttaccaacttccatgatggcagacctcttcctattgaaagagttaaaaagaatctactgaagaaggaatataatgttaacgatgactctatgaaacttggaggaaacaataccagtgaaaaggcagatggactaagcaaagacgcatctagatgtagtgaacaacccagtatttcagatatcaaggagaagagtaagtttcgcatgtcagaattgtctagctcccgccccaaaagaagaaaaactgctgtccagtacatagaaagcagtgattcagaggaaattgaaacaagtgaattgccgcagaaaatgaaaggcaaactgaaaaatgtacagtctgaaactaaaggcagggcgaaagcaggatcttctaaggttatagaagatgtggcatttgcatgtgcattaacttcatctgttcctacaacaaaaaagaaaatgttgaaaaagggagcttgtgcagtggaggggtcaaagaaaactgatgttgaggagagaccaagaacaacactgatcatctgtccgctttctgtgttaagcaactggattgaccagtttggacaacatataaaatcagatgtacacttgaatttttatgtttattatggtcctgatcgtattagagaaccggccttactttcaaaacaggatattgttttgactacgtataatattttaactcatgactatggaactaaaggagatagtccattacatagcataaggtggctaagagtgatcctggatgaaggacatgccatacgaaatccaaatgctcagcagacaaaagctgtacttgacttagaatcagaaagaagatgggttttgacaggtactccaatccagaattctttaaaggacttgtggtctcttctttcctttttaaaacttaaaccatttattgatagagaatggtggcatagaacaatacagcgtcctgtcacaatgggagatgaaggaggacttaggcgtttacagtccctaattaaaaatattacacttagaagaacaaagacaagcaaaattaaaggaaaacctgttttggagttaccagaacgtaaagtatttattcagcacattacactttcagatgaagagagaaagatttatcagtctgtgaaaaatgaaggcagagccactattggaaggtattttaatgaagggactgtcctggcacattatgcagatgtcctgggtcttttgcttagactgcggcaaatttgttgccatacttaccttcttacaaatgcagtgtcttccaatggcccctcaggaaatgatacacctgaagaactgagaaagaagttaataaggaagatgaagttaattctgagctcaggttcagatgaggaatgtgcaatttgcctggattctttaacagttcctgtgataacacattgtgcacatgtattttgtaaaccctgtatttgccaagtcattcagaatgagcagccacatgctaaatgccctttatgcagaaatgatatacatgaagataatttattagaatgtcctccagaagaattagcacgtgacagtgagaaaaagtctgatatggaatggacatccagttcaaagattaatgcgctaatgcacgcattgactgacttaagaaagaagaatcccaacataaaaagtttggttgtttctcagtttacaacattcctgtctttaatagaaataccacttaaagcctctggatttgtgtttactcgtttggatggttccatggcccaaaagaaaagagttgaatcaattcagtgttttcaaaacactgaagcaggatctccaactataatgcttctgtccttaaaagcaggtggagttggtttgaatctgtctgcagcttctcgagtgtttttaatggatccagcctggaatcctgctgctgaagatcagtgctttgacagatgccatagacttggtcagaagcaagaagttatcatcacaaaattcattgtaaaggactctgttgaagaaaatatgctgaaaatacaaaacaaaaagagagaacttgcagcaggagcctttggaactaaaaaaccaaatgctgacgaaatgaaacaagccaaaattaatgaaatcagaacattaattgacttataatttgtgggattttagtaagaagactactatatgtgagaggcgtgatatctggatggaagttgggctggatgatctccaaagtcgtttcaactcttaaagacatcttaatcctgaatgtaaacaattgttatgtgtttagaatcagaatttgattttgaacttgagtaattcatccttacagctatctgtagaattagtcatcttttttcttttcttttttttttacttttttgttaataagcaaacttatttgctgcagaatttgggttgactcctgagcatatttaaaacaaagaagctagaaatttagcagtcagattaggtaggtggttttatttcaaagggaaactttaatccaaagaaagattaattactctaacaaacaagagaagcttcatgtttgatgatacagatttaagaatacctgagacttaagagtgttggaagtcatttgatagaaagatgagatcggagacaatgttgtgttatagggcacacattgaaggtatatgccaaatctctcaccagataagtccttttctccctgtgccgttttcttgctcaaagggaacagtgaattagccagctagaatcttcctggtccctttttgaggcagtagcaggtaaggaaagggctgattttcatcaaaaccaagacctttctgcagggatgatagtggaataataatgtgggatta

SEQ ID NO: 140042 - DNA, 1276 bp, Homo sapiens
  Payload ID: 7465
  Gene Symbol: HLTF
  Gene Name: helicase-like transcription factor
  ENST ID: ENST00000467858
  CDS Start-End: 1-1276
gactatggaactaaaggagatagtccattacatagcataaggtggctaagagtgatcctggatgaaggacatgccatacgaaatccaaatgctcagcagacaaaagctgtacttgacttagaatcagaaagaagatgggttttgacaggtactccaatccagaattctttaaaggacttgtggtctcttctttcctttttaaaacttaaaccatttattgatagagaatggtggcatagaacaatacagcgtcctgtcacaatgggagatgaaggaggacttaggcgtttacagtccctaattaaaaatattacacttagaagaacaaagacaagcaaaattaaaggaaaacctgttttggagttaccagaacgtaaagtatttattcagcacattacactttcagatgaagagagaaagatttatcagtctgtgaaaaatgaaggcagagccactattggaaggtattttaatgaagggactgtcctggcacattatgcagatgtcctgggtcttttgcttagactgcggcaaatttgttgccatacttaccttcttacaaatgcagtgtcttccaatggcccctcagccttttctctaggaaatgatacacctgaagaactgagaaagaagttaataaggaagatgaagttaattctgagctcaggttcagatgaggaatgtgcaatttgcctggattctttaacagttcctgtgataacacattgtgcacatgtattttgtaaaccctgtatttgccaagtcattcagaatgagcagccacatgctaaatgccctttatgcagaaatgatatacatgaagataatttattagaatgtcctccagaagaattagcacgtgacagtgagaaaaagtctgatatggaatggacatccagttcaaagattaatgcgctaatgcacgcattgactgacttaagaaagaagaatcccaacataaaaagtttggttgtttctcagtttacaacattcctgtctttaatagaaataccacttaaagcctctggatttgtgtttactcgtttggatggttccatggcccaaaagaaaagagttgaatcaattcagtgttttcaaaacactgaagcaggatctccaactataatgcttctgtccttaaaagcaggtggagttggtttgaatctgtctgcagcttctcgagtgtttttaatggatccagcctggaatcctgctgctgaagatcagtgctttgacagatgccatagacttggtcagaagcaagaagttatcatca

SEQ ID NO: 140043 - DNA, 3633 bp, Homo sapiens
  Payload ID: 7465
  Gene Symbol: HLTF
  Gene Name: helicase-like transcription factor
  Uniprot ID: Q14527
  ENST ID: ENST00000494055
  CDS Start-End: 219-3248
acagagcgacgctggtctcccagattgttgcagaaggagacggcgtcgacgtctgactggactcgcggcgacttacctttcagtcgtgcgctcctgatccggcgctcggaatttgtccccggcttcagggctgcggggcctggaaggaggcgtatcgaggcggctcgaaaacgatccaggggagccgaggcgctcctcttgtcatcccactcagcgccatgtcctggatgttcaagagggatccagtttggaagtacttgcagactgtccagtatggagttcatggaaattttccacgcctctcatatccaactttctttccacgttttgaattccaagatgttatccctccagatgactttctaactagtgatgaagaagtagattccgttttatttggaagtttgagaggtcatgtggttggactacgctattacacgggagtagttaataataatgaaatggttgcattacaacgagatcctaataacccttatgataagaatgcaattaaagtaaacaatgtgaatggaaatcaagttggccatttaaagaaagagcttgcaggtgctttggcctatatcatggacaacaaattggcacaaattgaaggggtagttccttttggtgcaaacaatgcttttaccatgcctctgcatatgactttttggggaaaagaagaaaatagaaaagcggtttcagatcagttgaagaaacatggatttaaattgggtcctgcaccaaaaactttaggattcaatttggaaagtggttggggctctggaagagctggaccaagctatagtatgccagtgcatgctgcagtacagatgacaactgaacagcttaaaacagaatttgacaaattgtttgaagatttaaaagaagatgataaaacccatgaaatggaaccagctgaggctattgaaacaccactgcttccacatcaaaaacaagctctagcttggatggtgtcacgggaaaatagcaaagaacttccaccattctgggaacagcgaaatgacttatactataacacaataacaaatttttctgagaaggaccgaccagaaaatgtccatggaggaattttagctgatgatatgggtttgggtaaaactcttacggccattgcagtaatccttaccaacttccatgatggcagacctcttcctattgaaagagttaaaaagaatctactgaagaaggaatataatgttaacgatgactctatgaaacttggaggaaacaataccagtgaaaaggcagatggactaagcaaagacgcatctagatgtagtgaacaacccagtatttcagatatcaaggagaagagtaagtttcgcatgtcagaattgtctagctcccgccccaaaagaagaaaaactgctgtccagtacatagaaagcagtgattcagaggaaattgaaacaagtgaattgccgcagaaaatgaaaggcaaactgaaaaatgtacagtctgaaactaaaggcagggcgaaagcaggatcttctaaggttatagaagatgtggcatttgcatgtgcattaacttcatctgttcctacaacaaaaaagaaaatgttgaaaaagggagcttgtgcagtggaggggtcaaagaaaactgatgttgaggagagaccaagaacaacactgatcatctgtccgctttctgtgttaagcaactggattgaccagtttggacaacatataaaatcagatgtacacttgaatttttatgtttattatggtcctgatcgtattagagaaccggccttactttcaaaacaggatattgttttgactacgtataatattttaactcatgactatggaactaaaggagatagtccattacatagcataaggtggctaagagtgatcctggatgaaggacatgccatacgaaatccaaatgctcagcagacaaaagctgtacttgacttagaatcagaaagaagatgggttttgacaggtactccaatccagaattctttaaaggacttgtggtctcttctttcctttttaaaacttaaaccatttattgatagagaatggtggcatagaacaatacagcgtcctgtcacaatgggagatgaaggaggacttaggcgtttacagtccctaattaaaaatattacacttagaagaacaaagacaagcaaaattaaaggaaaacctgttttggagttaccagaacgtaaagtatttattcagcacattacactttcagatgaagagagaaagatttatcagtctgtgaaaaatgaaggcagagccactattggaaggtattttaatgaagggactgtcctggcacattatgcagatgtcctgggtcttttgcttagactgcggcaaatttgttgccatacttaccttcttacaaatgcagtgtcttccaatggcccctcaggaaatgatacacctgaagaactgagaaagaagttaataaggaagatgaagttaattctgagctcaggttcagatgaggaatgtgcaatttgcctggattctttaacagttcctgtgataacacattgtgcacatgtattttgtaaaccctgtatttgccaagtcattcagaatgagcagccacatgctaaatgccctttatgcagaaatgatatacatgaagataatttattagaatgtcctccagaagaattagcacgtgacagtgagaaaaagtctgatatggaatggacatccagttcaaagattaatgcgctaatgcacgcattgactgacttaagaaagaagaatcccaacataaaaagtttggttgtttctcagtttacaacattcctgtctttaatagaaataccacttaaagcctctggatttgtgtttactcgtttggatggttccatggcccaaaagaaaagagttgaatcaattcagtgttttcaaaacactgaagcaggatctccaactataatgcttctgtccttaaaagcaggtggagttggtttgaatctgtctgcagcttctcgagtgtttttaatggatccagcctggaatcctgctgctgaagatcagtgctttgacagatgccatagacttggtcagaagcaagaagttatcatcacaaaattcattgtaaaggactctgttgaagaaaatatgctgaaaatacaaaacaaaaagagagaacttgcagcaggagcctttggaactaaaaaaccaaatgctgacgaaatgaaacaagccaaaattaatgaaatcagaacattaattgacttataatttgtgggattttagtaagactactatatgtgagaggcgtgatatctggatggaagttgggctggatgatctccaaagtcgtttcaactcttaaagacatcttaatcctgaatgtaaacaattgttatgtgtttagaatcagaatttgattttgaacttgagtaattcatccttacagctatctgtagaattagtcatcttttttcttttcttttttttttacttttttgttaataagcaaacttatttgctgcagaatttgggttgactcctgagcatatttaaaacaaagaagctagaaatttagcagtcagattaggtaggtggttttatttcaaagggaaactttaatccaaagaaagattaattactctaacaaacaaga

SEQ ID NO: 140044 - DNA, 5306 bp, Homo sapiens
  Payload ID: 7465
  Gene Symbol: HLTF
  Gene Name: helicase-like transcription factor
  ENST ID: ENST00000465259
  CDS Start-End: 187-3213
gaaggagacggcgtcgacgtctgactggactcgcggcgacttacctttcagtcgtgcgctcctgatccggcgctcggaatttgtccccggcttcagggctgcggggcctggaaggaggcgtatcgaggcggctcgaaaacgatccaggggagccgaggcgctcctcttgtcatcccactcagcgccatgtcctggatgttcaagagggatccagtttggaagtacttgcagactgtccagtatggagttcatggaaattttccacgcctctcatatccaactttctttccacgttttgaattccaagatgttatccctccagatgactttctaactagtgatgaagaagtagattccgttttatttggaagtttgagaggtcatgtggttggactacgctattacacgggagtagttaataataatgaaatggttgcattacaacgagatcctaataacccttatgataagaatgcaattaaagtaaacaatgtgaatggaaatcaagttggccatttaaagaaagagcttgcaggtgctttggcctatatcatggacaacaaattggcacaaattgaaggggtagttccttttggtgcaaacaatgcttttaccatgcctctgcatatgactttttggggaaaagaagaaaatagaaaagcggtttcagatcagttgaagaaacatggatttaaattgggtcctgcaccaaaaactttaggattcaatttggaaagtggttggggctctggaagagctggaccaagctatagtatgccagtgcatgctgcagtacagatgacaactgaacagcttaaaacagaatttgacaaattgtttgaagatttaaaagaagatgataaaacccatgaaatggaaccagctgaggctattgaaacaccactgcttccacatcaaaaacaagctctagcttggatggtgtcacgggaaaatagcaaagaacttccaccattctgggaacagcgaaatgacttatactataacacaataacaaatttttctgagaaggaccgaccagaaaatgtccatggaggaattttagctgatgatatgggtttgggtaaaactcttacggccattgcagtaatccttaccaacttccatgatggcagacctcttcctattgaaagagttaaaaagaatctactgaagaaggaatataatgttaacgatgactctatgaaacttggaggaaacaataccagtgaaaaggcagatggactaagcaaagacgcatctagatgtagtgaacaacccagtatttcagatatcaaggagaagagtaagtttcgcatgtcagaattgtctagctcccgccccaaaagaagaaaaactgctgtccagtacatagaaagcagtgattcagaggaaattgaaacaagtgaattgccgcagaaaatgaaaggcaaactgaaaaatgtacagtctgaaactaaaggcagggcgaaaggatcttctaaggttatagaagatgtggcatttgcatgtgcattaacttcatctgttcctacaacaaaaaagaaaatgttgaaaaagggagcttgtgcagtggaggggtcaaagaaaactgatgttgaggagagaccaagaacaacactgatcatctgtccgctttctgtgttaagcaactggattgaccagtttggacaacatataaaatcagatgtacacttgaatttttatgtttattatggtcctgatcgtattagagaaccggccttactttcaaaacaggatattgttttgactacgtataatattttaactcatgactatggaactaaaggagatagtccattacatagcataaggtggctaagagtgatcctggatgaaggacatgccatacgaaatccaaatgctcagcagacaaaagctgtacttgacttagaatcagaaagaagatgggttttgacaggtactccaatccagaattctttaaaggacttgtggtctcttctttcctttttaaaacttaaaccatttattgatagagaatggtggcatagaacaatacagcgtcctgtcacaatgggagatgaaggaggacttaggcgtttacagtccctaattaaaaatattacacttagaagaacaaagacaagcaaaattaaaggaaaacctgttttggagttaccagaacgtaaagtatttattcagcacattacactttcagatgaagagagaaagatttatcagtctgtgaaaaatgaaggcagagccactattggaaggtattttaatgaagggactgtcctggcacattatgcagatgtcctgggtcttttgcttagactgcggcaaatttgttgccatacttaccttcttacaaatgcagtgtcttccaatggcccctcaggaaatgatacacctgaagaactgagaaagaagttaataaggaagatgaagttaattctgagctcaggttcagatgaggaatgtgcaatttgcctggattctttaacagttcctgtgataacacattgtgcacatgtattttgtaaaccctgtatttgccaagtcattcagaatgagcagccacatgctaaatgccctttatgcagaaatgatatacatgaagataatttattagaatgtcctccagaagaattagcacgtgacagtgagaaaaagtctgatatggaatggacatccagttcaaagattaatgcgctaatgcacgcattgactgacttaagaaagaagaatcccaacataaaaagtttggttgtttctcagtttacaacattcctgtctttaatagaaataccacttaaagcctctggatttgtgtttactcgtttggatggttccatggcccaaaagaaaagagttgaatcaattcagtgttttcaaaacactgaagcaggatctccaactataatgcttctgtccttaaaagcaggtggagttggtttgaatctgtctgcagcttctcgagtgtttttaatggatccagcctggaatcctgctgctgaagatcagtgctttgacagatgccatagacttggtcagaagcaagaagttatcatcacaaaattcattgtaaaggactctgttgaagaaaatatgctgaaaatacaaaacaaaaagagagaacttgcagcaggagcctttggaactaaaaaaccaaatgctgacgaaatgaaacaagccaaaattaatgaaatcagaacattaattgacttataatttgtgggattttagtaaggtcagtttgattggatacttaagttttagaaatgagaaaaatacagagttttagaaatgagatctagagaacacgtcttctaaaaggggcatattttatattagtgaagaggtattactgacacaatttcttctatatatgaacctatttttaatgaaacttcaaatagcaataagttccgttatatactgtggcctgaaataatttgagaaaaaaggttactttgttattcagcttttcataatatctatgctgagtattttcacgtatcttccaagtactcagctttttcgtatttcaaataaggtcagaccttttatacttttgaccaaatagttattttctatgttggacacttagttatttaccaaagcctccgatttgtgatgcagtgtttgtagtccttgtaaacaatatatacagactatacaagaattaattttattgggctttcaaaaaccatatttgcattccagaaccaaatcttaaatgagaccaaagtccaggttagcacaggtttttatttttcctacagctacattgagatatagttcacataaatgacttggagttttatgttcatgaaaaaattagggattatgttaagagtactattttttccattttagttaagtagtactacactcattgtttaaatgtaacttgctgtgtctgaggtataaatatagtctgtgggagtgagaggcaaaccagtcctacccaatttgatttgaatattttaaattatggaactgctaaatagatatttctataaatagataatttttatttatgtagctttttttggaagtaactttataaatttttataattcagaagactactatatgtgagaggcgtgatatctggatggaagttgggctggatgatctccaaagtcgtttcaactcttaaagacatcttaatcctgaatgtaaacaattgttatgtgtttagaatcagaatttgattttgaacttgagtaattcatccttacagctatctgtagaattagtcatcttttttcttttcttttttttttacttttttgttaataagcaaacttatttgctgcagaatttgggttgactcctgagcatatttaaaacaaagaagctagaaatttagcagtcagattaggtaggtggttttatttcaaagggaaactttaatccaaagaaagattaattactctaacaaacaagagaagcttcatgtttgatgatacagatttaagaatacctgagacttaagagtgttggaagtcatttgatagaaagatgagatcggagacaatgttgtgttatagggcacacattgaaggtatatgccaaatctctcaccagataagtccttttctccctgtgccgttttcttgctcaaagggaacagtgaattagccagctagaatcttcctggtccctttttgaggcagtagcaggtaaggaaagggctgattttcatcaaaaccaagacctttctgcagggatgatagtggaataataatgtgggattagcccgctagcattaggagcagttgggaagttacctggtagatcaagcattacacacaaaaaatcaagttgatcagagtatgggttctccatatagcaatacttcagtgagattaagtataaacagtttttggcaaaaaacaacacagtctactctttctgcttacaaagacaaagccttacaaactcactatgaaggtaaagggaggacagcttgcttctttgcccagacatttacaaagttgtttttaaaacacactcataagtaagtttggcaagttgtttaaaaaatgtctctttgttttgtacagttctgttagatgttgttatattttaaaagtttaatttaaaaaatttaatttgtccttcctaagaaggataaatatataaaaaagccactggaatgaaaacttcctatatgctatgctgttgtcttattattatatagaaaaataactttagaaaaatattgaagacattgtattaccacttgtgattcaaacaattttgtggttaaaactggattttaaatttaaaaatcaataaaaatttcaaatgtt

SEQ ID NO: 140045 - DNA, 1008 bp, Homo sapiens
  Payload ID: 7466
  Gene Symbol: HELT
  Gene Name: helt bHLH transcription factor
  ENST ID: ENST00000338875
  CDS Start-End: 1-984
atgtcagacaagctcaaggaacgcaaagtgagtcggctgagcccaaatggcacttgcgccctggtggtggaggcatctgactcaccgacccgccacttgggtggaccgatggcagggaagtgcccgcacgggactttgagtgtggaggaatctcgagtgagaacccccgtttctcataaagtgatagaaaagcggaggagggacaggatcaaccgctgcttgaacgagctgggcaagacagtgcccatggccttggcgaagcagggcgaacctcaggaggctctggcgcagatccgcagccgcgtccgctcgctggtcctctccagcgccacagtgcccgaccagcaggcgctgggccgctgcgaggggcccttcctccttttgcagagttccgggaagctggagaaggcggagatcctcgagatgaccgttcagtacctgagagcactgcactccgctgattttccccggggaagggaaaaagcagaacttctagcggagtttgccaactacttccactatggctaccacgagtgcatgaagaacctggtgcattacctcaccacggtggagcggatggagaccaaggacacgaagtacgcgcgcatcctcgccttcttgcagtccaaggcccgcctgggcgcggagcccgcctttccgccgctgggttcgctcccggagccggatttctcctatcagctgcaccctgcggggcccgaattcgctggtcacagcccgggcgaggccgctgtgttcccgcagggctctggtgccgggcctttcccctggccgcctggcgcggcccgcagccccgcgctgccctacctgcccagcgcgccagtgccgctcgctagcccagcgcagcagcacagccccttcctgacaccggtgcagggcctggaccggcattacctcaacctgatcggccacgcgcaccccaacgcccttaacctgcacacgccccagcaccccccggtgctctgacgcccactcgcccgccagatttct

SEQ ID NO: 140046 - DNA, 846 bp, Homo sapiens
  Payload ID: 7466
  Gene Symbol: HELT
  Gene Name: helt bHLH transcription factor
  Uniprot ID: A6NFD8
  ENST ID: ENST00000505610
  CDS Start-End: 89-814
acctgggacactcgaggaggcacacgaggcggaaaagtggacgggtgccccgcgccaccgcctctcccgagggcgcgtactgaccaggatgtcagacaagctcaaggaacgcaaaagaacccccgtttctcataaagtgatagaaaagcggaggagggacaggatcaaccgctgcttgaacgagctgggcaagacagtgcccatggccttggcgaagcagagttccgggaagctggagaaggcggagatcctcgagatgaccgttcagtacctgagagcactgcactccgctgattttccccggggaagggaaaaagaacttctagcggagtttgccaactacttccactatggctaccacgagtgcatgaagaacctggtgcattacctcaccacggtggagcggatggagaccaaggacacgaagtacgcgcgcatcctcgccttcttgcagtccaaggcccgcctgggcgcggagcccgcctttccgccgctgggttcgctcccggagccggatttctcctatcagctgcaccctgcggggcccgaattcgctggtcacagcccgggcgaggccgctgtgttcccgcagggctctggtgccgggcctttcccctggccgcctggcgcggcccgcagccccgcgctgccctacctgcccagcgcgccagtgccgctcgctagcccagcgcagcagcacagccccttcctgacaccggtgcagggcctggaccggcattacctcaacctgatcggccacgcgcaccccaacgcccttaacctgcacacgccccagcaccccccggtgctctgacgcccactcgcccgccagatttctcctcgctt

SEQ ID NO: 140047 - DNA, 841 bp, Homo sapiens
  Payload ID: 7466
  Gene Symbol: HELT
  Gene Name: helt bHLH transcription factor
  Uniprot ID: A6NFD8
  ENST ID: ENST00000515777
  CDS Start-End: 89-817
acctgggacactcgaggaggcacacgaggcggaaaagtggacgggtgccccgcgccaccgcctctcccgagggcgcgtactgaccaggatgtcagacaagctcaaggaacgcaaaagaacccccgtttctcataaagtgatagaaaagcggaggagggacaggatcaaccgctgcttgaacgagctgggcaagacagtgcccatggccttggcgaagcagagttccgggaagctggagaaggcggagatcctcgagatgaccgttcagtacctgagagcactgcactccgctgattttccccggggaagggaaaaagcagaacttctagcggagtttgccaactacttccactatggctaccacgagtgcatgaagaacctggtgcattacctcaccacggtggagcggatggagaccaaggacacgaagtacgcgcgcatcctcgccttcttgcagtccaaggcccgcctgggcgcggagcccgcctttccgccgctgggttcgctcccggagccggatttctcctatcagctgcaccctgcggggcccgaattcgctggtcacagcccgggcgaggccgctgtgttcccgcagggctctggtgccgggcctttcccctggccgcctggcgcggcccgcagccccgcgctgccctacctgcccagcgcgccagtgccgctcgctagcccagcgcagcagcacagccccttcctgacaccggtgcagggcctggaccggcattacctcaacctgatcggccacgcgcaccccaacgcccttaacctgcacacgccccagcaccccccggtgctctgacgcccactcgcccgccagatttct

SEQ ID NO: 140048 - DNA, 1633 bp, Homo sapiens
  Payload ID: 7467
  Gene Symbol: HN1
  Gene Name: hematological and neurological expressed 1
  ENST ID: ENST00000304834
  CDS Start-End: 279-413
aggctgagccgtggccgccacagcccatcgtaatgccgcatggtgcttggcactccagagagccaataggaatgaaagaattcatttgaatcggccaatgccggcgggttagggggcgggggttgaaaaccctataaaggcgtcgatcggccggacaggcggcagcggcggctcctgcagcggtggtcggctgttgggtgtggagtttcccagcgcccctcgggtccgaccctttgagcgttctgctccggcgccagcctacctcgctcctcggcgccatgaccacaaccaccaccttcaagggagtcgaccccaacagcaggaatagctcccgagacacggggtcttgccatgttgcccaggctggtcttgaactcctaggctcaagtgatgatcctgccttggcctcctagggtgctgggattacagagttttgcggcctccaggtggtggatccaatttttcattaggttttgatgaaccaacagaacaacctgtgaggaagaacaaaatggcctctaatatctttgggacacctgaagaaaatcaagcttcttgggccaagtcagcaggtgccaagtctagtggtggcagggaagacttggagtcatctggactgcagagaaggaactcctctgaagcaagctccggagacttcttagatctgaagggagaaggtgatattcatgaaaatgtggacacagacttgccaggcagcctggggcagagtgaagagaagcccgtgcctgctgcgcctgtgcccagcccggtggccccggccccagtgccatccagaagaaatccccctggcggcaagtccagcctcgtcttgggttagctctgactgtcctgaacgctgtcgttctgtctgtttcctccatgcttgtgaactgcacaacttgagcctgactgtacatctcttggatttgtttcattaaaaagaagcactttatgtactgctgtcttttttttttttcttttgaagaacaggtttctctctgtccttgactcttgggtctgtgggccatggcatgagtgttttctagtagtagattggagggaaagctttgtgacacttagtactgtgtttttaagaagaaataatttggttccagatgtgttagaggatcttttgtactgaggtttttaacactttacttgggtttaccaagcctcaactggacagaccataaacagtccacaggcaccgttcctgccaggccccaacccacagggagtctctccgcagagccttcttggtgttgccctaacttgccagtggcctttgctcagagcctcctcctgtgacatgtgaacaatgaagaggcctgcgcctcctgccttgccgcctgcaaagcaaagaaactgccttttattttttaaccttaaaaagtagccagatagtaacaagactggctggctgatgagcaaagcctttgctctcacgcagaggaaggcttggatgtacaatgaaactgcctggaactaaaagcagtgaagcaagggaggcaatcacactgaagcgggtcttcctccaggaacggggtcccacaggcgtgttgttttaaataacctgatgctgtgtgcatgatgctggtgcttgaccatgaaaggaaagtctcatccttaaaat

SEQ ID NO: 140049 - DNA, 1519 bp, Homo sapiens
  Payload ID: 7467
  Gene Symbol: HN1
  Gene Name: hematological and neurological expressed 1
  Uniprot ID: Q9UK76
  ENST ID: ENST00000356033
  CDS Start-End: 279-824
aggctgagccgtggccgccacagcccatcgtaatgccgcatggtgcttggcactccagagagccaataggaatgaaagaattcatttgaatcggccaatgccggcgggttagggggcgggggttgaaaaccctataaaggcgtcgatcggccggacaggcggcagcggcggctcctgcagcggtggtcggctgttgggtgtggagtttcccagcgcccctcgggtccgaccctttgagcgttctgctccggcgccagcctacctcgctcctcggcgccatgaccacaaccaccaccttcaagggagtcgaccccaacagcaggaatagctcccgagttttgcggcctccaggtggtggatccaatttttcattaggttttgatgaaccaacagaacaacctgtgaggaagaacaaaatggcctctaatatctttgggacacctgaagaaaatcaagcttcttgggccaagtcagcaggtgccaagtctagtggtggcagggaagacttggagtcatctggactgcagagaaggaactcctctgaagcaagctccggagacttcttagatctgaagaaaatgtggacacagacttgccaggcagcctggggcagagtgaagagaagcccgtgcctgctgcgcctgtgcccagcccggtggccccggccccagtgccatccagaagaaatccccctggcggcaagtccagcctcgtcttgggttagctctgactgtcctgaacgctgtcgttctgtctgtttcctccatgcttgtgaactgcacaacttgagcctgactgtacatctcttggatttgtttcattaaaaagaagcactttatgtactgctgtcttttttttttttcttttgaagaacaggtttctctctgtccttgactcttgggtctgtgggccatggcatgagtgttttctagtagtagattggagggaaagctttgtgacacttagtactgtgtttttaagaagaaataatttggttccagatgtgttagaggatcttttgtactgaggtttttaacactttacttgggtttaccaagcctcaactggacagaccataaacagtccacaggcaccgttcctgccaggccccaacccacagggagtctctccgcagagccttcttggtgttgccctaacttgccagtggcctttgctcagagcctcctcctgtgacatgtgaacaatgaagaggcctgcgcctcctgccttgccgcctgcaaagcaaagaaactgccttttattttttaaccttaaaaagtagccagatagtaacaagactggctggctgatgagcaaagcctttgctctcacgcagaggaaggcttggatgtacaatgaaactgcctggaactaaaagcagtgaagcaagggaggcaatcacactgaagcgggtcttcctccaggaacggggtcccacaggcgtgttgttttaaataacctgatgctgtgtgcatgatgctggtgcttgaccatgaaaggaaagtctcatccttaaaat

SEQ ID NO: 140050 - DNA, 1605 bp, Homo sapiens
  Payload ID: 7467
  Gene Symbol: HN1
  Gene Name: hematological and neurological expressed 1
  Uniprot ID: Q9UK76
  ENST ID: ENST00000409753
  CDS Start-End: 287-751
gcgggcttaggctgagccgtggccgccacagcccatcgtaatgccgcatggtgcttggcactccagagagccaataggaatgaaagaattcatttgaatcggccaatgccggcgggttagggggcgggggttgaaaaccctataaaggcgtcgatcggccggacaggcggcagcggcggctcctgcagcggtggtcggctgttgggtgtggagtttcccagcgcccctcgggtccgaccctttgagcgttctgctccggcgccagcctacctcgctcctcggcgccatgaccacaaccaccaccttcaagggagtcgaccccaacagcaggaatagctcccgagttttgcggcctccaggtggtggatccaatttttcattaggttttgatgaaccaacagaacaacctgtgaggaagaacaaaatggcctctaatatctttgggacacctgaagaaaatcaagcttcttgggccaagtcagcaggtgccaagtctagtggtggcagggaagacttggagtcatctggactgcagagaaggaactcctctgaagcaagctccggagacttcttagatctgaagggagaaggtgatattcatgaaaatgtggacacagacttgccaggcagcctggggcagagtgaagagaagcccgtgcctgctgcgcctgtgcccagcccggtggccccggccccagtgccatccagaagaaatccccctggcggcaagtccagcctcgtcttgggttagctctgactgtcctgaacgctgtcgttctgtctgtttcctccatgcttgtgaactgcacaacttgagcctgactgtacatctcttggatttgtttcattaaaaagaagcactttatgtactgctgtcttttttttttttcttttgaagaacaggtttctctctgtccttgactcttgggtctgtgggccatggcatgagtgttttctagtagtagattggagggaaagctttgtgacacttagtactgtgtttttaagaagaaataatttggttccagatgtgttagaggatcttttgtactgaggtttttaacactttacttgggtttaccaagcctcaactggacagaccataaacagtccacaggcaccgttcctgccaggccccaacccacagggagtctctccgcagagccttcttggtgttgccctaacttgccagtggcctttgctcagagcctcctcctgtgacatgtgaacaatgaagaggcctgcgcctcctgccttgccgcctgcaaagcaaagaaactgccttttattttttaaccttaaaaagtagccagatagtaacaagactggctggctgatgagcaaagcctttgctctcacgcagaggaaggcttggatgtacaatgaaactgcctggaactaaaagcagtgaagcaagggaggcaatcacactgaagcgggtcttcctccaggaacggggtcccacaggcgtgttgttttaaataacctgatgctgtgtgcatgatgctggtgcttgaccatgaaaggaaagtctcatccttaaaatgtgttgtacttcacaatcctggactgttgcttcaagtaaacaatatccacattttgaaa

SEQ ID NO: 140051 - DNA, 576 bp, Homo sapiens
  Payload ID: 7467
  Gene Symbol: HN1
  Gene Name: hematological and neurological expressed 1
  Uniprot ID: Q9UK76
  ENST ID: ENST00000481647
  CDS Start-End: 140-466
ccggcgggctccttaccctcgccgtgcccccactccttattcggacctacctgacagagttttgcggcctccaggtggtggatccaatttttcattaggttttgatgaaccaacagaacaacctgtgaggaagaacaaaatggcctctaatatctttgggacacctgaagaaaatcaagcttcttgggccaagtcagcaggtgccaagtctagtggtggcagggaagacttggagtcatctggactgcagagaaggaactcctctgaagcaagctccggagacttcttagatctgaagggagaaggtgatattcatgaaaatgtggacacagacttgccaggcagcctggggcagagtgaagagaagcccgtgcctgctgcgcctgtgcccagcccggtggccccggccccagtgccatccagaagaaatccccctggcggcaagtccagcctcgtcttgggttagctctgactgtcctgaacgctgtcgttctgtctgtttcctccatgcttgtgaactgcacaacttgagcctgactgtacatctcttggatttgtttcattaaaaagaagcac

SEQ ID NO: 140052 - DNA, 411 bp, Homo sapiens
  Payload ID: 7467
  Gene Symbol: HN1
  Gene Name: hematological and neurological expressed 1
  ENST ID: ENST00000580380
  CDS Start-End: 131-411
ctcaattagaaaactgcaatttggttccaccacatcctgactactaccagttttgcggcctccaggtggtggatccaatttttcattaggttttgatgaaccaacagaacaacctgtgaggaagaacaaaatggcctctaatatctttgggacacctgaagaaaatcaagcttcttgggccaagtcagcaggtgccaagtctagtggtggcagggaagacttggagtcatctggactgcagagaaggaactcctctgaagcaagctccggagacttcttagatctgaagggagaaggtgatattcatgaaaatgtggacacagacttgccaggcagcctggggcagagtgaagagaagcccgtgcctgctgcgcctgtgcccagcccggtggccccggccccagtgccatc

SEQ ID NO: 140053 - DNA, 663 bp, Homo sapiens
  Payload ID: 7467
  Gene Symbol: HN1
  Gene Name: hematological and neurological expressed 1
  Uniprot ID: Q9UK76
  ENST ID: ENST00000470924
  CDS Start-End: 121-447
cgcgcgcagccattggatccggagaccggatcgatcagagttttgcggcctccaggtggtggatccaatttttcattaggttttgatgaaccaacagaacaacctgtgaggaagaacaaaatggcctctaatatctttgggacacctgaagaaaatcaagcttcttgggccaagtcagcaggtgccaagtctagtggtggcagggaagacttggagtcatctggactgcagagaaggaactcctctgaagcaagctccggagacttcttagatctgaagggagaaggtgatattcatgaaaatgtggacacagacttgccaggcagcctggggcagagtgaagagaagcccgtgcctgctgcgcctgtgcccagcccggtggccccggccccagtgccatccagaagaaatccccctggcggcaagtccagcctcgtcttgggttagctctgactgtcctgaacgctgtcgttctgtctgtttcctccatgcttgtgaactgcacaacttgagcctgactgtacatctcttggatttgtttcattaaaaagaagcactttatgtactgctgtcttttttttttttcttttgaagaacaggtttctctctgtccttgactcttgggtctgtgggccatggcatgagtgttttctagtagtagat

SEQ ID NO: 140054 - DNA, 517 bp, Homo sapiens
  Payload ID: 7467
  Gene Symbol: HN1
  Gene Name: hematological and neurological expressed 1
  ENST ID: ENST00000581874
  CDS Start-End: 116-430
agcggcggctcctgcagcggtggtcggctgttgggtgtggagtttcccagcgcccctcgggtccgaccctttgagcgttctgctccggcgccagcctacctcgctcctcggcgccatgaccacaaccaccaccttcaagggagtcgaccccaacagcaggaatagctcccgagttttgcggcctccaggtggtggatccaatttttcattaggttttgatgaaccaacagaacaacctgtgaggaagaacaaaatggcctctaatatctttgggacacctgaagaaaatcaagcttcttgggccaagtcagcaggtgccaagtctagtggtggcagggaagacttggagtcatctggactgcagagaaggaactcctctgaagcaagctccggagacttcttagatctgaaggtcagtgtgacagcatgaggccagaaaggctttcagggagaaggtgatattcatgaaaatgtggacacagacttgccaggcagcctggggcagagtgaagagaag

SEQ ID NO: 140055 - DNA, 1614 bp, Homo sapiens
  Payload ID: 7467
  Gene Symbol: HN1
  Gene Name: hematological and neurological expressed 1
  Uniprot ID: Q9UK76
  ENST ID: ENST00000482348
  CDS Start-End: 472-798
acttacttggtggaagggtttggattctgtggaaggtgtccacattgtctcagctaattgcacactgttctttaaggtgggttacagttatgtctgggatcctcttcaaggcttggaagaagcttaaatcacttttttgagcatgtattttacatcgattatgacctgcattcatgtgtggctaccctcggggtcctggccaagtggcacaaagggagccattttgtggggctaagaagacacgtgaaatagccatatctcacaggggttagagaacttgggaacaaaaagcacgcctcactcagcaattgagccttaggaggaaagcatgggaaatgacattcctttacaactcaatactttcaggtttacaaggtcaaaaagactagagttttgcggcctccaggtggtggatccaatttttcattaggttttgatgaaccaacagaacaacctgtgaggaagaacaaaatggcctctaatatctttgggacacctgaagaaaatcaagcttcttgggccaagtcagcaggtgccaagtctagtggtggcagggaagacttggagtcatctggactgcagagaaggaactcctctgaagcaagctccggagacttcttagatctgaagggagaaggtgatattcatgaaaatgtggacacagacttgccaggcagcctggggcagagtgaagagaagcccgtgcctgctgcgcctgtgcccagcccggtggccccggccccagtgccatccagaagaaatccccctggcggcaagtccagcctcgtcttgggttagctctgactgtcctgaacgctgtcgttctgtctgtttcctccatgcttgtgaactgcacaacttgagcctgactgtacatctcttggatttgtttcattaaaaagaagcactttatgtactgctgtcttttttttttttcttttgaagaacaggtttctctctgtccttgactcttgggtctgtgggccatggcatgagtgttttctagtagtagattggagggaaagctttgtgacacttagtactgtgtttttaagaagaaataatttggttccagatgtgttagaggatcttttgtactgaggtttttaacactttacttgggtttaccaagcctcaactggacagaccataaacagtccacaggcaccgttcctgccaggccccaacccacagggagtctctccgcagagccttcttggtgttgccctaacttgccagtggcctttgctcagagcctcctcctgtgacatgtgaacaatgaagaggcctgcgcctcctgccttgccgcctgcaaagcaaagaaactgccttttattttttaaccttaaaaagtagccagatagtaacaagactggctggctgatgagcaaagcctttgctctcacgcagaggaaggcttggatgtacaatgaaactgcctggaactaaaagcagtgaagcaagggaggcaatcacactgaagcgggtcttcctccaggaacggggtcccacaggcgtgttgttttaaataacctgatgctgtgtgcatgatgctggtgcttgaccatgaaaggaaagtctcatccttaaaatgtgttgtacttcacaatcctg

SEQ ID NO: 140056 - DNA, 2289 bp, Homo sapiens
  Payload ID: 7467
  Gene Symbol: HN1
  Gene Name: hematological and neurological expressed 1
  Uniprot ID: Q9UK76
  ENST ID: ENST00000476258
  CDS Start-End: 1109-1435
cgtgcgctgtgctcgcgccggggcgggtggcggggttctgccgtcggcgccgcctttgtgccgcctggcgagccctgcgcgccggccccacccgggtccctgctgctctccattcattccttccacggagtcaggggctgaggaggccggggctggtcgcccctcggagcacggccggttttcgttaatcggaaccttcggggagggcttcgctttctcctgtgtgcatcccggctggtgcatccccagggtggtgggcttggccccccaggtgcccggggatcctttagggccccatgcatggtcaggtcctattgtcccattgatgggccacgcgctcctgtctctcccccgtggcatgcggttggtctcgctctcgcgcgcagccattggatccggagaccggatcgatcaggtccggcgggctccttaccctcgccgtgcccccactccttattcggacctacctgacaggtgcatgtgtggtcgagcggggctggtcatcgcgacccttcaccccccattgaggacccaatcgttcttcccctcttcgaagtgcctcccctcttccaagtgtctccccttcctaacaaaggaaagaccccttctccccatccctgcgctcatttctaaggcggggggcgggggcgggcgcggggaacgagccaacccgagtgggttttctgcgcttaaaccttcggaccgtggcctttgcatcctaccttcgcttcctcctttgacgtttgcccagtgagttcatccctggccctggttcccttgcaggaggaggtttcttgttcttgggcggggccggagacatccattgtctctaacgtggtagcgctacctgggaagcgggggatttttcttgcccttcttcccactgctttttgggcttggggcactgggtacagtgtttggacaggaacccttttccaagtccttgcttaacttacttggtggaagggtttggattctgtggaaggtgtccacattgtctcagctaattgcacactgttctttaagagttttgcggcctccaggtggtggatccaatttttcattaggttttgatgaaccaacagaacaacctgtgaggaagaacaaaatggcctctaatatctttgggacacctgaagaaaatcaagcttcttgggccaagtcagcaggtgccaagtctagtggtggcagggaagacttggagtcatctggactgcagagaaggaactcctctgaagcaagctccggagacttcttagatctgaagggagaaggtgatattcatgaaaatgtggacacagacttgccaggcagcctggggcagagtgaagagaagcccgtgcctgctgcgcctgtgcccagcccggtggccccggccccagtgccatccagaagaaatccccctggcggcaagtccagcctcgtcttgggttagctctgactgtcctgaacgctgtcgttctgtctgtttcctccatgcttgtgaactgcacaacttgagcctgactgtacatctcttggatttgtttcattaaaaagaagcactttatgtactgctgtcttttttttttttcttttgaagaacaggtttctctctgtccttgactcttgggtctgtgggccatggcatgagtgttttctagtagtagattggagggaaagctttgtgacacttagtactgtgtttttaagaagaaataatttggttccagatgtgttagaggatcttttgtactgaggtttttaacactttacttgggtttaccaagcctcaactggacagaccataaacagtccacaggcaccgttcctgccaggccccaacccacagggagtctctccgcagagccttcttggtgttgccctaacttgccagtggcctttgctcagagcctcctcctgtgacatgtgaacaatgaagaggcctgcgcctcctgccttgccgcctgcaaagcaaagaaactgccttttattttttaaccttaaaaagtagccagatagtaacaagactggctggctgatgagcaaagcctttgctctcacgcagaggaaggcttggatgtacaatgaaactgcctggaactaaaagcagtgaagcaagggaggcaatcacactgaagcgggtcttcctccaggaacggggtcccacaggcgtgttgttttaaataacctgatgctgtgtgcatgatgctggtgcttgaccatgaaaggaaagtctcatccttaaaatgtgttgtacttcacaatcctggactgttgcttcaagtaaacaatatccacattttgaaa

SEQ ID NO: 140057 - DNA, 3718 bp, Homo sapiens
  Payload ID: 7468
  Gene Symbol: HN1L
  Gene Name: hematological and neurological expressed 1-like
  Uniprot ID: Q9H910
  ENST ID: ENST00000248098
  CDS Start-End: 58-630
acctgcgctgggcgggcgggaacggcgcgcggcgagctgagggtggcggcggtcgacatgttccaggtcccggatagcgagggcggccgcgccggctccagggccatgaagcccccaggaggagaatcgagcaatctttttggaagtccagaagaagctactccttccagcaggcctaataggatggcatctaatatttttggaccaacagaagaacctcagaacatacccaagaggacaaatcccccagggggtaaaggaagtggtatctttgacgaatcaacccccgtgcagactcgacagcacctgaacccacctggagggaagaccagcgacatttttgggtctccggtcactgccacttcacgcttggcacacccaaacaaacccaaggatcatgttttcttatgtgaaggagaagaaccaaaatcggatcttaaagctgcaaggagcatcccggctggagcagagccaggtgagaaaggcagcgccagaaaagcaggccccgccaaggagcaggagcccatgcccacagtcgacagccatgagccccggctggggccgcggcctcgctctcacaacaaggtcctgaacccaccgggaggcaaatccagcatctccttctactaagagaagccactgctccacccggagccagaccagaaactcaagagatagggtagccatgttttcatttccttttgcccaaatgagcggggtgggaagagggttagtcttatgtgagcctggctgctcagcgtctcctggccgtcatgacagctgcttggagacccgtgccttccagatggctgggagatgcctctgtggggatgaaatggggcacccctggccatcactcatgtgtagtccaggtttgagaggaactggaaggggggtgagggtggggaggtggggcagggcatggtccttggatcaacagcccgccagctgattggatgtctaggaatgactgaaagaaaccaaaacagcctgtccactgctgctgtgggatggaggaggcgtaagcagaaacactaacagtatattgacctcttagcagaaccgcttccattctggagatcacggctgctaaatccagcatccccacttcattttacccccagcatattgttctgtagtcttttcttgaaacatcttgattgcttttcctcggcagctttcaaaaaaccaaataataatagttatccgtcttctacttcatggaagattgttttggtgccctgaccctctgaagtgcccagttcctgccatctgaaacctcggcctgatctgatctcatgttggaatctgcctgtctttcacacagggctggtcttggtcctttacatgccagttttgcttgtgaattcttgcttttttcctctcatcagccttaagtttaggcgtttgttgttctccagtgatgtagacagttcccttcacaagtcacagttcttcccataaatgaggcccgctgacctctgcgggactttaaaaatctattcagatatttccgagtaagtggcttgtttaaattcttcctgtgtctttctttattccttaattggttggtggaaagaagagatgcttgggaaccttgggttcttaggtttggattctttaataatatctaaaaagctaaattttaaataccagctttacataaatgattgttgactctggtctgtttctgacacctttccagaaaaaagtcaattgttcaggtacaccaaagaggaagaagagctgtggaggccaccctctacaaagctttatagaacttctggatctaactcacaaacaagcttccagaagagactagagaccttaggccaggagatgaaggagttcagtagcaaagtcacacctgtccaattccctgagctttgctcactcagctaatgggatggcaaaggtggtggtgctttcatcttcaggcagaagcctctgcccatccccctcaagggctgcaggcccagttctcatgctgcccttgggtgggcatctgttaacagaggagaacgtctgggtggcggcagcagctttgctctgagtgcctacaaagctaatgcttggtgctagaaacatcatcattattaaacttcagaaaagcagcagccatgttcagtcaggctcatgctgcctcactgcttaagtgcctgcaggagccgcctgccaagctccccttcctacacctggcacactggggtctgcacaaggctttgtcaaccaaagacagcttcccccttttgattgcctgtagactttggagccaagaaacactctgtgtgactctacacacacttcaggtggtttgtgcttcaaagtcattgatgcaacttgaaaggaaacagtttaatggtggaaatgaactaccatttataacttctgtttttttattgagaaaatgattcacgaattccaaatcagattgccaggaagaaataggacgtgacggtactgggccctgtgattctcccagcccttgcagtccgctaggtgagaggaaaagctctttacttccgcccctggcagggacttctgggttatgggagaaaccagagatgggaatgaggaaaatatgaactacagcagaagcccctgggcagctgtgatggagcccctgacattactcttcttgcatctgtcctgccttctttccctctgcgaggcagtggggtgggattcagagtgcttagtctgctcactgggagaagaagagttcctgcgcatgcaagccctgctgtgtggctgtcgtttacatttgggaggtgtcctgtatgtctgtacgttggggactgcctgtatttggaagatttaaaaacctagcatcctgttctcaccctctaagctgcattgagaaatgactcgtctctgtatttgtattaagccttaacacttttcttaagtgcattcggtgccaacattttttagagctgtaccaaaacaaaaagcctgtactcacatcacaatgtcattttgataggagcgttttgttatttttacaaggcagaatggggtgtaacagttgaattaaacttagcaatcacgtgctcagagcttttgcctgtcagttgtgtgtgtcccttatagtcccttcccccacagctcttgctgaaagagtttgccttgttttgttttgttgttttgtatttagccagaggatgccaaaattagtcttctcaaagctttgagtagagtaagtgtgggaataagccagtttttttttttctgtttctgtaacttaaatgaacgggtttttttcccttgtatgccacttgtcctaacatgtccttaaggtgtttaacctgcctctgacctggcttgcaatgcataggtgaggagaagcagagagcttgtcatatgcaagtcctgtcaagaaaacaggtgggcatggtggctcaggtctgtagtctttgggtctttgggaggccagggtgggaggatcacttgagctcaggagtttgagaccagcctagacaacatactacgaccctgtctatacaaaaaaaaacttctctaaattagccggatgtggtggtgcatgcctgtagtcccagctactcgggaggctgagtgaggcaggaggatcacttgagaccaggaggttgtggctgtagtgagtgatgatcatgccactgcacttcagcctggaccacagagcaagaccctgtgtaaaaaaataaaataaaaaacagattggatgtctttcttctga

SEQ ID NO: 140058 - DNA, 962 bp, Homo sapiens
  Payload ID: 7468
  Gene Symbol: HN1L
  Gene Name: hematological and neurological expressed 1-like
  ENST ID: ENST00000382710
  CDS Start-End: 155-691
atattgactttcacgctccagaagttagctgcacagggccgcactaaagtcatactcacactaccctgggggactggtttctggacaaggtgttgagaaagggagaaaactcttccttttaggatggtgaggaaggaaagccggtctgaactggatgatgagggccatgaagcccccaggaggagaatcgagcaatctttttggaagtccagaagaagctactccttccagcaggcctaataggatggcatctaatatttttggaccaacagaagaacctcagaacatacccaagaggacaaatcccccagggggtaaaggaagtggtatctttgacgaatcaacccccgtgcagactcgacagcacctgaacccacctggagggaagaccagcgacatttttgggtctccggtcactgccacttcacgcttggcacacccaaacaaacccaaggatcatgttttcttatgtgaaggagaagaaccaaaatcggatcttaaagctgcaaggagcatcccggctggagcagagccaggtgagaaaggcagcgccagaaaagcaggccccgccaaggagcaggagcccatgcccacagtcgacagccatgagccccggctggggccgcggcctcgctctcacaacaaggtcctgaacccaccgggaggcaaatccagcatctccttctactaagagaagccactgctccacccggagccagaccagaaactcaagagatagggtagccatgttttcatttccttttgcccaaatgagcggggtgggaagagggttagtcttatgtgagcctggctgctcagcgtctcctggccgtcatgacagctgcttggagacccgtgccttccagatggctgggagatgcctctgtggggatgaaatggggcacccctggccatcactcatgtgtagtccaggtttgagaggaactggaaggggggtgagg

SEQ ID NO: 140059 - DNA, 894 bp, Homo sapiens
  Payload ID: 7468
  Gene Symbol: HN1L
  Gene Name: hematological and neurological expressed 1-like
  Uniprot ID: Q9H910
  ENST ID: ENST00000382711
  CDS Start-End: 131-655
gcgcgcggcgagctgagggtggcggcggtcgacatgttccaggaaatggcaactgctgacaggaagtttggcatccacctcccccagcctcctgagtggacaggggccctgggcaccacttcagagggccatgaagcccccaggaggagaatcgagcaatctttttggaagtccagaagaagctactccttccagcaggcctaataggatggcatctaatatttttggaccaacagaagaacctcagaacatacccaagaggacaaatcccccagggggtaaaggaagtggtatctttgacgaatcaacccccgtgcagactcgacagcacctgaacccacctggagggaagaccagcgacatttttgggtctccggtcactgccacttcacgcttggcacacccaaacaaacccaaggatcatgttttcttatgtgaaggagaagaaccaaaatcggatcttaaagctgcaaggagcatcccggctggagcagagccaggtgagaaaggcagcgccagaaaagcaggccccgccaaggagcaggagcccatgcccacagtcgacagccatgagccccggctggggccgcggcctcgctctcacaacaaggtcctgaacccaccgggaggcaaatccagcatctccttctactaagagaagccactgctccacccggagccagaccagaaactcaagagatagggtagccatgttttcatttccttttgcccaaatgagcggggtgggaagagggttagtcttatgtgagcctggctgctcagcgtctcctggccgtcatgacagctgcttggagacccgtgccttccagatggctgggagatgcctctgtggggatgaaatggggcacccctggccatcactcatgtgtagtc

SEQ ID NO: 140060 - DNA, 1065 bp, Homo sapiens
  Payload ID: 7468
  Gene Symbol: HN1L
  Gene Name: hematological and neurological expressed 1-like
  ENST ID: ENST00000561516
  CDS Start-End: 35-247
ggcgcgcggcgagctgagggtggcggcggtcgacatgttccaggtcccggatagcgagggcggccgcgccggctccagggccatgaagcccccaggaggagaatcgagcaatctttttggaagtccagaagaagctactccttccagcaggcctaataggatggcatctaatatttttggaccaacagaagaacctcagaacatacccaagaggacaaatcccccaggatcatgttttcttatgtgaaggagaagaaccaaaatcggatcttaaagctgcaaggagcatcccggctggagcagagccaggtgagaaaggcagcgccagaaaagcaggccccgccaaggagcaggagcccatgcccacagtcgacagccatgagccccggctggggccgcggcctcgctctcacaacaaggtcctgaacccaccgggaggcaaatccagcatctccttctactaagagaagccactgctccacccggagccagaccagaaactcaagagatagggtagccatgttttcatttccttttgcccaaatgagcggggtgggaagagggttagtcttatgtgagcctggctgctcagcgtctcctggccgtcatgacagctgcttggagacccgtgccttccagatggctgggagatgcctctgtggggatgaaatggggcacccctggccatcactcatgtgtagtccaggtttgagaggaactggaaggggggtgagggtggggaggtggggcagggcatggtccttggatcaacagcccgccagctgattggatgtctaggaatgactgaaagaaaccaaaacagcctgtccactgctgctgtgggatggaggaggcgtaagcagaaacactaacagtatattgacctcttagcagaaccgcttccattctggagatcacggctgctaaatccagcatccccacttcattttacccccagcatattgttctgtagtcttttcttgaaacatcttgattgcttttcctcggcagctttcaaaaaaccaaataataatagttatccgtcttctacttcatggaagattg

SEQ ID NO: 140061 - DNA, 601 bp, Homo sapiens
  Payload ID: 7468
  Gene Symbol: HN1L
  Gene Name: hematological and neurological expressed 1-like
  ENST ID: ENST00000566691
  CDS Start-End: 256-601
atattgactttcacgctccagaagttagctgcacagggccgcactaaagtcatactcacactaccctgggggactggtttctggacaaggtgttgagaaagggagaaaactcttccttttaggatggtgaggaaggaaagccggtctgaactggatgatgaggtatcactggaagcttctgcttggggtccaccagacgctgcacatttgccactcatctgaacggggtcgagtcgcagggcgggcgccttggccatgaagcccccaggaggagaatcgagcaatctttttggaagtccagaagaagctactccttccagcaggcctaataggatggcatctaatatttttggaccaacagaagaacctcagaacatacccaagaggacaaatcccccagggggtaaaggaagtggtatctttgacgaatcaacccccgtgcagactcgacagcacctgaacccacctggagggaagaccagcgacatttttgggtctccggtcactgccacttcacgcttggcacacccaaacaaacccaaggatcatgttttcttatgtgaaggagaagaaccaaaatcggatcttaaagctgcaagga

SEQ ID NO: 140062 - DNA, 593 bp, Homo sapiens
  Payload ID: 7468
  Gene Symbol: HN1L
  Gene Name: hematological and neurological expressed 1-like
  ENST ID: ENST00000566742
  CDS Start-End: 24-593
agctgagggtggcggcggtcgacatgttccaggtcccggatagcgagggcggccgcgccggctccagggccatgaagcccccaggaggagaatcgagcaatctttttggaagtccagaagaagctactccttccagcaggcctaataggatggcatctaatatttttggaccaacagaagaacctcagaacatacccaagaggacaaatcccccagggggtaaaggaagtggtatctttgacgaatcaacccccgtgcagactcgacagcacctgaacccacctggagggaagaccagcgacatttttgggtctccggtcactgccacttcacgcttggcacacccaaacaaacccaaggatcatgttttcttatgtgaaggagaagaaccaaaatcggatcttaaagctgcaaggagcatcccggctggagcagagccagaaaaaagtcaattgttcaggtacaccaaagaggaagaagagctgtggaggccaccctctacaaagctttatagaacttctggatctaactcacaaacaagcttccagaagagactagagaccttaggccaggagatgaaggagttcagtagc

SEQ ID NO: 140063 - DNA, 570 bp, Homo sapiens
  Payload ID: 7468
  Gene Symbol: HN1L
  Gene Name: hematological and neurological expressed 1-like
  ENST ID: ENST00000566925
  CDS Start-End: 1-234
atgttccaggtcccggatagcgagggcggccgcgccggctccaggaaatggcaactgctgacaggaagtttggcatccacctcccccagcctcctgagtggacaggggccctgggcaccacttcagaggtcggccagcacacgcttggtttctgggggccatgaagcccccaggaggagaatcgagcaatctttttggaagtccagaagaagctactccttccagcaggcctaataggatggcatctaatatttttggaccaacagaagaacctcagaacatacccaagaggacaaatcccccagggggtaaaggaagtggtatctttgacgaatcaacccccgtgcagactcgacagcacctgaacccacctggagggaagaccagcgacatttttgggtctccggtcactgccacttcacgcttggcacacccaaacaaacccaaggatcatgttttcttatgtgaaggagaagaaccaaaatcggatcttaaagctgcaaggagcatcccggctggagcagagccaggtgagaaaggcagcgccagaaaagcaggccccgccaagga

SEQ ID NO: 140064 - DNA, 458 bp, Homo sapiens
  Payload ID: 7468
  Gene Symbol: HN1L
  Gene Name: hematological and neurological expressed 1-like
  ENST ID: ENST00000562569
  CDS Start-End: 1-351
ccttccagcaggcctaataggatggcatctaatatttttggaccaacagaagaacctcagaacatacccaagaggacaaatcccccagggggtaaaggaagtggtatctttgacgaatcaacccccgtgcagactcgacagcacctgaacccacctggagggaagaccagcgacatttttgggtctccggtcactgccacttcacgcttggcacacccaaacaaacccaaggatcatgttttcttatgtgaaggagaagaaccaaaatcggatcttaaagctgcaaggagcatcccggctggagcagagccaggcattatgtggattcagggtaaacttctcagactgtgagcctgagagttcctctctaggaggctccacaccattctgcctgctagatcggggccagatgagatgaaagtcaacgcttgagaaagaaaaccaacatgcattaactg

SEQ ID NO: 140065 - DNA, 565 bp, Homo sapiens
  Payload ID: 7468
  Gene Symbol: HN1L
  Gene Name: hematological and neurological expressed 1-like
  ENST ID: ENST00000565851
  CDS Start-End: 63-565
cacagtgacaagctttcaggtctgccatcagtaattggcatgtactctgtgcttgtagggccatgaagcccccaggaggagaatcgagcaatctttttggaagtccagaagaagctactccttccagcaggcctaataggatggcatctaatatttttggaccaacagaagaacctcagaacatacccaagaggacaaatcccccagggggtaaaggaagtggtatctttgacgaatcaacccccgtgcagactcgacagcacctgaacccacctggagggaagaccagcgacatttttgggtctccggtcactgccacttcacgcttggcacacccaaacaaacccaaggatcatgttttcttatgtgaaggagaagaaccaaaatcggatcttaaagctgcaaggagcatcccggctggagcagagccaggtgagaaaggcagcgccagaaaagcaggccccgccaaggagcaggagcccatgcccacagtcgacagccatgagccccggctggggccgcggcctcgctctcacaacaaggtcctgaacccaccgggaggcaa

SEQ ID NO: 140066 - DNA, 782 bp, Homo sapiens
  Payload ID: 7468
  Gene Symbol: HN1L
  Gene Name: hematological and neurological expressed 1-like
  ENST ID: ENST00000569765
  CDS Start-End: 1-297
atgttccaggtcccggatagcgagggcggccgcgccggctccaggaaatggcaactgctgacaggaagtttggcatccacctcccccagcctcctgagtggacaggggccctgggcaccacttcagagggccatgaagcccccaggaggagaatcgagcaatctttttggaagtccagaagaagctactccttccagcaggcctaataggatggcatctaatatttttggaccaacagaagaacctcagaacatacccaagaggacaaatcccccaggatcatgttttcttatgtgaaggagaagaaccaaaatcggatcttaaagctgcaaggagcatcccggctggagcagagccaggtgagaaaggcagcgccagaaaagcaggccccgccaaggagcaggagcccatgcccacagtcgacagccatgagccccggctggggccgcggcctcgctctcacaacaaggtcctgaacccaccgggaggcaaatccagcatctccttctactaagagaagccactgctccacccggagccagaccagaaactcaagagatagggtagccatgttttcatttccttttgcccaaatgagcggggtgggaagagggttagtcttatgtgagcctggctgctcagcgtctcctggccgtcatgacagctgcttggagacccgtgccttccagatggctgggagatgcctctgtggggatgaaatggggcacccctggccatcactcatgtgtagtccaggtttgagaggaactggaaggggggtg

SEQ ID NO: 140067 - DNA, 3185 bp, Homo sapiens
  Payload ID: 7468
  Gene Symbol: HN1L
  Gene Name: hematological and neurological expressed 1-like
  Uniprot ID: Q9H910
  ENST ID: ENST00000562684
  CDS Start-End: 37-693
acggcgcgcggcgagctgagggtggcggcggtcgacatgttccaggtcccggatagcgagggcggccgcgccggctccaggaaatggcaactgctgacaggaagtttggcatccacctcccccagcctcctgagtggacaggggccctgggcaccacttcagagggccatgaagcccccaggaggagaatcgagcaatctttttggaagtccagaagaagctactccttccagcaggcctaataggatggcatctaatatttttggaccaacagaagaacctcagaacatacccaagaggacaaatcccccagggggtaaaggaagtggtatctttgacgaatcaacccccgtgcagactcgacagcacctgaacccacctggagggaagaccagcgacatttttgggtctccggtcactgccacttcacgcttggcacacccaaacaaacccaaggatcatgttttcttatgtgaaggagaagaaccaaaatcggatcttaaagctgcaaggagcatcccggctggagcagagccaggtgagaaaggcagcgccagaaaagcaggccccgccaaggagcaggagcccatgcccacagtcgacagccatgagccccggctggggccgcggcctcgctctcacaacaaggtcctgaacccaccgggaggcaaatccagcatctccttctactaagagaagccactgctccacccggagccagaccagaaactcaagagatagggtagccatgttttcatttccttttgcccaaatgagcggggtgggaagagggttagtcttatgtgagcctggctgctcagcgtctcctggccgtcatgacagctgcttggagacccgtgccttccagatggctgggagatgcctctgtggggatgaaatggggcacccctggccatcactcatgtgtagtccaggtttgagaggaactggaaggggggtgagggtggggaggtggggcagggcatggtccttggatcaacagcccgccagctgattggatgtctaggaatgactgaaagaaaccaaaacagcctgtccactgctgctgtgggatggaggaggcgtaagcagaaacactaacagtatattgacctcttagcagaaccgcttccattctggagatcacggctgctaaatccagcatccccacttcattttacccccagcatattgttctgtagtcttttcttgaaacatcttgattgcttttcctcggcagctttcaaaaaaccaaataataatagttatccgtcttctacttcatggaagattgttttggtgccctgaccctctgaagtgcccagttcctgccatctgaaacctcggcctgatctgatctcatgttggaatctgcctgtctttcacacagggctggtcttggtcctttacatgccagttttgcttgtgaattcttgcttttttcctctcatcagccttaagtttaggcgtttgttgttctccagtgatgtagacagttcccttcacaagtcacagttcttcccataaatgaggcccgctgacctctgcgggactttaaaaatctattcagatatttccgagtaagtggcttgtttaaattcttcctgtgtctttctttattccttaattggttggtggaaagaagagatgcttgggaaccttgggttcttaggtttggattctttaataatatctaaaaagctaaattttaaataccagctttacataaatgattgttgactctggtctgtttctgacacctttccagaaaaaagtcaattgttcaggtacaccaaagaggaagaagagctgtggaggccaccctctacaaagctttatagaacttctggatctaactcacaaacaagcttccagaagagactagagaccttaggccaggagatgaaggagttcagtagcaaagtcacacctgtccaattccctgagctttgctcactcagctaatgggatggcaaaggtggtggtgctttcatcttcaggcagaagcctctgcccatccccctcaagggctgcaggcccagttctcatgctgcccttgggtgggcatctgttaacagaggagaacgtctgggtggcggcagcagctttgctctgagtgcctacaaagctaatgcttggtgctagaaacatcatcattattaaacttcagaaaagcagcagccatgttcagtcaggctcatgctgcctcactgcttaagtgcctgcaggagccgcctgccaagctccccttcctacacctggcacactggggtctgcacaaggctttgtcaaccaaagacagcttcccccttttgattgcctgtagactttggagccaagaaacactctgtgtgactctacacacacttcaggtggtttgtgcttcaaagtcattgatgcaacttgaaaggaaacagtttaatggtggaaatgaactaccatttataacttctgtttttttattgagaaaatgattcacgaattccaaatcagattgccaggaagaaataggacgtgacggtactgggccctgtgattctcccagcccttgcagtccgctaggtgagaggaaaagctctttacttccgcccctggcagggacttctgggttatgggagaaaccagagatgggaatgaggaaaatatgaactacagcagaagcccctgggcagctgtgatggagcccctgacattactcttcttgcatctgtcctgccttctttccctctgcgaggcagtggggtgggattcagagtgcttagtctgctcactgggagaagaagagttcctgcgcatgcaagccctgctgtgtggctgtcgtttacatttgggaggtgtcctgtatgtctgtacgttggggactgcctgtatttggaagatttaaaaacctagcatcctgttctcaccctctaagctgcattgagaaatgactcgtctctgtatttgtattaagccttaacacttttcttaagtgcattcggtgccaacattttttagagctgtaccaaaacaaaaagcctgtactcacatcacaatgtcattttgataggagcgttttgttatttttacaaggcagaatggggtgtaacagttgaattaaacttagcaatcacgtgctcagagcttttgcctgtcagttgtgtgtgtcccttatagtcccttcccccacagctcttgctgaaaga

SEQ ID NO: 140068 - DNA, 613 bp, Homo sapiens
  Payload ID: 7469
  Gene Symbol: HCST
  Gene Name: hematopoietic cell signal transducer
  Uniprot ID: Q9UBK5
  ENST ID: ENST00000246551
  CDS Start-End: 115-396
cttgacaccagcagggtgacatccgctattgctacttctctgctcccccacagttcctctggacttctctggaccacagtcctctgccagacccctgccagaccccagtccaccatgatccatctgggtcacatcctcttcctgcttttgctcccagtggctgcagctcagacgactccaggagagagatcatcactccctgccttttaccctggcacttcaggctcttgttccggatgtgggtccctctctctgccgctcctggcaggcctcgtggctgctgatgcggtggcatcgctgctcatcgtgggggcggtgttcctgtgcgcacgcccacgccgcagccccgcccaagaagatggcaaagtctacatcaacatgccaggcaggggctgaccctcctgcagcttggacctttgacttctgaccctctcatcctggatggtgtgtggtggcacaggaacccccgccccaacttttggattgtaataaaacaattgaaacacctgtagtcgtattctttctcaaagaaccccagagttcccaaagcctccctcccatgaactgtttctggatccaaggccccctcagaacccccacatgtccccatccc

SEQ ID NO: 140069 - DNA, 445 bp, Homo sapiens
  Payload ID: 7469
  Gene Symbol: HCST
  Gene Name: hematopoietic cell signal transducer
  Uniprot ID: Q9UBK5
  ENST ID: ENST00000437550
  CDS Start-End: 57-335
ctggacttctctggaccacagtcctctgccagacccctgccagaccccagtccaccatgatccatctgggtcacatcctcttcctgcttttgctcccagtggctgcagctcagacgactccaggagagagatcatcactccctgccttttaccctggcacttcaggctcttgttccggatgtgggtccctctctctgccgctcctggcaggcctcgtggctgctgatgcggtggcatcgctgctcatcgtgggggcggtgttcctgtgcgcacgcccacgccgcagccccgcccaagatggcaaagtctacatcaacatgccaggcaggggctgaccctcctgcagcttggacctttgacttctgaccctctcatcctggatggtgtgtggtggcacaggaacccccgccccaacttttggattgtaataaaacaattgaaacac

SEQ ID NO: 140070 - DNA, 2000 bp, Homo sapiens
  Payload ID: 7470
  Gene Symbol: HCLS1
  Gene Name: hematopoietic cell-specific Lyn substrate 1
  Uniprot ID: P14317
  ENST ID: ENST00000314583
  CDS Start-End: 93-1553
agtttctcactccgaagtggcagcagccagagagggagtcggtgtggacgcgaggagccgggcgcttagaacagaggcttgcacaggtggagatgtggaagtctgtagtgggccatgatgtgtctgtttccgtggagacccagggtgatgattgggacacagatcctgactttgtgaatgacatctctgaaaaggagcaacgatggggagccaagaccatcgaggggtctggacgcacagaacacatcaacatccaccagctgaggaacaaagtatcagaggagcatgatgttctcaggaagaaagagatggagtcagggcccaaagcatcccatggctatggaggtcggtttggagtagaaagagaccgaatggacaagagtgcagtgggccatgagtatgttgccgaggtggagaagcactcttctcagacggatgctgccaaaggctttgggggcaagtacggagttgagagggacagggcagacaagtcagcagtcggctttgattataaaggagaagtggagaagcacacatctcagaaagattactctcgtggctttggtggccggtacggggtggagaaggataaatgggacaaagcagctctgggatatgactacaagggagagacggagaaacacgagtcccagagagattatgccaagggctttggtggccagtatggaatccagaaggaccgagtggataagagcgctgtcggcttcaatgaaatggaggccccgaccacagcttataagaagacgacgcccatagaagccgcttctagtggtacccgtgggctgaaggcgaaatttgagtccatggctgaggagaagaggaagcgagaggaagaggagaaggcacagcaggtggccaggaggcaacaggagcgaaaggctgtgacaaagaggagccctgaggctccacagccagtgatagctatggaagagccagcagtaccggccccactgcccaagaaaatctcctcagaggcctggcctccagttgggactcctccatcatcagagtctgagcctgtgagaaccagcagggaacacccagtgcccttgctgcccattaggcagactctcccggaggacaatgaggagcccccagctctgccccctaggactctggaaggcctccaggtggaggaagagccagtgtacgaagcagagcctgagcctgagcccgagcctgagcccgagcctgagaatgactatgaggacgttgaggagatggacaggcatgagcaggaggatgaaccagagggggactatgaggaggtgctcgagcctgaagattcttctttttcttctgctctggctggatcatcaggctgcccggctggggctggggctggggctgtggctctggggatctcagctgtggctgtatatgattaccaaggagagggaagtgatgagctttcctttgatccggacgacgtaatcactgacattgagatggtggacgagggctggtggcggggacgttgccatggccactttggactcttccctgcaaattatgtcaagcttctggagtgactagagctcactgtctactgcaactgtgatttcccatgtccaaagtggctctgcctccaccccctccctattcctgctgcaaatgtctaaccagatgaggttctggacagacttccctctcctgcttcattaagggcttggggcagagacagcatggggaaggaggtccccttccccaagagtcctctctatcctggatgagctcatgaacatttctcttgtgttcctgactccttcccaatgaacacctctctgccaccccaagctctgctctcctcctctgtgagctctgggcttcccagtttgtttacccgggaaagtacgtctagattgtgtggtttgcctcattgtgctatttgcccactttccttccctgaagaaatatctgaaccttctttctgttcagtcctaaaattcgaaataaagtgagactatggttcacctgta

SEQ ID NO: 140071 - DNA, 1560 bp, Homo sapiens
  Payload ID: 7470
  Gene Symbol: HCLS1
  Gene Name: hematopoietic cell-specific Lyn substrate 1
  ENST ID: ENST00000428394
  CDS Start-End: 80-1429
gaagtggcagcagccagagagggagtcggtgtggacgcgaggagccgggcgcttagaacagaggcttgcacaggtggagatgtggaagtctgtagtgggccatgatgtgtctgtttccgtggagacccagggtgatgattgggacacagatcctgactttgtgaatgacatctctgaaaaggagcaacgatggggagccaagaccatcgaggggtctggacgcacagaacacatcaacatccaccagctgaggaacaaagtatcagaggagcatgatgttctcaggaagaaagagatggagtcagggcccaaagcatcccatggctatggaggtcggtttggagtagaaagagaccgaatggacaagagtgcagtgggccatgagtatgttgccgaggtggagaagcactcttctcagacggatgctgccaaaggctttgggggcaagtacggagttgagagggacagggcagacaagtcagcagtcggctttgattataaaggagaagtggagaagcacacatctcagaaagattatgccaagggctttggtggccagtatggaatccagaaggaccgagtggataagagcgctgtcggcttcaatgaaatggaggccccgaccacagcttataagaagacgacgcccatagaagccgcttctagtggtacccgtgggctgaaggcgaaatttgagtccatggctgaggagaagaggaagcgagaggaagaggagaaggcacagcaggtggccaggaggcaacaggagcgaaaggctgtgacaaagaggagccctgaggctccacagccagtgatagctatggaagagccagcagtaccggccccactgcccaagaaaatctcctcagaggcctggcctccagttgggactcctccatcatcagagtctgagcctgtgagaaccagcagggaacacccagtgcccttgctgcccattaggcagactctcccggaggacaatgaggagcccccagctctgccccctaggactctggaaggcctccaggtggaggaagagccagtgtacgaagcagagcctgagcctgagcccgagcctgagcccgagcctgagaatgactatgaggacgttgaggagatggacaggcatgagcaggaggatgaaccagagggggactatgaggaggtgctcgagcctgaagattcttctttttcttctgctctggctggatcatcaggctgcccggctggggctggggctggggctgtggctctggggatctcagctgtggctgtatatgattaccaaggagagggaagtgatgagctttcctttgatccggacgacgtaatcactgacattgagatggtggacgagggctggtggcggggacgttgccatggccactttggactcttccctgcaaattatgtcaagcttctggagtgactagagctcactgtctactgcaactgtgatttcccatgtccaaagtggctctgcctccaccccctccctattcctgctgcaaatgtctaaccagatgaggttctggacagacttccctctcctgcttcatt

SEQ ID NO: 140072 - DNA, 1219 bp, Homo sapiens
  Payload ID: 7470
  Gene Symbol: HCLS1
  Gene Name: hematopoietic cell-specific Lyn substrate 1
  Uniprot ID: P14317
  ENST ID: ENST00000495491
  CDS Start-End: 109-738
actgaagcagcagctcagtttctcactccgaagtggcagcagccagagagggagtcggtgtggacgcgaggagccgggcgcttagaacagaggcttgcacaggtggagatgtggaagtctgtagtgggccatgatgtgtctgtttccgtggagacccagggtgatgattgggacacagatcctgactttgtgaatgacatctctgaaaaggagcaacgatggggagccaagaccatcgaggggtctggacgcacagaacacatcaacatccaccagctgaggaacaaagtatcagaggagcatgatgttctcaggaagaaagagatggagtcagggcccaaagcatcccatggctatggaggtcggtttggagtagaaagagaccgaatggacaagagtgcagtgggccatgagtatgttgccgaggtggagaagcactcttctcagacggatgctgccaaaggctttgggggcaagtacggagttgagagggacagggcagacaagattactctcgtggctttggtggccggtacggggtggagaaggataaatgggacaaagcagctctgggatatgactacaagggagagacggagaaacacgagtcccagagagattatgccaagggctttggtggccagtatggaatccagaaggaccgagtggataagagcgctgtcggcttcaatgaaatggaggccccgaccacagcttataagaagacgacgcccatagaagccgcttctagtggtacccgtgggctgaaggcgaaatttgagtccatggctgaggagaagaggaagcgagaggaagaggagaaggcacagcaggtggccaggaggcaacaggagcgaaaggctgtgacaaagaggagccctgaggctccacagccagtgatagctatggaagagccagcagtaccggccccactgcccaagaaaatctcctcagaggcctggcctccagttgggactcctccatcatcagagtctgagcctgtgagaaccagcagggaacacccagtgcccttgctgcccattaggcagactctcccggaggacaatgaggagcccccagctctgccccctaggactctggaaggcctccaggtggaggaagagccagtgtacgaagcagagcctgagcctgagcccgagcctgagcccgagcctgagaatgactatgaggacgttgaggagatggacaggcatgagca

SEQ ID NO: 140073 - DNA, 533 bp, Homo sapiens
  Payload ID: 7470
  Gene Symbol: HCLS1
  Gene Name: hematopoietic cell-specific Lyn substrate 1
  ENST ID: ENST00000497391
  CDS Start-End: 101-331
agcagctcagtttctcactccgaagtggcagcagccagagagggagtcggtgtggacgcgaggagccgggcgcttagaacagaggcttgcacaggtggagatgtggaagtctgtagtgggccatgatgtgtctgtttccgtggagacccagggtgatgattgggacacagatcctgactttgtgaatgacatctctgaaaaggagcaacgatggggagccaagaccatcgaggggtctggacgcacagaacacatcaagatagatgagccttggtcatgtggtttcttccagcatccaccagctgaggaacaaagtatcagaggagcatgatgttctcaggaagaaagagatggagtcagggcccaaagcatcccatggctatggaggtcggtttggagtagaaagagaccgaatggacaagagtgcagtgggccatgagtatgttgccgaggtggagaagcactcttctcagacggatgctgccaaaggctttgggggcaagtacggagttgagagggacagggcagacaag

SEQ ID NO: 140074 - DNA, 552 bp, Homo sapiens
  Payload ID: 7470
  Gene Symbol: HCLS1
  Gene Name: hematopoietic cell-specific Lyn substrate 1
  ENST ID: ENST00000464274
  CDS Start-End: 65-292
agagagggagtcggtgtggacgcgaggagccgggcgcttagaacagaggcttgcacaggtggagatgtggaagtctgtagtgggccatgatgtgtctgtttccgtggagacccagggtgatgattgggacacagatcctgactttgtgaatgacatctctgaaaaggagcaacgatggggagccaagaccatcgaggggtctggacgcacagaacacatcaacatcccatggctatggaggtcggtttggagtagaaagagaccgaatggacaagagtgcagtgggccatgagtatgttgccgaggtggagaagcactcttctcagacggatgctgccaaaggctttgggggcaagtacggagttgagagggacagggcagacaagtcagcagtcggctttgattataaaggagaagtggagaagcacacatctcagaaagattactctcgtggctttggtggccggtacggggtggagaaggataaatgggacaaagcagctctgggatatgactacaagggagagacggagaaacacgagtcccagagag

SEQ ID NO: 140075 - DNA, 1636 bp, Homo sapiens
  Payload ID: 7471
  Gene Symbol: HPGDS
  Gene Name: hematopoietic prostaglandin D synthase
  Uniprot ID: O60760
  ENST ID: ENST00000295256
  CDS Start-End: 92-691
acttactcgtcatataaacccaaggcacagtcacatacccagggatacaagacactgcagactcccgagagacataacacagaattgcaccatgccaaactacaaactcacttattttaatatgagggggagagcagaaattattcgttacatatttgcttatttggacatacagtatgaagaccacagaatagaacaagctgactggcctgaaatcaaatcaactctcccatttggaaaaatccccattttggaagttgatggacttactcttcaccagagcctagcaatagcaagatatttgaccaaaaacacagatttggctggaaacacagaaatggaacaatgtcatgttgatgctattgtggacactctggatgatttcatgtcatgttttccttgggcagagaaaaagcaagatgtgaaagagcagatgttcaatgagctgctcacgtataatgcgcctcatcttatgcaagacttggacacatatttaggggggagagaatggcttattggtaactctgtaacttgggcagacttctactgggagatttgcagtaccacacttttggtctttaagcctgacctgttagacaaccatccaaggctggtgactttacggaagaaagtccaagccattcctgccgtcgctaactggataaaacgaaggccccaaaccaaactctagctgatccatgttgccttcaagtttgtttttctcgggggcatctctctcatcagataagacagctacatcagcctgccagataatccacatgctccctccccagctccactaagattttcactttagccatattctgatttttaaaaaggaaaataaaaacaaatctttcttcagtatctttttctttcagaatagcttctcatcatttacaattacagaaaaatagtatgtaatacaggcagaccttgctttgcacaggttctaacatgcacgaattgcagtcataatggtttagcaacaccattcttcccctcccccaaaatgttttggacttcagctaccacaattacctgtaattgcataaaacacaaactttgctagtagctctccagttcacatatcgctgtgtaaataacctatgtacatcatgaccaatgaccagtcacttctatcaaagactgccagaggtcactgcacatctgttattcctgcatagatagcaaagtgtgtagttgtattgctattgcctgcttgtggcccagtgataaatccctttgacattttacaaaaatgaatcaaaagagggaactccccaacaaagatgaaagtgcagcaaaggaacaaaaactgataatcctggaatgaaattcaaactgaatataaagagttatcgagaaaagagctgactgtgggaatctgacacggctcaaaaggctctagatatgcagccagagaaacttgtaaagatgaatttactgacatgaataaagttgttgtgatgagaaaaatgtagataccccagagatcaagagaaggagaagacaagccacagacttggagaaaatacttgtaaaacatgtatctgacaaaagactattattcaaaattatatagaactcataaaactcggctgactctcttttcggactcagcccacctgcaccc

SEQ ID NO: 140076 - DNA, 585 bp, Homo sapiens
  Payload ID: 7472
  Gene Symbol: HSH2D
  Gene Name: hematopoietic SH2 domain containing
  ENST ID: ENST00000593031
  CDS Start-End: 67-585
agctacagcgagggcctcggccatccaagggtctcccaggtgaccttccctccaccccaggaagctatgacagaggccgggaagctgcccctaccgctacccccacggctggactgggatgctgagaacttgctggagtcacagccactgggatcctttctcatcagggtcagtcacagccatgtgggctacacactctcctacaaagcccaaagcagctgctgccatttcatggtgaagctcttggatgatgggactttcatgatccccggggagaaggtggcccacacctcgctggacgccctggtcaccttccaccagcagaagccaattgagccgcgcagggagctgctgacacagccctgcaggcagaaggatcccgcaaacgtggattacgaggatctcttcctctactccaacgcagtggccgaggaagctgcctgcccggtgtctgcccctgaggaggcctccccaaagccagtcctgtgtcaccaatcaaaggaaaggaagccgtcagcagagatgaacagaataaccaccaaggaagccacttcctcctgccccccaaaatcccctcttggagag

SEQ ID NO: 140077 - DNA, 507 bp, Homo sapiens
  Payload ID: 7472
  Gene Symbol: HSH2D
  Gene Name: hematopoietic SH2 domain containing
  ENST ID: ENST00000591154
  CDS Start-End: 1-122
ggatgctgagaacttgctggagtcacagccactgggatcctttctcatcagggtcagtcacagccatgtgggctacacactctcctacaaagcccaaagcagctgctgccatttcatggtgaagctcttggatgatgggactttcatgatccccggggagaaggtggcccacacctcgctggacgccctggtcaccttccaccagcagaagccaattgagccgcgcagggagctgctgacacagccctgcaggcaggatcccgcaaacgtggattacgaggatctcttcctctactccaacgcagtggccgaggaagctgcctgcccggtgtctgcccctgaggagacggagtcttgctttgtcgaccaagctggagtggaatggcacagtctaggctcgctgcaacctccgcctcccaggttcaagcgattctcctgcctcagcctcctgagtagctgggactacaggcctccccaaagccagtcctgtgtcaccaatcaaaggaa

SEQ ID NO: 140078 - DNA, 1364 bp, Homo sapiens
  Payload ID: 7472
  Gene Symbol: HSH2D
  Gene Name: hematopoietic SH2 domain containing
  ENST ID: ENST00000586872
  CDS Start-End: 118-336
attgacgtgcagaccttgaatcgaaacccaggctcctgcaggcactggcacagctacagcgagggcctcggccatccaagggtctcccaggtgaccttccctccaccccaggaagctatgacagaggccgggaagctgcccctaccgctacccccacggctggactggtttgtgcacacccagatgggccagctggcccaagacggggtccccgagtggttccatggtgcaatctcaagagaggatgctgagaacttgctggagtcacagccactgggatcctttctcatcagggtcagtcacagccatgtgggctacacactctcctacaagtaaggcctgggccgggatccagggcaggggcaggtgggctcttgggtttccttggagggggcaaggggtgcttcatgtcatagcttctcagaaagcagcagtaactgaggctgtggatctgagaacgggagctgctagccaagcaatgagtgaagcttttgtccgtagtggcatgttttatctgaggccagcctttgtactcctgtgttataaatgggggaaactgaggcacagcgaggttagtaacctgctgggtgttgcatggccagtgagtgaagaagcctgcatgggaacctggggtagtctggctgtagcagtgacgctgccggcccaagggctggggacttggggcagggatgagggggagtaggatgtcccagcccccgcagtgtctccgcagagcccaaagcagctgctgccatttcatggtgaagctcttggatgatgggactttcatgatccccggggagaaggtggcccacacctcgctggacgccctggtcaccttccaccagcagaagccaattgagccgcgcagggagctgctgacacagccctgcaggcagaaggatcccgcaaacgtggattacgaggatctcttcctctactccaacgcagtggccgaggaagctgcctgcccggtgtctgcccctgaggaggtatgtatatgacaggaggctggcacctcccacctggctgaggggcaggagtggaggtggtcaacagcttccagaggaggctccttctagaatgagaatgcgatcctacagcttggtgctttaaacctttccagtgcttttgcaacaccgagattaaaattcaaactacaatctgaggtcctctttctgcctgtcacctacccagcgccagccctgctgccataccgtctgttgttcagacacaccaagctagcctcggggtctctgcgtgtgccggccccacctcaggtcctttgcacaaactgtgtgccctgcccctagatttcccatgtcttcattcatttctccttcaagtgcctccttccccaggcc

SEQ ID NO: 140079 - DNA, 2473 bp, Homo sapiens
  Payload ID: 7472
  Gene Symbol: HSH2D
  Gene Name: hematopoietic SH2 domain containing
  ENST ID: ENST00000616070
  CDS Start-End: 112-321
gtgcagaccttgaatcgaaacccaggctcctgcaggcactggcacagctacagcgagggcctcggccatccaagggtctcccaggtgaccttccctccaccccaggaagctatgacagaggccgggaagctgcccctaccgctacccccacggctggactggtttgtgcacacccagatgggccagctggcccaagacggggtccccgagtggttccatggtgcaatctcaagagacagccttggaagtggagtttactctccccttgaggaagctgaaggtcagaaagggagagacgattgcctgaggtcacacagctgatggacagtagagctgggttatgaactcgaatgcatctgagcatacagggatgctgagaacttgctggagtcacagccactgggatcctttctcatcagggtcagtcacagccatgtgggctacacactctcctacaagtaaggcctgggccgggatccagggcaggggcaggtgggctcttgggtttccttggagggggcaaggggtgcttcatgtcatagcttctcagaaagcagcagtaactgaggctgtggatctgagaacgggagctgctagccaagcaatgagtgaagcttttgtccgtagtggcatgttttatctgaggccagcctttgtactcctgtgttataaatgggggaaactgaggcacagcgaggttagtaacctgctgggtgttgcatggccagtgagtgaagaagcctgcatgggaacctggggtagtctggctgtagcagtgacgctgccggcccaagggctggggacttggggcagggatgagggggagtaggatgtcccagcccccgcagtgtctccgcagagcccaaagcagctgctgccatttcatggtgaagctcttggatgatgggactttcatgatccccggggagaaggtggcccacacctcgctggacgccctggtcaccttccaccagcagaagccaattgagccgcgcagggagctgctgacacagccctgcaggcagaaggatcccgcaaacgtggattacgaggatctcttcctctactccaacgcagtggccgaggaagctgcctgcccggtgtctgcccctgaggaggcctccccaaagccagtcctgtgtcaccaatcaaaggaaaggaagccgtcagcagagatgaacagaataaccaccaaggaagccacttcctcctgccccccaaaatcccctcttggagagacccgccagaaactctggaggagcctcaaaatgctccccgagagaggccagagggtccggcagcagctaaaaagccacctcgccactgtgaacttgtcgtcactcttggatgtccggagatccacggtgatctcaggccctgggaccggaaaaggcagccaagatcactcaggggatcccacctcgggggacagaggctacacggatccctgtgtggccacatctctcaaaagcccctcacagccccaggcaccaaaagacagaaaggtccccaccaggaaggccgagaggtcggtcagctgcattgaggtgaccccaggggacaggagttggcaccaaatggtagtgagagccctatcctcccaggagtccaagccagagcaccagggcttggcagagcctgagaacgaccagctcccggaggagtaccaacaaccgccaccctttgcccctgggtactgctagagaacaggtccaccctggctctgggactcgctgccaggggctgccacactcctgaatgccttaacatttcttccatggccccacaccatggcatccgggggtcttcgggaacccgggaaatggaataaagatgtttttggggtctgttcctgcactcacccatggggtgagctggttattttagcaacaatcatcagagtgacgctgatggtttggggcaccagctatacatcagccccagtgccagaccttctattcattattttacgcctcagagcaaggccctcagggagggtcatcctccatgttttgaagaagagactgaggttcagagaggataagaggcgtgaccaaggccacagagctatgggtgtcagcaccaggatttgaagccaggtgaatccgagcccttttcccatatcatctgtttgttctgttgtctaaaagcacactgcaagccgggctcagtggctcatgcctgtagtcccagcactctgtggggccgaggcaggcagatcgcttgaggtcaggagttcgagaccagcctggccaacatggtgaaaccccgtctatactaaaaaattcaaaaattacccggacgtggtggcgcatgcctgtaatcccagctacttgggagcctgaggcgggagaattgcttgaacccgggaggcagaggttgcagtgagccgagatcgcatcactgcagtccagcctggatgacagagtgagactccatctcaaaaaataaataaataaataaaaatgaaatt

SEQ ID NO: 140080 - DNA, 2366 bp, Homo sapiens
  Payload ID: 7472
  Gene Symbol: HSH2D
  Gene Name: hematopoietic SH2 domain containing
  Uniprot ID: Q96JZ2
  ENST ID: ENST00000616645
  CDS Start-End: 532-1590
gtccttcccaagaccacacccaggtccagtcattccctaggacttggcagagagctgtactcacagccaagatcacagcaaaatcagcaaagggaaaaggcatgcagagtgaagtccagaggcaaccagacagaagcatccagaatcctctcacagtggggtcacacaccccatgcttaactcccccaacaatgagttgtaacaacagtcaggtgtggtggtgtgtgcctgtagtcccagctacttgggagcctgaggcaggaggatcacttgagtccagcagttcaagactgcagtgagctatgatcataccactgcactccagcctgagtgacagagtgaaactctgtctctaaaatagggctcacctgcttgaggaaacaggaactgcctcggggcagccagccccgccccattgacgtgcagaccttgaatcgaaacccaggctcctgcaggcactggcacagctacagcgagggcctcggccatccaagggtctcccaggtgaccttccctccaccccaggaagctatgacagaggccgggaagctgcccctaccgctacccccacggctggactggtttgtgcacacccagatgggccagctggcccaagacggggtccccgagtggttccatggtgcaatctcaagagaggatgctgagaacttgctggagtcacagccactgggatcctttctcatcagggtcagtcacagccatgtgggctacacactctcctacaaagcccaaagcagctgctgccatttcatggtgaagctcttggatgatgggactttcatgatccccggggagaaggtggcccacacctcgctggacgccctggtcaccttccaccagcagaagccaattgagccgcgcagggagctgctgacacagccctgcaggcagaaggatcccgcaaacgtggattacgaggatctcttcctctactccaacgcagtggccgaggaagctgcctgcccggtgtctgcccctgaggaggcctccccaaagccagtcctgtgtcaccaatcaaaggaaaggaagccgtcagcagagatgaacagaataaccaccaaggaagccacttcctcctgccccccaaaatcccctcttggagagacccgccagaaactctggaggagcctcaaaatgctccccgagagaggccagagggtccggcagcagctaaaaagccacctcgccactgtgaacttgtcgtcactcttggatgtccggagatccacggtgatctcaggccctgggaccggaaaaggcagccaagatcactcaggggatcccacctcgggggacagaggctacacggatccctgtgtggccacatctctcaaaagcccctcacagccccaggcaccaaaagacagaaaggtccccaccaggaaggccgagaggtcggtcagctgcattgaggtgaccccaggggacaggagttggcaccaaatggtagtgagagccctatcctcccaggagtccaagccagagcaccagggcttggcagagcctgagaacgaccagctcccggaggagtaccaacaaccgccaccctttgcccctgggtactgctagagaacaggtccaccctggctctgggactcgctgccaggggctgccacactcctgaatgccttaacatttcttccatggccccacaccatggcatccgggggtcttcgggaacccgggaaatggaataaagatgtttttggggtctgttcctgcactcacccatggggtgagctggttattttagcaacaatcatcagagtgacgctgatggtttggggcaccagctatacatcagccccagtgccagaccttctattcattattttacgcctcagagcaaggccctcagggagggtcatcctccatgttttgaagaagagactgaggttcagagaggataagaggcgtgaccaaggccacagagctatgggtgtcagcaccaggatttgaagccaggtgaatccgagcccttttcccatatcatctgtttgttctgttgtctaaaagcacactgcaagccgggctcagtggctcatgcctgtagtcccagcactctgtggggccgaggcaggcagatcgcttgaggtcaggagttcgagaccagcctggccaacatggtgaaaccccgtctatactaaaaaattcaaaaattacccggacgtggtggcgcatgcctgtaatcccagctacttgggagcctgaggcgggagaattgcttgaacccgggaggcagaggttgcagtgagccgagatcgcatcactgcagtccagcctggatgacagagtgagactccatctcaaaaaataaataaataaataaaaatgaaattaaaaaa

SEQ ID NO: 140081 - DNA, 1957 bp, Homo sapiens
  Payload ID: 7472
  Gene Symbol: HSH2D
  Gene Name: hematopoietic SH2 domain containing
  Uniprot ID: Q96JZ2
  ENST ID: ENST00000613986
  CDS Start-End: 118-1176
attgacgtgcagaccttgaatcgaaacccaggctcctgcaggcactggcacagctacagcgagggcctcggccatccaagggtctcccaggtgaccttccctccaccccaggaagctatgacagaggccgggaagctgcccctaccgctacccccacggctggactggtttgtgcacacccagatgggccagctggcccaagacggggtccccgagtggttccatggtgcaatctcaagagaggatgctgagaacttgctggagtcacagccactgggatcctttctcatcagggtcagtcacagccatgtgggctacacactctcctacaaagcccaaagcagctgctgccatttcatggtgaagctcttggatgatgggactttcatgatccccggggagaaggtggcccacacctcgctggacgccctggtcaccttccaccagcagaagccaattgagccgcgcagggagctgctgacacagccctgcaggcagaaggatcccgcaaacgtggattacgaggatctcttcctctactccaacgcagtggccgaggaagctgcctgcccggtgtctgcccctgaggaggcctccccaaagccagtcctgtgtcaccaatcaaaggaaaggaagccgtcagcagagatgaacagaataaccaccaaggaagccacttcctcctgccccccaaaatcccctcttggagagacccgccagaaactctggaggagcctcaaaatgctccccgagagaggccagagggtccggcagcagctaaaaagccacctcgccactgtgaacttgtcgtcactcttggatgtccggagatccacggtgatctcaggccctgggaccggaaaaggcagccaagatcactcaggggatcccacctcgggggacagaggctacacggatccctgtgtggccacatctctcaaaagcccctcacagccccaggcaccaaaagacagaaaggtccccaccaggaaggccgagaggtcggtcagctgcattgaggtgaccccaggggacaggagttggcaccaaatggtagtgagagccctatcctcccaggagtccaagccagagcaccagggcttggcagagcctgagaacgaccagctcccggaggagtaccaacaaccgccaccctttgcccctgggtactgctagagaacaggtccaccctggctctgggactcgctgccaggggctgccacactcctgaatgccttaacatttcttccatggccccacaccatggcatccgggggtcttcgggaacccgggaaatggaataaagatgtttttggggtctgttcctgcactcacccatggggtgagctggttattttagcaacaatcatcagagtgacgctgatggtttggggcaccagctatacatcagccccagtgccagaccttctattcattattttacgcctcagagcaaggccctcagggagggtcatcctccatgttttgaagaagagactgaggttcagagaggataagaggcgtgaccaaggccacagagctatgggtgtcagcaccaggatttgaagccaggtgaatccgagcccttttcccatatcatctgtttgttctgttgtctaaaagcacactgcaagccgggctcagtggctcatgcctgtagtcccagcactctgtggggccgaggcaggcagatcgcttgaggtcaggagttcgagaccagcctggccaacatggtgaaaccccgtctatactaaaaaattcaaaaattacccggacgtggtggcgcatgcctgtaatcccagctacttgggagcctgaggcgggagaattgcttgaacccgggaggcagaggttgcagtgagccgagatcgcatcactgcagtccagcctggatgacagagtgagactccatctcaaaaaataaataaataaataaaaatgaaattaaaaaataaaa

SEQ ID NO: 140082 - DNA, 1508 bp, Homo sapiens
  Payload ID: 7472
  Gene Symbol: HSH2D
  Gene Name: hematopoietic SH2 domain containing
  ENST ID: ENST00000613195
  CDS Start-End: 88-345
ggctcctgcaggcactggcacagctacagcgagggcctcggccatccaagggtctcccaggtgaccttccctccaccccaggaagctatgacagaggccgggaagctgcccctaccgctacccccacggctggactggtttgtgcacacccagatgggccagctggcccaagacggggtccccgagtggttccatggtgcaatctcaagagaggatgctgagaacttgctggagtcacagccactgggatcctttctcatcagggtcagtcacagccatgtgggctacacactctcctacaatgtctccgcagagcccaaagcagctgctgccatttcatggtgaagctcttggatgatgggactttcatgatccccggggagaaggtggcccacacctcgctggacgccctggtcaccttccaccagcagaagccaattgagccgcgcagggagctgctgacacagccctgcaggcaggatcccgcaaacgtggattacgaggatctcttcctctactccaacgcagtggccgaggaagctgcctgcccggtgtctgcccctgaggaggcctccccaaagccagtcctgtgtcaccaatcaaaggaaaggaagccgtcagcagagatgaacagaataaccaccaaggaagccacttcctcctgccccccaaaatcccctcttggagagacccgccagaaactctggaggagcctcaaaatgctccccgagagaggccagagggtccggcagcagctaaaaagccacctcgccactgtgaacttgtcgtcactcttggatgtccggagatccacggtgatctcaggccctgggaccggaaaaggcagccaagatcactcaggggatcccacctcgggggacagaggctacacggatccctgtgtggccacatctctcaaaagcccctcacagccccaggcaccaaaagacagaaaggtccccaccaggaaggccgagaggtcggtcagctgcattgaggtgaccccaggggacaggagttggcaccaaatggtagtgagagccctatcctcccaggagtccaagccagagcaccagggcttggcagagcctgagaacgaccagctcccggaggagtaccaacaaccgccaccctttgcccctgggtactgctagagaacaggtccaccctggctctgggactcgctgccaggggctgccacactcctgaatgccttaacatttcttccatggccccacaccatggcatccgggggtcttcgggaacccgggaaatggaataaagatgtttttggggtctgttcctgcactcacccatggggtgagctggttattttagcaacaatcatcagagtgacgctgatggtttggggcaccagctatacatcagccccagtgccagaccttctattcattattttacgcctcagagcaaggccctcagggagggtcatcctccatgttttgaagaagagactgaggttcagagaggataagaggcgtgaccaa

SEQ ID NO: 140083 - DNA, 1727 bp, Homo sapiens
  Payload ID: 7473
  Gene Symbol: HHEX
  Gene Name: hematopoietically expressed homeobox
  Uniprot ID: Q03014
  ENST ID: ENST00000282728
  CDS Start-End: 37-849
cagcagctctgcgaggggccggagcgcggcggagccatgcagtacccgcaccccgggccggcggcgggcgccgtgggggtgccgctgtacgcgcccacgccgctgctgcaacccgcacacccgacgcccttttacatcgaggacatcctgggccgcgggcccgccgcgcccacgcccgcccccacgctgccgtcccccaactcctccttcaccagcctcgtgtccccctaccggaccccggtgtacgagcccacgccgatccatccagccttctcgcaccactccgccgccgcgctggccgctgcctacggacccggcggcttcgggggccctctgtaccccttcccgcggacggtgaacgactacacgcacgccctgctccgccacgaccccctgggcaaacctctactctggagccccttcttgcagaggcctctgcataaaaggaaaggcggccaggtgagattctccaacgaccagaccatcgagctggagaagaaattcgagacgcagaaatatctctctccgcccgagaggaagcgtctggccaagatgctgcagctcagcgagagacaggtcaaaacctggtttcagaatcgacgcgctaaatggaggagactaaaacaggagaaccctcaaagcaataaaaaagaagaactggaaagtttggacagttcctgtgatcagaggcaagatttgcccagtgaacagaataaaggtgcttctttggatagctctcaatgttcgccctcccctgcctcccaggaagaccttgaatcagagatttcagaggattctgatcaggaagtggacattgagggcgataaaagctattttaatgctggatgatgaccactggcattggcatgttcagaaaactggatttaggaataatgttttgctacagaaaatcttcatagaagaactggaaggctatataagaaagggaatcaattctctggtattctggaaacctaaaaatatttggtgcactgctcaattaacaaacctacatggagaccttaattttgacttaacaaatagtttatgtactgctcttaggttgttttgataaagtgacattatagtgattaaattcttccccctttaaaaaaacagttagtggttttcactatttataaaaaattaattttgaactttttgttaaatttttaagttatagctttaaaggttttaataggaccttcttgaacgacttttctgtaatctgtttatctcccacttaatggaaaggcaaaggggtaccccaaatccagaggtgcctacatttcaggcagccttggagtattttaaaaggaaaacattctttacttttatatgacattcttatactgctgtctcaaatccaaaaacatttcagagctcttgtctcagagatgtgtgttctttttgtcagagatatggttgatgagaatcttaaatgcttgttttgcactatcacttagtacctgtttgaccaaggtgttaaggggatagtacctcccaattcaagcagagaaactgacctgactaaagttaatcgcagatgaactagaagtcacaggttaattaaatgtaagtagattgtagatactgttttatatcaaacaatgtttataatgtgtatatagaattgttcactgtaaaaaaaatggccaaaatgtgttttttttttaataagtaacttgactataaaataaagccgtccgtgggacgactgacctcgt

SEQ ID NO: 140084 - DNA, 808 bp, Homo sapiens
  Payload ID: 7473
  Gene Symbol: HHEX
  Gene Name: hematopoietically expressed homeobox
  ENST ID: ENST00000492654
  CDS Start-End: 492-788
ccactggggaaagagggtcgtggtattgtaagcccagccggtagtgcccattctttttggggttaaaggtatgtctggatttagttctaggtgtgacggctgtgtgtctgtctgtgtgtgtacaaggctgtgtgcatctgcggtgtcagtgtgtgactttgggtatgtttgtgtgtcggtgggaacgtgttaggtccacgtgccggtgggtgtatgtgaatgtgtctggttgggtggcctcctggcctacctttgtcatccctggggcccgacagctctggggtctggccaggccgctccagggcagtgggtgagcgccgctcttcccgctcgcaggcaaacctctactctggagccccttcttgcagaggcctctgcataaaaggaaaggcggccaggtgagattctccaacgaccagaccatcgagctggagaagaaattcgagacgcagaaatatctctctccgcccgagaggaagcgtctggccaagatgctgcagctcagcgagagacaggtcaaaacctggtttcagaatcgacgcgctaaatggaggagactaaaacaggagaaccctcaaagcaataaaaaagaagaactggaaagtttggacagttcctgtgatcagaggcaagatttgcccagtgaacagaataaaggtgcttctttggatagctctcaatgttcgccctcccctgcctcccaggaagaccttgaatcagagatttcagaggattctgatcaggaagtggacattgagggcgataaaagctattttaatgctggatgatgaccactggcattggcatg

SEQ ID NO: 140085 - DNA, 1605 bp, Homo sapiens
  Payload ID: 7473
  Gene Symbol: HHEX
  Gene Name: hematopoietically expressed homeobox
  ENST ID: ENST00000472590
  CDS Start-End: 436-732
tgaaatcagaggaggccgcggctcccccggccaggattggaggctcctcgcgcaacctaatgcgggtgtccgggcccgagcgcttcccgcgcagccaggccttgtcggtgcagcagccccgctcctccccaacacgcacacacccggtgttcgcaagtgcggctcaccaagggagatccaagggggcaaaaagttatgtataaatccgagagccactggggaaagagggtcgtggtattgtaagcccagccggtagtgcccattctttttggggttaaaggcaaacctctactctggagccccttcttgcagaggcctctgcataaaaggaaaggcggccaggtgagattctccaacgaccagaccatcgagctggagaagaaattcgagacgcagaaatatctctctccgcccgagaggaagcgtctggccaagatgctgcagctcagcgagagacaggtcaaaacctggtttcagaatcgacgcgctaaatggaggagactaaaacaggagaaccctcaaagcaataaaaaagaagaactggaaagtttggacagttcctgtgatcagaggcaagatttgcccagtgaacagaataaaggtgcttctttggatagctctcaatgttcgccctcccctgcctcccaggaagaccttgaatcagagatttcagaggattctgatcaggaagtggacattgagggcgataaaagctattttaatgctggatgatgaccactggcattggcatgttcagaaaactggatttaggaataatgttttgctacagaaaatcttcatagaagaactggaaggctatataagaaagggaatcaattctctggtattctggaaacctaaaaatatttggtgcactgctcaattaacaaacctacatggagaccttaattttgacttaacaaatagtttatgtactgctcttaggttgttttgataaagtgacattatagtgattaaattcttccccctttaaaaaaacagttagtggttttcactatttataaaaaattaattttgaactttttgttaaatttttaagttatagctttaaaggttttaataggaccttcttgaacgacttttctgtaatctgtttatctcccacttaatggaaaggcaaaggggtaccccaaatccagaggtgcctacatttcaggcagccttggagtattttaaaaggaaaacattctttacttttatatgacattcttatactgctgtctcaaatccaaaaacatttcagagctcttgtctcagagatgtgtgttctttttgtcagagatatggttgatgagaatcttaaatgcttgttttgcactatcacttagtacctgtttgaccaaggtgttaaggggatagtacctcccaattcaagcagagaaactgacctgactaaagttaatcgcagatgaactagaagtcacaggttaattaaatgtaagtagattgtagatactgttttatatcaaacaatgtttataatgtgtatatagaattgttcactgtaaaaaaaatggccaaaatgtgttttttttttaataagtaacttgactataaaataaagccgtccgtgggacgactgac

SEQ ID NO: 140086 - DNA, 1173 bp, Homo sapiens
  Payload ID: 7474
  Gene Symbol: HEBP1
  Gene Name: heme binding protein 1
  Uniprot ID: Q9NRV9
  ENST ID: ENST00000014930
  CDS Start-End: 160-729
ctcgccgcctcgccgtcccgccgccttgccgccctgccaccctgccgccctgccgccctgccgccctgccgccctgccgccggtggtcgctgcccgtggtgctccgtcgcccccgccacctcacgtcctcccgtgcgtcgggagcgtctcggctacaacatgttgggcatgatcaagaactcgctgttcggaagcgtagagacgtggccttggcaggtcctaagcaaaggggacaaggaagaagttgcctatgaagaaagggcctgtgaaggcggcaaatttgccacagtagaagtgacagataagcctgtggatgaggctctacgggaagcaatgcccaaggtcgcaaagtatgcggggggcaccaatgacaagggaattgggatggggatgacagtccctatttcctttgctgtgttccccaatgaagatggctctctgcagaagaaattaaaagtctggttccggattccaaaccaatttcaaagcgacccaccagctcccagtgacaaaagcgttaagattgaggaacgggaaggcatcactgtctattccatgcagtttggtggttatgccaaggaagcagactacgtagcacaagccacccgtctgcgtgctgccctggagggcacagccacctaccggggggacatctacttctgcacgggttatgaccctcccatgaagccctacggacggcgcaatgagatctggctgttgaagacatgagtgacccactgaaccaagaacttactggaagtgtgcctctgtgtctccttcctcgggggtaaggaggggacagtgcttcccaagttccagctgcaagtccaacttaaccaactttccttcaaagtcagttactgccaattttctgaaaaaagcatgttccatatactaagtctcttttctcacagtaggaaataatacagccaagatatgcagcatccttctcattgatgtagaaaattctgcgatagaccagaaaaatcctggcagcttttctccaggcatctgggtcactaaaaactgattttctaaaattattggatttgtattttgttattaagggggaaaatgtgatttgtgcctgatctttcatctgtgattcttataagagctttgtcttcagaaaaactaaaaataaaaggcattgacttaaacagctgagacaaa

SEQ ID NO: 140087 - DNA, 2056 bp, Homo sapiens
  Payload ID: 7474
  Gene Symbol: HEBP1
  Gene Name: heme binding protein 1
  ENST ID: ENST00000536942
  CDS Start-End: 152-553
ctcgccgtcccgccgccttgccgccctgccaccctgccgccctgccgccctgccgccctgccgccctgccgccggtggtcgctgcccgtggtgctccgtcgcccccgccacctcacgtcctcccgtgcgtcgggagcgtctcggctacaacatgttgggcatgatcaagaactcgctgttcggaagcgtagagacgtggccttggcaggtcctaagcaaaggggacaaggaagaagttgcctatgaagaaagggcctgtgaaggcggcaaatttgccacagtagaagtgacagataagcctgtggatgaggctctacgggaagcaatgcccaaggtcgcaaagtatgcggggggcaccaatgacaagggaattgggatggggatgacagtccctatttcctttgctgtgttccccaatgaagatggctctctgcagaagaaattaaaagtctggttccggattccaaaccaatttcaaagcgacccaccagctcccagtgacaaaagcgttaagattgaggaacgggaaggcatcactgtctattccatgtaaggagacaatccttcaggcatccatgggtggcgcttgattcccgtaccactccttgcatcacctctggcaagcattcgcgtcaaatttttatggttgctgaattaatttaagtaggaaatgctgaatcctaacagtttctcattttaatttcttcaggctgcagcacacacacatttgcattttatcagaataaatgccttggccagttgccaaattgatgggacgagcttaagctttgcttaagcttacagtgaatgtctacattagccatagcagggttctaggagactcagcaaatatcttaagtcaagccatggtctggattcgtggacacatgggaagcataaagggctgaggaatacctgatttctaccccacactccctttgaatgccagagagcagggagcatttgctagagctgggcttccatcctccttgttgttcctggatggtagtcctttgagcagagcacacatctattctcttgtcatcctggtcctgtttccaggacttcatgtggggtcattttcccttgactgtagagaatagcaggtgcaaatggttactagtttctatcccttgtgctccaaactgccctcagaaaccaagtcttctagatcattgatgactcctcacatttgttaaaacactcccatgtgacaggcaccaaaccaggctcagggaaagaccaggatcttcaccagaagtaatcataggtggtttggctccgctcaggagcaacctcatgaaaaattcacatacatataatattgcactggactgagtattggtccacttcagggacctccaaacttggctgccctgctgcaaccctgaacctgatggtgggaccattttccccggagctgtgtcaatgttctgagaatgtgagtttcaccgctgtgtgtagtcctaggccaggtgactgcagggccctccagaggacagtgaatgtaatgcagctgggagctagcaccggagcctcagctcctgtgcttgtcctgcagtcctcattcagacttcccagcttcccttcagagggtgtggagaaagcaaattaacttaacaatatcttttcctagggtggagatgcaccttgggtgcagcatttaaggaagcactcactctcacagctgtccaagtgcaggatggggactgagagtgagcgcctccttaaatcttgtgccctgggttagatgtctgcttgtcttttccattctatttcctgtgtttgggaagcagcaggtataataaaatgaacttgtattttatttgaattccagctctactgcttactagcagaatgatgcttgggaagttagccactttaagacttagcttttgcatttgttaagtgctgataatataacctcctatatatgatgtgtgtgtgtgtgcatgtaatgtaaccttataggattattgttaaatatctttcagtatttactaagatactatttatgtattacctaatgtttatgacctgaagcaggttttggcaa

SEQ ID NO: 140088 - DNA, 460 bp, Homo sapiens
  Payload ID: 7474
  Gene Symbol: HEBP1
  Gene Name: heme binding protein 1
  ENST ID: ENST00000535636
  CDS Start-End: 1-189
aagggaattgggatggggatgacagtccctatttcctttgctgtgttccccaatgaagatggctctctgcagaagaaattaaaagtctggttccggattccaaaccaatttcaaagcgacccaccagctcccagtgacaaaagcgttaagattgaggaacgggaaggcatcactgtctattccatctgaaagtgccaaatgtggtgtctagcctggctccatggaatttttaacacggagttctcacacagcatatgatcattcctcaactcgccacttgatgtcactgcatagtcaaatgagcattcaaaattaccctgcagtggtttgtgttatttctgattctgttgaaagcaatgttaatgagatggtagaaggcaaatgtactacttcaaatgcaaaagtactctatcaaataatgcagtgagtgcattcaatgacaaaattaattctaaaatga

SEQ ID NO: 140089 - DNA, 844 bp, Homo sapiens
  Payload ID: 7475
  Gene Symbol: HEBP2
  Gene Name: heme binding protein 2
  ENST ID: ENST00000367697
  CDS Start-End: 250-600
gcaggacgcgcaactccggccggagctgtccggggtcgtgagccggccccgccttggtggcggcgccccctcgcggtccagaggcagacgcatcgggtgggctcgggtctccagcccggccgggaggagggaccgggtctgcggagcggggactcggggcctcggcggggcgcgcacacgcaggcggggcggcccggggtgcggggcctctgcgcggctgaccaggctcccagagcgtcagcgccgcccatggccgagccgctccagccagaccccggggcggccgaggacgcggcggcccaagctgtggagacgccgggctggaaggccccggaggacgccggcccccagcccggaagttatgagatccgacactatggaccagccaagtgggtcagcacgtccgtggagtctatggactgggattcagccatccagacgggctttacgaaactgaacagctacattcaaggcaaaaacgagaaagagatgaaaataaagatgacagctccagtgacaagctacgtggagcctggttcaggtccttttagtctttcgatggattttctagtgcccaaaagaatcaagaacaacttttgacattagcaagcattttaagggaagatggaaaagttttcgatgagaaggtttactacactgcaggctacaacagtcctgtcaaattgcttaatagaaataatgaagtgtggttgattcaaaaaaatgaacccaccaaagaaaacgaatgagaaaaatgaaaggaagttctgctgtcagaggcaaaacatctgtttatcatagacatcaacatgacctataagtaaagtgcgtgtctagtgtcttc

SEQ ID NO: 140090 - DNA, 661 bp, Homo sapiens
  Payload ID: 7475
  Gene Symbol: HEBP2
  Gene Name: heme binding protein 2
  ENST ID: ENST00000448741
  CDS Start-End: 34-417
ccccggagagcctcggagctctggctgcccacgatgggagtcctctggggggcgccggagccgtgccgggtccccgccgcaggggacagtaacgcggagtcggcctggccggcggaaagggggtgctggggaacagagccgcaccccactcggctcgggaaagccctgcccggaagttatgagatccgacactatggaccagccaagtgggtcagcacgtccgtggagtctatggactgggattcagccatccagacgggctttacgaaactgaacagctacattcaaggcaaaaacgagaaagagatgaaaataaagatgacagctccagtgacaagctacgtggagcctggttcaggtccttttagtctttcgatggattttctagtgcccaaaagaatcaagaacaacttttgacattagcaagcattttaagggaagatggaaaagttttcgatgagaaggtttactacactgcaggctacaacagtcctgtcaaattgcttaatagaaataatgaagtgtggttgattcaaaaaaatgaacccaccaaagaaaacgaatgagaaaaatgaaaggaagttctgctgtcagaggcaaaacatctgtttatcatagacatcaacatgacctataagtaaagtgcgtgtctagtgtcttc

SEQ ID NO: 140091 - DNA, 512 bp, Homo sapiens
  Payload ID: 7475
  Gene Symbol: HEBP2
  Gene Name: heme binding protein 2
  ENST ID: ENST00000453452
  CDS Start-End: 1-137
agatgaaaataaagatgacagctccagtgacaagctacgtggagcctggttcaggtccttttagagagggaaaaaggggcaatgtgcaagtgaaaatcgagtctggaaaaggggcttctacaggggtgttggtgtagttctctgatcagcagcaccggcatggatgtgggagctcggaggaaatacactctcaggccccaccccagacctgaatctgcatcgtagcaaaatccccaggtctttcgatggattttctagtgcccaaaagaatcaagaacaacttttgacattagcaagcattttaagggaagatggaaaagttttcgatgagaaggtttactacactgcaggctacaacagtcctgtcaaattgcttaatagaaataatgaagtgtggttgattcaaaaaaatgaacccaccaaagaaaacgaatgagaaaaatgaaaggaagttctgctgtcagaggcaaaacatctgtttatcatagacatcaacatgacctataagtaaa

SEQ ID NO: 140092 - DNA, 10014 bp, Homo sapiens
  Payload ID: 7475
  Gene Symbol: HEBP2
  Gene Name: heme binding protein 2
  Uniprot ID: Q9Y5Z4
  ENST ID: ENST00000607197
  CDS Start-End: 278-895
ggctccctgtcgccgcggaggggcgggggcaggacgcgcaactccggccggagctgtccggggtcgtgagccggccccgccttggtggcggcgccccctcgcggtccagaggcagacgcatcgggtgggctcgggtctccagcccggccgggaggagggaccgggtctgcggagcggggactcggggcctcggcggggcgcgcacacgcaggcggggcggcccggggtgcggggcctctgcgcggctgaccaggctcccagagcgtcagcgccgcccatggccgagccgctccagccagaccccggggcggccgaggacgcggcggcccaagctgtggagacgccgggctggaaggccccggaggacgccggcccccagcccggaagttatgagatccgacactatggaccagccaagtgggtcagcacgtccgtggagtctatggactgggattcagccatccagacgggctttacgaaactgaacagctacattcaaggcaaaaacgagaaagagatgaaaataaagatgacagctccagtgacaagctacgtggagcctggttcaggtccttttagtgagtctaccattaccatttccctgtatattccctctgaacagcaatttgatccacccaggcctttagagtcagatgtcttcattgaagatagagccgaaatgactgtgtttgtacggtctttcgatggattttctagtgcccaaaagaatcaagaacaacttttgacattagcaagcattttaagggaagatggaaaagttttcgatgagaaggtttactacactgcaggctacaacagtcctgtcaaattgcttaatagaaataatgaagtgtggttgattcaaaaaaatgaacccaccaaagaaaacgaatgagaaaaatgaaaggaagttctgctgtcagaggcaaaacatctgtttatcatagacatcaacatgacctataagtaaagtgcgtgtctagtgtcttctattgagagtactactattaattaagcttatttccaatgtgcctttttaatgcttgaagttttatctacatacacaggtaacagaggacagtagtctgtaaacatataaatcggtcataactatcgtggtctttatttctgtgaggatctagggaaatttcatgtcacttccctccttcactgcatcacaatcatattcccttttttttttcttggatttgtgtcagttggatgatatcccctccagatagtatcaataaaatgttaaaattatttatcttgtgtggaacccctaggctgtcaggcccggagaggtgaaattcagctggacacaaaaatcaaattgtcttttgtggctgccaccattacattctctgttgtatgtattactttccctcctgcatcctcccactgccccactgcacaagaatactccatgtaactccatttaaatgtaatgaattcattcctttctttctggtctccacttaaccccctaaaaatcttgctttttcccctaaacatttccctgaactgtcacgtattttcattcattctttaactcattgtagggagtccctgctatgttccaagcactctgctaaggactgggaggtggtggtaagaaaacctgtgtcccaagcccctcatcactgacttcctcttcactaactccaacaacatctttccacctccttaactatttcattcaccctcccactgtgaacaccacagacaaggcccctggcctcatggagtttacattctagagggtgagggagttcaacacaaataagatgcttgaaattggcaagtgtgatgaagaacagaatagggcagtggggtagagtgtggttaggtagggtgtggtggacatcacataaggtggtcagcaaaggcctctcaagagacagttgagacttgaatgacgaggatgagtcagatgaaagccaggggcagaggtgaggggagcatcttgggcagaggtgacagtgttaaagggagaggccacgttcagtacccagaacaaaaagctgcacacactgcttgctgagcaagagagcactgctcttgtagggcacggtctctcggataaagaaaactgcggaccttatgcagggttttaggaaggattaacagactttcaaaagcatttaggagtcgagggagctttagttgtggggatgcagttaccagagtgaggccgctgctgattagcatgatttagaagcctagtttggaggtgaggttactgatgggaaattgtcattgattgtttctggtacttaattgctactgtggccaaaggatggtcagttttattcaggatttgaagtggtggcagacaacgtgaggtgtgccactcaaattcaccttcaagaaagtaccagccgcccagctgtgaggggtgtggttcgccgacagtctccccgttaccgtcttcagggtccacgccagatttcaagataaggacacactattctgtgggagagagggacctagtctacaactgagcaaggcagtggtagctgacagcatgcttttttctggcaattcccagccaataactgagcaaggtggtggtataagacctagccatttaggccaggtgcagtggctcacagctgtaattccagcactttgggaggctaaggtgggaggattgcttgagcccagaagttcaagacgagtcatggcaacctagtgagactgtctgtccaaaaaataaaaaattagccaagcgtggtggcacacgcctgtattcctagctcctgaggtgaaaggattgcttgagctcgggaggcggaggttgcagtgagtcctgatcatgccactgcactccagcctgggtgacagagcaagatcctgtctcagaaagaaaaaaaaaagtcctagtcatttctaccaactcgaaagccctctaataagcagtctctgctctggagctttttggtgggctgctagagactttgttagatcctaccgttcctctgctcaatcctgcttttcccttttcctttcagagatgtcacttcaccagttttgtactcctaactccatctcagcctaaaattggcacaattggtaccagtggcccacgaacgtaggtggtaagacagcatttgcaggctgagtgactcactgtctggctggctcggaggcccccatccctggtggataggtggcacagacagtccctggcacaagaaggctgtccagtgatgaagacttcagatgaaatggcatgctggtgcaggggaacgcaatgactggtgggtgatttgggtgtctcaaatatgggaagggtggataaaagagacaaggacagtgggcttccatggttattgctgagttggattgacgtcctgcaagtggataatgaaaagctgaggtcaattaacaaacaaaactaagtgtgagccgcagagtctctgtggtagcttgccaacaatcctcatctcatgctgtagccaagcagagcaagctgaaggccaagcacaggatttgatggtaaaagtagctaacagccaacaaatactcaaccaagccaggtctgttagatcaaggttggaatcaaacttgggatcccaaaacatgggatgggagcatttagtggatctccccaaccatctgcctccctagaaaactccctgaatattcacatccttcagaagaggcccacccttccccatgaagagctggaactaccctcccttcctgcctcttccctaacacaagggaagacagtgtccaaggtctttccccatgaagcaaaaggtgtccctcaggactggtccctccccttctcctggctaccaggcctataacgagacttaagtcacaacataactgattgcggctgaggggtctgatgagggagaaatgggatctatgccagaggagccacctaacctggcagcatgtactgcaggggccaggggcgtactcttgggactggatcctgagggtgcttggtcaaaggggctgggtttatacaactagataaaggagagggtatattgacttggggctctcaggatagaggatttcacaccatgagaaaaatgccaggagataatacagactcactgctctagggcagcttggtagaagcctagaaagagtgatcaaaatgttgaaatgcctgaatggctgggacaaacaatagagaaaggaatgagaaggctcagggaagggagcatgccagcatggatatatgaggcaaggtgacccatcagacaattatgttccacgggaaggcccaggggacccatccttcagcaaggctgctgggaatgcactgataagcgggcttgggcatcataaaggagctcagcggtggctctcctcggcaggctggggctggcaggaagggctgtgatggaacttcacttgctgagagcaatgtggatgatgatgagaccttgaagagcccaggtggcagtgccagccacagaagccagggtgccatcagtatcctgttaaccactaagctccaaatggcagccgaggggtcctgacctgtaaagtctcatggaaatagttggtagaacaaggcattcctagggacaaaagagctgactaatcaacaagggtaaggctttatatataatcaaaagtgagcaagaattgatgagcaggggactgagagagatcactccaattaaaaaacaaaaacatgattccttgccagtttctagttcagttttctgacctagagctcattaattgcagaggtgactgtatcctaggggaaagtttcctgcaacatttcagcaggtgtacacagtaatgatcccctcattctttttctaaaggatctatggccatttactcaggtggctctaccctggggaaagaggaatacctggatacgtcagggtccaagttaacgtctgatacccagaaacccaaagagtcattacagttcctcctcctcccattaaaatgggagcatacagaggttagaaagtaaacgtagttctaatcaaagtttggcttacagcagatctcctgggcctgcaggttatctgcctaatccctgaatgtataattgagactgacatccttggcaggcagaataacccctacatttgttccttgacctgtggggaaagagtataagcttctaaactccctctcctccaatcagggcagtaaaccataataaatattgccttgaacagtattttttaagcacctcgggtgaacatctgcttctggccatgatgatgaattgggaacccaatttacctgtccctcttaaacaactaaaagcccagacaaaatatatgaaacaatggttttcagacactgaaagttcatagtacaggactgtgatctctgcgagaagggggaataatgaggtgagtccagtgattgctcaggcgaatggcctggaggcagtttctaggcagcaaagcagggagagggaagccagagaccagtggtcctgctgtgttgaggagatggagatcagtgtcaccggaggccaaggtgagtaagtgagaggagaggaggcagcagcacacagacagagagtgctgtagatctgcagtgggtcccctggagtccttggttgagtgaaggtgttagaagaaactacttaagccaagaaatgagtaactggaaattagtagagcaaataatttacagatcatctatggggctgggaaaagtttgtgtttccactagccagagtagaaataactcataatgcatgggtcatcaggtggagtcctccaacaggtgttgccttagtactgaggtcaaattgtccctagaccaaaggcttctttggacttcccctaacaaagcttaaagacaagccttggaaggatcaaactaatttcaagaaacttaactgtgaatcagaataaaacccaataccatttataggaatataacaaaatccatcaacaaacaacataacactcataattaccaacattcagtaaaaaattactggaaacagagaaatataaattatggcccataattaggaaaaaagggtaatcattagaagtagaaccagaagtgacagatatgaagaaattagcagcttgaattatgtgatgtggcagatcttatgtattggaggtagggggaaagaagatgcagtgtggaatagatgacaaggcccaatgagagaatcacagtgcaggtccctggggccctgaaggaaggtggttctaaccacaggagaggatcatatgctttttgaaaaacagcctctgctgtgctactgggccctggtagacacggaactttgagacccagtgatgctgtatccagaactgctcatcttaactaggtcctgtgggaagcactaagtcataagctagtaggatcggcagcagcccattggaagatggaaatgatatgtacaggagcagttccaagccagaccagaggacataagcaaactgcaagagcaattactccaaccgccatgtctgcacagtggcacctacatcccccctccctgtggttgttggaggacctgtatgatccactgaaggaagaggaatgcttgggcttggtttattgattagttatcttctgtagttgcaagctgaaaatggaccttcactcaaaggtgacattgaaaaacgggaaaaaaattgcaatcttcctgcaaaaactgggcagaattttttgaggtacactggatcattcaccttgtgagggaggacaggtaaaatatttatggaagtggcagaaaatggcctgccagctgatcaggagtttgggaggaaaaaaacatggattaggaggtctggggtagaggcatgtggatgggcatatggagtgaacacagaagttgaaaaactgtatcacatgttaatgcccactagatagcacccaccagagaagaggcactaaacaaccaagtagatgaaatgacttagcctgttctattagcttttgccagtgcccacctcagtgctggtaaaatgcacacataaagtggcagtggtggcaaagatggaggctatggatggaacccaccaacatgggctcccacttaccaaggccaacttagacactgctcactgtgactatccaacctgcctgcaacaaataccaatgctgagaccctgatgaggctgtgaagaccaactggtcgcttgatagcaaattcactatggtaggctcattctttcctagaagcaccagcagtttattcacacaaggacagacttcctattctaggtatgtggttcctttcgggcctacagggtcctgaacacaatctaaggacttacaaaacatctgaactgtcagcgtagatttgctgaatacgtgatctatacatgttaacacccaatcagggagagttcgccagcggtcataggatccactgctcctatcacatactgcgccacctagaagctgctagactgatggaatgttggcatggcctgctttagtgccaggtgggagacaataccctgccaagatgtgccaccgtctcctgcacacagtatacttattgaatcagaaagcctgtatgatgctgtgtctacaacaggaatatatagatttcagaaccaaggagtggaggcaggagtgaccccacttaccatcgcacccaacgaaccactgagggacttagtacttcccatgcccacaactccaggttctacagcatcagaagtcctagttctcagagactgtataccttctctaggcaatattgcaagaatcccattgaactacagtctgctgctactatgtgggcactttggactctgtgttcagggaccagtaggcaagaagtcaccatctagtcaagggtaattgaccctgaactgcaggaggaggcaagcctgctgtcagaggatagtggcgagagcaatgtgtgtggaacttagcggacccactggaggcaccctctgtactccttgcccagttgtaactgaatggactagtgcagcaaccctggtctgagaagggtttggctcccaggagctcaggaccctcaggaatgagagcttggtttatactatcaaaaaagccaccaagaccagcaaagatgacagttgtgggtgaggggaatttagaatgaagcagggagtaatgaggaccagttgtggttccaaaaccatttgcaggaaggtgctatagttggtcctaccaaactcctctttcaacatttatcctcaggaagagaggtccattggcgccctgaaacagtcactctctgcgtgtttttgggaaaatggatccacataggcaaggggtggaccatggcaggcatagagcggtgccacttagatcccccttcaagacaagatatgccatccagctgcaaggagtgtgggtagctggcagccaccagctgctacttcaccaggatccaccttagctttcaagctgaggtcacgctattctcaagacaggaggggttggtggccaatgatttcactaaattatggaaattgagagcatgcttttctgagggggccctcttgccaaagaccaagcaaggccatggtacaaggacctaactgtttcagtccaacacaggactcctccaatgagtgacctttttcccagagttcccctgggatggcagctcgcctgctctccctgcctcgtcctgcttcctcttttcctttcaaaggtgcttactccaataataaatcctttggtattctaactgtctacttcttgaagaatctaaactggcagtaggatcatgcccctcactgatagctcaaccacgttttctatctttgggcctccttgtctttacctagcacatgagaagcatttattaggactttttttcccccattgctgaacaaatgactacagattgctctacctcttgttctgtgaataaaggctggccgctgtggaaggtaggtcagagcaggcaactgagagaaactgtattacagttaccgagtggcttattaaggaaagtggcgcaacaatcaggtccatgtttcattcaaatgaccctccattcccccaacaacatcctcacatctgccaaagcaaattatgctgctgtgctcatttgatgatggaatcagcatcgcatgcaggctgaacccctactacggcagaaccaagaaagccactctttcccctctcctcctaagatgccaccacagagcagggtgccagtggtgggtggggagaaagacggagacacagaaacgtctccttttcactgtgattctcctaaggaatatacagtcacccccacaggaaaagcaagagttcaatcaagattcttcagaaatagtaggatggcagaaagcagatcgcattgaggttgtttccaactgacagaccaagcagtaatttgtttctctccccactgatagtaaaaataaagtggaaataatttagggctggggcttctgtgattatctggaacttaaagtatgagggtatgagagccatcagatctacccctgtggagctttttaagatgcggtccataacagaagcgggccccaaggagtagagtagccacatggaaggtgccatgtttcagggatgagtctcgattcttctctccctgtatttcatccatgcctgtaagaagttctcacgtctctccacatgccacgtcatctgaaccgccaggcgataggttattcgtattttattccaaagtccataggacacgatgtggacttgtttttccacgtgcccttgtagatggtgccatccagtgtctgtgatgttccacctcctctgttgggttgtcacctcccccagagaccttctggtctcactgcttttctgtttgtatccagcaaaacactcaacaattctgtataagaacacctatctcattattcaaaaaaaatgcatgtataaacaaaaagaaatatttcaaatatttactttacaattgttttattcaaaggaaattaaatacaaatgtatatttttcattaaaaatggggatttaaaaatagttttataattagtgttatgttgctttatcttatctttgcataaattatgtattattaaaggtttctgatatccata

SEQ ID NO: 140093 - DNA, 1822 bp, Homo sapiens
  Payload ID: 7476
  Gene Symbol: HMOX1
  Gene Name: heme oxygenase 1
  Uniprot ID: P09601
  ENST ID: ENST00000216117
  CDS Start-End: 340-1206
gtgtgtgtgtgtgtgtgtgtgtgtgtgtgtatgtgtgtgtgtgtgtgtgtgtgtgtgtgttttctctaaaagtcctatggccagactttgtttcccaagggtcatatgactgctcctctccaccccacactggcccggggcgggctgggcgcgggcccctgcgggtgttgcaacgcccggccagaaagtgggcatcagctgttccgcctggcccacgtgacccgccgagcataaatgtgaccggccgcggctccggcagtcaacgcctgcctcctctcgagcgtcctcagcgcagccgccgcccgcggagccagcacgaacgagcccagcaccggccggatggagcgtccgcaacccgacagcatgccccaggatttgtcagaggccctgaaggaggccaccaaggaggtgcacacccaggcagagaatgctgagttcatgaggaactttcagaagggccaggtgacccgagacggcttcaagctggtgatggcctccctgtaccacatctatgtggccctggaggaggagattgagcgcaacaaggagagcccagtcttcgcccctgtctacttcccagaagagctgcaccgcaaggctgccctggagcaggacctggccttctggtacgggccccgctggcaggaggtcatcccctacacaccagccatgcagcgctatgtgaagcggctccacgaggtggggcgcacagagcccgagctgctggtggcccacgcctacacccgctacctgggtgacctgtctgggggccaggtgctcaaaaagattgcccagaaagccctggacctgcccagctctggcgagggcctggccttcttcaccttccccaacattgccagtgccaccaagttcaagcagctctaccgctcccgcatgaactccctggagatgactcccgcagtcaggcagagggtgatagaagaggccaagactgcgttcctgctcaacatccagctctttgaggagttgcaggagctgctgacccatgacaccaaggaccagagcccctcacgggcaccagggcttcgccagcgggccagcaacaaagtgcaagattctgcccccgtggagactcccagagggaagcccccactcaacacccgctcccaggctccgcttctccgatgggtccttacactcagctttctggtggcgacagttgctgtagggctttatgccatgtgaatgcaggcatgctggctcccagggccatgaactttgtccggtggaaggccttctttctagagagggaattctcttggctggcttccttaccgtgggcactgaaggctttcagggcctccagccctctcactgtgtccctctctctggaaaggaggaaggagcctatggcatcttccccaacgaaaagcacatccaggcaatggcctaaacttcagagggggcgaagggatcagccctgcccttcagcatcctcagttcctgcagcagagcctggaagacaccctaatgtggcagctgtctcaaacctccaaaagccctgagtttcaagtatccttgttgacacggccatgaccactttccccgtgggccatggcaatttttacacaaacctgaaaagatgttgtgtcttgtgtttttgtcttatttttgttggagccactctgttcctggctcagcctcaaatgcagtatttttgttgtgttctgttgtttttatagcagggttggggtggtttttgagccatgcgtgggtggggagggaggtgtttaacggcactgtggccttggtctaacttttgtgtgaaataataaacaacattgtctgatagtagcttgaa

SEQ ID NO: 140094 - DNA, 921 bp, Homo sapiens
  Payload ID: 7476
  Gene Symbol: HMOX1
  Gene Name: heme oxygenase 1
  ENST ID: ENST00000412893
  CDS Start-End: 361-921
cggggacttagtctcctccctgggtttggacactggcatcctgctttatgtgtgacaccactgcacccctctgagcctcggtttccccatctgtaaaatagaagcgatctaccctcacagggtcatatgactgctcctctccaccccacactggcccggggcgggctgggcgcgggcccctgcgggtgttgcaacgcccggccagaaagtgggcatcagctgttccgcctggcccacgtgacccgccgagcataaatgtgaccggccgcggctccggcagtcaacgcctgcctcctctcgagcgtcctcagcgcagccgccgcccgcggagccagcacgaacgagcccagcaccggccggatggagcgtccgcaacccgacagcatgccccaggatttgtcagaggccctgaaggaggccaccaaggaggtgcacacccaggcagagaatgctgagttcatgaggaactttcagaagggccaggtgacccgagacggcttcaagctggtgatggcctccctgtaccacatctatgtggccctggaggaggagattgagcgcaacaaggagagcccagtcttcgcccctgtctacttcccagaagagctgcaccgcaaggctgccctggagcaggacctggccttctggtacgggccccgctggcaggaggtcatcccctacacaccagccatgcagcgctatgtgaagcggctccacgaggtggggcgcacagagcccgagctgctggtggcccacgcctacacccgctacctgggtgacctgtctgggggccaggtgctcaaaaagattgcccagaaagccctggacctgcccagctctggcgagggcctggccttcttcaccttccccaacattgccagtgccaccaagttcaagcagctctaccgctcccgcatgaac

SEQ ID NO: 140095 - DNA, 1621 bp, Homo sapiens
  Payload ID: 7477
  Gene Symbol: HMOX2
  Gene Name: heme oxygenase 2
  Uniprot ID: P30519
  ENST ID: ENST00000219700
  CDS Start-End: 81-1031
gccggcctcgcgccagtccgctgggctgcagggactgcggaccagaggagcgagagcagcaagaaccacacccagcagcaatgtcagcggaagtggaaacctcagagggggtagacgagtcagaaaaaaagaactctggggccctagaaaaggagaaccaaatgagaatggctgacctctcggagctcctgaaggaagggaccaaggaagcacacgaccgggcagaaaacacccagtttgtcaaggacttcttgaaaggcaacattaagaaggagctgtttaagctggccaccacggcactttacttcacatactcagccctcgaggaggaaatggagcgcaacaaggaccatccagcctttgcccctttgtacttccccatggagctgcaccggaaggaggcgctgaccaaggacatggagtatttctttggtgaaaactgggaggagcaggtgcagtgccccaaggctgcccagaagtacgtggagcggatccactacatagggcagaacgagccggagctactggtggcccatgcatacacccgctacatgggggatctctcggggggccaggtgctgaagaaggtggcccagcgagcactgaaactccccagcacaggggaagggacccagttctacctgtttgagaatgtggacaatgcccagcagttcaagcagctctaccgggccaggatgaacgccctggacctgaacatgaagaccaaagagaggatcgtggaggaggccaacaaggcttttgagtataacatgcagatattcaatgaactggaccaggccggctccacactggccagagagaccttggaggatgggttccctgtacacgatgggaaaggagacatgcgtaaatgccctttctacgctgctgaacaagacaaaggtgccctggagggcagcagctgtcccttccgaacagctatggctgtgctgaggaagcccagcctccagttcatcctggccgctggtgtggccctagctgctggactcttggcctggtactacatgtgaagcacccatcatgccacaccggtaccctcctcccgactgaccactggcctacccctttctccagccctgactaaactaccacctcaggtgactttttaaaaaatgctgggtttaagaaaggcaaccaataaaagccagatgctagagcctctgcctgacagcatcctctctatgggccatattccgcactgggcacaggccgtcaccctgggagcagtcggcacagtgcagcaagcctggcccccgacccagctctactccaggcttccacacttctgggccctaggctgcttccggtagtccctgtttttgcagtacatgggtgactatctcccctgttggaggtgagtggcctgtaagtccaagctgtgcgagggggccttgctggatgctgctgtacaacttctgggcctctcttggaccctgggagtgagggtgggtgtgggtggaagcctcagaggccttgggagctcatccctctcacccagaatccctctaaccccttgggtgcggtttgctcagccccagcttatctcctcctccgcgctgtgtaaatgctccagcactcaataaagtgggctttgcaagct

SEQ ID NO: 140096 - DNA, 1644 bp, Homo sapiens
  Payload ID: 7477
  Gene Symbol: HMOX2
  Gene Name: heme oxygenase 2
  Uniprot ID: P30519
  ENST ID: ENST00000398595
  CDS Start-End: 549-1499
attgtccactaaggtctggcaggtctgattgcctcttttcaggcactgagtggtggggtatgccatcctcccctgctggaaccagccttggcctgccctgttagtcatcaaaaatagatctcaccagggaacaatcttctcaggttgttgtgtaatttgagtgagccaagatggagtctcgctctgttgcccaggctggagtgcagtggatcagtctagctcattgcagcctccacctcctgggttcaagagattctcctgcctcagcctcctgtgtagctgggattacagagtcttactttgtcggccaggctggagtgcagtggcatgatctcgactcactgcaacctctgtctcccaggctcaagaaatcctcctacatcagcctcccaagtagctgggattacaggctggagtgcagtggctccatctcggctcactgcaacctccgcctcccaggttcaagcgattctcctgcctcagcctcctgagtagctgggattacaggaccagaggagcgagagcagcaagaaccacacccagcagcaatgtcagcggaagtggaaacctcagagggggtagacgagtcagaaaaaaagaactctggggccctagaaaaggagaaccaaatgagaatggctgacctctcggagctcctgaaggaagggaccaaggaagcacacgaccgggcagaaaacacccagtttgtcaaggacttcttgaaaggcaacattaagaaggagctgtttaagctggccaccacggcactttacttcacatactcagccctcgaggaggaaatggagcgcaacaaggaccatccagcctttgcccctttgtacttccccatggagctgcaccggaaggaggcgctgaccaaggacatggagtatttctttggtgaaaactgggaggagcaggtgcagtgccccaaggctgcccagaagtacgtggagcggatccactacatagggcagaacgagccggagctactggtggcccatgcatacacccgctacatgggggatctctcggggggccaggtgctgaagaaggtggcccagcgagcactgaaactccccagcacaggggaagggacccagttctacctgtttgagaatgtggacaatgcccagcagttcaagcagctctaccgggccaggatgaacgccctggacctgaacatgaagaccaaagagaggatcgtggaggaggccaacaaggcttttgagtataacatgcagatattcaatgaactggaccaggccggctccacactggccagagagaccttggaggatgggttccctgtacacgatgggaaaggagacatgcgtaaatgccctttctacgctgctgaacaagacaaaggtgccctggagggcagcagctgtcccttccgaacagctatggctgtgctgaggaagcccagcctccagttcatcctggccgctggtgtggccctagctgctggactcttggcctggtactacatgtgaagcacccatcatgccacaccggtaccctcctcccgactgaccactggcctacccctttctccagccctgactaaactaccacctcaggtgactttttaaaaaatgctgggtttaagaaaggcaaccaataaaagccagatgctag

SEQ ID NO: 140097 - DNA, 1727 bp, Homo sapiens
  Payload ID: 7477
  Gene Symbol: HMOX2
  Gene Name: heme oxygenase 2
  Uniprot ID: P30519
  ENST ID: ENST00000406590
  CDS Start-End: 187-1137
ccaggcacgtgcacagtgagtttgtgtaaatccagttagaccaaaatgagcgaggtggagagcctcttaaccggatgctacgggtgatgactgggaggaggagaaaaattacctctttatcttgcatgaacatcttaattttcaggaccagaggagcgagagcagcaagaaccacacccagcagcaatgtcagcggaagtggaaacctcagagggggtagacgagtcagaaaaaaagaactctggggccctagaaaaggagaaccaaatgagaatggctgacctctcggagctcctgaaggaagggaccaaggaagcacacgaccgggcagaaaacacccagtttgtcaaggacttcttgaaaggcaacattaagaaggagctgtttaagctggccaccacggcactttacttcacatactcagccctcgaggaggaaatggagcgcaacaaggaccatccagcctttgcccctttgtacttccccatggagctgcaccggaaggaggcgctgaccaaggacatggagtatttctttggtgaaaactgggaggagcaggtgcagtgccccaaggctgcccagaagtacgtggagcggatccactacatagggcagaacgagccggagctactggtggcccatgcatacacccgctacatgggggatctctcggggggccaggtgctgaagaaggtggcccagcgagcactgaaactccccagcacaggggaagggacccagttctacctgtttgagaatgtggacaatgcccagcagttcaagcagctctaccgggccaggatgaacgccctggacctgaacatgaagaccaaagagaggatcgtggaggaggccaacaaggcttttgagtataacatgcagatattcaatgaactggaccaggccggctccacactggccagagagaccttggaggatgggttccctgtacacgatgggaaaggagacatgcgtaaatgccctttctacgctgctgaacaagacaaaggtgccctggagggcagcagctgtcccttccgaacagctatggctgtgctgaggaagcccagcctccagttcatcctggccgctggtgtggccctagctgctggactcttggcctggtactacatgtgaagcacccatcatgccacaccggtaccctcctcccgactgaccactggcctacccctttctccagccctgactaaactaccacctcaggtgactttttaaaaaatgctgggtttaagaaaggcaaccaataaaagccagatgctagagcctctgcctgacagcatcctctctatgggccatattccgcactgggcacaggccgtcaccctgggagcagtcggcacagtgcagcaagcctggcccccgacccagctctactccaggcttccacacttctgggccctaggctgcttccggtagtccctgtttttgcagtacatgggtgactatctcccctgttggaggtgagtggcctgtaagtccaagctgtgcgagggggccttgctggatgctgctgtacaacttctgggcctctcttggaccctgggagtgagggtgggtgtgggtggaagcctcagaggccttgggagctcatccctctcacccagaatccctctaaccccttgggtgcggtttgctcagccccagcttatctcctcctccgcgctgtgtaaatgctccagcactcaataaagtgggctttgcaagct

SEQ ID NO: 140098 - DNA, 1752 bp, Homo sapiens
  Payload ID: 7477
  Gene Symbol: HMOX2
  Gene Name: heme oxygenase 2
  Uniprot ID: P30519
  ENST ID: ENST00000414777
  CDS Start-End: 212-1162
attgtccactaaggtctggcaggtctgattgcctcttttcaggcactgagtggtggggtatgccatcctcccctgctggaaccagccttggcctgccctgttagtcatcaaaaatagatctcaccagggaacaatcttctcaggttgttgtgtaatttgagtgagccaaggaccagaggagcgagagcagcaagaaccacacccagcagcaatgtcagcggaagtggaaacctcagagggggtagacgagtcagaaaaaaagaactctggggccctagaaaaggagaaccaaatgagaatggctgacctctcggagctcctgaaggaagggaccaaggaagcacacgaccgggcagaaaacacccagtttgtcaaggacttcttgaaaggcaacattaagaaggagctgtttaagctggccaccacggcactttacttcacatactcagccctcgaggaggaaatggagcgcaacaaggaccatccagcctttgcccctttgtacttccccatggagctgcaccggaaggaggcgctgaccaaggacatggagtatttctttggtgaaaactgggaggagcaggtgcagtgccccaaggctgcccagaagtacgtggagcggatccactacatagggcagaacgagccggagctactggtggcccatgcatacacccgctacatgggggatctctcggggggccaggtgctgaagaaggtggcccagcgagcactgaaactccccagcacaggggaagggacccagttctacctgtttgagaatgtggacaatgcccagcagttcaagcagctctaccgggccaggatgaacgccctggacctgaacatgaagaccaaagagaggatcgtggaggaggccaacaaggcttttgagtataacatgcagatattcaatgaactggaccaggccggctccacactggccagagagaccttggaggatgggttccctgtacacgatgggaaaggagacatgcgtaaatgccctttctacgctgctgaacaagacaaaggtgccctggagggcagcagctgtcccttccgaacagctatggctgtgctgaggaagcccagcctccagttcatcctggccgctggtgtggccctagctgctggactcttggcctggtactacatgtgaagcacccatcatgccacaccggtaccctcctcccgactgaccactggcctacccctttctccagccctgactaaactaccacctcaggtgactttttaaaaaatgctgggtttaagaaaggcaaccaataaaagccagatgctagagcctctgcctgacagcatcctctctatgggccatattccgcactgggcacaggccgtcaccctgggagcagtcggcacagtgcagcaagcctggcccccgacccagctctactccaggcttccacacttctgggccctaggctgcttccggtagtccctgtttttgcagtacatgggtgactatctcccctgttggaggtgagtggcctgtaagtccaagctgtgcgagggggccttgctggatgctgctgtacaacttctgggcctctcttggaccctgggagtgagggtgggtgtgggtggaagcctcagaggccttgggagctcatccctctcacccagaatccctctaaccccttgggtgcggtttgctcagccccagcttatctcctcctccgcgctgtgtaaatgctccagcactcaataaagtgggctttgcaagct

SEQ ID NO: 140099 - DNA, 1797 bp, Homo sapiens
  Payload ID: 7477
  Gene Symbol: HMOX2
  Gene Name: heme oxygenase 2
  Uniprot ID: P30519
  ENST ID: ENST00000458134
  CDS Start-End: 308-1258
catctctaggccccgccccgcgctgcgtgcccacgttgcgccggcctcgcgccagtccgctgggctgcagggactgcggcgcctgagggagtcgctgacgggcacgctgactggaggctggcggacaggcgacagcgacctgcggcagagtcttgctgcgacacccaggctggagtgcaatggcgctatctcggctcactgcaacctccgcttcccggattcaagcgattctcctgcctcagcctcccgagtaggtgggactacaggaccagaggagcgagagcagcaagaaccacacccagcagcaatgtcagcggaagtggaaacctcagagggggtagacgagtcagaaaaaaagaactctggggccctagaaaaggagaaccaaatgagaatggctgacctctcggagctcctgaaggaagggaccaaggaagcacacgaccgggcagaaaacacccagtttgtcaaggacttcttgaaaggcaacattaagaaggagctgtttaagctggccaccacggcactttacttcacatactcagccctcgaggaggaaatggagcgcaacaaggaccatccagcctttgcccctttgtacttccccatggagctgcaccggaaggaggcgctgaccaaggacatggagtatttctttggtgaaaactgggaggagcaggtgcagtgccccaaggctgcccagaagtacgtggagcggatccactacatagggcagaacgagccggagctactggtggcccatgcatacacccgctacatgggggatctctcggggggccaggtgctgaagaaggtggcccagcgagcactgaaactccccagcacaggggaagggacccagttctacctgtttgagaatgtggacaatgcccagcagttcaagcagctctaccgggccaggatgaacgccctggacctgaacatgaagaccaaagagaggatcgtggaggaggccaacaaggcttttgagtataacatgcagatattcaatgaactggaccaggccggctccacactggccagagagaccttggaggatgggttccctgtacacgatgggaaaggagacatgcgtaaatgccctttctacgctgctgaacaagacaaaggtgccctggagggcagcagctgtcccttccgaacagctatggctgtgctgaggaagcccagcctccagttcatcctggccgctggtgtggccctagctgctggactcttggcctggtactacatgtgaagcacccatcatgccacaccggtaccctcctcccgactgaccactggcctacccctttctccagccctgactaaactaccacctcaggtgactttttaaaaaatgctgggtttaagaaaggcaaccaataaaagccagatgctagagcctctgcctgacagcatcctctctatgggccatattccgcactgggcacaggccgtcaccctgggagcagtcggcacagtgcagcaagcctggcccccgacccagctctactccaggcttccacacttctgggccctaggctgcttccggtagtccctgtttttgcagtacatgggtgactatctcccctgttggaggtgagtggcctgtaagtccaagctgtgcgagggggccttgctggatgctgctgtacaacttctgggcctctcttggaccctgggagtgagggtgggtgtgggtggaagcctcagaggccttgggagctcatccctctcacccagaatccctctaaccccttgggtgcggtttgctcagccccagcttatctcctc

SEQ ID NO: 140100 - DNA, 877 bp, Homo sapiens
  Payload ID: 7477
  Gene Symbol: HMOX2
  Gene Name: heme oxygenase 2
  ENST ID: ENST00000570445
  CDS Start-End: 189-877
ggcggacaggcgacagcgacctgcggcagagtcttgctgcgacacccaggctggagtgcaatggcgctatctcggctcactgcaacctccgcttcccggattcaagcgattctcctgcctcagcctcccgagtaggtgggactacaggaccagaggagcgagagcagcaagaaccacacccagcagcaatgtcagcggaagtggaaacctcagagggggtagacgagtcagaaaaaaagaactctggggccctagaaaaggagaaccaaatgagaatggctgacctctcggagctcctgaaggaagggaccaaggaagcacacgaccgggcagaaaacacccagtttgtcaaggacttcttgaaaggcaacattaagaaggagctgtttaagctggccaccacggcactttacttcacatactcagccctcgaggaggaaatggagcgcaacaaggaccatccagcctttgcccctttgtacttccccatggagctgcaccggaaggaggcgctgaccaaggacatggagtatttctttggtgaaaactgggaggagcaggtgcagtgccccaaggctgcccagaagtacgtggagcggatccactacatagggcagaacgagccggagctactggtggcccatgcatacacccgctacatgggggatctctcggggggccaggtgctgaagaaggtggcccagcgagcactgaaactccccagcacaggggaagggacccagttctacctgtttgagaatgtggacaatgcccagcagttcaagcagctctaccgggccaggatgaacgccctggacctgaacatgaagaccaaagagaggatcgtggaggaggccaacaaggcttttgagtataa

SEQ ID NO: 140101 - DNA, 914 bp, Homo sapiens
  Payload ID: 7477
  Gene Symbol: HMOX2
  Gene Name: heme oxygenase 2
  ENST ID: ENST00000575051
  CDS Start-End: 200-914
gggtttgcccgccccaggcacgtgcacagtgagtttgtgtaaatccagttagaccaaaatgagcgaggtggagagcctcttaaccggatgctacgggtgatgactgggaggaggagaaaaattacctctttatcttgcatgaacatcttaattttcaggaccagaggagcgagagcagcaagaaccacacccagcagcaatgtcagcggaagtggaaacctcagagggggtagacgagtcagaaaaaaagaactctggggccctagaaaaggagaaccaaatgagaatggctgacctctcggagctcctgaaggaagggaccaaggaagcacacgaccgggcagaaaacacccagtttgtcaaggacttcttgaaaggcaacattaagaaggagctgtttaagctggccaccacggcactttacttcacatactcagccctcgaggaggaaatggagcgcaacaaggaccatccagcctttgcccctttgtacttccccatggagctgcaccggaaggaggcgctgaccaaggacatggagtatttctttggtgaaaactgggaggagcaggtgcagtgccccaaggctgcccagaagtacgtggagcggatccactacatagggcagaacgagccggagctactggtggcccatgcatacacccgctacatgggggatctctcggggggccaggtgctgaagaaggtggcccagcgagcactgaaactccccagcacaggggaagggacccagttctacctgtttgagaatgtggacaatgcccagcagttcaagcagctctaccgggccaggatgaacgccctggacctgaacatgaagaccaaagagaggatcgtggaggaggccaacaaggcttttgagtataacatgcagatattcaatgaactggacc

SEQ ID NO: 140102 - DNA, 583 bp, Homo sapiens
  Payload ID: 7477
  Gene Symbol: HMOX2
  Gene Name: heme oxygenase 2
  ENST ID: ENST00000576827
  CDS Start-End: 190-583
gggcacgctgactggaggctggcggacaggcgacagcgacctgcggcagagaacaacatgaagagaccttgctgctgctatgaaacccagactctaaggacaacttgggggacattggatattttttcacagatgtagacatcaaggagaccagaggagcgagagcagcaagaaccacacccagcagcaatgtcagcggaagtggaaacctcagagggggtagacgagtcagaaaaaaagaactctggggccctagaaaaggagaaccaaatgagaatggctgacctctcggagctcctgaaggaagggaccaaggaagcacacgaccgggcagaaaacacccagtttgtcaaggacttcttgaaaggcaacattaagaaggagctgtttaagctggccaccacggcactttacttcacatactcagccctcgaggaggaaatggagcgcaacaaggaccatccagcctttgcccctttgtacttccccatggagctgcaccggaaggaggcgctgaccaaggacatggagtatttctttggtgaaaactgggaggagcaggtgcagtgccccaaggctgccc

SEQ ID NO: 140103 - DNA, 514 bp, Homo sapiens
  Payload ID: 7477
  Gene Symbol: HMOX2
  Gene Name: heme oxygenase 2
  ENST ID: ENST00000570622
  CDS Start-End: 1-332
cccagttctacctgtttgagaatgtggacaatgcccagcagttcaagcagctctaccgggccaggatgaacgccctggacctgaacatgaagaccaaagagaggatcgtggaggaggccaacaaggcttttgagtataacatgcagatattcaatgaactggaccaggccggctccacactggccagagagaccttggaggatgggttccctgtacacgatgggaaaggagacatgcgtaaatgccctttctacgctgctgaacaagacaaaggtaggtctgtgtgtcctgagctcccctcctggggcaggtgtagcaggagactccactgatgccatgtctcctattggtgctgccacacaggtgccctggagggcagcagctgtcccttccgaacagctatggctgtgctgaggaagcccagcctccagttcatcctggccgctggtgtggccctagctgctggactcttggcctggtactacatgtgaagcacccatcatgccacaccggt

SEQ ID NO: 140104 - DNA, 2147 bp, Homo sapiens
  Payload ID: 7477
  Gene Symbol: HMOX2
  Gene Name: heme oxygenase 2
  Uniprot ID: P30519
  ENST ID: ENST00000570646
  CDS Start-End: 606-1556
caaaactcggtctcaaaaaaagaaaaatcattctgtcattctggccgctgtttgaagaatgcgaataatgcaacagggagatcagatacaagactggtaaccgaggtgtcagagttgagactcagtttcgcagattgcattggcaagtgaccaagtgggtggtgccacggttgacaaccctatttcttacatcactgagtggatgtacaaggattaaaccacactggggaagaaaagtgctcaaccctgaggcaccctcacacacctcggctcttgtgaacactagtgttcctgccgaagcacgcctacttaccccgctgagcagagcctgagcctgcaacctccagagacctggggaaagccacatactccgcttcccgcccccggcaagggcgtgtcagctacaaggggcgtgtcatctctaggccccgccccgcgctgcgtgcccacgttgcgccggcctcgcgccagtccgctgggctgcagggactgcggcgcctgagggagtcgctgacgggcacgctgactggaggctggcggacaggcgacagcgacctgcggcaggaccagaggagcgagagcagcaagaaccacacccagcagcaatgtcagcggaagtggaaacctcagagggggtagacgagtcagaaaaaaagaactctggggccctagaaaaggagaaccaaatgagaatggctgacctctcggagctcctgaaggaagggaccaaggaagcacacgaccgggcagaaaacacccagtttgtcaaggacttcttgaaaggcaacattaagaaggagctgtttaagctggccaccacggcactttacttcacatactcagccctcgaggaggaaatggagcgcaacaaggaccatccagcctttgcccctttgtacttccccatggagctgcaccggaaggaggcgctgaccaaggacatggagtatttctttggtgaaaactgggaggagcaggtgcagtgccccaaggctgcccagaagtacgtggagcggatccactacatagggcagaacgagccggagctactggtggcccatgcatacacccgctacatgggggatctctcggggggccaggtgctgaagaaggtggcccagcgagcactgaaactccccagcacaggggaagggacccagttctacctgtttgagaatgtggacaatgcccagcagttcaagcagctctaccgggccaggatgaacgccctggacctgaacatgaagaccaaagagaggatcgtggaggaggccaacaaggcttttgagtataacatgcagatattcaatgaactggaccaggccggctccacactggccagagagaccttggaggatgggttccctgtacacgatgggaaaggagacatgcgtaaatgccctttctacgctgctgaacaagacaaaggtgccctggagggcagcagctgtcccttccgaacagctatggctgtgctgaggaagcccagcctccagttcatcctggccgctggtgtggccctagctgctggactcttggcctggtactacatgtgaagcacccatcatgccacaccggtaccctcctcccgactgaccactggcctacccctttctccagccctgactaaactaccacctcaggtgactttttaaaaaatgctgggtttaagaaaggcaaccaataaaagccagatgctagagcctctgcctgacagcatcctctctatgggccatattccgcactgggcacaggccgtcaccctgggagcagtcggcacagtgcagcaagcctggcccccgacccagctctactccaggcttccacacttctgggccctaggctgcttccggtagtccctgtttttgcagtacatgggtgactatctcccctgttggaggtgagtggcctgtaagtccaagctgtgcgagggggccttgctggatgctgctgtacaacttctgggcctctcttggaccctgggagtgagggtgggtgtgggtggaagcctcagaggccttgggagctcatccctctcacccagaatccctctaaccccttgggtgcggtttgctcagccccagcttatctcctcctccgcgctgtgtaaatgctccagcactcaataaagtgggctttgcaagcta

SEQ ID NO: 140105 - DNA, 549 bp, Homo sapiens
  Payload ID: 7477
  Gene Symbol: HMOX2
  Gene Name: heme oxygenase 2
  ENST ID: ENST00000572812
  CDS Start-End: 220-549
actgcggcgcctgagggagtcgctgacgggcacgctgactggaggctggcggacaggcgacagcgacctgcggcagagtcttgctgcgacacccaggctggagtgcaatggcgctatctcggctcactgcaacctccgcttcccggattcaagcgattctcctgcctcagcctcccgagaccagaggagcgagagcagcaagaaccacacccagcagcaatgtcagcggaagtggaaacctcagagggggtagacgagtcagaaaaaaagaactctggggccctagaaaaggagaaccaaatgagaatggctgacctctcggagctcctgaaggaagggaccaaggaagcacacgaccgggcagaaaacacccagtttgtcaaggacttcttgaaaggcaacattaagaaggagctgtttaagctggccaccacggcactttacttcacatactcagccctcgaggaggaaatggagcgcaacaaggaccatccagcctttgcccctttgtacttccccatggagctgcaccggaaggaggcgctgacc

SEQ ID NO: 140106 - DNA, 1027 bp, Homo sapiens
  Payload ID: 7477
  Gene Symbol: HMOX2
  Gene Name: heme oxygenase 2
  Uniprot ID: P30519
  ENST ID: ENST00000575120
  CDS Start-End: 84-947
gcagggactgcggcgcctgagggagtcgctgacgggcacgctgactggaggctggcggacaggcgacagcgacctgcggcagaatggctgacctctcggagctcctgaaggaagggaccaaggaagcacacgaccgggcagaaaacacccagtttgtcaaggacttcttgaaaggcaacattaagaaggagctgtttaagctggccaccacggcactttacttcacatactcagccctcgaggaggaaatggagcgcaacaaggaccatccagcctttgcccctttgtacttccccatggagctgcaccggaaggaggcgctgaccaaggacatggagtatttctttggtgaaaactgggaggagcaggtgcagtgccccaaggctgcccagaagtacgtggagcggatccactacatagggcagaacgagccggagctactggtggcccatgcatacacccgctacatgggggatctctcggggggccaggtgctgaagaaggtggcccagcgagcactgaaactccccagcacaggggaagggacccagttctacctgtttgagaatgtggacaatgcccagcagttcaagcagctctaccgggccaggatgaacgccctggacctgaacatgaagaccaaagagaggatcgtggaggaggccaacaaggcttttgagtataacatgcagatattcaatgaactggaccaggccggctccacactggccagagagaccttggaggatgggttccctgtacacgatgggaaaggagacatgcgtaaatgccctttctacgctgctgaacaagacaaaggtgccctggagggcagcagctgtcccttccgaacagctatggctgtgctgaggaagcccagcctccagttcatcctggccgctggtgtggccctagctgctggactcttggcctggtactacatgtgaagcacccatcatgccacaccggtaccctcctcccgactgaccactggcctacccctttctccagccctgactaaactacc

SEQ ID NO: 140107 - DNA, 607 bp, Homo sapiens
  Payload ID: 7477
  Gene Symbol: HMOX2
  Gene Name: heme oxygenase 2
  ENST ID: ENST00000575129
  CDS Start-End: 212-607
attgtccactaaggtctggcaggtctgattgcctcttttcaggcactgagtggtggggtatgccatcctcccctgctggaaccagccttggcctgccctgttagtcatcaaaaatagatctcaccagggaacaatcttctcaggttgttgtgtaatttgagtgagccaaggaccagaggagcgagagcagcaagaaccacacccagcagcaatgtcagcggaagtggaaacctcagagggggtagacgagtcagaaaaaaagaactctggggccctagaaaaggagaaccaaatgagaatggctgacctctcggagctcctgaaggaagggaccaaggaagcacacgaccgggcagaaaacacccagtttgtcaaggacttcttgaaaggcaacattaagaaggagctgtttaagctggccaccacggcactttacttcacatactcagccctcgaggaggaaatggagcgcaacaaggaccatccagcctttgcccctttgtacttccccatggagctgcaccggaaggaggcgctgaccaaggacatggagtatttctttggtgaaaactgggaggagcaggtgcagtgccccaaggctgcccag

SEQ ID NO: 140108 - DNA, 687 bp, Homo sapiens
  Payload ID: 7477
  Gene Symbol: HMOX2
  Gene Name: heme oxygenase 2
  ENST ID: ENST00000574466
  CDS Start-End: 296-687
actgcggcgcctgagggagtcgctgacgggcacgctgactggaggctggcggacaggcgacagcgacctgcggcaggtgagctgtccgcgccctcccggggccttccttccgcccggcttctcggaccgcgctgcgtccttcgcgggccctgcctcggtccaggccttcggacctgggcttggccgggccacagccctttgggtcccctgcgccggtctgaggggagacccggccgggggcggccggaagctgggaccagaggagcgagagcagcaagaaccacacccagcagcaatgtcagcggaagtggaaacctcagagggggtagacgagtcagaaaaaaagaactctggggccctagaaaaggagaaccaaatgagaatggctgacctctcggagctcctgaaggaagggaccaaggaagcacacgaccgggcagaaaacacccagtttgtcaaggacttcttgaaaggcaacattaagaaggagctgtttaagctggccaccacggcactttacttcacatactcagccctcgaggaggaaatggagcgcaacaaggaccatccagcctttgcccctttgtacttccccatggagctgcaccggaaggaggcgctgaccaaggacatggagtatttctttggtgaaaactgggaggagcaggtgcagtgccccaaggctgc

SEQ ID NO: 140109 - DNA, 1703 bp, Homo sapiens
  Payload ID: 7477
  Gene Symbol: HMOX2
  Gene Name: heme oxygenase 2
  ENST ID: ENST00000613539
  CDS Start-End: 1-1113
atggagtctcgctctgttgcccaggctggagtgcagtggatcagtctagctcattgcagcctccacctcctgggttcaagagattctcctgcctcagcctcctgtgtagctgggattacaggaccagaggagcgagagcagcaagaaccacacccagcagcaatgtcagcggaagtggaaacctcagagggggtagacgagtcagaaaaaaagaactctggggccctagaaaaggagaaccaaatgagaatggctgacctctcggagctcctgaaggaagggaccaaggaagcacacgaccgggcagaaaacacccagtttgtcaaggacttcttgaaaggcaacattaagaaggagctgtttaagctggccaccacggcactttacttcacatactcagccctcgaggaggaaatggagcgcaacaaggaccatccagcctttgcccctttgtacttccccatggagctgcaccggaaggaggcgctgaccaaggacatggagtatttctttggtgaaaactgggaggagcaggtgcagtgccccaaggctgcccagaagtacgtggagcggatccactacatagggcagaacgagccggagctactggtggcccatgcatacacccgctacatgggggatctctcggggggccaggtgctgaagaaggtggcccagcgagcactgaaactccccagcacaggggaagggacccagttctacctgtttgagaatgtggacaatgcccagcagttcaagcagctctaccgggccaggatgaacgccctggacctgaacatgaagaccaaagagaggatcgtggaggaggccaacaaggcttttgagtataacatgcagatattcaatgaactggaccaggccggctccacactggccagagagaccttggaggatgggttccctgtacacgatgggaaaggagacatgcgtaaatgccctttctacgctgctgaacaagacaaaggtgccctggagggcagcagctgtcccttccgaacagctatggctgtgctgaggaagcccagcctccagttcatcctggccgctggtgtggccctagctgctggactcttggcctggtactacatgtgaagcacccatcatgccacaccggtaccctcctcccgactgaccactggcctacccctttctccagccctgactaaactaccacctcaggtgactttttaaaaaatgctgggtttaagaaaggcaaccaataaaagccagatgctagagcctctgcctgacagcatcctctctatgggccatattccgcactgggcacaggccgtcaccctgggagcagtcggcacagtgcagcaagcctggcccccgacccagctctactccaggcttccacacttctgggccctaggctgcttccggtagtccctgtttttgcagtacatgggtgactatctcccctgttggaggtgagtggcctgtaagtccaagctgtgcgagggggccttgctggatgctgctgtacaacttctgggcctctcttggaccctgggagtgagggtgggtgtgggtggaagcctcagaggccttgggagctcatccctctcacccagaatccctctaaccccttgggtgcggtttgctcagccccagcttatctcctcctccgcgctgtgtaaatgctccagcactcaataaagtgggctttgcaagct

SEQ ID NO: 140110 - DNA, 1829 bp, Homo sapiens
  Payload ID: 7477
  Gene Symbol: HMOX2
  Gene Name: heme oxygenase 2
  Uniprot ID: P30519
  ENST ID: ENST00000620445
  CDS Start-End: 289-1239
catctctaggccccgccccgcgctgcgtgcccacgttgcgccggcctcgcgccagtccgctgggctgcagggactgcggcgcctgagggagtcgctgacgggcacgctgactggaggctggcggacaggcgacagcgacctgcggcagagaacaacatgaagagaccttgctgctgctatgaaacccagactctaaggacaacttgggggacattggatattttttcacagatgtagacatcaaggagaccagaggagcgagagcagcaagaaccacacccagcagcaatgtcagcggaagtggaaacctcagagggggtagacgagtcagaaaaaaagaactctggggccctagaaaaggagaaccaaatgagaatggctgacctctcggagctcctgaaggaagggaccaaggaagcacacgaccgggcagaaaacacccagtttgtcaaggacttcttgaaaggcaacattaagaaggagctgtttaagctggccaccacggcactttacttcacatactcagccctcgaggaggaaatggagcgcaacaaggaccatccagcctttgcccctttgtacttccccatggagctgcaccggaaggaggcgctgaccaaggacatggagtatttctttggtgaaaactgggaggagcaggtgcagtgccccaaggctgcccagaagtacgtggagcggatccactacatagggcagaacgagccggagctactggtggcccatgcatacacccgctacatgggggatctctcggggggccaggtgctgaagaaggtggcccagcgagcactgaaactccccagcacaggggaagggacccagttctacctgtttgagaatgtggacaatgcccagcagttcaagcagctctaccgggccaggatgaacgccctggacctgaacatgaagaccaaagagaggatcgtggaggaggccaacaaggcttttgagtataacatgcagatattcaatgaactggaccaggccggctccacactggccagagagaccttggaggatgggttccctgtacacgatgggaaaggagacatgcgtaaatgccctttctacgctgctgaacaagacaaaggtgccctggagggcagcagctgtcccttccgaacagctatggctgtgctgaggaagcccagcctccagttcatcctggccgctggtgtggccctagctgctggactcttggcctggtactacatgtgaagcacccatcatgccacaccggtaccctcctcccgactgaccactggcctacccctttctccagccctgactaaactaccacctcaggtgactttttaaaaaatgctgggtttaagaaaggcaaccaataaaagccagatgctagagcctctgcctgacagcatcctctctatgggccatattccgcactgggcacaggccgtcaccctgggagcagtcggcacagtgcagcaagcctggcccccgacccagctctactccaggcttccacacttctgggccctaggctgcttccggtagtccctgtttttgcagtacatgggtgactatctcccctgttggaggtgagtggcctgtaagtccaagctgtgcgagggggccttgctggatgctgctgtacaacttctgggcctctcttggaccctgggagtgagggtgggtgtgggtggaagcctcagaggccttgggagctcatccctctcacccagaatccctctaaccccttgggtgcggtttgctcagccccagcttatctcctcctccgcgctgtgtaaatgctccagcactcaataaagtgggctttgcaagct

SEQ ID NO: 140111 - DNA, 1703 bp, Homo sapiens; identical to SEQ ID NO: 140109
  Payload ID: 7477
  Gene Symbol: HMOX2
  Gene Name: heme oxygenase 2
  ENST ID: ENST00000617111
  CDS Start-End: 1-1113

SEQ ID NO: 140112 - DNA, 1727 bp, Homo sapiens; identical to SEQ ID NO: 140097
  Payload ID: 7477
  Gene Symbol: HMOX2
  Gene Name: heme oxygenase 2
  Uniprot ID: P30519
  ENST ID: ENST00000612525
  CDS Start-End: 187-1137

SEQ ID NO: 140113 - DNA, 1908 bp, Homo sapiens
  Payload ID: 7477
  Gene Symbol: HMOX2
  Gene Name: heme oxygenase 2
  Uniprot ID: P30519
  ENST ID: ENST00000621065
  CDS Start-End: 368-1318
catctctaggccccgccccgcgctgcgtgcccacgttgcgccggcctcgcgccagtccgctgggctgcagggactgcggcgcctgagggagtcgctgacgggcacgctgactggaggctggcggacaggcgacagcgacctgcggcaggtgagctgtccgcgccctcccggggccttccttccgcccggcttctcggaccgcgctgcgtccttcgcgggccctgcctcggtccaggccttcggacctgggcttggccgggccacagccctttgggtcccctgcgccggtctgaggggagacccggccgggggcggccggaagctgggaccagaggagcgagagcagcaagaaccacacccagcagcaatgtcagcggaagtggaaacctcagagggggtagacgagtcagaaaaaaagaactctggggccctagaaaaggagaaccaaatgagaatggctgacctctcggagctcctgaaggaagggaccaaggaagcacacgaccgggcagaaaacacccagtttgtcaaggacttcttgaaaggcaacattaagaaggagctgtttaagctggccaccacggcactttacttcacatactcagccctcgaggaggaaatggagcgcaacaaggaccatccagcctttgcccctttgtacttccccatggagctgcaccggaaggaggcgctgaccaaggacatggagtatttctttggtgaaaactgggaggagcaggtgcagtgccccaaggctgcccagaagtacgtggagcggatccactacatagggcagaacgagccggagctactggtggcccatgcatacacccgctacatgggggatctctcggggggccaggtgctgaagaaggtggcccagcgagcactgaaactccccagcacaggggaagggacccagttctacctgtttgagaatgtggacaatgcccagcagttcaagcagctctaccgggccaggatgaacgccctggacctgaacatgaagaccaaagagaggatcgtggaggaggccaacaaggcttttgagtataacatgcagatattcaatgaactggaccaggccggctccacactggccagagagaccttggaggatgggttccctgtacacgatgggaaaggagacatgcgtaaatgccctttctacgctgctgaacaagacaaaggtgccctggagggcagcagctgtcccttccgaacagctatggctgtgctgaggaagcccagcctccagttcatcctggccgctggtgtggccctagctgctggactcttggcctggtactacatgtgaagcacccatcatgccacaccggtaccctcctcccgactgaccactggcctacccctttctccagccctgactaaactaccacctcaggtgactttttaaaaaatgctgggtttaagaaaggcaaccaataaaagccagatgctagagcctctgcctgacagcatcctctctatgggccatattccgcactgggcacaggccgtcaccctgggagcagtcggcacagtgcagcaagcctggcccccgacccagctctactccaggcttccacacttctgggccctaggctgcttccggtagtccctgtttttgcagtacatgggtgactatctcccctgttggaggtgagtggcctgtaagtccaagctgtgcgagggggccttgctggatgctgctgtacaacttctgggcctctcttggaccctgggagtgagggtgggtgtgggtggaagcctcagaggccttgggagctcatccctctcacccagaatccctctaaccccttgggtgcggtttgctcagccccagcttatctcctcctccgcgctgtgtaaatgctccagcactcaataaagtgggctttgcaagct

SEQ ID NO: 140114 - DNA, 1621 bp, Homo sapiens; identical to SEQ ID NO: 140095
  Payload ID: 7477
  Gene Symbol: HMOX2
  Gene Name: heme oxygenase 2
  Uniprot ID: P30519
  ENST ID: ENST00000622146
  CDS Start-End: 81-1031

SEQ ID NO: 140115 - DNA, 1752 bp, Homo sapiens; identical to SEQ ID NO: 140098
  Payload ID: 7477
  Gene Symbol: HMOX2
  Gene Name: heme oxygenase 2
  Uniprot ID: P30519
  ENST ID: ENST00000615778
  CDS Start-End: 212-1162

SEQ ID NO: 140116 - DNA, 1829 bp, Homo sapiens; identical to SEQ ID NO: 140110
  Payload ID: 7477
  Gene Symbol: HMOX2
  Gene Name: heme oxygenase 2
  Uniprot ID: P30519
  ENST ID: ENST00000619528
  CDS Start-End: 289-1239

SEQ ID NO: 140117 - DNA, 1908 bp, Homo sapiens; identical to SEQ ID NO: 140113
  Payload ID: 7477
  Gene Symbol: HMOX2
  Gene Name: heme oxygenase 2
  Uniprot ID: P30519
  ENST ID: ENST00000619913
  CDS Start-End: 368-1318

SEQ ID NO: 140118 - DNA, 687 bp, Homo sapiens; identical to SEQ ID NO: 140108
  Payload ID: 7477
  Gene Symbol: HMOX2
  Gene Name: heme oxygenase 2
  ENST ID: ENST00000633088
  CDS Start-End: 296-687

SEQ ID NO: 140119 - DNA, 1797 bp, Homo sapiens; identical to SEQ ID NO: 140099
  Payload ID: 7477
  Gene Symbol: HMOX2
  Gene Name: heme oxygenase 2
  Uniprot ID: P30519
  ENST ID: ENST00000631540
  CDS Start-End: 308-1258

SEQ ID NO: 140120 - DNA, 877 bp, Homo sapiens; identical to SEQ ID NO: 140100
  Payload ID: 7477
  Gene Symbol: HMOX2
  Gene Name: heme oxygenase 2
  ENST ID: ENST00000631495
  CDS Start-End: 189-877

SEQ ID NO: 140121 - DNA, 914 bp, Homo sapiens; identical to SEQ ID NO: 140101
  Payload ID: 7477
  Gene Symbol: HMOX2
  Gene Name: heme oxygenase 2
  ENST ID: ENST00000631986
  CDS Start-End: 200-914

SEQ ID NO: 140122 - DNA, 583 bp, Homo sapiens; identical to SEQ ID NO: 140102
  Payload ID: 7477
  Gene Symbol: HMOX2
  Gene Name: heme oxygenase 2
  ENST ID: ENST00000631697
  CDS Start-End: 190-583

SEQ ID NO: 140123 - DNA, 549 bp, Homo sapiens; identical to SEQ ID NO: 140105
  Payload ID: 7477
  Gene Symbol: HMOX2
  Gene Name: heme oxygenase 2
  ENST ID: ENST00000634141
  CDS Start-End: 220-549

SEQ ID NO: 140124 - DNA, 1644 bp, Homo sapiens; identical to SEQ ID NO: 140096
  Payload ID: 7477
  Gene Symbol: HMOX2
  Gene Name: heme oxygenase 2
  Uniprot ID: P30519
  ENST ID: ENST00000631677
  CDS Start-End: 549-1499

SEQ ID NO: 140125 - DNA, 607 bp, Homo sapiens; identical to SEQ ID NO: 140107
  Payload ID: 7477
  Gene Symbol: HMOX2
  Gene Name: heme oxygenase 2
  ENST ID: ENST00000632175
  CDS Start-End: 212-607

SEQ ID NO: 140126 - DNA, 1027 bp, Homo sapiens; identical to SEQ ID NO: 140106
  Payload ID: 7477
  Gene Symbol: HMOX2
  Gene Name: heme oxygenase 2
  Uniprot ID: P30519
  ENST ID: ENST00000633319
  CDS Start-End: 84-947

SEQ ID NO: 140127 - DNA, 2147 bp, Homo sapiens; identical to SEQ ID NO: 140104
  Payload ID: 7477
  Gene Symbol: HMOX2
  Gene Name: heme oxygenase 2
  Uniprot ID: P30519
  ENST ID: ENST00000632458
  CDS Start-End: 606-1556

SEQ ID NO: 140128 - DNA, 514 bp, Homo sapiens; identical to SEQ ID NO: 140103
  Payload ID: 7477
  Gene Symbol: HMOX2
  Gene Name: heme oxygenase 2
  ENST ID: ENST00000633529
  CDS Start-End: 1-332

SEQ ID NO: 140129 - DNA, 18208 bp, Homo sapiens
  Payload ID: 7478
  Gene Symbol: HMCN1
  Gene Name: hemicentin 1
  Uniprot ID: Q96RW7
  ENST ID: ENST00000271588
  CDS Start-End: 230-17137
gaagccgcatccagacaaaagctgccgcatccctgccctgcccaacccctggagggattcgagtttggtgcttgtccccgtctgattctcagcgccaaactttttgctagttcagagattccaagagtctgatgagttactctgagaggaaaccctctgcctgttgttgaggaggactgagcacagtgcttaggcgctgagggggaaaaagagggggaaaaaaaagaaaatgatttcctgggaagttgtccatacagtattcctgtttgctcttctttattcttccctagctcaagatgcgagcccccagtcagagatcagagctgaggaaattcccgagggggcctccacgttggcttttgtgtttgatgtgactggttctatgtatgatgatttagttcaggtgattgaaggggcttccaaaattttggagacgtctttgaaaagacctaaaagacctcttttcaactttgcgttggtgcctttccatgatccagaaattggcccagtgacaattaccacagatcccaagaaatttcaatatgaactcagagaactgtatgttcagggtggtggtgattgcccagaaatgagtattggagctataaaaattgccttggaaatttctcttcctggttctttcatctatgttttcactgatgctcggtccaaagattaccggctcacccatgaggtgctgcaacttatccaacagaaacagtcacaagtcgtatttgttctgactggagattgtgatgacaggacccatattggatataaagtctatgaagaaattgcctctacaagttctggtcaagtgttccatctggacaaaaaacaagttaatgaggtattaaaatgggtagaagaagcagtacaggcctccaaagttcaccttttatccacagatcatttggaacaggctgtaaatacttggagaattccttttgatcccagcctgaaagaggtcactgtgtctttgagtgggccttctccaatgattgaaattcgcaatcctttagggaagctgataaaaaagggatttggcctgcatgagctattaaatatccataactctgccaaagtagtgaatgtgaaagagccagaggctggaatgtggacagtgaagacctcaagcagtggaaggcactctgttcgcattactggcctcagtactattgatttccgagctggcttttctcgaaagcccaccctggacttcaaaaaaacagtcagcagaccagtgcaaggaatacctacctatgtactgctcaatacttctggaatttccactccagctagaatagatcttcttgaacttttgagtatctcaggaagttctcttaagactattcctgttaaatattacccacatcgaaaaccttatggcatatggaatatttctgactttgtaccaccaaatgaagctttctttctcaaagtaacaggctatgataaagatgattacctcttccagagagtatcaagtgtttccttttctagtattgtcccagatgctcccaaagttacgatgcctgagaaaaccccaggatactatctgcagccgggccaaattccctgctctgttgacagtcttttgccctttaccttgagctttgtcagaaatggagttacacttggagtagaccagtatttgaaagaatctgccagtgtgaacttagatattgcaaaggtcactttgtctgacgaaggtttctatgaatgcattgctgtcagcagtgcaggtactggacgggcacagacattttttgacgtatcagagccccctccggtcatccaagtgcctaacaatgttacagtcactcctggagagagagcagttttaacatgtctcatcatcagtgcggtggattacaatctaacctggcagaggaatgacagagatgtcagactggcagagccagcgagaattaggaccttggctaatctgtcattggagctaaagagtgtgaaattcaacgatgctggagagtatcattgtatggtttctagtgaaggtggatcatcagccgcttcagttttcctcacagtgcaagaaccacccaaagtcactgtgatgcccaagaatcagtctttcacaggagggtctgaggtctccatcatgtgttctgcaacaggttatcccaaaccaaagattgcctggaccgttaacgatatgtttatcgtgggttcacacaggtataggatgacctcagatggtaccttatttatcaaaaatgcagctcccaaagatgcagggatctatggttgcctagcaagtaattcagctggaacagataaacagaattctactctcagatacattgaagcccctaagttgatggtagttcagagtgagctcttggttgcccttggggatataaccgttatggaatgcaaaacctctggtattcctccacctcaagttaaatggttcaaaggagatcttgagttgaggccctcaacattcctcattattgaccctctcttgggacttttgaagattcaagaaacacaagatctggatgctggcgattatacctgtgtagccatcaatgaggctggaagagcaactggcaagataactctggatgttggctcacctccagttttcatacaagaacctgctgatgtgtctatggaaattggctcaaatgtgacattaccttgttatgttcagggttatccagaaccaacaatcaaatggcgaagattagacaacatgccaattttctcaagacctttttcagttagttccatcagccaactaagaacaggagctctctttattttaaacttatgggcaagtgataaaggaacctatatttgtgaagctgaaaaccagtttggaaagatccagtcagagacaacagtaacagtgaccggacttgttgctccacttattggaatcagcccttcagtggccaatgttattgaaggacagcagcttactttgccctgtactctgttagctggaaatcccattccagaacgtcggtggattaagaattcagctatgttgctccaaaatccttacatcactgtgcgcagtgatgggagcctccatattgaaagagttcagcttcaggatggtggtgaatatacttgtgtggccagtaacgttgctgggaccaataacaaaactacctctgtggttgtgcatgttctgccaaccattcagcatgggcagcagatactcagtacaattgaaggcattccagtaactttaccatgcaaagcaagtggaaatcccaaaccgtctgtcatctggtccaagaaaggagagctgatttcaaccagcagtgctaagttttcagcaggagctgatggtagtctgtatgtggtatcacctggaggagaggagagtggggagtatgtctgcactgccaccaatacagccggctacgccaaaaggaaagtgcagctaacagtctatgtaaggcccagagtgtttggagatcaacgaggactgtcccaggataagcctgttgagatctccgtccttgcaggggaagaggtaacacttccatgtgaagtgaagagcttacctccacccataattacttgggccaaagaaacccagctcatctcaccgttctctccaagacacacattcctcccttctggttcaatgaagatcactgaaacccgcacttcagatagtgggatgtatctttgtgttgccacaaatattgctgggaatgtgactcaggctgtcaaattaaatgtccatgttcctccaaagatacagcgtggacctaaacatctcaaagtccaagttggtcaaagagtggatattccatgtaatgctcaagggactcctcttcctgtaatcacctggtccaaaggtggaagcactatgctggttgatggagagcaccatgttagcaatccagacggaactttaagcatcgaccaagccacgccctcagatgctggcatatatacatgtgttgctactaacatagcaggcactgatgaaacagagataacgctacatgtccaagaaccacccacagtggaagatctagaacctccatataacactactttccaagaaagagtggccaatcaacgcattgaatttccatgtcctgcaaaaggtacccctaaaccaaccatcaaatggttacacaatggtagagagttgacaggcagagagcctggcatttctatcttggaagatggcacattgctggttattgcttctgttacaccctatgacaatggggagtacatctgtgtggcagtcaatgaagctggaaccacagaaagaaaatataacctcaaagtccatgttcctccagtaattaaagataaagaacaagttacaaatgtgtcggtgttgttaaatcagctgaccaatctcttctgtgaagtggaaggcactccatctcccatcattatgtggtataaagataatgtccaggtgactgaaagcagcactattcagactgtgaacaatgggaagatactgaagctcttcagagccactccagaggatgcaggaagatattcctgcaaagcaattaatattgcaggcacttctcagaagtactttaacattgatgtgctagttccacccaccataataggtaccaacttcccaaatgaagtctcagttgtcctcaaccgtgacgtcgcccttgaatgccaggtcaaaggcactccctttcctgatattcattggttcaaagatggcaagcctttatttttgggcgatcctaatgttgaacttctagacagaggacaagtcttacatttaaagaatgcacggagaaatgacaaggggcgctaccaatgtactgtgtctaatgcagctggcaaacaagccaaggatataaaactgactatctatattccacctagtattaaaggaggaaatgtcaccacagacatatcagtattgatcaacagccttattaaactggaatgtgaaacacggggacttccaatgcctgccattacttggtataaggacgggcagccaatcatgtccagctcacaagcactttatattgataaaggacaatatcttcatattcctcgagcacaggtctctgattcagcaacatatacgtgtcatgtagccaatgttgctggaactgctgaaaaatcattccatgtggatgtctatgttcctccaatgattgaaggcaacttggccacgcctttgaataagcaagtagttattgctcattctctgacactggagtgcaaagctgctggaaacccttctcccattctcacctggttgaaagatggtgtacctgtgaaagctaatgacaatatccgcatagaagctggtgggaagaaactcgaaatcatgagtgcccaagaaattgatcgaggacagtacatatgcgtggctaccagtgtggcaggagaaaaggaaatcaaatatgaagttgatgtcttggtgccaccagctatagaaggaggagatgaaacatcttacttcattgtgatggttaataacttactggagctagattgtcatgtgacaggctctcccccaccaactatcatgtggctgaaggatggccagttaattgatgaaagggatggattcaagattttattaaatggacgcaaactggttattgctcaggctcaagtgtcaaacacaggcctttatcggtgcatggcagcaaatactgctggagaccacaagaaggaatttgaagtgactgttcatgttcctccaacaatcaagtcctcaggcctttctgagagagttgtggtaaaatacaagcctgtcgccttgcagtgcatagccaatgggattccaaatccttccattacatggttaaaagatgaccagcctgtgaacactgcccaaggaaaccttaaaatacagtcttctggtcgagttctacaaattgccaaaaccctgttggaagatgctggcagatacacatgtgtggctaccaacgcagctggagaaacacaacagcacattcaactgcatgttcatgaaccacctagtctggaagatgctggaaaaatgctgaatgagactgtgttggtgagcaaccctgtacagctggagtgtaaggcagctggaaatcctgtgcctgttattacatggtacaaagataatcgtctactctcaggttccaccagcatgactttcttgaacagaggacagatcattgatattgaaagtgcccagatctcagatgctggcatatataaatgcgtggccatcaactcagctggagctacagagttattttacagtctgcaagttcatgtggccccatcaatttctggcagcaataacatggtggcagtggtggttaataacccggtgaggttagaatgtgaagccagaggtattcctgccccaagtctgacctggttgaaagatgggagtcctgtttctagtttttctaatggattacaggttctctctggtggtcgaatcctagcattgaccagtgcacaaatcagcgacacaggaaggtacacctgcgtggcagtgaatgctgctggagaaaagcaaagggacattgacctccgagtatatgttccgccaaatattatgggagaagaacagaatgtctctgtcctcattagccaagctgtggaattactatgtcaaagtgatgctattcccccacctactcttacttggttaaaagacggccaccccttgctgaagaaaccaggcctcagtatatctgaaaatagaagtgtgttaaagattgaagatgctcaggttcaagacactggtcgttacacttgtgaagcaacaaatgttgctggaaaaactgaaaaaaactacaatgtcaacatttgggtccccccaaatattggtggttctgatgaacttactcaacttacagtcattgaagggaatctcattagtctgttgtgtgaatcaagtggtattccacccccaaatctcatctggaagaagaaaggctctccagtgctgactgattccatggggcgagttagaattttatctgggggcaggcaattacaaatttcaattgctgaaaagtctgatgcagcactctattcatgtgtggcgtcgaatgttgctgggactgcaaagaaagaatacaatctgcaagtttacattagaccaaccataaccaacagtggcagccaccctactgaaattattgtgacccgagggaagagtatctccttggagtgtgaggtgcagggtattccaccaccaacagtgacctggatgaaagatggccaccccttgatcaaggcaaagggagtagaaatactggatgaaggtcacatccttcagctgaagaacattcatgtatctgacacaggccgttatgtgtgtgttgctgtgaatgtagcaggaatgactgacaaaaaatatgacttaagtgtccatgctcctccaagcatcataggaaaccacaggtcacctgaaaatattagtgtggtagaaaagaactcagtatctttgacttgtgaagcttctggaattcccctgccttccataacctggttcaaagatgggtggcctgtcagccttagcaattctgtgaggattctttcaggaggcaggatgctacggctgatgcagaccacaatggaagatgctggccaatatacttgcgttgtaaggaatgcagctggtgaagaaagaaaaatctttgggctttcagtattagtaccacctcatattgtgggtgaaaatacattggaagatgtgaaggtaaaagagaaacagagtgttacgctgacttgtgaagtgacagggaatccagtgccagaaattacatggcacaaagatgggcagcccctccaagaagatgaagcccatcacattatatctggtggccgttttcttcaaattaccaatgtccaggtgccacacactggaagatatacatgtttggcttccagtccagctggccacaagagcaggagcttcagtcttaatgtatttgtatctcctacaattgctggtgtaggtagtgatggcaaccctgaagatgtcactgtcatccttaacagccctacatctttggtctgtgaagcttattcatatcctccagctaccatcacctggtttaaggatggcactcctttagaatctaaccgaaatattcgtattcttccaggaggcagaactctgcagatcctcaatgcacaggaggacaatgctggaagatactcttgtgtagccacgaatgaggctggagaaatgataaagcactatgaagtgaaggtgtacattccacccataatcaataaaggggacctttgggggccaggtctttcccctaaagaagtgaagatcaaagtaaacaacactctgaccttggaatgtgaagcgtatgcaattccttctgcctccctcagctggtacaaggatggacagccccttaaatccgatgatcatgttaatattgctgcgaatggacacacacttcaaataaaggaggctcaaatatcagacaccggacgatatacttgtgtagcatctaacattgcaggtgaagatgagttggattttgatgtgaatattcaagttcctccaagttttcagaaactctgggaaataggaaacatgctagatactggcaggaatggtgaagccaaagatgtgatcatcaacaatcccatttctctttactgtgagacaaatgctgctccccctcctacactgacatggtacaaagatggccaccctctgacctcaagtgataaagtattgattttgccaggagggcgagtgttgcagattcctcgggctaaagtagaagatgctgggagatacacatgtgtggctgtgaatgaggctggagaagattcccttcaatatgatgtccgtgtactcgtgccgccaattatcaagggagcaaatagtgatctccctgaagaggtcaccgtgctggtgaacaagagtgcactgatagagtgtttatccagtggcagcccagcaccaaggaattcctggcagaaagatggacagcccttgctagaagatgaccatcataaatttctatctaatggacgaattctgcagattctgaatactcaaataacagatatcggcaggtatgtgtgtgttgctgagaacacagctgggagtgccaaaaaatattttaacctcaatgttcatgttcctccaagtgtcattggtcctaaatctgaaaatcttaccgtcgtggtgaacaatttcatctctttgacctgtgaggtctctggttttccacctcctgacctcagctggctcaagaatgaacagcccatcaaactgaacacaaatactctcattgtgcctggtggtcgaactctacagattattcgggccaaggtatcagatggtggtgaatacacttgtatagctatcaatcaagctggcgaaagcaagaaaaagttttccctgactgtttatgtgcccccaagcattaaagaccatgacagtgaatctctttctgtagttaatgtaagagagggaacttctgtgtctttggagtgtgagtcgaacgctgtgccacctccagtcatcacttggtataagaatgggcggatgataacagagtctactcatgtggagattttagctgatggacaaatgctacacattaagaaagctgaggtatctgacacaggccagtatgtatgtagagctataaatgtagcaggacgggatgataaaaatttccacctcaatgtatatgtgccacccagtattgaaggacctgaaagagaagtgattgtggagacgatcagcaatcctgtgacattaacatgtgatgccactgggatcccacctcccacgatagcatggttaaagaaccacaagcgcatagaaaattctgactcactggaagttcgtattttgtctggaggtagcaaactccagattgcccggtctcagcattcagatagtggaaactatacatgtattgcttcaaatatggagggaaaagcccagaaatattactttctttcaattcaagttcctccaagtgttgctggtgctgaaattccaagtgatgtcagtgtccttctaggagaaaatgttgagctggtctgcaatgcaaatggcattcctactccacttattcaatggcttaaagatggaaagcccatagctagtggtgaaacagaaagaatccgagtgagtgcaaatggcagcacattaaacatttatggagctcttacatctgacacggggaaatacacatgtgttgctactaatcccgctggagaagaagaccgaatttttaacttgaatgtctatgttacacctacaattaggggtaataaagatgaagcagagaaactaatgactttagtggatacttcaataaatattgaatgcagagccacagggacgcctccaccacagataaactggctgaagaatggacttcctctgcctctctcctcccatatccggttactggcagcaggacaagttatcaggattgtgagagctcaggtgtctgatgtcgctgtgtatacttgtgtggcctccaacagagctggggtggataataagcattacaatcttcaagtgtttgcaccaccaaatatggacaattcaatggggacagaggaaatcacagttctcaaaggtagttccacctctatggcatgcattactgatggaaccccagctcccagtatggcctggcttagagatggccagcctctggggcttgatgcccatctgacagtcagcacccatggaatggtcctgcagctcctcaaagcagagactgaagattcgggaaagtacacctgcattgcctcaaatgaagctggagaagtcagcaagcactttatcctcaaggtcctagaaccacctcacattaatggatctgaagaacatgaagagatatcagtaattgttaataacccacttgaacttacctgcattgcttctggaatcccagcccctaaaatgacctggatgaaagatggccggccccttccacagacggatcaagtgcaaactctaggaggaggagaggttcttcgaatttctactgctcaggtggaggatacaggaagatatacatgtctggcatccagtcctgcaggagatgatgataaggaatatctagtgagagtgcatgtacctcctaatattgctggaactgatgagccccgggatatcactgtgttacggaacagacaagtgacattggaatgcaagtcagatgcagtgcccccacctgtaattacttggctcagaaatggagaacggttacaggcaacacctcgagtgcgaatcctatctggagggagatacttgcaaatcaacaatgctgacctaggtgatacagccaattatacctgtgttgccagcaacattgcaggaaagactacaagagaatttattctcactgtaaatgttcctccaaacataaaggggggcccccagagccttgtaattcttttaaataagtcaactgtattggaatgcatcgctgaaggtgtgccaactccaaggataacatggagaaaggatggagctgttctagctgggaatcatgcaagatattccatcttggaaaatggattccttcatattcaatcagcacatgtcactgacactggacggtatttgtgtatggccaccaatgctgctggaacagatcgcaggcgaatagatttacaggtccatgttcctccatctattgctccgggtcctaccaacatgactgtaatagtaaatgttcaaactactctggcttgtgaggctactgggataccaaaaccatcaatcaattggagaaaaaatgggcatcttcttaatgtggatcaaaatcagaactcatacaggctcctttcttcaggttcactagtaattatttccccttctgtggatgacactgcaacctatgaatgtactgtgacaaacggtgctggagatgataaaagaactgtggatctcactgtccaagttccaccttccatagctgatgagcctacagatttcctagtaaccaaacatgccccagcagtaattacctgcactgcttcgggagttccatttccctcaattcactggaccaaaaatggtataagactgcttcccaggggagatggctatagaattctgtcctcaggagcaattgaaatacttgccacccaattaaaccatgctggaagatacacttgtgtcgctaggaatgcggctggctctgcacatcgacacgtgacccttcatgttcatgagcctccagtcattcagccccaaccaagtgaactacacgtcattctgaacaatcctattttattaccatgtgaagcaacagggacacccagtcctttcattacttggcaaaaagaaggcatcaatgttaacacttcaggcagaaaccatgcagttcttcctagtggcggcttacagatctccagagctgtccgagaggatgctggcacttacatgtgtgtggcccagaacccggctggtacagccttgggcaaaatcaagttaaatgtccaagttcctccagtcattagccctcatctaaaggaatatgttattgctgtggacaagcccatcacgttatcctgtgaagcagatggcctccctccgcctgacattacatggcataaagatgggcgtgcaattgtggaatctatccgccagcgcgtcctcagctctggctctctgcaaatagcatttgtccagcctggtgatgctggccattacacgtgcatggcagccaatgtagcaggatcaagcagcacaagcaccaagctcaccgtccatgtaccacccaggatcagaagtacagaaggacactacacggtcaatgagaattcacaagccattcttccatgcgtagctgatggaatccccacaccagcaattaactggaaaaaagacaatgttcttttagctaacttgttaggaaaatacactgctgaaccatatggagaactcattttagaaaatgttgtgctggaggattctggcttctatacctgtgttgctaacaatgctgcaggtgaagatacacacactgtcagcctgactgtgcatgttctccccacttttactgaacttcctggagacgtgtcattaaataaaggagaacagctacgattaagctgtaaagctactggtattccattgcccaaattaacatggaccttcaataacaatattattccagcccactttgacagtgtgaatggacacagtgaacttgttattgaaagagtgtcaaaagaggattcaggtacttatgtgtgcaccgcagagaacagcgttggctttgtgaaggcaattggatttgtttatgtgaaagaacctccagtcttcaaaggtgattatccttctaactggattgaaccacttggtgggaatgcaatcctgaattgtgaggtgaaaggagaccccaccccaaccatccagtggaacagaaagggagtggatattgaaattagccacagaatccggcaactgggcaatggctccctggccatctatggcactgttaatgaagatgccggtgactatacatgtgtagctaccaatgaagctggggtggtggagcgcagcatgagtctgactctgcaaagtcctcctattatcactcttgagccagtggaaactgttattaatgctggtggcaaaatcatattgaattgtcaggcaactggagagcctcaaccaaccattacatggtcccgtcaagggcactctatttcctgggatgaccgggttaacgtgttgtccaacaactcattatatattgctgatgctcagaaagaagatacctctgaatttgaatgtgttgctcgaaacttaatgggttctgtccttgtcagagtgccagtcatagtccaggttcatggtggattttcccagtggtctgcatggagagcctgcagtgtcacctgtggaaaaggcatccaaaagaggagtcgtctgtgcaaccagccccttccagccaatggtgggaagccctgccaaggttcagatttggaaatgcgaaactgtcaaaataagccttgtccagtggatggtagctggtcggaatggagtctttgggaagaatgcacaaggagctgtggacgcggcaaccaaaccaggaccaggacttgcaataatccatcagttcagcatggtgggcggccatgtgaagggaatgctgtggaaataattatgtgcaacattaggccttgcccagttcatggagcatggagcgcttggcagccttggggaacatgcagcgaaagttgtgggaaaggtactcagacaagagcaagactttgtaataacccaccaccagcgtttggtgggtcctactgtgatggagcagaaacacagatgcaagtttgcaatgaaagaaattgtccaattcatggcaagtgggcgacttgggccagttggagtgcctgttctgtgtcatgtggaggaggtgccagacagagaacaaggggctgctccgaccctgtgccccagtatggaggaaggaaatgcgaagggagtgatgtccagagtgatttttgcaacagtgacccttgcccaacccatggtaactggagtccttggagtggctggggaacatgcagccggacgtgtaacggagggcagatgcggcggtaccgcacatgtgataaccctcctccctccaatgggggaagagcttgtgggggaccagactcccagatccagaggtgcaacactgacatgtgtcctgtggatggaagttggggaagctggcatagttggagccagtgctctgcctcctgtggaggaggtgaaaagactcggaagcggctgtgcgaccatcctgtgccagttaaaggtggccgtccctgtcccggagacactactcaggtgaccaggtgcaatgtacaagcatgtccaggtgggccccagcgagccagaggaagtgttattggaaatattaatgatgttgaatttggaattgctttccttaatgccacaataactgatagccctaactctgatactagaataatacgtgccaaaattaccaatgtacctcgtagtcttggttcagcaatgagaaagatagtttctattctaaatcccatttattggacaacagcaaaggaaataggagaagcagtcaatggctttaccctcaccaatgcagtcttcaaaagagaaactcaagtggaatttgcaactggagaaatcttgcagatgagtcatattgcccggggcttggattccgatggttctttgctgctagatatcgttgtgagtggctatgtcctacagcttcagtcacctgctgaagtcactgtaaaggattacacagaggactacattcaaacaggtcctgggcagctgtacgcctactcaacccggctgttcaccattgatggcatcagcatcccatacacatggaaccacaccgttttctatgatcaggcacagggaagaatgcctttcttggttgaaacacttcatgcatcctctgtggaatctgactataaccagatagaagagacactgggttttaaaattcatgcttcaatatccaaaggagatcgcagtaatcagtgcccctccgggtttaccttagactcagttggacctttttgtgctgatgaggatgaatgtgcagcagggaatccctgctcccatagctgccacaatgccatggggacttactactgctcctgccctaaaggcctcaccatagctgcagatggaagaacttgtcaagatattgatgagtgtgctttgggtaggcatacctgccacgctggtcaggactgtgacaatacgattggatcttatcgctgtgtggtccgttgtggaagtggctttcgaagaacctctgatgggctgagttgtcaagatattaatgaatgtcaagaatccagcccctgtcaccagcgctgtttcaatgccataggaagtttccattgtggatgtgaacctgggtatcagctcaaaggcagaaaatgcatggatgtgaacgagtgtagacaaaatgtatgcagaccagatcagcactgtaagaacacccgtggtggctataagtgcattgatctttgtccaaatggaatgaccaaggcagaaaatggaacctgtattgatattgatgaatgtaaagatgggacccatcagtgcagatataaccagatatgtgagaatacaagaggcagctatcgttgtgtatgcccaagaggttatcggtctcaaggagttggaagaccctgcatggacattaatgaatgtgaacaagtgcctaaaccttgtgcacatcagtgctccaacacccccggcagcttcaagtgtatctgtccaccaggacaacatttattaggggacgggaaatcttgcgctggattggagaggctgccaaattatggcactcaatacagtagctataaccttgcacggttctcccctgtgagaaacaactatcaacctcaacagcattacagacagtactcacatctctacagctcctactcagagtatagaaacagcagaacatctctctccaggactagaaggactattaggaaaacttgccctgaaggctctgaggcaagccatgacacatgtgtagatattgatgaatgtgaaaatacagatgcctgccagcatgagtgtaagaatacctttggaagttatcagtgcatctgcccacctggctatcaactcacacacaatggaaagacatgccaagatatcgatgaatgtctggagcagaatgtgcactgtggacccaatcgcatgtgcttcaacatgagaggaagctaccagtgcatcgatacaccctgtccacccaactaccaacgggatcctgtttcagggttctgcctcaagaactgtccacccaatgatttggaatgtgccttgagcccatatgccttggaatacaaactcgtctccctcccatttggaatagccaccaatcaagatttaatccggctggttgcatacacacaggatggagtgatgcatcccaggacaactttcctcatggtagatgaggaacagactgttccttttgccttgagggatgaaaacctgaaaggagtggtgtatacaacacgaccactacgagaagcagagacctaccgcatgagggtccgagcctcatcctacagtgccaatgggaccattgaatatcagaccacattcatagtttatatagctgtgtccgcctatccatactaaggaactctccaaagcctattccacatatttaaaccgcattaatcatggcaatcaagcccccttccagattactgtctcttgaacagttgcaatcttggcagcttgaaaatggtgctacactctgttttgtgtgccttccttggtacttctgaggtattttcatgatcccaccatggtcatatcttgaagtatggtctagaaaagtcccttattattttatttattacactggagcagttacttcccaaagattattctgaacatctaacaggacatatcagtgatggtttacagtagtgtagtacctaagatcattttcctgaaagccaaaccaaacaacgaaaaacaagaacaactaattcagaatcaaatagagtttttgagcatttgactatttttagaatcataaaattagttactaagtattttgatcaaagcttataaaataacttacggagatttttgtaagtattgatacattataataggacttgcctattttcatttttaagaagaaaaacaccactcattttataaaatatagtacagctactataaggcttgtttgatcccaaatggtgcttatcttgattgaacattcagaacaaggatattattttcagtgattttgtgagatcagctgaaccacttatgataataataataaaaaagactgctttgccctcacgtcagttgtacatggcatggaactttaaaaattttaatataaactttcatccagttagcttcataacttttacgttccagaattttgtttattttcctgtcaatgaaagcaatttttaaagataccagtgggacagatttggttttttaaaaatctcatgtgttcaaattaacataaatattacacgtcaatacactgtacatggtggtaatagactctaagcaattgccaagatgtattctatttttatgaagtgtatatatattaccttagtgtgcattttctatataatatcttgatggactcttttataaaattattttataaaaaacaatgttacactaaaatcagcctaaataaattttcacaactttttttcataa

SEQ ID NO: 140130 - DNA, 720 bp, Homo sapiens
  Payload ID: 7478
  Gene Symbol: HMCN1
  Gene Name: hemicentin 1
  ENST ID: ENST00000414277
  CDS Start-End: 1-720
gccataggaagtttccattgtggatgtgaacctgggtatcagctcaaaggcagaaaatgcatggatgtgaacgagtgtagacaaaatgtatgcagaccagatcagcactgtaagaacacccgtggtggctataagtgcattgatctttgtccaaatggaatgaccaaggcagaaaatggaacctgtattgatattgatgaatgtaaagatgggacccatcagtgcagatataaccagatatgtgagaatacaagaggcagctatcgttgtgtatgcccaagaggttatcggtctcaaggagttggaagaccctgcatggatattgatgaatgtgaaaatacagatgcctgccagcatgagtgtaagaatacctttggaagttatcagtgcatctgcccacctggctatcaactcacacacaatggaaagacatgccaagatatcgatgaatgtctggagcagaatgtgcactgtggacccaatcgcatgtgcttcaacatgagaggaagctaccagtgcatcgatacaccctgtccacccaactaccaacgggatcctgtttcagggttctgcctcaagaactgtccacccaatgatttggaatgtgccttgagcccatatgccttggaatacaaactcgtctccctcccatttggaatagccaccaatcaagatttaatccggctggttgcatacacacaggatggagtgatgcatccc

SEQ ID NO: 140131 - DNA, 926 bp, Homo sapiens
  Payload ID: 7479
  Gene Symbol: HMCN2
  Gene Name: hemicentin 2
  ENST ID: ENST00000428715
  CDS Start-End: 1-926
gcctggccagctgttcgtgggctccacacagcgcttcttccagggcggcctcccctcgttcctacgctgcaaccacagcatccagtacaacgcggcccggggcccccagccccagctggtgcagcacctgcgggcctcagctatcagctcggcctttgatccagaggccgaggccctgcgcttccagctcgctacagccctgcaggcggaggagaacgaggtcggctgccccgagggctttgagctggactcccagggagcgttttgtgtggatgtggacgagtgtgcgtgggatgctcacctctgccgagagggacagcgctgtgtgaacctgctcgggtcctaccgctgcctccccgactgtgggcctggcttccgggtggctgatggggccggctgtgaagatgtggacgaatgcctggaggggttggacgactgtcactacaaccagctctgcgagaacaccccaggcggtcaccgctgcagctgccccaggggttaccggatgcagggccccagcctgccctgcctagatgtcaatgagtgcctgcagctgcccaaggcctgcgcctaccagtgccacaacctccagggcagctaccgctgcctgtgccccccaggccagaccctccttcgcgacggcaaggcctgcacctcactggagcggaatggacaaaatgtgaccaccgtcagccaccgaggccctctattgccctggctgcggccctgggcctcgatccccggtacctcctaccacgcctgggtctctctccgtccgggtcccatggccctgagcagtgtgggccgggcctggtgccctcctggtttcatcaggcagaacggagtctgcacagaccttgacgagtgccgcgtgaggaacctgtgtcagcacgcctgccgcaacactgagggcagctaccagtgcc

SEQ ID NO: 140132 - DNA, 1920 bp, Homo sapiens
  Payload ID: 7479
  Gene Symbol: HMCN2
  Gene Name: hemicentin 2
  ENST ID: ENST00000611173
  CDS Start-End: 60-1847
tgtgtgaggcatctggggttcccccgccccgagtcatctggtatcgagggggtcttgaaatgatcctggcccctgagggctccagctctgggaagctgcggatcccggcggctcaggagagggatgctggcacctacacctgccgggctgtcaatgagttgggtgacgcctctgcagaaatccagctggcggttggacatgcgccccagctgacggagctgccccgggatgtcactgtggaactggggaggagtgccctcttggcatgccgggcaacaggccgcccgcccccgacggtcacctggcgccgcggagatggccagcctctgggactcaggctgggggccgggcgaggcagtaggtctcggcagccggattcgggagtgctgttctttgaaagtgtggccccagaagaccaggccccatatgtctgtgaagctcgaaacgtctttgggaaggtccaggctgaggcccggctcatcgtcactggtcacgccccgccacagatcgccagcagcgcccccaccgtccgggtcctggaggggcagcccgtgtccctgccctgcatcgtcctagctgggcggcccctcccggaaaggcactggctcaaggacggccggcccctcccacctggcagccggcattccatccgagcagacggcagcctccaccttgaccgagcattgcaggagcacgcggggaggtacagctgtgtggccaccaacacggccggctctcagcaccgggacgtggagctggtggtccaggtgccacctagaatccatcccactgccacccaccatatcaccaatgaaggggttgcggcctctcttccctgcgtcgcttcaggagttcccgcccccaccatcacgtggaccaaggaaaccaatgccctgacctccagaggtccccactacaatgtgagtaaggagggcaccctgctcatcgcccagccgtctgcccaggacgcaggggcctacgtctgcacggccaccaacaccgtgggcttttctagccaggagatgcgactttctgtcaacaccaaacccaggatccatatgaacgggtcacgtaatgcagatgtgcctctgcaagtcacagcgaaggctggcgaagaggtgaccctggactgcgaggccaagggctccccacccccactggtcacctggacgaaggactcccgccctgtaccgcccatcaccaacaggtatggcctcctcccgtctggctccctgcgtctggcccaggtgcaggtgggtgacagcggccactacgagtgcacagccagtaaccccgccgggtccgcctcccatcgctacgtccttggggtgcaaggtaggaccagctggcagccccagtccctccctgtcccccatcaccctgcctgtctctcaggtctctcagtgcccctcctgcagcccacgcccaggtctgtcaggctctgtcacctctccctccgtgcgcctctgccacctccttttgccacccccacttcctgtctctctcaggcctgtctctcctcctccaccctttctctccacctctccccataccccttgaggggtcctggagacgctgttcagaggcccccaacaacacagggcagagcacagtggggacttgggtttgggaggacaggggtcagaggggaacccatgaaggtgggtctgagagggtctctgcctggtacgcgaggcccagctgggagcccagggtgtggcgatgggaagaggcctgtgaggtgccacagagcccctcctgctgggagcatcttaatgcccccaagaggcccttctgagcccctgctcccaccactgccatcaacaaggcactttgtgcacctataacagtgggtgccgctctctctccatgtatcccttcctctagtccaaggcccctacgtaccccactgtgcctctg

SEQ ID NO: 140133 - DNA, 15610 bp, Homo sapiens
  Payload ID: 7479
  Gene Symbol: HMCN2
  Gene Name: hemicentin 2
  ENST ID: ENST00000624552
  CDS Start-End: 1-15180
atgcccggggcgccgctcctgcggctgctgaccgcggtctctgcggcagtggcagtggcagtggccggggcgcccgggacggtaatgccccccaccacgggggacgccaccctggccttcgtcttcgacgtcaccggctccatgtgggacgaactgatgcaggtgatcgatggcgcctcgcgcattctggaacgcagtctgagccgccgcagccaggccatcgccaactacgcgctggtgcccttccacgacccagatattggcccagtgaccctcacggcggaccccacagtgtttcagagggagctgagagaactctacgtgcagggaggtggtgactgcccggagatgagtgtgggggccattaaggctgccgtggaggttgccaaccccggatccttcatctacgtcttttcggatgcccgcgccaaagactatcacaagaaggaagagctgctgcggctcctgcagctcaagcaatcacaggtggtctttgtgctgacgggggactgtggcgaccgcacccatcctggctacctggcttatgaggagatcgctgccaccagctctgggcaggtgttccacctggacaagcagcaagtgacagaggtgctgaagtgggtggagtcagcgatccaggcctccaaggtgcacctgctgtccacagaccacgaggaggagggggagcacacatggagactcccctttgaccccagcctgaaggaggtcaccatctcattgagtgggccagggcctgagattgaagtccaagatccgctggggaggatcctgcaggaggacgagggcctcaacgtgcttctcaacatccctgactcggccaaggtcgtagcctttaagcctgagcatccggggctgtggtccatcaaggtctatagcagtggccgccattcagtgaggatcacaggcgtcagcaacattgacttccgagccggcttctccactcagcccttgctggacctcaaccacaccctcgagtggcccttgcaaggagtccccatctccctggtgatcaattccacgggcctgaaggcacccggccgcctagactcggtggagctggcacaaagctcagggaagcccctcctgactctgcccacgaagcccctctccaatggctccacccatcagctgtggggcgggccgcccttccacacccccaaggagcgcttctacctcaaggtgaagggcaaggaccatgagggaaaccccctccttcgtgtctctggagtgtcctacagtggggtggccccaggcgctcccctcgtcagcatggcccccaggatccatggctacctgcaccagcccctgctggtctcctgctcggtgcacagtgcccttcccttccggctgcagctgcggcgaggtgaagccaggctgggcgaagagaggcactttcaggagtcgggaaacagcagctgggagatcctgcgggcctccaaggccgaggagggcacgtacgagtgcacagccgtcagcagggctgggaccgggcgagcaaaggcccagattgttgtcacagaccccccgccgcagctggtccctgctcccaacgtgaccgtgtccccaggggagactgccgtcctatcctgccgggtcctaggcgaggccccctacaacctgacgtgggtccgggactggcgagtcctgccggcctcgacgggccgagttgcccagctggctgacctgtccctggagatcagtggcatcatccccacagacggcgggaggtaccagtgtgtggccagcaatgccaatggggtcacaagggcatccgtctggctcctggtgcgagaggccccacaggtcagcatccacaccagctcccagcacttctcccaaggtgtggaggtgaaggtcagctgctcagcctctggataccccacaccccacatctcctggagccgtgagagccaagccctacaagaggacagcagaatccatgtggacgcacagggaaccctgattattcagggggtagccccagaggatgctgggaattacagctgccaggcgactaatgaggttggcactgaccaggagacggtcaccctctactacacagacccaccgtcggtctctgctgtaaatgccgtggtgctggtggccgttggggaggaggctgtgttggtgtgtgaggcatctggggttcccccgccccgagtcatctggtatcgagggggtcttgaaatgatcctggcccctgagggctccagctctgggaagctgcggatcccggcggctcaggagagggatgctggcacctacacctgccgggctgtcaatgagttgggtgacgcctctgcagaaatccagctggcggttggacatgcgccccagctgacggagctgccccgggatgtcactgtggaactggggaggagtgccctcttggcatgccgggcaacaggccgcccgcccccgacggtcacctggcgccgcggagatggccagcctctgggactcaggctgggggccgggcgaggcagtaggtctcggcagccggattcgggagtgctgttctttgaaagtgtggccccagaagaccaggccccatatgtctgtgaagctcgaaacgtctttgggaaggtccaggctgaggcccggctcatcgtcactggtcacgccccgccacagatcgccagcagcgcccccaccgtccgggtcctggaggggcagcccgtgtccctgccctgcatcgtcctagctgggcggcccctcccggaaaggcactggctcaaggacggccggcccctcccacctggcagccggcattccatccgagcagacggcagcctccaccttgaccgagcattgcaggagcacgcggggaggtacagctgtgtggccaccaacacggccggctctcagcaccgggacgtggagctggtggtccaggtgccacctagaatccatcccactgccacccaccatatcaccaatgaaggggttgcggcctctcttccctgcgtcgcttcaggagttcccgcccccaccatcacgtggaccaaggaaaccaatgccctgacctccagaggtccccactacaatgtgagtaaggagggcaccctgctcatcgcccagccgtctgcccaggacgcaggggcctacgtctgcacggccaccaacaccgtgggcttttctagccaggagatgcgactttctgtcaacaccaaacccaggatccatatgaacgggtcacgtaatgcagatgtgcctctgcaagtcacagcgaaggctggcgaagaggtgaccctggactgcgaggccaagggctccccacccccactggtcacctggacgaaggactcccgccctgtaccgcccatcaccaacaggtatggcctcctcccgtctggctccctgcgtctggcccaggtgcaggtgggtgacagcggccactacgagtgcacagccagtaaccccgccgggtccgcctcccatcgctacgtccttggggtgcaagtcccccctcaggtgcagccaggccctcgggttctgaaggtgctggtgggagaagccctggatctgaactgtgtggctgagggcaacccagagccccagctgagctggtccaaggatggcgtggtgttgcagggccgggggcctcagggctccgtccacttcgcagccatcagaacctctgatgccgggaggtaccgctgtgaagcctccaacagcgccggggtggatgcctgggaggtggagctcagggtgctggagccaccacactggggggctgatgagaccagcggcctgctggagcgagtggccggagagaatgccagcctgccgtgccctgccagaggaacgcccaagccgcaggtcacatggaggaagggcccgtcctcggagcccctgcatggccagccaggtgtggcagtgctggaggaggggtctctgttcctggcctccgtctcacctgcggatagtggagactacgagtgccaggccaccaacgaggtgggctccacgtccaggagagccaagctggtggtctatgtgccccccagcatccgggaggacgggcgcaaggccaacgtgtcgggtatggccgggcagtccctgacgctggagtgtgacgcgaacggctttccagtccctgagatcgtgtggctgaaggacgcgcagctgattcctaaggtgggcggccaccgcctcctggacgagggccagtccctccacttccccaggatccaggagggtgattctgggctctactcctgccgggcagagaaccaggctggcaccgcccagagggacttccatctccttgtgctcacccctccttccgtgcttggagccggggccgctcaggaggtgctaggattggccggtgcagacgtggagctgcagtgttggacctcaggggtccccacgccccaggtggagtggaccaaggacaggcagcctgtccttccgggaggccctcacctgcaggtccaggaggatggccaggttctcaggatcaccggcagtcacgtgggggatgagggacgataccagtgcgtggccttcagcccagctggtcagcaggccagggacttccagctccgagttcatgcgccccccactatctggggctccaacgagacaggcgaggtggccgtcatggaggaccacctagtgcagctcctgtgtgaggctcgaggagtgcccaccccaaacatcacctggttcaaggacggggccctgctccccaccagcaccaaggtggtctacactaggggcggtcggcagttgcagctggggagggcccagagctccgatgccggcgtctacacctgcaaggccagcaatgctgtgggggccgcagagaaggccaccaggctggatgtttatgtcccacctaccatcgagggcgccggtggaagaccatacgtggtgaaggctgtggctgggaggcctgtggcgctggagtgcgtggccagaggccacccgtcccccaccctctcctggcaccacgaggggctgcccgtggcagagagcaacgagtcgcggctggagacagacgggagtgtgctgaggctggagagcccgggggaggcatccagtggcctgtacagctgtgtggccagcagtcctgccggggaagccgtcctgcagtactccgtggaggttcaggtgcccccacagctcctggtggctgaaggcttgggacaggtgaccaccatcgtgggacagcccctggaacttccctgccaggcctcaggctccccagtacccactatccagtggctgcagaatggccgcccagccgaggagctggctggggtgcaggtggcctcgcaggggaccacactgcacattgaccatgtggagctggaccactcaggcctcttcgcctgccaggccaccaatgaggcgggcactgccggggccgaggtggaggtgtctgtgcatgagttcccatcggtcagtatcattgggggtgagaacatcacagctcctttcctgcagcctgtgaccctccagtgcataggggatggggtgcccaccccaagcctccgttggtggaaggatggtgtagccctggcagcctttggggggaacctacagattgagaaggtggacctgagggacgagggcatctacacttgtgctgctaccaacctggctggggagagcaagagggaagtggcgctgaaagttttggtgccccccaacatcgagccaggcccagtcaacaaggcagtgctggaaaatgcctcagtgaccttggagtgtctggcttcgggcgtgccccctcctgatgtctcctggttcaagggccaccaacctgtctcttcatggatgggagtgacagtatcagtggatgggagagttctccgcattgagcaagcccagctttctgatgctgggagctaccgctgtgtggcatccaatgtggcaggtagcacagagctgcggtatggcctacgggtcaatgtgccccctcgaatcacactgccacccagcctgccaggccctgtgttggtcaacacccctgtccggctgacctgcaatgccaccggtgcccccagccccacactgatgtggctgaaggatggaaaccctgtgtcccctgcagggacccctggcctgcaggtcttccctgggggccgggtcctcaccttggctagtgcccgggcctccgactctgggaggtactcctgcgtggctgtgagcgcggtgggcgaggaccgccaggatgttgtcctgcaagtccacatgcccccgagtatccttggagaagagctgaatgtgtccgttgtggccaatgagtcagtggccctggagtgccagagccacgccatgccccctcctgtgctgagctggtggaaggacgggcggcccctggaaccacggcctggagtccacctctccgcagacaaagccttgctgcaggtggacagagccgatgtgtgggatgcgggccattacacctgtgaggcactgaaccaggccggccactcagagaaacactacaatctgaacgtctgggttgctccagtgttccccttgagggaatcccacaccctgactgtgagagaggggcaccctaccaggctgtcctgcgaatgccggggtgtccccttccccaagatctcctggaggaaggacggtcaacccctccccggggagggggctggcctccagcacgtgtcggctgtggggaggctgttgtacctgggacaggcccagctggctcaggaaggaacatacacctgtgaatgcagcaacgtggtggggaacagcagccaggacctgcagctggaggtgcacgttccccctcagattgccggtccccgggagcctcccacacaagtctctgtggtccaggatggagtggccactctggagtgcaacgccacagggaaaccccctccgacagtgacatgggagcgggacggccagcccgtgggggctgaactgggcctgcagctgcagaaccagggtcagagcctgcatgtggagcgggcccaggctgcccacactggacgctacagctgtgtggccgagaacctggctgggagggcagagaggaagtttgagctctccgtactggtgcccccagagctcattggagacttggacccgctgaccaacatcactgctgccttgcacagccccttaactctgctctgtgaagccatggggatcccacctccagccatccgctggttccgaggggaggagcctgtcagccccggggaggacacctacctgctggcaggtggctggatgctgaagatgactcagacacaggagcaagacagtggcctctactcatgcctggcaagcaacgaggctggggaggcacggaggaacttcagtgtggaggtgctggttcctcccagtattgagaacgaggacttggaggaggtgatcaaggtccttgatggacagactgcccatcttatgtgcaacgtcacaggccacccacagcccaagctcacatggttcaaagatggccggcctctggctaggggagatgctcaccacatctccccagacggagtcctcctgcaggtcctccaggcaaacctgtccagtgctggccactactcctgcattgcagccaacgctgttggggagaagaccaaacacttccagctcagtgtcctgttggctcccaccatcctgggaggggccgaggacagtgcagatgaggaggtgaccgtgactgtcaacaaccccatctctctgatctgcgaggccctggccttcccttcccccaacatcacctggatgaaggacggggccccgtttgaggcctccaggaacatccagctgctcccaggtacccacgggctgcagatcctgaatgcccagaaggaagatgctggccagtacacctgcgtggtcaccaatgagctcggggaggccgtgaaaaactaccatgtggaagtgctcatccccccttccatctccaaagacgaccccttggcggaggtcggcgtgaaggaggtgaagaccaaggtcaacagcaccttgaccttggagtgtgagagctgggctgtgcccccgcccaccatccgctggtacaaggatggacagcccgtgacccccagctcgcggctgcaggtcctgggtgaagggcgactgctccagatccagcccacacaggtctcagactcggggcggtacctgtgtgtggccaccaatgtggctggcgaggacgaccaggacttcaacgtgctcatccaggtgccccccatgttccagaaggtgggtgatttcagtgcagccttcgagatcctgtcccgggaggaggaggcccggggcggagtcacggaatacagggagatcgtggagaacaacccagcctacctgtactgcgacaccaacgcgatcccacccccggacctcacctggtacagagaggatcagcccctctcggccggggatgaggtgtctgtgctgcaaggaggccgggtcctgcagatccccctggtgcgggcagagaacgccgggaggtactcgtgcaaggcctccaacgaggtgggcgaggactggctgcactacgagctgctggtgctgaccccacctgtgatcctgggtgacacagaggagctggtggaagaggtgacagtcaatgccagcagcaccgtcagcctgcagtgcccggccctgggaaaccccgtgcccaccatctcatggctccagaatgggctgcctttctccccgagcccacggctgcaggtcctggaggacgggcaagtcttgcaggtttccacggcagaggtggccgacgccgccagctacatgtgtgtggccgagaaccaggcgggctccgctgagaagctcttcaccctcagggttcaagtcccgccacgaatcgcaggcctggacttggagcaggtcactgccatcctcaacagcagcgtctccctcccttgcgacgtccacgctcacccaaaccccgaggtcacgtggtacaaggacagccaggccctctccctgggtgaagaggtcttcctcctgcctggcacccacacgctgcagctggggagagcacggctgtcggactccgggatgtacacatgcgaagccctcaatgctgccggccgagaccagaagctggtgcagctcagtgttctggttcccccggccttcaggcaggctcccagaggtccccaggatgcggtcctggtgagggtcggggacaaagctgtcctgagctgcgagacagatgcgctccctgagccaactgtgacctggtacaaggatgggcagcccctggtcctggcacagcggacccaggctctgcggggtgggcagaggctggagatccaggaagcccaggtatcggataaaggtttatacagctgtaaagtcagcaacgtggctggggaggccgtgcggaccttcaccctcaccgtccaggtgcccccaacatttgagaaccccaagacagagacagtgagccaggtggctgggagccccctggtcctgacctgtgatgtgtccggggtccctgcacccacggtcacttggctgaaggacaggatgcctgtggagagcagcgcggtgcacggtgtggtctcccgggggggccgcctccagctgagccgcctgcaaccggcccaggcgggcacctacacgtgcgtggctgagaacacccaggctgaggcccgcaaggacttcgtggtagcagtgctggtggccccccggatccggagctcgggcgtggcgcgggagcaccatgtcttggaagggcaggaggtgcggctggactgtgaggccgatgggcagccgccgccggacgtggcctggctgaaggacggcagcccgctgggccaggacatgggcccccacctccggttctacctggacggcggctccctggtgctaaaaggcctgagggcctcggacgcgggtgcctacacctgcgtggcccacaacccagccggggaggacgccaggctgcacacggtgaatgtgctggttcctcccaccatcaagcagggagcagacggctcggggaccctggtgagcaggcctggggagctggtgaccatggtgtgccctgtgcggggctccccgcccatccacgtgagctggctcaaggacggcctgcccctcccgctctcccagcgcaccctcctccacggctctggccacaccctcaggatttccaaggtgcaattggcagacgctggcatcttcacctgtgtggccgcaagcccagctggcgtggcggacaggaacttcaccttgcaggtgcaggtgccccctgtcctggagccggtggagttccagaatgacgtggtggtggttcgtggctccctggtggaactcccgtgcgaggcccggggcgttcccctgcctctcgtgtcgtggatgaaggatggggaacccttgttgtcccagagcctcgagcaggggcccagcctgcagctggaggcagtgggagctggtgactcggggacctactcctgtgtggccgtgagcgaggcgggggaagccaggaggcatttccagctgaccgtcatggagccccctcacattgaggactcaggccagcctacagagctgtcgctgacccccggcgcccccatggagctcctctgtgatgcccagggcaccccccagcccaacatcacctggcataaggacgggcaggccctgaccaggctggagaacaacagcagagccacacgggtgctccgggtggagaatgtgcaggttagggatgctgggctgtacacttgtctggctgaaagccctgcaggtgcaattgagaagagcttccgggtcagggttcaagcccctccaaacattgttgggccccgaggcccccgctttgtggtcggcctggccccagggcagctggtcctggagtgttcggtggaggcagagccagcgcccaagatcacgtggcaccgagacggcattgtgctgcaggaggacgcccacacacaattcccggagcggggcaggttcctccagctgcaggccctgagcacggctgacagcggcgactacagctgcacagcccgcaacgccgcaggcagcactagtgtcgccttccgcgtggagatccacacggtgcccaccatccggtcaggaccacctgcagtgaacgtctcagtgaaccagacagccctgctgccttgccaggccgacggcgtgcccgcacccctcgtgagctggcggaaggacagggtccccctggatcccaggagccccaggtttgaaattctgcctgagggttccctgagaatccagccagtccttgcccaggacgccggccactacctctgcctggcatccaactctgctggctccgatcgtcaaggccgtgacctacgggtcttggccttgctgccctgcgaggccagcggctcccctaagcccctggtggtctggtggaaggacggacagaagctggacttccgcctgcagcagggcgcctaccggctcctgccctccaacgccctgctcctcacggcccccggcccccaggactcagcccagtttgaatgcgtggtgagcaatgaggtgggcgaggcccacaggctctaccaggtgaccgtccatgtgcctcccaccattgccgatgaccagacagacttcaccgtgaccatgatggcacctgtggtcctcacatgtcacagcacgggtataccagctccgaccgtgtcctggagcaaggcaggcgcccagctaggagctcgggggagtggctatcgtgtctcaccatcgggcgccctggagatcgggcaggccctccccatccacgcaggccgctacacctgctcagcccgcaactctgccggcgtagcccacaagcacgtcttcctcactgtgcaagcctccccggtggtgaagccgctgcccagcgtggttcgggcagtggcagaggaggaggtgctgctgccctgcgaggcctcaggcatcccccggccgaccatcacctggcagaaggaagggctcaacgtcgctactggagtgagtacccaggtcctaccaggcggacagctgcggattgcccatgccagcccagaggatgctggaaactatctctgcatcgctaagaacagtgcgggcagtgccatggggaagacgcggctggtggtgcaagtcccaccagtgatcgagaatggcctcccagacctgtccaccaccgaaggctcccacgccttcttgccttgcaaggcgaggggcagtcctgagcccaacatcacctgggacaaagatggccagcctgtgtcgggcgccgaggggaagttcaccatccagccttctggggagttgctggtgaagaacttggagggccaggacgcaggcacctatacctgtaccgctgagaacgccgtgggccgggcccgccgccgcgtgcacctcaccatcctggtactgcctgtgttcaccaccctgcctggggaccgcagcctgcgccttggggacaggctgtggcttcgctgtgcagcccggggcagccccacccctcgcattggctggactgtcaacgaccggccagtcacagaaggggtgtctgagcaggatggaggcagcacgctgcagcgggccgctgtctccagagaagacagcgggacctatgtctgctgggcggagaacagagtgggccgcacgcaggcggtcagcttcgtccacgtgaaggaggctcctgtcctacaaggggaggctttctcctacctggtggaacctgtaggaggcagcattcagctagactgtgtggtgcgtggagacccagtgccggacatccactggatcaaagatggccttccactgcggggcagccacctccggcaccagctgcagaatggctcgctgaccatccgcaggactgagagggacgatgcgggacggtaccagtgcctggcagagaatgagatgggcgtggcgaagaaagtggtgatcctcgtcctgcagagtgctccggtgttccaggtggagccccaggacatgacagtgagatctggggatgacgtggccctgcggtgccaggccactggagagcccacacccaccattgaatggctacaggcgggtcaacccttgcgggccagccggcggctccggaccctgcccgatgggagcctgtggctggagaacgtggagactggggatgcaggcacctacgactgcgtcgctcacaacctcctgggctctgccacagcccgggcgttcctggtcgtgagaggggagccccaggggagctggggcagcatgactggggtgataaatggccggaaatttggcgtggccacactcaacaccagcgtgatgcaggaggcacactccggggtcagcagcatccacagcagcatccgccatgtcccagcaaacgtggggcctctgatgcgggtgctcgtggtcaccatcgcccccatctactgggccctggccagagagagtggggaagccctgaatggccactctctgactgggggcaggttccggcaggagtcacacgtggagtttgctacaggggagctgctcacgatgacccaggtggcccggggtctggatcccgatggcctcctgctcctcgacgtggtggtcaatggcgttgtccccgagagcctggctgacgcagatcttcaagtgcaggactttgaggagcactacgtgcaaacagggcctggccagctgttcgtgggctccacacagcgcttcttccagggcggcctcccctcgttcctacgctgcaaccacagcatccagtacaacgcggcccggggcccccagccccagctggtgcagcacctgcgggcctcagctatcagctcggcctttgatccagaggccgaggccctgcgcttccagctcgctacagccctgcaggcggaggagaacgaggtcggctgccccgagggctttgagctggactcccagggagcgttttgtgtggacagggacgagtgctcaggaggccctagcccctgctcccatgcctgccttaatgcacccggccgcttctcctgcacctgccccactggcttcgccctggcctgggatgacaggaactgcagagatgtggacgagtgtgcgtgggatgctcacctctgccgagagggacagcgctgtgtgaacctgctcgggtcctaccgctgcctccccgactgtgggcctggcttccgggtggctgatggggccggctgtgaagatgtggacgaatgcctggaggggttggacgactgtcactacaaccagctctgcgagaacaccccaggcggtcaccgctgcagctgccccaggggttaccggatgcagggccccagcctgccctgcctagatgtcaatgagtgcctgcagctgcccaaggcctgcgcctaccagtgccacaacctccagggcagctaccgctgcctgtgccccccaggccagaccctccttcgcgacggcaaggcctgcacctcactggagcggaatggacaaaatgtgaccaccgtcagccaccgaggccctctattgccctggctgcggccctgggcctcgatccccggtacctcctaccacgcctgggtctctctccgtccgggtcccatggccctgagcagtgtgggccgggcctggtgccctcctggtttcatcaggcagaacggagtctgcacagaccttgacgagtgccgcgtgaggaacctgtgtcagcacgcctgccgcaacactgagggcagctaccagtgcctgtgccccgccggctaccgtctgctccccagcgggaagaactgccaggacatcaacgagtgcgaggaggagagcatcgagtgtggacccggccagatgtgcttcaacacccgtggcagctaccagtgtgtggacacaccctgtcctgccacctaccggcagggccccagccctgggacgtgcttccggcgctgctcgcaggactgcggcacgggcggcccctctacgctgcagtaccggctgctgccgctgcccctgggcgtgcgcgcccaccacgacgtggcccgcctcaccgccttctccgaggtcggcgtccccgccaaccgcaccgagctcagcatgctggagcccgacccccgcagccccttcgcgctgcgtccgctgcgcgcgggccttggcgcggtctacacccgtcgcgcgctcacccgcgccggcctctaccggctcaccgtgcgtgctgcggcaccgcgccaccaaagcgtcttcgtcttgctcatcgccgtgtccccctacccctactaaacgggagagggcattggcggccgccctggcgtgacccccgaggaaggggtcgaggagaagcttggtccacgccacctgctgtggcaagcggagcgtcatcgtctcccgccccgtgcgtcagcgagaccttgggtcaacacgaccctgcgcacagccttgacccccgacagcgaggacctgacctcacagagggaggcgtccagggcggcccttgggtggccagtcccgcaggcagggcccggggaagcccggatcagacctccaggtctgatccgcccctcagtgggagcgggacagggacacagggcacctggacgcgcgggagagggggcagaccccgcgttaggggtggcagcagctgtcgcccggccacacctggtggtgtcattctgaaccctgttgcaatataaagggatttttttttaaccaa

SEQ ID NO: 140134 - DNA, 4802 bp, Homo sapiens
  Payload ID: 7479
  Gene Symbol: HMCN2
  Gene Name: hemicentin 2
  ENST ID: ENST00000487727
  CDS Start-End: 1-1438
cgtccacgctcacccaaaccccgaggtcacgtggtacaaggacagccaggccctctccctgggtgaagaggtcttcctcctgcctggcacccacacgctgcagctggggagagcacggctgtcggactccgggatgtacacatgcgaagccctcaatgctgccggccgagaccagaagctggtgcagctcagtgttctggttcccccggccttcaggcaggctcccagaggtccccaggatgcggtcctggtgagggtcggggacaaagctgtcctgagctgcgagacagatgcgctccctgagccaactgtgacctggtacaaggatgggcagcccctggtcctggcacagcggacccaggctctgcggggtgggcagaggctggagatccaggaagcccaggtatcggataaaggtttatacagctgtaaagtcagcaacgtggctggggaggccgtgcggaccttcaccctcaccgtccaggtgcccccaacatttgagaaccccaagacagagacagtgagccaggtggctgggagccccctggtcctgacctgtgatgtgtccggggtccctgcacccacggtcacttggctgaaggacaggatgcctgtggagagcagcgcggtgcacggtgtggtctcccgggggggccgcctccagctgagccgcctgcaaccggcccaggcgggcacctacacgtgcgtggctgagaacacccaggctgaggcccgcaaggacttcgtggtagcagtgctggtggccccccggatccggagctcgggcgtggcgcgggagcaccatgtcttggaagggcaggaggtgcggctggactgtgaggccgatgggcagccgccgccggacgtggcctggctgaaggacggcagcccgctgggccaggacatgggcccccacctccggttctacctggacggcggctccctggtgctaaaaggcctgagggcctcggacgcgggtgcctacacctgcgtggcccacaacccagccggggaggacgccaggctgcacacggtgaatgtgctggttcctcccaccatcaagcagggagcagacggctcggggaccctggtgagcaggcctggggagctggtgaccatggtgtgccctgtgcggggctccccgcccatccacgtgagctggctcaaggacggcctgcccctcccgctctcccagcgcaccctcctccacggctctggccacaccctcaggatttccaaggtgcaattggcagacgctggcatcttcacctgtgtggccgcaagcccagctggcgtggcggacaggaacttcaccttgcagtgccccctgtcctggagccggtggagttccagaatgacgtggtggtggttcgtggctccctggtggaactcccgtgcgaggcccggggcgttcccctgcctctcgtgtcgtggatgaaggatggggaacccttgttgtcccagagcctcgagcaggggcccagcctgcagctggaggcagtgggagctggtgactcggggacctactcctgtgtggccgtgagcgaggcgggggaagccaggaggcatttccagctgaccgtcatggagccccctcacattgaggactcaggccagcctacagagctgtcgctgacccccggcgcccccatggagctcctctgtgatgcccagggcaccccccagcccaacatcacctggcataaggacgggcaggccctgaccaggctggagaacaacagcagagccacacgggtgctccgggtggagaatgtgcaggttagggatgctgggctgtacacttgtctggctgaaagccctgcaggtgcaattgagaagagcttccgggtcagggttcaagcccctccaaacattgttgggccccgaggcccccgctttgtggtcggcctggccccagggcagctggtcctggagtgttcggtggaggcagagccagcgcccaagatcacgtggcaccgagacggcattgtgctgcaggaggacgcccacacacaattcccggagcggggcaggttcctccagctgcaggccctgagcacggctgacagcggcgactacagctgcacagcccgcaacgccgcaggcagcactagtgtcgccttccgcgtggagatccacacggtgcccaccatccggtcaggaccacctgcagtgaacgtctcagtgaaccagacagccctgctgccttgccaggccgacggcgtgcccgcacccctcgtgagctggcggaaggacagggtccccctggatcccaggagccccaggtttgaaattctgcctgagggttccctgagaatccagccagtccttgcccaggacgccggccactacctctgcctggcatccaactctgctggctccgatcgtcaaggccgtgacctacgggtcttggccttgctgccctgcgaggccagcggctcccctaagcccctggtggtctggtggaaggacggacagaagctggacttccgcctgcagcagggcgcctaccggctcctgccctccaacgccctgctcctcacggcccccggcccccaggactcagcccagtttgaatgcgtggtgagcaatgaggtgggcgaggcccacaggctctaccaggtgaccgtccatgtgcctcccaccattgccgatgaccagacagacttcaccgtgaccatgatggcacctgtggtcctcacatgtcacagcacgggtataccagctccgaccgtgtcctggagcaaggcaggcgcccagctaggagctcgggggagtggctatcgtgtctcaccatcgggcgccctggagatcgggcaggccctccccatccacgcaggccgctacacctgctcagcccgcaactctgccggcgtagcccacaagcacgtcttcctcactgtgcaagcctccccggtggtgaagccgctgcccagcgtggttcgggcagtggcagaggaggaggtgctgctgccctgcgaggcctcaggcatcccccggccgaccatcacctggcagaaggaagggctcaacgtcgctactggagtgagtacccaggtcctaccaggcggacagctgcggattgcccatgccagcccagaggatgctggaaactatctctgcatcgctaagaacagtgcgggcagtgccatggggaagacgcggctggtggtgcaagtcccaccagtgatcgagaatggcctcccagacctgtccaccaccgaaggctcccacgccttcttgccttgcaaggcgaggggcagtcctgagcccaacatcacctgggacaaagatggccagcctgtgtcgggcgccgaggggaagttcaccatccagccttctggggagttgctggtgaagaacttggagggccaggacgcaggcacctatacctgtaccgctgagaacgccgtgggccgggcccgccgccgcgtgcacctcaccatcctggtactgcctgtgttcaccaccctgcctggggaccgcagcctgcgccttggggacaggctgtggcttcgctgtgcagcccggggcagccccacccctcgcattggctggactgtcaacgaccggccagtcacagaaggggtgtctgagcaggatggaggcagcacgctgcagcgggccgctgtctccagagaagacagcgggacctatgtctgctgggcggagaacagagtgggccgcacgcaggcggtcagcttcgtccacgtgaaggaggctcctgtcctacaaggggaggctttctcctacctggtggaacctgtaggaggcagcattcagctagactgtgtggtgcgtggagacccagtgccggacatccactggatcaaagatggccttccactgcggggcagccacctccggcaccagctgcagaatggctcgctgaccatccgcaggactgagagggacgatgcgggacggtaccagtgcctggcagagaatgagatgggcgtggcgaagaaagtggtgatcctcgtcctgcagagtgctccggtgttccaggtggagccccaggacatgacagtgagatctggggatgacgtggccctgcggtgccaggccactggagagcccacacccaccattgaatggctacaggcgggtcaacccttgcgggccagccggcggctccggaccctgcccgatgggagcctgtggctggagaacgtggagactggggatgcaggcacctacgactgcgtcgctcacaacctcctgggctctgccacagcccgggcgttcctggtcgtgagaggtatggggcatccctgtctggaccttcgtggacagaggcaggatctcttgccgatggggattgtgtggtgcttatgggagacctgtcccctgccttgccagctccccacctcttccctttgcttcatcacaagcccagaatgaacccctaccctgcccgtttacagttgggtaaactgaatcttggaggtgctgtttgctgctcatcttggacagggaacacaggttgttcctgcttaactggcacaaatgcatgtcctctgtctggacactgcacagcccctggaagcaggcagaggaagacaagggcatccccggtgccctcgggggctgctgtgaaaagtctgtgcatcagtgcatgtcccaggcatcacacattgcctggccgtggcaggtggttggaaaagaaatggcttcctggtgggatggacccctgccatctcgattcctcaatcagctcccttctaccttgggtcagaccaactttaaaattaagaaaagatctatcctgagaaaccacagtaaatggattcagacctgca

SEQ ID NO: 140135 - DNA, 6087 bp, Homo sapiens
  Payload ID: 7480
  Gene Symbol: HEMK1
  Gene Name: HemK methyltransferase family member 1
  Uniprot ID: Q9Y5R4
  ENST ID: ENST00000232854
  CDS Start-End: 553-1569
gttcctaaacgccagctcggagcaatccccttgggctggagccaaatccctgctgtgattttaaggaagaccggcaggtccgggcccccaagggtcaaccccacacacatccccgcactttcctgtatgcaggcctgcgagcgtagagggagtggaattcacagcctccccacccatccgcaggggtctcctgggaggaacccaccagcgataggaacactgaagctgggctacggcgtccgcccgagccttttcttaaaggcgccgaccccggaagcggggcgtccgagggagcgcgcgacgggccacgcacgtccgggcgtccagttcggggcagcttctccggctggtgggtgggtggggcagcctttcaggcagggtggcaaccaactatatctgaggaccagagccattttggggcaccagagcttgtgacctctccatctccacccagctgggtccaggggccactctcagcactcacctcagcagctgacatcataaagcagacttgggaacctggaagcactctggagaacctttccctgagacatggagctttggggccgaatgctgtgggccctcctgtctggcccagggaggaggggaagtacccggggctgggccttcagctcatggcaaccccaaccacctctggctgggttatccagtgccatagaactggtcagccactggactggggtctttgagaagaggggtatccctgaggcccgggaatccagtgagtacatcgtggctcatgtccttggagccaaaacatttcagagcctgaggccggcactttggacccagcccttgacctctcagcaactacagtgtatccgggagctgagtagccgtcgattgcagaggatgccggtgcagtacatccttggagagtgggacttccaggggctcagcctaaggatggtgcccccagtgtttattcctcggccagaaacagaggaactggttgagtgggtgctggaagaggtggcccagaggtcccatgctgtgggatccccaggcagccccctcattctggaggtgggctgcggatcaggagccatctccctcagcctgctgagccagctcccccagagccgagtcattgctgtggataagcgggaagctgctatctctctgacccatgagaatgctcagaggcttcggttgcaggacaggatttggatcatccacctcgacatgacctcagaaaggagctggacacacctgccctggggccccatggacctgattgtcagcaaccctccctacgtcttccaccaggacatggagcagctggcccctgagatccgcagctatgaagaccccgcggccctggatggtggggaggagggcatggacatcattacccacattctggccttggcaccccggctcctgaaagactctggtagtatcttcttagaagtggacccaaggcacccggagcttgtcagcagctggcttcagagccggcctgacctgtaccttaatcttgtggctgtgcgcagggacttctgtgggaggccccggttcctgcatatccggaggtctgggccatagcatggctgccctgtggatgccttgtcagtgccgccagcctgaccagaggggaggtggatggcactttccagagcccaggttcttatggcatttcccagggttctgtgatttccccatgctctgcatttctaggatatttctaggacacctggattggctccatcacatcagagtggctgagggcagttgctctgtgttggtgaaattgctgtgggggtatcgggggatatggccagtaaagtattgagagactaacaaatggtgacctaatgttttgtccatgacttgcaggtcccctgacccccttactcccaggtagcactggggcaagggtttccttctgccccagcagggctggccgtcagtcccctgcttggtagtggtgtgggggtgcagtgtggaggaaggcacgtgagtcctcactcctggccttggataccatgggtcctggcatagagcagctcactcccagggattgattagtcctccactgccctgggtgcatgcgtacacaattccctggccaagcctggctcgagcacaggaagctcatctgcgttttggctcaaggatgactgcctgctttctggaggggagggtctggaggtctttgctgcacagttcctgggtcgcacatccacgttcatttaactgaaggcttgagccagtgaggggtgtttcctttttatccccatagcttttagctaaaacatccctcccgagttgaccccctggggtttcaaataacccatgtgtccctggttggggctggggagagtgagaagctgagatactgggcacagggttgtggcctccaccccagctctggtctgtgcagactcatggccaccaggaggcctgcagatccagccttcctgtcaacagcgacaggaaatctctaggttggtgagtgctggtgatgtgagcctacatcagggtgggtcctaagaaacatggcaaaccaggctgtctcattccactagactgccccctgccaccctggcacttcccagggcctggcagtatggtctgatgggcagtatggtccaataggcagcatcctctgctgcagctgggagagctgagttccagggctgtgtcctgcagtgggaccttgggcaactcctttccctatgagaagctggctcttctgagtccagggccaacgccaactggcaacctctttactcttagtcaagtggaatgtgcatgctggcatctgaatgtccattcgccaggcatggagagcaagagaaggtatgtactgcctgaggtcacatgacagtgaccaagtggagacagtaagttagatccctccctttggggagcctatattgctggagtcatacccagcctaagtgttgccctgcactatggctggaggacacatttggtagaggtcacactgcagctcccagtgccccagtgtcctgccctgtgcccagccccagctgcatggactctgagctgcccctggcttcctttaaggaggctgctccagaaggaacctgggtggggagggcgaagggggtgcacaaccagggcaaggctccccacttccttagtcccccatgctcacagacctttgcctgctaaggtcctcaccagtattgccctttctgtctttctccttgtgccctttggctcttgctgtcttcagcagcatctcagggtagctgccctgacctcggagcagtctgtcgcccccctacacctcagccagtcctggcttccctgatggtctctccctcctggcctcaggcccattcctgaggaagggccttggcgagcttgtggatgttgcaccagaagagagtgcagtgttggagagtgacactgtcggggcagctggggccacaagcaggagccggcctcgggcacaactttctgcccagaaaaatgtgcagcttgactctgctgaggaaaaggtccaagccaagaggactggcaggcggggcctcaagcctgcagccactggcttgattgggccctggacgttgagcccagatgttggagccacaccagcctggatttcaatcccagaatctgcccctcacgaggatgtgaccttgggcagatgacttcacctcactcagccttggcttctaaggctgagaaatgggacttaatgctttattttataggatgcatgtgaggagcccatgggatgtgcctggcttggcacattgtggcatttttccttgccttcctcggagggcagacacagggaggaaggacccagtgccctcaggcgtccatctgatgcatgggaccaacataaggcaggcagggatacaaggcagtctggaaagaagggaaggcaggagtttcagtcttgggctcttgactcctcactgttgtctagagatggagccagcaggctggtagcctggcagcctacatctcccctcagcctctcctcactatggccccagtgccttgaggcccaggccagggcagccagtggctctagctcagggaaagccaggcccacctgccctatcccctcccttgctcctgaggccaaagccagagactcgaacagcctccccaccaccaccagcatatgtcaaggagcacttgcaggcagaatgggaggaggacatggagctgatggagtccaggctgtgcaagcccctgaggtcttgagagatgtgcccactgcccgtgcagcctccttcagccagagcccagagcatagacaggagtgtaggagtccctgtttgatgtactctgggagagtaattctatctcctcttctgatagttggggaaactgaggccttgtctcacagttggatgcttttcccagttgtcagtgggtttctccatgggtctcatacagctgccttattgaaataggccccgaaccccctaaatgcaaaaaatactcttttttgctcctttacccccacctggaccctgggctattggctgctcccaatccttgccccaaacacttagctggctccccatgacttaagtgtgttctcttgtgtcctatggaatccagttctgaagaggtgggggaggacaactgtgggaaaagccctgggggcccctcccaaggccccatcagtgctctgagtaggctgtcatcagaacaaagggctccactgctgacaaggtttgagaactgctggcttgaggtgagaacccctttaacctctgcgggacagcatgtctttccctatccaccttcgattcttttctcttttttttcttcattggctccttcttagtggattctcttctctactgccctgggcttcagcctttgtgcagtactctcgatgccctgaacacacaccttccctttgcccaggcggtgcaaacaatccacttcttcaagctccaacacaaatgctgcctcctttaggatgcctgctctgtgctctccctgcctcccctagcccatacctctgctggcaccttctgtaccatgccttcagaaaccttcttatccccctcatctctggggccccctgtggatctggcatacccaagttcagtaaatgtctatcagtaagctgatggtacatgcattttctagaatagagctgggacttcccatgtggcccacatctgacctggcagcccatgtattccggtcattagggatgggaagccatgaggacctggccttctgcccgacccaggcagccattcaagttgagcaatggccacttcgaagactcaagtgcacctgatccctgcgcaacagccacaccaggagaacaggctgtccttggcggcagtaggagcaggcgccaggtttcctggagctcttggcttcagccagcccccagccagagtcctggctaggacagtgacctgatctcctcctcatgaccttctgccctggacaagccccctgaactggatttgggactgtcaaagcaactctacccctgctctggtaggctgaacagtgaccccccaaaatggcagtgtcttaatcacctaaaccttaacatgtgactatattaccttcacatagcaaaatggactttgcagatgtgattaaggatcttgagatggaaggagtatcctggatttttcaggtaaactgagtataatcacaagggcctctgtaaaggaggcaggagtgtcagagtgacggaagaaaatgtatgtaacaatggaagcagaggtcagagtgatgcaattgctggaggaagagccatgagccgaggaatgcagacagcctcttctcctctggggcctcaagaagaatgcagtcctgccaataccttgattttaagccctgtgaaactgatttcagattgctgacctccagaacagtaagatcataaatttgtgttgttttcacatgtgtgaaaacacatgtgtgataatttgttacagcagccacgggaaacgaatatagattgtggtgcccaaattagagtgctgctgtaacacacgcctactgattgaagtggctttggaattgcaacgtggaaatgggcagaggctggaagaattttgagagtcatgataaattgccttaaccacc

SEQ ID NO: 140136 - DNA, 873 bp, Homo sapiens
  Payload ID: 7480
  Gene Symbol: HEMK1
  Gene Name: HemK methyltransferase family member 1
  ENST ID: ENST00000424388
  CDS Start-End: 417-683
ggcaggtatgcatgggaggtggggatcggaacggggtgtttcgactgcaaccgcctggagacctggccggtaccattctccatagtgcagatggggaaacagggttggagagagggggcctcatctgggtcgttaacaatgcggtgcgtagctgtgagggagtttacacttctgacttcgggccttggctcctgggacggcgcactggtgcaagagccgcttctggagtctggtggactcggggtggcaaccaactatatctgaggaccagagccattttggggcaccagagcttgtgacctctccatctccacccagctgggtccaggggccactctcagcactcacctcagcagctgacatcataaagcagacttgggaacctggaagcactctggagaacctttccctgagacatggagctttggggccgaatgctgtgggccctcctgtctggcccagggaggaggggaagtacccggggctgggccttcagctcatggcaaccccaaccacctctggctgggttatccagtgccatagaactggtcagccactggactggggtctttgagaagaggggtatccctgaggcccgggaatccatttcagagcctgaggccggcactttggacccagcccttgacctctcagcaactacagtgtatccgggagctgagtagccgtcgattgcagaggatgccggtgcagtacatccttggagagtgggacttccaggggctcagcctaaggatggtgcccccagtgtttattcctcggccagaaacagaggaactggttgagtgggtgctggaagaggtggcccagaggtcccatgctgtgggatccccaggcagccccctcattctggag

SEQ ID NO: 140137 - DNA, 5757 bp, Homo sapiens
  Payload ID: 7480
  Gene Symbol: HEMK1
  Gene Name: HemK methyltransferase family member 1
  ENST ID: ENST00000448997
  CDS Start-End: 272-538
gcgtccgagggagcgcgcgacgggccacgcacgtccgggcgtccagttcggggcagcttctccggctggtgggtgggtggggcagcctttcaggcagggtggcaaccaactatatctgaggaccagagccattttggggcaccagagcttgtgacctctccatctccacccagctgggtccaggggccactctcagcactcacctcagcagctgacatcataaagcagacttgggaacctggaagcactctggagaacctttccctgagacatggagctttggggccgaatgctgtgggccctcctgtctggcccagggaggaggggaagtacccggggctgggccttcagctcatggcaaccccaaccacctctggctgggttatccagtgccatagaactggtcagccactggactggggtctttgagaagaggggtatccctgaggcccgggaatccatttcagagcctgaggccggcactttggacccagcccttgacctctcagcaactacagtgtatccgggagctgagtagccgtcgattgcagaggatgccggtgcagtacatccttggagagtgggacttccaggggctcagcctaaggatggtgcccccagtgtttattcctcggccagaaacagaggaactggttgagtgggtgctggaagaggtggcccagaggtcccatgctgtgggatccccaggcagccccctcattctggaggtgggctgcggatcaggagccatctccctcagcctgctgagccagctcccccagagccgagtcattgctgtggataagcgggaagctgctatctctctgacccatgagaatgctcagaggcttcggttgcaggacaggatttggatcatccacctcgacatgacctcagaaaggagctggacacacctgccctggggccccatggacctgattgtcagcaaccctccctacgtcttccaccaggacatggagcagctggcccctgagatccgcagctatgaagaccccgcggccctggatggtggggaggagggcatggacatcattacccacattctggccttggcaccccggctcctgaaagactctgggtatgaatgggatgggtctcctaggtctgtccccagcaggctcctctgctcctaatgtgtactgggcaggccctggcagaggtcagcacaggaccctcacctcgccagcccaagcagcccagaagggcaggcgccagacctgtcctgctgagcccacccatttctcccccatgtagtagtatcttcttagaagtggacccaaggcacccggagcttgtcagcagctggcttcagagccggcctgacctgtaccttaatcttgtggctgtgcgcagggacttctgtgggaggccccggttcctgcatatccggaggtctgggccatagcatggctgccctgtggatgccttgtcagtgccgccagcctgaccagaggggaggtggatggcactttccagagcccaggttcttatggcatttcccagggttctgtgatttccccatgctctgcatttctaggatatttctaggacacctggattggctccatcacatcagagtggctgagggcagttgctctgtgttggtgaaattgctgtgggggtatcgggggatatggccagtaaagtattgagagactaacaaatggtgacctaatgttttgtccatgacttgcaggtcccctgacccccttactcccaggtagcactggggcaagggtttccttctgccccagcagggctggccgtcagtcccctgcttggtagtggtgtgggggtgcagtgtggaggaaggcacgtgagtcctcactcctggccttggataccatgggtcctggcatagagcagctcactcccagggattgattagtcctccactgccctgggtgcatgcgtacacaattccctggccaagcctggctcgagcacaggaagctcatctgcgttttggctcaaggatgactgcctgctttctggaggggagggtctggaggtctttgctgcacagttcctgggtcgcacatccacgttcatttaactgaaggcttgagccagtgaggggtgtttcctttttatccccatagcttttagctaaaacatccctcccgagttgaccccctggggtttcaaataacccatgtgtccctggttggggctggggagagtgagaagctgagatactgggcacagggttgtggcctccaccccagctctggtctgtgcagactcatggccaccaggaggcctgcagatccagccttcctgtcaacagcgacaggaaatctctaggttggtgagtgctggtgatgtgagcctacatcagggtgggtcctaagaaacatggcaaaccaggctgtctcattccactagactgccccctgccaccctggcacttcccagggcctggcagtatggtctgatgggcagtatggtccaataggcagcatcctctgctgcagctgggagagctgagttccagggctgtgtcctgcagtgggaccttgggcaactcctttccctatgagaagctggctcttctgagtccagggccaacgccaactggcaacctctttactcttagtcaagtggaatgtgcatgctggcatctgaatgtccattcgccaggcatggagagcaagagaaggtatgtactgcctgaggtcacatgacagtgaccaagtggagacagtaagttagatccctccctttggggagcctatattgctggagtcatacccagcctaagtgttgccctgcactatggctggaggacacatttggtagaggtcacactgcagctcccagtgccccagtgtcctgccctgtgcccagccccagctgcatggactctgagctgcccctggcttcctttaaggaggctgctccagaaggaacctgggtggggagggcgaagggggtgcacaaccagggcaaggctccccacttccttagtcccccatgctcacagacctttgcctgctaaggtcctcaccagtattgccctttctgtctttctccttgtgccctttggctcttgctgtcttcagcagcatctcagggtagctgccctgacctcggagcagtctgtcgcccccctacacctcagccagtcctggcttccctgatggtctctccctcctggcctcaggcccattcctgaggaagggccttggcgagcttgtggatgttgcaccagaagagagtgcagtgttggagagtgacactgtcggggcagctggggccacaagcaggagccggcctcgggcacaactttctgcccagaaaaatgtgcagcttgactctgctgaggaaaaggtccaagccaagaggactggcaggcggggcctcaagcctgcagccactggcttgattgggccctggacgttgagcccagatgttggagccacaccagcctggatttcaatcccagaatctgcccctcacgaggatgtgaccttgggcagatgacttcacctcactcagccttggcttctaaggctgagaaatgggacttaatgctttattttataggatgcatgtgaggagcccatgggatgtgcctggcttggcacattgtggcatttttccttgccttcctcggagggcagacacagggaggaaggacccagtgccctcaggcgtccatctgatgcatgggaccaacataaggcaggcagggatacaaggcagtctggaaagaagggaaggcaggagtttcagtcttgggctcttgactcctcactgttgtctagagatggagccagcaggctggtagcctggcagcctacatctcccctcagcctctcctcactatggccccagtgccttgaggcccaggccagggcagccagtggctctagctcagggaaagccaggcccacctgccctatcccctcccttgctcctgaggccaaagccagagactcgaacagcctccccaccaccaccagcatatgtcaaggagcacttgcaggcagaatgggaggaggacatggagctgatggagtccaggctgtgcaagcccctgaggtcttgagagatgtgcccactgcccgtgcagcctccttcagccagagcccagagcatagacaggagtgtaggagtccctgtttgatgtactctgggagagtaattctatctcctcttctgatagttggggaaactgaggccttgtctcacagttggatgcttttcccagttgtcagtgggtttctccatgggtctcatacagctgccttattgaaataggccccgaaccccctaaatgcaaaaaatactcttttttgctcctttacccccacctggaccctgggctattggctgctcccaatccttgccccaaacacttagctggctccccatgacttaagtgtgttctcttgtgtcctatggaatccagttctgaagaggtgggggaggacaactgtgggaaaagccctgggggcccctcccaaggccccatcagtgctctgagtaggctgtcatcagaacaaagggctccactgctgacaaggtttgagaactgctggcttgaggtgagaacccctttaacctctgcgggacagcatgtctttccctatccaccttcgattcttttctcttttttttcttcattggctccttcttagtggattctcttctctactgccctgggcttcagcctttgtgcagtactctcgatgccctgaacacacaccttccctttgcccaggcggtgcaaacaatccacttcttcaagctccaacacaaatgctgcctcctttaggatgcctgctctgtgctctccctgcctcccctagcccatacctctgctggcaccttctgtaccatgccttcagaaaccttcttatccccctcatctctggggccccctgtggatctggcatacccaagttcagtaaatgtctatcagtaagctgatggtacatgcattttctagaatagagctgggacttcccatgtggcccacatctgacctggcagcccatgtattccggtcattagggatgggaagccatgaggacctggccttctgcccgacccaggcagccattcaagttgagcaatggccacttcgaagactcaagtgcacctgatccctgcgcaacagccacaccaggagaacaggctgtccttggcggcagtaggagcaggcgccaggtttcctggagctcttggcttcagccagcccccagccagagtcctggctaggacagtgacctgatctcctcctcatgaccttctgccctggacaagccccctgaactggatttgggactgtcaaagcaactctacccctgctctggtaggctgaacagtgaccccccaaaatggcagtgtcttaatcacctaaaccttaacatgtgactatattaccttcacatagcaaaatggactttgcagatgtgattaaggatcttgagatggaaggagtatcctggatttttcaggtaaactgagtataatcacaagggcctctgtaaaggaggcaggagtgtcagagtgacggaagaaaatgtatgtaacaatggaagcagaggtcagagtgatgcaattgctggaggaagagccatgagccgaggaatgcagacagcctcttctcctctggggcctcaagaagaatgcagtcctgccaataccttgattttaagccctgtgaaactgatttcagattgctgacctccagaacagtaagatcataaatttgtgttgttttca

SEQ ID NO: 140138 - DNA, 634 bp, Homo sapiens
  Payload ID: 7480
  Gene Symbol: HEMK1
  Gene Name: HemK methyltransferase family member 1
  ENST ID: ENST00000443894
  CDS Start-End: 1-375
attctggaggtgggctgcggatcaggagccatctccctcagcctgctgagccagctcccccagagccgagtcattgctgtggataagcgggaagctgctatctctctgacccatgagaatgctcagagctatgaagaccccgcggccctggatggtggggaggagggcatggacatcattacccacattctggccttggcaccccggctcctgaaagactctggtagtatcttcttagaagtggacccaaggcacccggagcttgtcagcagctggcttcagagccggcctgacctgtaccttaatcttgtggctgtgcgcagggacttctgtgggaggccccggttcctgcatatccggaggtctgggccatagcatggctgccctgtggatgccttgtcagtgccgccagcctgaccagaggggaggtggatggcactttccagagcccaggttcttatggcatttcccagggttctgtgatttccccatgctctgcatttctaggatatttctaggacacctggattggctccatcacatcagagtggctgagggcagttgctctgtgttggtgaaattgctgtgggggtatcgggggatatggccagtaaagtattgagagactaacaaa

SEQ ID NO: 140139 - DNA, 1499 bp, Homo sapiens
  Payload ID: 7480
  Gene Symbol: HEMK1
  Gene Name: HemK methyltransferase family member 1
  Uniprot ID: Q9Y5R4
  ENST ID: ENST00000455834
  CDS Start-End: 228-1244
cgcgacgggccacgcacgtccgggcgtccagttcggggcagcttctccggctgggtggcaaccaactatatctgaggaccagagccattttggggcaccagagcttgtgacctctccatctccacccagctgggtccaggggccactctcagcactcacctcagcagctgacatcataaagcagacttgggaacctggaagcactctggagaacctttccctgagacatggagctttggggccgaatgctgtgggccctcctgtctggcccagggaggaggggaagtacccggggctgggccttcagctcatggcaaccccaaccacctctggctgggttatccagtgccatagaactggtcagccactggactggggtctttgagaagaggggtatccctgaggcccgggaatccagtgagtacatcgtggctcatgtccttggagccaaaacatttcagagcctgaggccggcactttggacccagcccttgacctctcagcaactacagtgtatccgggagctgagtagccgtcgattgcagaggatgccggtgcagtacatccttggagagtgggacttccaggggctcagcctaaggatggtgcccccagtgtttattcctcggccagaaacagaggaactggttgagtgggtgctggaagaggtggcccagaggtcccatgctgtgggatccccaggcagccccctcattctggaggtgggctgcggatcaggagccatctccctcagcctgctgagccagctcccccagagccgagtcattgctgtggataagcgggaagctgctatctctctgacccatgagaatgctcagaggcttcggttgcaggacaggatttggatcatccacctcgacatgacctcagaaaggagctggacacacctgccctggggccccatggacctgattgtcagcaaccctccctacgtcttccaccaggacatggagcagctggcccctgagatccgcagctatgaagaccccgcggccctggatggtggggaggagggcatggacatcattacccacattctggccttggcaccccggctcctgaaagactctggtagtatcttcttagaagtggacccaaggcacccggagcttgtcagcagctggcttcagagccggcctgacctgtaccttaatcttgtggctgtgcgcagggacttctgtgggaggccccggttcctgcatatccggaggtctgggccatagcatggctgccctgtggatgccttgtcagtgccgccagcctgaccagaggggaggtggatggcactttccagagcccaggttcttatggcatttcccagggttctgtgatttccccatgctctgcatttctaggatatttctaggacacctggattggctccatcacatcagagtggctgagggcagttgctctgtgttggtgaaattgctgtgggggtatcgggggatatggccagtaaagtattgagagactaa

SEQ ID NO: 140140 - DNA, 17064 bp, Homo sapiens
  Payload ID: 7480
  Gene Symbol: HEMK1
  Gene Name: HemK methyltransferase family member 1
  Uniprot ID: Q9Y5R4
  ENST ID: ENST00000434410
  CDS Start-End: 297-1313
ctttccggcaggctactgggctccgcccacacacctcccggcctggttcctaaacgccagctcggagcaatccccttgggctggagccaaatccctgctgtgattttaaggaagaccggcagggtggcaaccaactatatctgaggaccagagccattttggggcaccagagcttgtgacctctccatctccacccagctgggtccaggggccactctcagcactcacctcagcagctgacatcataaagcagacttgggaacctggaagcactctggagaacctttccctgagacatggagctttggggccgaatgctgtgggccctcctgtctggcccagggaggaggggaagtacccggggctgggccttcagctcatggcaaccccaaccacctctggctgggttatccagtgccatagaactggtcagccactggactggggtctttgagaagaggggtatccctgaggcccgggaatccagtgagtacatcgtggctcatgtccttggagccaaaacatttcagagcctgaggccggcactttggacccagcccttgacctctcagcaactacagtgtatccgggagctgagtagccgtcgattgcagaggatgccggtgcagtacatccttggagagtgggacttccaggggctcagcctaaggatggtgcccccagtgtttattcctcggccagaaacagaggaactggttgagtgggtgctggaagaggtggcccagaggtcccatgctgtgggatccccaggcagccccctcattctggaggtgggctgcggatcaggagccatctccctcagcctgctgagccagctcccccagagccgagtcattgctgtggataagcgggaagctgctatctctctgacccatgagaatgctcagaggcttcggttgcaggacaggatttggatcatccacctcgacatgacctcagaaaggagctggacacacctgccctggggccccatggacctgattgtcagcaaccctccctacgtcttccaccaggacatggagcagctggcccctgagatccgcagctatgaagaccccgcggccctggatggtggggaggagggcatggacatcattacccacattctggccttggcaccccggctcctgaaagactctggtagtatcttcttagaagtggacccaaggcacccggagcttgtcagcagctggcttcagagccggcctgacctgtaccttaatcttgtggctgtgcgcagggacttctgtgggaggccccggttcctgcatatccggaggtctgggccatagcatggctgccctgtggatgccttgtcagtgccgccagcctgaccagaggggaggtggatggcactttccagagcccaggttcttatggcatttcccagggttctgtgatttccccatgctctgcatttctaggatatttctaggacacctggattggctccatcacatcagagtggctgagggcagttgctctgtgttggtgaaattgctgtgggggtatcgggggatatggccagtaaagtattgagagactaacaaatggtgacctaatgttttgtccatgacttgcaggtcccctgacccccttactcccaggtagcactggggcaagggtttccttctgccccagcagggctggccgtcagtcccctgcttggtagtggtgtgggggtgcagtgtggaggaaggcacgtgagtcctcactcctggccttggataccatgggtcctggcatagagcagctcactcccagggattgattagtcctccactgccctgggtgcatgcgtacacaattccctggccaagcctggctcgagcacaggaagctcatctgcgttttggctcaaggatgactgcctgctttctggaggggagggtctggaggtctttgctgcacagttcctgggtcgcacatccacgttcatttaactgaaggcttgagccagtgaggggtgtttcctttttatccccatagcttttagctaaaacatccctcccgagttgaccccctggggtttcaaataacccatgtgtccctggttggggctggggagagtgagaagctgagatactgggcacagggttgtggcctccaccccagctctggtctgtgcagactcatggccaccaggaggcctgcagatccagccttcctgtcaacagcgacaggaaatctctaggttggtgagtgctggtgatgtgagcctacatcagggtgggtcctaagaaacatggcaaaccaggctgtctcattccactagactgccccctgccaccctggcacttcccagggcctggcagtatggtctgatgggcagtatggtccaataggcagcatcctctgctgcagctgggagagctgagttccagggctgtgtcctgcagtgggaccttgggcaactcctttccctatgagaagctggctcttctgagtccagggccaacgccaactggcaacctctttactcttagtcaagtggaatgtgcatgctggcatctgaatgtccattcgccaggcatggagagcaagagaaggtatgtactgcctgaggtcacatgacagtgaccaagtggagacagtaagttagatccctccctttggggagcctatattgctggagtcatacccagcctaagtgttgccctgcactatggctggaggacacatttggtagaggtcacactgcagctcccagtgccccagtgtcctgccctgtgcccagccccagctgcatggactctgagctgcccctggcttcctttaaggaggctgctccagaaggaacctgggtggggagggcgaagggggtgcacaaccagggcaaggctccccacttccttagtcccccatgctcacagacctttgcctgctaaggtcctcaccagtattgccctttctgtctttctccttgtgccctttggctcttgctgtcttcagcagcatctcagggtagctgccctgacctcggagcagtctgtcgcccccctacacctcagccagtcctggcttccctgatggtctctccctcctggcctcaggcccattcctgaggaagggccttggcgagcttgtggatgttgcaccagaagagagtgcagtgttggagagtgacactgtcggggcagctggggccacaagcaggagccggcctcgggcacaactttctgcccagaaaaatgtgcagcttgactctgctgaggaaaaggtccaagccaagaggactggcaggcggggcctcaagcctgcagccactggcttgattgggccctggacgttgagcccagatgttggagccacaccagcctggatttcaatcccagaatctgcccctcacgaggatgtgaccttgggcagatgacttcacctcactcagccttggcttctaaggctgagaaatgggacttaatgctttattttataggatgcatgtgaggagcccatgggatgtgcctggcttggcacattgtggcatttttccttgccttcctcggagggcagacacagggaggaaggacccagtgccctcaggcgtccatctgatgcatgggaccaacataaggcaggcagggatacaaggcagtctggaaagaagggaaggcaggagtttcagtcttgggctcttgactcctcactgttgtctagagatggagccagcaggctggtagcctggcagcctacatctcccctcagcctctcctcactatggccccagtgccttgaggcccaggccagggcagccagtggctctagctcagggaaagccaggcccacctgccctatcccctcccttgctcctgaggccaaagccagagactcgaacagcctccccaccaccaccagcatatgtcaaggagcacttgcaggcagaatgggaggaggacatggagctgatggagtccaggctgtgcaagcccctgaggtcttgagagatgtgcccactgcccgtgcagcctccttcagccagagcccagagcatagacaggagtgtaggagtccctgtttgatgtactctgggagagtaattctatctcctcttctgatagttggggaaactgaggccttgtctcacagttggatgcttttcccagttgtcagtgggtttctccatgggtctcatacagctgccttattgaaataggccccgaaccccctaaatgcaaaaaatactcttttttgctcctttacccccacctggaccctgggctattggctgctcccaatccttgccccaaacacttagctggctccccatgacttaagtgtgttctcttgtgtcctatggaatccagttctgaagaggtgggggaggacaactgtgggaaaagccctgggggcccctcccaaggccccatcagtgctctgagtaggctgtcatcagaacaaagggctccactgctgacaaggtttgagaactgctggcttgaggtgagaacccctttaacctctgcgggacagcatgtctttccctatccaccttcgattcttttctcttttttttcttcattggctccttcttagtggattctcttctctactgccctgggcttcagcctttgtgcagtactctcgatgccctgaacacacaccttccctttgcccaggcggtgcaaacaatccacttcttcaagctccaacacaaatgctgcctcctttaggatgcctgctctgtgctctccctgcctcccctagcccatacctctgctggcaccttctgtaccatgccttcagaaaccttcttatccccctcatctctggggccccctgtggatctggcatacccaagttcagtaaatgtctatcagtaagctgatggtacatgcattttctagaatagagctgggacttcccatgtggcccacatctgacctggcagcccatgtattccggtcattagggatgggaagccatgaggacctggccttctgcccgacccaggcagccattcaagttgagcaatggccacttcgaagactcaagtgcacctgatccctgcgcaacagccacaccaggagaacaggctgtccttggcggcagtaggagcaggcgccaggtttcctggagctcttggcttcagccagcccccagccagagtcctggctaggacagtgacctgatctcctcctcatgaccttctgccctggacaagccccctgaactggatttgggactgtcaaagcaactctacccctgctctggtaggctgaacagtgaccccccaaaatggcagtgtcttaatcacctaaaccttaacatgtgactatattaccttcacatagcaaaatggactttgcagatgtgattaaggatcttgagatggaaggagtatcctggatttttcaggtaaactgagtataatcacaagggcctctgtaaaggaggcaggagtgtcagagtgacggaagaaaatgtatgtaacaatggaagcagaggtcagagtgatgcaattgctggaggaagagccatgagccgaggaatgcagacagcctcttctcctctggggcctcaagaagaatgcagtcctgccaataccttgattttaagccctgtgaaactgatttcagattgctgacctccagaacagtaagatcataaatttgtgttgttttcacatgtgtgaaaacacatgtgtgataatttgttacagcagccacgggaaacgaatatagattgtggtgcccaaattagagtgctgctgtaacacacgcctactgattgaagtggctttggaattgcaacgtggaaatgggcagaggctggaagaattttgagagtcatgataaattgccttaaccacctctcttctgataggtgatgtggccaggggaactcttcctcaaccttcagacctaaactgcccaggccccccctttttttactcatatttggagagaggtggccctttcccagagtgagaagactgaaagactgaccagcatgggtcccagaagggagtgggtgaggaatgggactgggatgtggggagaaagtgcaaggctggcctccatggcccatctccagagactgggtccagagaggacctcagagactgggaccaagcctgttcctgctctcctgtggagttatgtgactggcccaggaccccttgggtgtgtgaggatgagcaggggccctgtactctctgggttgcaggtactgcatctgtgaaatgagcacagcagcccctgactttgagctaatgggcctggcccctccatgtaagccataggcctgagcagagctgtgtcaccattctgttcctatggtggagtggggctatccctggggttctcaacctcctggttcctaaaactgaattggccaactggtgccctcagccctgtccctgtccaagctgggactaggacctccctttccaggggtactaaaggactctggagacaccatcccacccagccaaggcttggggctcctgaagccagtcctaacccaggagccacatggagagctactgggaggccagacatgggcctcatgctgggtttcagagctgagaagctgggggacagagagcatggacacctgggttcaagggtcagcttggccccaaatcacctggatacgctttggatgaagccaggagggcctgtttatactggaaggggtggatcatggcaagacttatattcaatccctgatcttttttcccagagagggatggggcttacttgaagtaacacagcacttgactcctgactcccagtatgatgctctcatctcctattgcttccaaaggcctggggttagttaattaagtcaattaggtggtgctcatatggctgtccatgtagctactaaacccagggattctggcccataaagccctctgggccaggtttatgggcaggtaagagtcacattaggccaactgtagccctgggtgtgcagacagatctgagtcccatctgaagctctggtagctgtgggaggagagcaggatttcccccgcttgcggaatgagtgggtgccttcccctctgaggtaattggctgtacagcccccagcctctgccccccagggccctcctgaggtgtctggaaggacctttgggatctttggcctcataaccagaaatcagaagcttcaaattctagaggccccttttcttccaaagactacctctcacacatacagcagtcctgcaggaaaatggtcaggaaaggctaattttacagctcacaaagtgggaaaggcagggaagcctacctcagcttcatggaaagccctgaactgggctgacctccacctgccccagctatgcctaaagggggagggtgagacagcttagagtagccatgccccgtggcaggcaggcctggctaagtggcccccttcccaggggctggggtcttccccaaacactctacctctcagagcagaggatgtcaccttattgctccctcttgtactaggtctgcggccctcttctggggcatgtggctggggaaatggtgggatcagatatcccctactgagcccagggagcagattgttggtgcctgaagcgctcacagagatccctgtggtacagatgaggaaactgaggcttagcaggacaggagcagggctggggcacgagccaggtctcttctctggctcacagctgccagtccttcctttgccacctgaagaccccccaccccacctggctttccaggaacaggcctgcctgcctggagaggcgtccaagtccctctgctgttcctggaagtcagtgtgaggctgagctacgtgaccaagcaaagcaaactaggactacaggtgtgaacaaccctgcctggctaatttttaatttttttttttttttagaaacggggtcttgctatgttgccagggctggcacatggggtttttagttgtccccacattacaaagttgaggacaccaaggctcagcagggtgcagttgcaggtcaggttgcatagctggacaggaagggaggatgaggctgccattggtgtccatttgactatcagagacgctgaggccagcataactaggtcctgggctgtcccctgcagagcttagcgcagaagttacctgggcttgtggacccttggagcaggagcaagggtttccagggctgtccctagagggctttctagaagacctgcagctgctcctgggtgcatctcctgaggtatagggccagggcctcagtctctcaagacctactttgtgtcaggcaccagggagatgataccaagtggagggtcctatagaatatggtgcatcctgcgccaagtacttccaggattatcttactcaaccttcatgacatcctcagagatggaggctgtgaaccctctcgttatactgacgaagaaacaaactggggctaagaaacttgctcataggctggctgagctgtgattctggcataggctgagtgacctggagctggaggccttagtcatcacaccaggcttgaggaggggcggataggacaggaatataccaggcagtagggacagtctggacaaaagcctggagttctgcagacatgcgggtagggatatgtaggggtgaggtggtgccgagaggtccccttggctgagctctgaatgcatttctggggaccaggggcctaaagagctttttgagctgagttacagggttagagaagcattgaggctgctctttctggctgccaggaaaaaggggctggggcaggaggctgcaacttgtccagggtctggaggtggctggggtctgtagcagtggcatcagatattctggaacagaactgactcacaaccattgctgagggtttggatgtgagatggccaggaccacagtgggcccagggatctgattgggacctgggggaaatggggccaccctgagttggagactggggtgctggggggaacagtcggggagcttgacagtgtaggatgccttcagaatatccgagaagcagcattggggcgtctggagatgcaaatgtgaccatgtggggacacagtccaaaggcaacccttgaggtagagttgtgaagaccactctcctagacctgagtgctggcgacaacagtaccgggcatctgcagtgtgtaaactagtgccaggtgctgcacacacgtggtcataaatccatctgttggcacatcagggatcccttccttggcccactgtatggatgaagggactgaggcttaacatgcccaaggtcacacagccagcagctggccatgctggagtttgaacctagtcctctgacatcccagtcaggagaggcgtgagcaggctgccgaggccaaatgcagcccagggcctcaaccccccagaggggcctcaggagccagttaggtgccccacagccaacgtgggctccagggtgaaggggaaagtgatgaatcaaacagaaagcagcagacgcagactgagctctctccctgtcggcccgggtgccagattttcacgcccacagcaaaggggccaggcagagcgctaggtgtggggcaggagagggcagcgaaagtggctgccactgaacccagactctgatgtactccggatatgggtggcgtggactgacagacacccagcccagttccagactgaaagttgagtctgtctcagcatgtgaggatatgaagtttgccttgtcatggggagcatttcaggtccctaggcctgtgaggttctgggatgaggcaccagatggatgtgtctaaaaacccttgttgaaggcactccacagctcaataactgaccattgctcactactctcttggcccgcactgaaagccactgtttcttcatcatttcactcagcccgcctgtctcagccccccagaactttggagctcattctttcaaagtacatttcatgtgcaactgaaatacatatttttaaaaagataaaatgagcatctagttagcaaaaatgtattttgcaagtgcaaattctttcttagcatacagtccatcagggcgaagagcaatgaacacaaatgtttgaactgggggctgggatggtagttgtagtcttatgttggtctcaatgtccattttctttcagtgtttgattttggtagcacaggacaaagtgaccgctgattctcacagataattgtttacaaatgctagcactgtgtctgaagcccaccttgcagtctctttgattgacagggacagcaagagaagccttatctcaagctcagcacaaaccctgttctctgagcacataggaaggattctaatgtgtcataatttggtgctgtgcccatttgagtctgtgtgtggtttttaaaattgggttttttttttttcaataattaaaaatatgagctgggcatggtggcacatgcctgtggtcccacctactcgggaggctgaggcaggaggattacttgagcacaagagtttaagacagcagtgagctataatagcgccactgcactccagcctggacatcagagtcagaccctgtctctaaaaaaataattttaggccgggcgcggtggctcacgcctgtaatcccagcactctgggaggctgaggcaggcagatcacctgaggtcaggagttcgaggccagcttggccaacatggtgaaaatccgtctgtactaaaaatacaaaaattagccgggtgtggtggctcacgcctgtaatcccagctacttgagaggctgaggcaggagaatcgcttgaaaccgagaggcagatgttgcagtgagccaagatcacgccattgtactcccacccaggcaacaagagcaaaactctgtctcaaaaataataataataggccaggcgcagtagctcacgtttgtaatcccagcactttgggaggccaaggatcacaaggttaggagttcaagaccagcctggccaacacagtgaaaccccgtctactaaaaatacaaaaattagctgggtgtggtggtggacacctgtaatcccagctactcgggaggctgaagcaggagaattgcttgaacccgggaggcagagattgcagtgagccaagatcatgccactgcactccagcctgggcgacagagctagactccatctcaaaaaaaaaaatttaaaaataataattttaaaaaaatgttttaaaaatgaaagaaaaggaagaagggaggaggaagccagaaagaaaggggccgtgcagggtggctcacacttgtaatcccagcactttgggaggctgaagcaggcagatcacccgagctcaggagttcaagaccagcctggccaacatggtgaaaccctgtctctactaaaaatacaaaaattagctgggcatggtggctcatgcctgtaattccagctactcgggaggctgaggcaggagaatcgcttgaacccggaaggcggaggttgcagtgagctgagatcacctcactaccctctagcgtgggcgacagcaagactgtttcaaaaaaaaaaaagaggaagagtgaaaggatggacgaaaggaactcctgtggggtggggcatctggggcacttgatgccccacgtgaccattcccttcccggaggtctgccccaactgctccagcccccatagcctgaggctcccggcacctcccacccagcatctgtcacagcaaatcaatctgggccacatgctcctgaaaggtccttgggagccccaccaggctccagtgtggttgccccaagtactccatgagtagacatgggctagggacttacccaggcccttggtggtgcctccaagggtggaaagactgggggaccctgtgcccctgaaagcccagagtttcactgtttctgggtaccttcatttctgggaactaactgtgctttggaaagagagaaatgagaagcaaaaccctagggccccagtatcacccctcctttctgtcttccttccgcttagtcacagccaagagctcagtacctcagcctcccttagggccactaggtggggcagaatacaaggtcaggcgaggacacagcatctgggacgagtcctttcctgccaacagcctccgtgaggggtcctaggattgctgagggctgagaccaccttcccaaagttggggaaggggtaactgaggctgtcatctggcctgtctcacctgtcttacctgcaggcccatcattcctgcacagtcatttattaggcaccaactgtaagccaggcccaggaggttggatggttcaggtggggccctggccttgcagaactcatggacttgcacatagactcctcctgacaggcccctcatgagtagctgggtccttacgatttttctggtcagcagtggggagccgtgggaggcattaggctctggggaagccaagcaacatcacatgtacacagcatagagactcacacacccttgcacaggcacccacacgtacgtgtatgttcatgggcgtgggccttgagcaccgggtcccgtgagccactgcacctggccaactgggtccatgtccataatcataggtgtccacgcagggcctcccttggatgggggagctccaggctctggaaaccaagccagggttgcatgcatgcacgtgtgtgtgtgtgtgtgtgtgtgtgtgtgtgtgtttgtgtgtgtgtggtgttactctgcctcagaggcccaaccactgcctccaagtcatgggagcgcagagcccatgtaagctcaaacactgccccatgtcatagaaaagagggccaaagatggggctgggcgtggtggctcactcctgtaatcctagcactttgggaggctgagtcgggtggatcacgaggtcaggagatcgagaccatcctgactaacacggtgaaaccctgtctctactaaaaatacaaaaaaattagctgggcgtagtggcgggtgcctataatcccagctactcaggaggctgaggcaggagaatggcctgaacccgggaggcggagcttgccgtgagcggagattgcaccactgcactccagcctggacgacagagtgagactccgcatcagaaaaaaaaaaaaaagaaagaaaagagagccaaagctcagagagggcccatgacttgcccagtgtcacacagcaaggtgaggcaggtctgggagggaaatgaaccagaccttatccacatccctgacctttttggcttcatgcttggagcttggcaccccctgagaaccacactccgttgacctctgggaaatggaggctggtgattctcccagcaaacccgcctgggaactaaccacaggctcctcccagctttcactaaccaaccccaggatttccaataccggtgctttgcttagctgtactgggcacctggaactcattctccctgccaccctccctccctgattccttgaataaaattcagccttccaaattttactcaaatgcttctactttctctgaccctctggaactttcccctgttgccagcctccctccagcatctgtcccctcattcccacctcctgtttacttccctacaaaagccaaaaattgacccctagagcctgagactctggatggaggatcttcgtagctggggccacacccaggccagcccagcccttcagactctgccagtcacagtggggtgggccctggagctggaagaggaaacagagcctctgccagagtcaccacctgcccccaaccctacttctcctccgaaggcccaacaaggtcctgtgcgccctccaagggcagaggaggctgctggctgtggctgtgggaggagacctggagcactgtgcccgaggcaaagctggccccgtggagtttgctattccagcttttatttactcctctgtaccctgagcaccatcaactgggtgccaggcctgtgcctatatttggcagggtgaggggtgggggccagacaaattgtagaggagcctcaggtctttggggtgttgcccctccactacatggccccagaccaagttctctgccagtttgcagagctcttcccttccacttggtcttgaggaggggccagagaggctgcctttaccccatgagctctgaaccctctcactatctggctgtcccctcattctctcaccacccactcccactcccgatgggagcctcaggcctggcttaggaaccctgcccacagctgtactaatgcccttggctttgctatagggaaagaacacagccactccacactctgggacagccagcttgcgtccatcccctagtgcagagggctagtttagggaaggacattaggaccctgactgtgcacctgactcaggggccccggagaagatttggtgggctaagggtgggcaggagaatacaactcacagccaagcggaaggtggctttcagctccccccttctcattttttcttactgtggctgcaccagggctgtgcccctcatggaaggttcactttcctgcttatctagtctcagatgttacagtttttcttgttatgtattatacagagagatggcctaactggttcttgctgctgcatgggcaagccattaatttacaggggtttatcttataactggacacctttttgttttctcttacaagatgtgcttgttgttgcttctcttggattttctacattgacattttaccactgaaaataatgacaatgacaaatttgtcttttcctttctttcttttttttttttttgagacaaagtgccactctgttgcccagactggagtgcagtggcgcgatctcccaggttcaagcgattctcttggctcagcctcccgagtagctgggattacaggcgtccaccaccatgccaggctaattttttttttgtattttcagtagagacggggttttgccatgttggccaggctggtctcgaactcctgacctcaagtgatctgccacctcggcctcccaaaatgctgggattacaggcctgagccaccacacccggcctgtcttttcctttttaatacttatggctcttatttattttccttgtttaatagcttggctgagaccttcaatacaatattgaaaaactgtaacgactagagcatttgtatattgtttctcacttggggtgcctctggtccctccctgtcaagtgcacttgctattgattttggatagatggcccttttctacttaaaaatggttcagtctagttctggctgactctgattttttgtttattttagaggctttttttttcatctttcattcatgcaacagaccttcagtgagctgattgccaggactacactgtcatactgtggtaccaaagaaaaattgacacggtccctactcataaggagttcatggcctggtggaggatacaggcaggcaaatagatccttatccttaggccatggggcatgcattcagtcaccatctgctggcactgtgccaggcacaaggaatgggcactattcaggcaggcccccatcacagtctggtggggtccaagcagttcacatcccctctcactcaagttcccacagagtagttgcaatggtgagctgaggttttctctgctgcagaggccaggtgggtaagtaaccaaaagtgcctgagagctaatcccctggagcagcctgaaaccaaggaagacagagagttggtagacacatgcccagctccctcaccccttgggtgggacaaccgtggcttgtgttttctgccagctcccaactgaagactgagcctcagttgcctacagaaggaacccactcataaacccacctacctcctttggcttcctttccttccctgtctcaccccctctcccattttatatcaataagtgtgaaggctgagattttatccgactttctttttttttttttgagacagagtctcattctgttgccaggctggagtgcagtggcgtgatcttggcttactgcaacctctgcctcccaggttcaaacgattctcctgcctcaggctcccgagtactgggactacaggtgcgcaccaccacacccagctattttgtatttttagtagaaacagggtttcaccatgttggccaggatggtctcaatctcttgacctcatggtctgcccacctcggcctcccaaagtgctgggattacaggagtgagccaccgcgcccggcttatccgactttgaagcaaacaagttagtctatcatagtctatcatattctcaaggatcatggcagaaggcacagaactctgggttcagaaacagacaacagattattgtttacagtaacggcagtagacagagtaaaagcattttcttgcaccacttccctgaaccgcagttcctacagagtgatgtgatgatggcccggtgatgcctgcatatgcattgggttgcactacggtggagaaactgcatgctgaatttaggggacccacgtcttttataataagctgcaagcaaacctgcccaggtgggagatgttatctttagtatacgggacaataaaatctgccttttgctctggagggagatactacctctatcttctaaggttactcactataataatcacccttgtaaagattatttagaacaagggcaaccagtgcctctactggcaagtgtgcagaaataggagagaaccatggggaattgtctctcaataccttactggtgcttcttggcattacttcccaaataatctatttgcatttggatgcttgtctcagagtggtttctgcaggaaaaaacccaagatagagagacaacactatataggcatcgatgtatttctggggtgactctctttcctccagacctctcctgcaaacaacgcaggggagccacgcaaaggaagaggtttccacacctgggattgatactgctgggactccagggcaggtgctctaaaggactcttagaatttcatttttaatgtttaatatttggtccatctagaatttatggtggaaggtgtgaggtagacgttgcacttttttttccttccaaattgctccaatatcacttactggaaattgtgctttgtctgttaccactctcttctaatctgcctgtggcctgttccttagagtgtatcacaaacatacaagtgatcaatttccaataaattgattaaagaatt

SEQ ID NO: 140141 - DNA, 1704 bp, Homo sapiens
  Payload ID: 7481
  Gene Symbol: HFE
  Gene Name: hemochromatosis
  Uniprot ID: Q30201
  ENST ID: ENST00000349999
  CDS Start-End: 161-943
ctaaagttctgaaagacctgttgcttttcaccaggaagttttactgggcatctcctgagcctaggcaatagctgtagggtgacttctggagccatccccgtttccccgccccccaaaagaagcggagatttaacggggacgtgcggccagagctggggaaatgggcccgcgagccaggccggcgcttctcctcctgatgcttttgcagaccgcggtcctgcaggggcgcttgctgcagtcccacaccctgcaggtcatcctgggctgtgaaatgcaagaagacaacagtaccgagggctactggaagtacgggtatgatgggcaggaccaccttgaattctgccctgacacactggattggagagcagcagaacccagggcctggcccaccaagctggagtgggaaaggcacaagattcgggccaggcagaacagggcctacctggagagggactgccctgcacagctgcagcagttgctggagctggggagaggtgttttggaccaacaagtgcctcctttggtgaaggtgacacatcatgtgacctcttcagtgaccactctacggtgtcgggccttgaactactacccccagaacatcaccatgaagtggctgaaggataagcagccaatggatgccaaggagttcgaacctaaagacgtattgcccaatggggatgggacctaccagggctggataaccttggctgtaccccctggggaagagcagagatatacgtgccaggtggagcacccaggcctggatcagcccctcattgtgatctgggagccctcaccgtctggcaccctagtcattggagtcatcagtggaattgctgtttttgtcgtcatcttgttcattggaattttgttcataatattaaggaagaggcagggttcaagaggagccatggggcactacgtcttagctgaacgtgagtgacacgcagcctgcagactcactgtgggaaggagacaaaactagagactcaaagagggagtgcatttatgagctcttcatgtttcaggagagagttgaacctaaacatagaaattgcctgacgaactccttgattttagccttctctgttcatttcctcaaaaagatttccccatttaggtttctgagttcctgcatgccggtgatccctagctgtgacctctcccctggaactgtctctcatgaacctcaagctgcatctagaggcttccttcatttcctccgtcacctcagagacatacacctatgtcatttcatttcctatttttggaagaggactccttaaatttgggggacttacatgattcattttaacatctgagaaaagctttgaaccctgggacgtggctagtcataaccttaccagatttttacacatgtatctatgcattttctggacccgttcaacttttcctttgaatcctctctctgtgttacccagtaactcatctgtcaccaagccttggggattcttccatctgattgtgatgtgagttgcacagctatgaaggctgtacactgcacgaatggaagaggcacctgtcccagaaaaagcatcatggctatctgtgggtagtatgatgggtgtttttagcaggtaggaggcaaatatcttgaaaggggttgtgaagaggtgttttttctaattggcatgaaggtgtcatacagatttgcaaagtttaatggtgccttcatttgggatg

SEQ ID NO: 140142 - DNA, 1158 bp, Homo sapiens
  Payload ID: 7481
  Gene Symbol: HFE
  Gene Name: hemochromatosis
  ENST ID: ENST00000309234
  CDS Start-End: 3-1016
aaatgggcccgcgagccaggccggcgcttctcctcctgatgcttttgcagaccgcggtcctgcaggggcgcttgctgcgttcacactctctgcactacctcttcatgggtgcctcagagcaggaccttggtctttccttgtttgaagctttgggctacgtggatgaccagctgttcgtgttctatgatcatgagagtcgccgtgtggagccccgaactccatgggtttccagtagaatttcaagccagatgtggctgcagctgagtcagagtctgaaagggtgggatcacatgttcactgttgacttctggactattatggaaaatcacaaccacagcaaggagtcccacaccctgcaggtcatcctgggctgtgaaatgcaagaagacaacagtaccgagggctactggaagtacgggtatgatgggcaggaccaccttgaattctgccctgacacactggattggagagcagcagaacccagggcctggcccaccaagctggagtgggaaaggcacaagattcgggccaggcagaacagggcctacctggagagggactgccctgcacagctgcagcagttgctggagctggggagaggtgttttggaccaacaagtgcctcctttggtgaaggtgacacatcatgtgacctcttcagtgaccactctacggtgtcgggccttgaactactacccccagaacatcaccatgaagtggctgaaggataagcagccaatggatgccaaggagttcgaacctaaagacgtattgcccaatggggatgggacctaccagggctggataaccttggctgtaccccctggggaagagcagagatatacgtgccaggtggagcacccaggcctggatcagcccctcattgtgatctgggagccctcaccgtctggcaccctagtcattggagtcatcagtggaattgctgtttttgtcgtcatcttgttcattggaattttgttcataatattaaggaagaggcagggttcaagtttctgagttcctgcatgccggtgatccctagctgtgacctctcccctggaactgtctctcatgaacctcaagctgcatctagaggcttccttcatttcctccgtcacctcagagacatacacctatgtcatttcatttcctatttttg

SEQ ID NO: 140143 - DNA, 809 bp, Homo sapiens
  Payload ID: 7481
  Gene Symbol: HFE
  Gene Name: hemochromatosis
  Uniprot ID: Q30201
  ENST ID: ENST00000353147
  CDS Start-End: 161-667
ctaaagttctgaaagacctgttgcttttcaccaggaagttttactgggcatctcctgagcctaggcaatagctgtagggtgacttctggagccatccccgtttccccgccccccaaaagaagcggagatttaacggggacgtgcggccagagctggggaaatgggcccgcgagccaggccggcgcttctcctcctgatgcttttgcagaccgcggtcctgcaggggcgcttgctgctgcctcctttggtgaaggtgacacatcatgtgacctcttcagtgaccactctacggtgtcgggccttgaactactacccccagaacatcaccatgaagtggctgaaggataagcagccaatggatgccaaggagttcgaacctaaagacgtattgcccaatggggatgggacctaccagggctggataaccttggctgtaccccctggggaagagcagagatatacgtgccaggtggagcacccaggcctggatcagcccctcattgtgatctgggagccctcaccgtctggcaccctagtcattggagtcatcagtggaattgctgtttttgtcgtcatcttgttcattggaattttgttcataatattaaggaagaggcagggttcaagaggagccatggggcactacgtcttagctgaacgtgagtgacacgcagcctgcagactcactgtgggaaggagacaaaactagagactcaaagagggagtgcatttatgagctcttcatgtttcaggagagagttgaacctaaacatagaaattgcctgacgaactccttgattttagccttc

SEQ ID NO: 140144 - DNA, 1922 bp, Homo sapiens
  Payload ID: 7481
  Gene Symbol: HFE
  Gene Name: hemochromatosis
  Uniprot ID: Q30201
  ENST ID: ENST00000317896
  CDS Start-End: 161-931
ctaaagttctgaaagacctgttgcttttcaccaggaagttttactgggcatctcctgagcctaggcaatagctgtagggtgacttctggagccatccccgtttccccgccccccaaaagaagcggagatttaacggggacgtgcggccagagctggggaaatgggcccgcgagccaggccggcgcttctcctcctgatgcttttgcagaccgcggtcctgcaggggcgcttgctgcgttcacactctctgcactacctcttcatgggtgcctcagagcaggaccttggtctttccttgtttgaagctttgggctacgtggatgaccagctgttcgtgttctatgatcatgagagtcgccgtgtggagccccgaactccatgggtttccagtagaatttcaagccagatgtggctgcagctgagtcagagtctgaaagggtgggatcacatgttcactgttgacttctggactattatggaaaatcacaaccacagcaaggtgcctcctttggtgaaggtgacacatcatgtgacctcttcagtgaccactctacggtgtcgggccttgaactactacccccagaacatcaccatgaagtggctgaaggataagcagccaatggatgccaaggagttcgaacctaaagacgtattgcccaatggggatgggacctaccagggctggataaccttggctgtaccccctggggaagagcagagatatacgtgccaggtggagcacccaggcctggatcagcccctcattgtgatctgggagccctcaccgtctggcaccctagtcattggagtcatcagtggaattgctgtttttgtcgtcatcttgttcattggaattttgttcataatattaaggaagaggcagggttcaagaggagccatggggcactacgtcttagctgaacgtgagtgacacgcagcctgcagactcactgtgggaaggagacaaaactagagactcaaagagggagtgcatttatgagctcttcatgtttcaggagagagttgaacctaaacatagaaattgcctgacgaactccttgattttagccttctctgttcatttcctcaaaaagatttccccatttaggtttctgagttcctgcatgccggtgatccctagctgtgacctctcccctggaactgtctctcatgaacctcaagctgcatctagaggcttccttcatttcctccgtcacctcagagacatacacctatgtcatttcatttcctatttttggaagaggactccttaaatttgggggacttacatgattcattttaacatctgagaaaagctttgaaccctgggacgtggctagtcataaccttaccagatttttacacatgtatctatgcattttctggacccgttcaacttttcctttgaatcctctctctgtgttacccagtaactcatctgtcaccaagccttggggattcttccatctgattgtgatgtgagttgcacagctatgaaggctgtacactgcacgaatggaagaggcacctgtcccagaaaaagcatcatggctatctgtgggtagtatgatgggtgtttttagcaggtaggaggcaaatatcttgaaaggggttgtgaagaggtgttttttctaattggcatgaaggtgtcatacagatttgcaaagtttaatggtgccttcatttgggatgctactctagtattccagacctgaagaatcacaataattttctacctggtctctccttgttctgataatgaaaattatgataaggatgataaaagcacttacttcgtgtccgactcttctgagcacctacttacatgcattactgcatgcacttcttacaataattctatgagataggtactattatccccatttcttttttaaatgaagaaagtgaagtaggccgggcac

SEQ ID NO: 140145 - DNA, 653 bp, Homo sapiens
  Payload ID: 7481
  Gene Symbol: HFE
  Gene Name: hemochromatosis
  Uniprot ID: Q30201
  ENST ID: ENST00000352392
  CDS Start-End: 161-391
ctaaagttctgaaagacctgttgcttttcaccaggaagttttactgggcatctcctgagcctaggcaatagctgtagggtgacttctggagccatccccgtttccccgccccccaaaagaagcggagatttaacggggacgtgcggccagagctggggaaatgggcccgcgagccaggccggcgcttctcctcctgatgcttttgcagaccgcggtcctgcaggggcgcttgctgcagccctcaccgtctggcaccctagtcattggagtcatcagtggaattgctgtttttgtcgtcatcttgttcattggaattttgttcataatattaaggaagaggcagggttcaagaggagccatggggcactacgtcttagctgaacgtgagtgacacgcagcctgcagactcactgtgggaaggagacaaaactagagactcaaagagggagtgcatttatgagctcttcatgtttcaggagagagttgaacctaaacatagaaattgcctgacgaactccttgattttagccttctctgttcatttcctcaaaaagatttccccatttaggtttctgagttcctgcatgccggtgatccctagctgtgacctctcccctggaactgtctctcatgaacctcaagctgcatctaga

SEQ ID NO: 140146 - DNA, 804 bp, Homo sapiens
  Payload ID: 7481
  Gene Symbol: HFE
  Gene Name: hemochromatosis
  Uniprot ID: Q30201
  ENST ID: ENST00000336625
  CDS Start-End: 45-773
aagaagcggagatttaacggggacgtgcggccagagctggggaaatgggcccgcgagccaggccggcgcttctcctcctgatgcttttgcagaccgcggtcctgcaggggcgcttgctgcgttcacactctctgcactacctcttcatgggtgcctcagagcaggaccttggtctttccttgtttgaagctttgggctacgtggatgaccagctgttcgtgttctatgatcatgagagtcgccgtgtggagccccgaactccatgggtttccagtagaatttcaagccagatgtggctgcagctgagtcagagtctgaaagggtgggatcacatgttcactgttgacttctggactattatggaaaatcacaaccacagcaaggtgaccactctacggtgtcgggccttgaactactacccccagaacatcaccatgaagtggctgaaggataagcagccaatggatgccaaggagttcgaacctaaagacgtattgcccaatggggatgggacctaccagggctggataaccttggctgtaccccctggggaagagcagagatatacgtgccaggtggagcacccaggcctggatcagcccctcattgtgatctgggagccctcaccgtctggcaccctagtcattggagtcatcagtggaattgctgtttttgtcgtcatcttgttcattggaattttgttcataatattaaggaagaggcagggttcaagaggagccatggggcactacgtcttagctgaacgtgagtgacacgcagcctgcagactcactgtgggaagga

SEQ ID NO: 140147 - DNA, 1280 bp, Homo sapiens
  Payload ID: 7481
  Gene Symbol: HFE
  Gene Name: hemochromatosis
  Uniprot ID: Q30201
  ENST ID: ENST00000397022
  CDS Start-End: 161-1138
ctaaagttctgaaagacctgttgcttttcaccaggaagttttactgggcatctcctgagcctaggcaatagctgtagggtgacttctggagccatccccgtttccccgccccccaaaagaagcggagatttaacggggacgtgcggccagagctggggaaatgggcccgcgagccaggccggcgcttctcctcctgatgcttttgcagaccgcggtcctgcaggggcgcttgctgcctttgggctacgtggatgaccagctgttcgtgttctatgatcatgagagtcgccgtgtggagccccgaactccatgggtttccagtagaatttcaagccagatgtggctgcagctgagtcagagtctgaaagggtgggatcacatgttcactgttgacttctggactattatggaaaatcacaaccacagcaaggagtcccacaccctgcaggtcatcctgggctgtgaaatgcaagaagacaacagtaccgagggctactggaagtacgggtatgatgggcaggaccaccttgaattctgccctgacacactggattggagagcagcagaacccagggcctggcccaccaagctggagtgggaaaggcacaagattcgggccaggcagaacagggcctacctggagagggactgccctgcacagctgcagcagttgctggagctggggagaggtgttttggaccaacaagtgcctcctttggtgaaggtgacacatcatgtgacctcttcagtgaccactctacggtgtcgggccttgaactactacccccagaacatcaccatgaagtggctgaaggataagcagccaatggatgccaaggagttcgaacctaaagacgtattgcccaatggggatgggacctaccagggctggataaccttggctgtaccccctggggaagagcagagatatacgtgccaggtggagcacccaggcctggatcagcccctcattgtgatctgggagccctcaccgtctggcaccctagtcattggagtcatcagtggaattgctgtttttgtcgtcatcttgttcattggaattttgttcataatattaaggaagaggcagggttcaagaggagccatggggcactacgtcttagctgaacgtgagtgacacgcagcctgcagactcactgtgggaaggagacaaaactagagactcaaagagggagtgcatttatgagctcttcatgtttcaggagagagttgaacctaaacatagaaattgcctgacgaactccttgattttagccttc

SEQ ID NO: 140148 - DNA, 5286 bp, Homo sapiens
  Payload ID: 7481
  Gene Symbol: HFE
  Gene Name: hemochromatosis
  Uniprot ID: Q30201
  ENST ID: ENST00000357618
  CDS Start-End: 123-1169
ttttactgggcatctcctgagcctaggcaatagctgtagggtgacttctggagccatccccgtttccccgccccccaaaagaagcggagatttaacggggacgtgcggccagagctggggaaatgggcccgcgagccaggccggcgcttctcctcctgatgcttttgcagaccgcggtcctgcaggggcgcttgctgcgttcacactctctgcactacctcttcatgggtgcctcagagcaggaccttggtctttccttgtttgaagctttgggctacgtggatgaccagctgttcgtgttctatgatcatgagagtcgccgtgtggagccccgaactccatgggtttccagtagaatttcaagccagatgtggctgcagctgagtcagagtctgaaagggtgggatcacatgttcactgttgacttctggactattatggaaaatcacaaccacagcaaggagtcccacaccctgcaggtcatcctgggctgtgaaatgcaagaagacaacagtaccgagggctactggaagtacgggtatgatgggcaggaccaccttgaattctgccctgacacactggattggagagcagcagaacccagggcctggcccaccaagctggagtgggaaaggcacaagattcgggccaggcagaacagggcctacctggagagggactgccctgcacagctgcagcagttgctggagctggggagaggtgttttggaccaacaagtgcctcctttggtgaaggtgacacatcatgtgacctcttcagtgaccactctacggtgtcgggccttgaactactacccccagaacatcaccatgaagtggctgaaggataagcagccaatggatgccaaggagttcgaacctaaagacgtattgcccaatggggatgggacctaccagggctggataaccttggctgtaccccctggggaagagcagagatatacgtgccaggtggagcacccaggcctggatcagcccctcattgtgatctgggagccctcaccgtctggcaccctagtcattggagtcatcagtggaattgctgtttttgtcgtcatcttgttcattggaattttgttcataatattaaggaagaggcagggttcaagaggagccatggggcactacgtcttagctgaacgtgagtgacacgcagcctgcagactcactgtgggaaggagacaaaactagagactcaaagagggagtgcatttatgagctcttcatgtttcaggagagagttgaacctaaacatagaaattgcctgacgaactccttgattttagccttctctgttcatttcctcaaaaagatttccccatttaggtttctgagttcctgcatgccggtgatccctagctgtgacctctcccctggaactgtctctcatgaacctcaagctgcatctagaggcttccttcatttcctccgtcacctcagagacatacacctatgtcatttcatttcctatttttggaagaggactccttaaatttgggggacttacatgattcattttaacatctgagaaaagctttgaaccctgggacgtggctagtcataaccttaccagatttttacacatgtatctatgcattttctggacccgttcaacttttcctttgaatcctctctctgtgttacccagtaactcatctgtcaccaagccttggggattcttccatctgattgtgatgtgagttgcacagctatgaaggctgtacactgcacgaatggaagaggcacctgtcccagaaaaagcatcatggctatctgtgggtagtatgatgggtgtttttagcaggtaggaggcaaatatcttgaaaggggttgtgaagaggtgttttttctaattggcatgaaggtgtcatacagatttgcaaagtttaatggtgccttcatttgggatgctactctagtattccagacctgaagaatcacaataattttctacctggtctctccttgttctgataatgaaaattatgataaggatgataaaagcacttacttcgtgtccgactcttctgagcacctacttacatgcattactgcatgcacttcttacaataattctatgagataggtactattatccccatttcttttttaaatgaagaaagtgaagtaggccgggcacggtggctcacgcctgtaatcccagcactttgggaggccaaagcgggtggatcacgaggtcaggagatcgagaccatcctggctaacatggtgaaaccccatctctaataaaaatacaaaaaattagctgggcgtggtggcagacgcctgtagtcccagctactcggaaggctgaggcaggagaatggcatgaacccaggaggcagagcttgcagtgagccgagtttgcgccactgcactccagcctaggtgacagagtgagactccatctcaaaaaaataaaaataaaaataaaaaaatgaaaaaaaaaagaaagtgaagtatagagtatctcatagtttgtcagtgatagaaacaggtttcaaactcagtcaatctgaccgtttgatacatctcagacaccactacattcagtagtttagatgcctagaataaatagagaaggaaggagatggctcttctcttgtctcattgtgtttcttctgagtgagcttgaatcacatgaaggggaacagcagaaaacaaccaactgatcctcagctgtcatgtttcctttaaaagtccctgaaggaaggtcctggaatgtgactcccttgctcctctgttgctctctttggcattcatttctttggaccctacgcaaggactgtaattggtggggacagctagtggccctgctgggcttcacacacggtgtcctccctaggccagtgcctctggagtcagaactctggtggtatttccctcaatgaagtggagtaagctctctcattttgagatggtataatggaagccaccaagtggcttagaggatgcccaggtccttccatggagccactggggttccggtgcacattaaaaaaaaaatctaaccaggacattcaggaattgctagattctgggaaatcagttcaccatgttcaaaagagtcttttttttttttttgagactctattgcccaggctggagtgcaatggcatgatctcggctcactgtaacctctgcctcccaggttcaagcgattctcctgtctcagcctcccaagtagctgggattacaggcgtgcaccaccatgcccggctaatttttgtatttttagtagagacagggtttcaccatgttggccaggctggtctcgaactctcctgacctcgtgatccgcctgcctcggcctcccaaagtgctgagattacaggtgtgagccaccctgcccagccgtcaaaagagtcttaatatatatatccagatggcatgtgtttactttatgttactacatgcacttggctgcataaatgtggtacaagcattctgtcttgaagggcaggtgcttcaggataccatatacagctcagaagtttcttctttaggcattaaattttagcaaagatatctcatctcttcttttaaaccattttctttttttgtggttagaaaagttatgtagaaaaaagtaaatgtgatttacgctcattgtagaaaagctataaaatgaatacaattaaagctgttatttaattagccagtgaaaaactattaacaacttgtctattacctgttagtattattgttgcattaaaaatgcatatactttaataaatgtatattgtattgtatactgcatgattttattgaagttcttgttcatcttgtgtatatacttaatcgctttgtcattttggagacatttattttgcttctaatttctttacattttgtcttacggaatattttcattcaactgtggtagccgaattaatcgtgtttcttcactctagggacattgtcgtctaagttgtaagacattggttattttaccagcaaaccattctgaaagcatatgacaaattatttctctcttaatatcttactatactgaaagcagactgctataaggcttcacttactcttctacctcataaggaatatgttacaattaatttattaggtaagcatttgttttatattggttttatttcacctgggctgagatttcaagaaacaccccagtcttcacagtaacacatttcactaacacatttactaaacatcagcaactgtggcctgttaatttttttaatagaaattttaagtcctcattttctttcggtgttttttaagcttaatttttctggctttattcataaattcttaaggtcaactacatttgaaaaatcaaagacctgcattttaaattcttattcacctctggcaaaaccattcacaaaccatggtagtaaagagaagggtgacacctggtggccataggtaaatgtaccacggtggtccggtgaccagagatgcagcgctgagggttttcctgaaggtaaaggaataaagaatgggtggaggggcgtgcactggaaatcacttgtagagaaaagcccctgaaaatttgagaaaacaaacaagaaactacttaccagctatttgaattgctggaatcacaggccattgctgagctgcctgaactgggaacacaacagaaggaaaacaaaccactctgataatcattgagtcaagtacagcaggtgattgaggactgctgagaggtacaggccaaaattcttatgttgtattataataatgtcatcttataatactgtcagtattttataaaacattcttcacaaactcacacacatttaaaaacaaaacactgtctctaaaatccccaaatttttcataaactcagttttaaactaactttttttcaaaccacaatctgatttaacaatgactatcatttaaatatttctgactttcaaattaaagattttcacatgcaggctgatatttgtaattgtgattctctctgtaggctttgggtataatgtgttcttttccttttttgcatcagcgattaacttctacactctaacatgtagaatgttactacaatattaaagtattttgtatgacaattttatttgaaagcctaggatgcgttgacatcctgcatgcatttattacttgatatgcatgcattctggtatctcaagcattctatttctgagtaattgtttaaggtgtagaagagatagatatggtggatttggagttgatacttatatattttctatttcttggatggatgaatttgtacattaaaagttttccatggcagaaa

SEQ ID NO: 140149 - DNA, 777 bp, Homo sapiens
  Payload ID: 7481
  Gene Symbol: HFE
  Gene Name: hemochromatosis
  ENST ID: ENST00000485729
  CDS Start-End: 1-168
attgtgatctgggagccctcaccgtctggcaccctagtcattggagtcatcagtggaattgctgtttttgtcgtcatcttgttcattggaattttgttcataatattaaggaagaggcagggttcaagaggagccatggggcactacgtcttagctgaacgtttctgagttcctgcatgccggtgatccctagctgtgacctctcccctggaactgtctctcatgaacctcaagctgcatctagaggcttccttcatttcctccgtcacctcagagacatacacctatgtcatttcatttcctatttttggaagaggactccttaaatttgggggacttacatgattcattttaacatctgagaaaagctttgaaccctgggacgtggctagtcataaccttaccagatttttacacatgtatctatgcattttctggacccgttcaacttttcctttgaatcctctctctgtgttacccagtaactcatctgtcaccaagccttggggattcttccatctgattgtgatgtgagttgcacagctatgaaggctgtacactgcacgaatggaagaggcacctgtcccagaaaaagcatcatggctatctgtgggtagtatgatgggtgtttttagcaggtaggaggcaaatatcttgaaaggggttgtgaagaggtgttttttctaattggcatgaaggtgtcatacagatttgcaaagtttaatggtgccttcatttgggatgctactctagtattccagacctgaagaatcacaa

SEQ ID NO: 140150 - DNA, 1123 bp, Homo sapiens
  Payload ID: 7481
  Gene Symbol: HFE
  Gene Name: hemochromatosis
  ENST ID: ENST00000470149
  CDS Start-End: 50-1087
cccaaaagaagcggagatttaacggggacgtgcggccagagctggggaaatgggcccgcgagccaggccggcgcttctcctcctgatgcttttgcagaccgcggtcctgcaggggcgcttgctgcgttcacactctctgcactacctcttcatgggtgcctcagagcaggaccttggtctttccttgtttgaagctttgggctacgtggatgaccagctgttcgtgttctatgatcatgagagtcgccgtgtggagccccgaactccatgggtttccagtagaatttcaagccagatgtggctgcagctgagtcagagtctgaaagggtgggatcacatgttcactgttgacttctggactattatggaaaatcacaaccacagcaaggagtcccacaccctgcaggtcatcctgggctgtgaaatgcaagaagacaacagtaccgagggctactggaagtacgggtatgatgggcaggaccaccttgaattctgccctgacacactggattggagagcagcagaacccagggcctggcccaccaagctggagtgggaaaggcacaagattcgggccaggcagaacagggcctacctggagagggactgccctgcacagctgcagcagttgctggagctggggagaggtgttttggaccaacaagaaggaagtgaaagttccagtcttcctggcaaggtgaccactctacggtgtcgggccttgaactactacccccagaacatcaccatgaagtggctgaaggataagcagccaatggatgccaaggagttcgaacctaaagacgtattgcccaatggggatgggacctaccagggctggataaccttggctgtaccccctggggaagagcagagatatacgtgccaggtggagcacccaggcctggatcagcccctcattgtgatctgggagccctcaccgtctggcaccctagtcattggagtcatcagtggaattgctgtttttgtcgtcatcttgttcattggaattttgttcataatattaaggaagaggcagggttcaagaggagccatggggcactacgtcttagctgaacgtgagtgacacgcagcctgcagactcactgtgggaaggagacaa

SEQ ID NO: 140151 - DNA, 781 bp, Homo sapiens
  Payload ID: 7481
  Gene Symbol: HFE
  Gene Name: hemochromatosis
  Uniprot ID: Q30201
  ENST ID: ENST00000488199
  CDS Start-End: 37-777
gagatttaacggggacgtgcggccagagctggggaaatgggcccgcgagccaggccggcgcttctcctcctgatgcttttgcagaccgcggtcctgcaggggcgcttgctgcagtcccacaccctgcaggtcatcctgggctgtgaaatgcaagaagacaacagtaccgagggctactggaagtacgggtatgatgggcaggaccaccttgaattctgccctgacacactggattggagagcagcagaacccagggcctggcccaccaagctggagtgggaaaggcacaagattcgggccaggcagaacagggcctacctggagagggactgccctgcacagctgcagcagttgctggagctggggagaggtgttttggaccaacaagtgaccactctacggtgtcgggccttgaactactacccccagaacatcaccatgaagtggctgaaggataagcagccaatggatgccaaggagttcgaacctaaagacgtattgcccaatggggatgggacctaccagggctggataaccttggctgtaccccctggggaagagcagagatatacgtgccaggtggagcacccaggcctggatcagcccctcattgtgatctgggagccctcaccgtctggcaccctagtcattggagtcatcagtggaattgctgtttttgtcgtcatcttgttcattggaattttgttcataatattaaggaagaggcagggttcaagaggagccatggggcactacgtcttagctgaacgtgagtgacacg

SEQ ID NO: 140152 - DNA, 1045 bp, Homo sapiens
  Payload ID: 7481
  Gene Symbol: HFE
  Gene Name: hemochromatosis
  Uniprot ID: Q30201
  ENST ID: ENST00000461397
  CDS Start-End: 37-1041
gagatttaacggggacgtgcggccagagctggggaaatgggcccgcgagccaggccggcgcttctcctcctgatgcttttgcagaccgcggtcctgcaggggcgcttgctgcgttcacactctctgcactacctcttcatgggtgcctcagagcaggaccttggtctttccttgtttgaagctttgggctacgtggatgaccagctgttcgtgttctatgatcatgagagtcgccgtgtggagccccgaactccatgggtttccagtagaatttcaagccagatgtggctgcagctgagtcagagtctgaaagggtgggatcacatgttcactgttgacttctggactattatggaaaatcacaaccacagcaaggagtcccacaccctgcaggtcatcctgggctgtgaaatgcaagaagacaacagtaccgagggctactggaagtacgggtatgatgggcaggaccaccttgaattctgccctgacacactggattggagagcagcagaacccagggcctggcccaccaagctggagtgggaaaggcacaagattcgggccaggcagaacagggcctacctggagagggactgccctgcacagctgcagcagttgctggagctggggagaggtgttttggaccaacaagtgaccactctacggtgtcgggccttgaactactacccccagaacatcaccatgaagtggctgaaggataagcagccaatggatgccaaggagttcgaacctaaagacgtattgcccaatggggatgggacctaccagggctggataaccttggctgtaccccctggggaagagcagagatatacgtgccaggtggagcacccaggcctggatcagcccctcattgtgatctgggagccctcaccgtctggcaccctagtcattggagtcatcagtggaattgctgtttttgtcgtcatcttgttcattggaattttgttcataatattaaggaagaggcagggttcaagaggagccatggggcactacgtcttagctgaacgtgagtgacacg

SEQ ID NO: 140153 - DNA, 2234 bp, Homo sapiens
  Payload ID: 7482
  Gene Symbol: HFE2
  Gene Name: hemochromatosis type 2 (juvenile)
  Uniprot ID: Q6ZVN8
  ENST ID: ENST00000336751
  CDS Start-End: 345-1625
ggacttagctatttttaaaaccgtcaactcagtagccacctccctccctgctcagctgtccagtactctggccagccatatactcccccttccccccataccaaaccttctctggttccctgacctcagtgagacagcagccggcctggggacctgggggagacacggaggaccccctggctggagctgacccacagagtagggaatcatggctggagaattggatagcagagtaatgtttgacctctggaaacatcacttacagggcttccggtcaaaattcactaggtaggagggtcatcagctgggaagaaccggcgcctgggaaacctggctggataggtatgggggagccaggccagtcccctagtcccaggtcctcccatggcagtcccccaactctaagcactctcactctcctgctgctcctctgtggacatgctcattctcaatgcaagatcctccgctgcaatgctgagtacgtatcgtccactctgagccttagaggtgggggttcatcaggagcacttcgaggaggaggaggaggaggccggggtggaggggtgggctctggcggcctctgtcgagccctccgctcctatgcgctctgcactcggcgcaccgcccgcacctgccgcggggacctcgccttccattcggcggtacatggcatcgaagacctgatgatccagcacaactgctcccgccagggccctacagcccctcccccgccccggggccccgcccttccaggcgcgggctccggcctccctgccccggacccttgtgactatgaaggccggttttcccggctgcatggtcgtcccccggggttcttgcattgcgcttccttcggggacccccatgtgcgcagcttccaccatcactttcacacatgccgtgtccaaggagcttggcctctactggataatgacttcctctttgtccaagccaccagctcccccatggcgttgggggccaacgctaccgccacccggaagctcaccatcatatttaagaacatgcaggaatgcattgatcagaaggtgtatcaggctgaggtggataatcttcctgtagcctttgaagatggttctatcaatggaggtgaccgacctgggggatccagtttgtcgattcaaactgctaaccctgggaaccatgtggagatccaagctgcctacattggcacaactataatcattcggcagacagctgggcagctctccttctccatcaaggtagcagaggatgtggccatggccttctcagctgaacaggacctgcagctctgtgttggggggtgccctccaagtcagcgactctctcgatcagagcgcaatcgtcggggagctataaccattgatactgccagacggctgtgcaaggaagggcttccagtggaagatgcttacttccattcctgtgtctttgatgttttaatttctggtgatcccaactttaccgtggcagctcaggcagcactggaggatgcccgagccttcctgccagacttagagaagctgcatctcttcccctcagatgctggggttcctctttcctcagcaaccctcttagctccactcctttctgggctctttgttctgtggctttgcattcagtaaggggaccatcagtcccattactagtttggaaatgatttggagatacagattggcatagaagaatgtaaagaatcattaaaggaagcagggcctaggagacacgtgaaacaatgacattatccagagtcagatgaggctgcagtccagggttgaaattatcacagaataaggattctgggcaaggttactgcattccggatctctgtggggctcttcaccaatttttccagcctcatttatagtaaacaaattgttctaatccatttactgcagatttcacccttataagtttagaggtcatgaaggttttaatgatcagtaaagatttaagggttgagatttttaagaggcaagagctgaaagcagaagacatgatcattagccataagaaactcaaaggaggaagacataattagggaaagaagtctatttgatgaatatgtgtgtgtaaggtatgttctgctttcttgattcaaaaatgaagcaggcattgtctagctcttaggtgaagggagtctctgcttttgaagaatggcacaggtaggacagaagtatcatccctaccccctaactaatctgttattaaagctacaaattcttcacaccatc

SEQ ID NO: 140154 - DNA, 2123 bp, Homo sapiens
  Payload ID: 7482
  Gene Symbol: HFE2
  Gene Name: hemochromatosis type 2 (juvenile)
  Uniprot ID: Q6ZVN8
  ENST ID: ENST00000357836
  CDS Start-End: 575-1516
atattctttctaatcctctaaccctccccactcccccaactcccacaccctacccccaccaacgttcctggaattttggacttagctatttttaaaaccgtcaactcagtagccacctccctccctgctcagctgtccagtactctggccagccatatactcccccttccccccataccaaaccttctctggttccctgacctcagtgagacagcagccggcctggggacctgggggagacacggaggaccccctggctggagctgacccacagagtagggaatcatggctggagaattggatagcagagtaatgtttgacctctggaaacactcattctcaatgcaagatcctccgctgcaatgctgagtacgtatcgtccactctgagccttagaggtgggggttcatcaggagcacttcgaggaggaggaggaggaggccggggtggaggggtgggctctggcggcctctgtcgagccctccgctcctatgcgctctgcactcggcgcaccgcccgcacctgccgcggggacctcgccttccattcggcggtacatggcatcgaagacctgatgatccagcacaactgctcccgccagggccctacagcccctcccccgccccggggccccgcccttccaggcgcgggctccggcctccctgccccggacccttgtgactatgaaggccggttttcccggctgcatggtcgtcccccggggttcttgcattgcgcttccttcggggacccccatgtgcgcagcttccaccatcactttcacacatgccgtgtccaaggagcttggcctctactggataatgacttcctctttgtccaagccaccagctcccccatggcgttgggggccaacgctaccgccacccggaagctcaccatcatatttaagaacatgcaggaatgcattgatcagaaggtgtatcaggctgaggtggataatcttcctgtagcctttgaagatggttctatcaatggaggtgaccgacctgggggatccagtttgtcgattcaaactgctaaccctgggaaccatgtggagatccaagctgcctacattggcacaactataatcattcggcagacagctgggcagctctccttctccatcaaggtagcagaggatgtggccatggccttctcagctgaacaggacctgcagctctgtgttggggggtgccctccaagtcagcgactctctcgatcagagcgcaatcgtcggggagctataaccattgatactgccagacggctgtgcaaggaagggcttccagtggaagatgcttacttccattcctgtgtctttgatgttttaatttctggtgatcccaactttaccgtggcagctcaggcagcactggaggatgcccgagccttcctgccagacttagagaagctgcatctcttcccctcagatgctggggttcctctttcctcagcaaccctcttagctccactcctttctgggctctttgttctgtggctttgcattcagtaaggggaccatcagtcccattactagtttggaaatgatttggagatacagattggcatagaagaatgtaaagaatcattaaaggaagcagggcctaggagacacgtgaaacaatgacattatccagagtcagatgaggctgcagtccagggttgaaattatcacagaataaggattctgggcaaggttactgcattccggatctctgtggggctcttcaccaatttttccagcctcatttatagtaaacaaattgttctaatccatttactgcagatttcacccttataagtttagaggtcatgaaggttttaatgatcagtaaagatttaagggttgagatttttaagaggcaagagctgaaagcagaagacatgatcattagccataagaaactcaaaggaggaagacataattagggaaagaagtctatttgatgaatatgtgtgtgtaaggtatgttctgctttcttgattcaaaaatgaagcaggcattgtctagctcttaggtgaagggagtctctgcttttgaagaatggcacaggtaggacagaagtatcatccctaccccctaactaatctgttattaaagctacaaattcttcacacca

SEQ ID NO: 140155 - DNA, 536 bp, Homo sapiens
  Payload ID: 7482
  Gene Symbol: HFE2
  Gene Name: hemochromatosis type 2 (juvenile)
  ENST ID: ENST00000421822
  CDS Start-End: 257-536
cttctctggttccctgacctcagtgagacagcagccggcctggggacctgggggagacacggaggaccccctggctggagctgacccacagagtagggaatcatggctggagaattggatagcagagtaatgtttgacctctggaaacaccaaatttcttttttcagtcacttacagggcttccggtcaaaattcactaggtaggagggtcatcagctgggaagaaccggcgcctgggaaacctggctggataggtatgggggagccaggccagtcccctagtcccaggtcctcccatggcagtcccccaactctaagcactctcactctcctgctgctcctctgtggacatgctcattctcaatgcaagatcctccgctgcaatgctgagtacgtatcgtccactctgagccttagaggtgggggttcatcaggagcacttcgaggaggaggaggaggaggccggggtggaggggtgggctctggcggcctctgtcgagccctccgctcctatgcgctctgcactcggcgcaccg

SEQ ID NO: 140156 - DNA, 1419 bp, Homo sapiens
  Payload ID: 7482
  Gene Symbol: HFE2
  Gene Name: hemochromatosis type 2 (juvenile)
  Uniprot ID: Q6ZVN8
  ENST ID: ENST00000497365
  CDS Start-End: 208-810
cttctctggttccctgacctcagtgagacagcagccggcctggggacctgggggagacacggaggaccccctggctggagctgacccacagagtagggaatcatggctggagaattggatagcagagtaatgtttgacctctggaaacactcattctcaatgcaagatcctccgctgcaatgctgactcaccatcatatttaagaacatgcaggaatgcattgatcagaaggtgtatcaggctgaggtggataatcttcctgtagcctttgaagatggttctatcaatggaggtgaccgacctgggggatccagtttgtcgattcaaactgctaaccctgggaaccatgtggagatccaagctgcctacattggcacaactataatcattcggcagacagctgggcagctctccttctccatcaaggtagcagaggatgtggccatggccttctcagctgaacaggacctgcagctctgtgttggggggtgccctccaagtcagcgactctctcgatcagagcgcaatcgtcggggagctataaccattgatactgccagacggctgtgcaaggaagggcttccagtggaagatgcttacttccattcctgtgtctttgatgttttaatttctggtgatcccaactttaccgtggcagctcaggcagcactggaggatgcccgagccttcctgccagacttagagaagctgcatctcttcccctcagatgctggggttcctctttcctcagcaaccctcttagctccactcctttctgggctctttgttctgtggctttgcattcagtaaggggaccatcagtcccattactagtttggaaatgatttggagatacagattggcatagaagaatgtaaagaatcattaaaggaagcagggcctaggagacacgtgaaacaatgacattatccagagtcagatgaggctgcagtccagggttgaaattatcacagaataaggattctgggcaaggttactgcattccggatctctgtggggctcttcaccaatttttccagcctcatttatagtaaacaaattgttctaatccatttactgcagatttcacccttataagtttagaggtcatgaaggttttaatgatcagtaaagatttaagggttgagatttttaagaggcaagagctgaaagcagaagacatgatcattagccataagaaactcaaaggaggaagacataattagggaaagaagtctatttgatgaatatgtgtgtgtaaggtatgttctgctttcttgattcaaaaatgaagcaggcattgtctagctcttaggtgaagggagtctctgcttttgaagaatggcacaggtaggacagaagtatcatccctaccccctaactaatctgttattaaagctacaaattcttcacaccatc

SEQ ID NO: 140157 - DNA, 1381 bp, Homo sapiens
  Payload ID: 7482
  Gene Symbol: HFE2
  Gene Name: hemochromatosis type 2 (juvenile)
  Uniprot ID: Q6ZVN8
  ENST ID: ENST00000475797
  CDS Start-End: 170-772
ttctctggttccctgacctcagtgagacagcagccggcctggggacctgggggagacacggaggaccccctggctggagctgacccacagagtagggaatcatggctggagaattggatagcagagtaatgtttgacctctggaaacactcaccatcatatttaagaacatgcaggaatgcattgatcagaaggtgtatcaggctgaggtggataatcttcctgtagcctttgaagatggttctatcaatggaggtgaccgacctgggggatccagtttgtcgattcaaactgctaaccctgggaaccatgtggagatccaagctgcctacattggcacaactataatcattcggcagacagctgggcagctctccttctccatcaaggtagcagaggatgtggccatggccttctcagctgaacaggacctgcagctctgtgttggggggtgccctccaagtcagcgactctctcgatcagagcgcaatcgtcggggagctataaccattgatactgccagacggctgtgcaaggaagggcttccagtggaagatgcttacttccattcctgtgtctttgatgttttaatttctggtgatcccaactttaccgtggcagctcaggcagcactggaggatgcccgagccttcctgccagacttagagaagctgcatctcttcccctcagatgctggggttcctctttcctcagcaaccctcttagctccactcctttctgggctctttgttctgtggctttgcattcagtaaggggaccatcagtcccattactagtttggaaatgatttggagatacagattggcatagaagaatgtaaagaatcattaaaggaagcagggcctaggagacacgtgaaacaatgacattatccagagtcagatgaggctgcagtccagggttgaaattatcacagaataaggattctgggcaaggttactgcattccggatctctgtggggctcttcaccaatttttccagcctcatttatagtaaacaaattgttctaatccatttactgcagatttcacccttataagtttagaggtcatgaaggttttaatgatcagtaaagatttaagggttgagatttttaagaggcaagagctgaaagcagaagacatgatcattagccataagaaactcaaaggaggaagacataattagggaaagaagtctatttgatgaatatgtgtgtgtaaggtatgttctgctttcttgattcaaaaatgaagcaggcattgtctagctcttaggtgaagggagtctctgcttttgaagaatggcacaggtaggacagaagtatcatccctaccccctaactaatctgttattaaagctacaaattcttcacaccatc

SEQ ID NO: 140158 - DNA, 506 bp, Homo sapiens
  Payload ID: 7482
  Gene Symbol: HFE2
  Gene Name: hemochromatosis type 2 (juvenile)
  ENST ID: ENST00000634927
  CDS Start-End: 239-451
cttctctggttccctgacctcagtgagacagcagccggcctggggacctgggggagacacggaggaccccctggctggagctgacccacagagtagggaatcatggctggagaattggatagcagagtaatgtttgacctctggaaacatcacttacagggcttccggtcaaaattcactaggtaggagggtcatcagctgggaagaaccggcgcctgggaaacctggctggataggtatgggggagccaggccagtcccctagtcccaggtcctcccatggcagtcccccaactctaagcactctcactctcctgctgctcctctgtggacatgctcattctcaatgcaagatcctccgctgcaatgctgactcaccatcatatttaagaacatgcaggaatgcattgatcagaaggtgtatcaggctgaggtggataatcttcctgtagcctttgaagatggttctatcaatggaggtgaccgacctgggggatccagtttgtc

SEQ ID NO: 140159 - DNA, 2192 bp, Homo sapiens
  Payload ID: 7483
  Gene Symbol: HEMGN
  Gene Name: hemogen
  Uniprot ID: Q9BXL5
  ENST ID: ENST00000259456
  CDS Start-End: 145-1599
cggcagacatatgacagaagactgaacaaccagaagttatgaagataggtactgtgggtgttagaaagattcacggcaaaacagggaagcatctaggctgcttgtggaagtcagaccaaaatagcaggaaggtattgcagcaagatggatttgggaaaggaccaatctcatttgaagcaccatcagacacctgaccctcatcaagaagagaaccattctccagaagtcattggaacctggagtttgagaaacagagaactacttagaaaaagaaaagctgaagtgcatgaaaaggaaacatcacaatggctatttggagaacagaaaaaacgcaagcagcagagaacaggaaaaggaaatcgaagaggcagaaagagacaacaaaacacagaattgaaggtggagcctcagccacagatagaaaaggaaatagtggagaaagcactggcacctatagagaaaaaaactgagccacctgggagcataaccaaagtatttccttcagtagcctccccgcaaaaagttgtgcctgaggaacacttttctgaaatatgtcaagaaagtaacatatatcaggagaatttttctgagtaccaagaaatagcagtacaaaaccattcttctgaaacatgccaacatgtgtctgaacctgaagacctctctcctaaaatgtaccaagaaatatctgtacttcaagacaattcttccaaaatatgccaagacatgaaggaacctgaagacaactctcctaacacatgccaagtaatatctgtaattcaagaccatcctttcaaaatgtaccaagatatggctaaacgagaagatctggctcctaaaatgtgccaagaagctgctgtacccaaaatccttccttgtccaacatctgaagacacagctgatctggcaggatgctctcttcaagcatatccaaaaccagatgtgcctaaaggctatattcttgacacagaccaaaatccagcagaaccagaggaatacaatgaaacagatcaaggaatagctgagacagaaggcctttttcctaaaatacaagaaatagctgagcctaaagacctttctacaaaaacacaccaagaatcagctgaacctaaataccttcctcataaaacatgtaacgaaattattgtgcctaaagccccctctcataaaacaatccaagaaacacctcattctgaagactattcaattgaaataaaccaagaaactcctgggtctgaaaaatattcacctgaaacgtatcaagaaatacctgggcttgaagaatattcacctgaaatataccaagaaacatcccagcttgaagaatattcacctgaaatataccaagaaacaccggggcctgaagacctctctactgagacatataaaaataaggatgtgcctaaagaatgctttccagaaccacaccaagaaacaggtgggccccaaggccaggatcctaaagcacaccaggaagatgctaaagatgcttatacttttcctcaagaaatgaaagaaaaacccaaagaagagccaggaataccagcaattctgaatgagagtcatccagaaaatgatgtctatagttatgttttgttttaacaatgctcaaccataaagttgtggtccaatggaacatacagcttaatagtttatgcgtgattttctcaaaatattgtaaaacttttgacaatgctcattaatattattttttctatttgtagaccatatctgaaagaaataacattttttaaggctctaccacatagacaatatcatgctagaatgtgtgtgtgtgtgtgtgtgtgtgtgtgtgtatgtatgtataggtcggggagaggatagtggtgggaacagacaaataaggaagcggggaggactggataattggttttcccccctaagaacatttatttacgtcttaagagcagataagtgactaagactgaacacatacattttgtggagtatatagttttcttgtaaatgctgttcaattattaatgtaacagtagcatcaaaattttattcaggctttagttgactcttttggtcagttttaacaattctccttaaaagatattttggagtgatgaatgtagtttacttttgtatttgaattttgattttctatttttattttttaaatattgtatttgtgcacaatgtacattaaatcattattacatgcttaa

SEQ ID NO: 140160 - DNA, 2305 bp, Homo sapiens
  Payload ID: 7483
  Gene Symbol: HEMGN
  Gene Name: hemogen
  Uniprot ID: Q9BXL5
  ENST ID: ENST00000616898
  CDS Start-End: 258-1712
ataaatagcaacctatgctaggggttgctagcaccagccatttcccctactcacacctgtgcagtgtgataaagatagtagaattagcctgcagttgtggtccaaccagataaaacttttaggcgggaagtcaagtgacaggcaaacttgtgtgtgtggtttttttttttaagtgttagatgtttttgatattttaaaaaagcatctaggctgcttgtggaagtcagaccaaaatagcaggaaggtattgcagcaagatggatttgggaaaggaccaatctcatttgaagcaccatcagacacctgaccctcatcaagaagagaaccattctccagaagtcattggaacctggagtttgagaaacagagaactacttagaaaaagaaaagctgaagtgcatgaaaaggaaacatcacaatggctatttggagaacagaaaaaacgcaagcagcagagaacaggaaaaggaaatcgaagaggcagaaagagacaacaaaacacagaattgaaggtggagcctcagccacagatagaaaaggaaatagtggagaaagcactggcacctatagagaaaaaaactgagccacctgggagcataaccaaagtatttccttcagtagcctccccgcaaaaagttgtgcctgaggaacacttttctgaaatatgtcaagaaagtaacatatatcaggagaatttttctgagtaccaagaaatagcagtacaaaaccattcttctgaaacatgccaacatgtgtctgaacctgaagacctctctcctaaaatgtaccaagaaatatctgtacttcaagacaattcttccaaaatatgccaagacatgaaggaacctgaagacaactctcctaacacatgccaagtaatatctgtaattcaagaccatcctttcaaaatgtaccaagatatggctaaacgagaagatctggctcctaaaatgtgccaagaagctgctgtacccaaaatccttccttgtccaacatctgaagacacagctgatctggcaggatgctctcttcaagcatatccaaaaccagatgtgcctaaaggctatattcttgacacagaccaaaatccagcagaaccagaggaatacaatgaaacagatcaaggaatagctgagacagaaggcctttttcctaaaatacaagaaatagctgagcctaaagacctttctacaaaaacacaccaagaatcagctgaacctaaataccttcctcataaaacatgtaacgaaattattgtgcctaaagccccctctcataaaacaatccaagaaacacctcattctgaagactattcaattgaaataaaccaagaaactcctgggtctgaaaaatattcacctgaaacgtatcaagaaatacctgggcttgaagaatattcacctgaaatataccaagaaacatcccagcttgaagaatattcacctgaaatataccaagaaacaccggggcctgaagacctctctactgagacatataaaaataaggatgtgcctaaagaatgctttccagaaccacaccaagaaacaggtgggccccaaggccaggatcctaaagcacaccaggaagatgctaaagatgcttatacttttcctcaagaaatgaaagaaaaacccaaagaagagccaggaataccagcaattctgaatgagagtcatccagaaaatgatgtctatagttatgttttgttttaacaatgctcaaccataaagttgtggtccaatggaacatacagcttaatagtttatgcgtgattttctcaaaatattgtaaaacttttgacaatgctcattaatattattttttctatttgtagaccatatctgaaagaaataacattttttaaggctctaccacatagacaatatcatgctagaatgtgtgtgtgtgtgtgtgtgtgtgtgtgtgtatgtatgtataggtcggggagaggatagtggtgggaacagacaaataaggaagcggggaggactggataattggttttcccccctaagaacatttatttacgtcttaagagcagataagtgactaagactgaacacatacattttgtggagtatatagttttcttgtaaatgctgttcaattattaatgtaacagtagcatcaaaattttattcaggctttagttgactcttttggtcagttttaacaattctccttaaaagatattttggagtgatgaatgtagtttacttttgtatttgaattttgattttctatttttattttttaaatattgtatttgtgcacaatgtacattaaatcattattacatgcttaa

SEQ ID NO: 140161 - DNA, 577 bp, Homo sapiens
  Payload ID: 7484
  Gene Symbol: HBA1
  Gene Name: hemoglobin, alpha 1
  Uniprot ID: P69905
  ENST ID: ENST00000320868
  CDS Start-End: 38-466
actcttctggtccccacagactcagagagaacccaccatggtgctgtctcctgccgacaagaccaacgtcaaggccgcctggggtaaggtcggcgcgcacgctggcgagtatggtgcggaggccctggagaggatgttcctgtccttccccaccaccaagacctacttcccgcacttcgacctgagccacggctctgcccaggttaagggccacggcaagaaggtggccgacgcgctgaccaacgccgtggcgcacgtggacgacatgcccaacgcgctgtccgccctgagcgacctgcacgcgcacaagcttcgggtggacccggtcaacttcaagctcctaagccactgcctgctggtgaccctggccgcccacctccccgccgagttcacccctgcggtgcacgcctccctggacaagttcctggcttctgtgagcaccgtgctgacctccaaataccgttaagctggagcctcggtggccatgcttcttgccccttgggcctccccccagcccctcctccccttcctgcacccgtacccccgtggtctttgaataaagtctgagtgggcggca

SEQ ID NO: 140162 - DNA, 504 bp, Homo sapiens
  Payload ID: 7484
  Gene Symbol: HBA1
  Gene Name: hemoglobin, alpha 1
  ENST ID: ENST00000397797
  CDS Start-End: 61-393
gagagaacccaccatggtgctgtctcctgccgacaagaccaacgtcaaggccgcctggggatgttcctgtccttccccaccaccaagacctacttcccgcacttcgacctgagccacggctctgcccaggttaagggccacggcaagaaggtggccgacgcgctgaccaacgccgtggcgcacgtggacgacatgcccaacgcgctgtccgccctgagcgacctgcacgcgcacaagcttcgggtggacccggtcaacttcaagctcctaagccactgcctgctggtgaccctggccgcccacctccccgccgagttcacccctgcggtgcacgcctccctggacaagttcctggcttctgtgagcaccgtgctgacctccaaataccgttaagctggagcctcggtggccatgcttcttgccccttgggcctccccccagcccctcctccccttcctgcacccgtacccccgtggtctttgaataaagtctgagtgggcggca

SEQ ID NO: 140163 - DNA, 605 bp, Homo sapiens
  Payload ID: 7485
  Gene Symbol: HBA2
  Gene Name: hemoglobin, alpha 2
  Uniprot ID: P69905
  ENST ID: ENST00000251595
  CDS Start-End: 67-495
cataaaccctggcgcgctcgcgggccggcactcttctggtccccacagactcagagagaacccaccatggtgctgtctcctgccgacaagaccaacgtcaaggccgcctggggtaaggtcggcgcgcacgctggcgagtatggtgcggaggccctggagaggatgttcctgtccttccccaccaccaagacctacttcccgcacttcgacctgagccacggctctgcccaggttaagggccacggcaagaaggtggccgacgcgctgaccaacgccgtggcgcacgtggacgacatgcccaacgcgctgtccgccctgagcgacctgcacgcgcacaagcttcgggtggacccggtcaacttcaagctcctaagccactgcctgctggtgaccctggccgcccacctccccgccgagttcacccctgcggtgcacgcctccctggacaagttcctggcttctgtgagcaccgtgctgacctccaaataccgttaagctggagcctcggtagccgttcctcctgcccgctgggcctcccaacgggccctcctcccctccttgcaccggcccttcctggtctttgaataaagtctgagtgggcagca

SEQ ID NO: 140164 - DNA, 513 bp, Homo sapiens
  Payload ID: 7485
  Gene Symbol: HBA2
  Gene Name: hemoglobin, alpha 2
  ENST ID: ENST00000397806
  CDS Start-End: 71-403
cacagactcagagagaacccaccatggtgctgtctcctgccgacaagaccaacgtcaaggccgcctggggatgttcctgtccttccccaccaccaagacctacttcccgcacttcgacctgagccacggctctgcccaggttaagggccacggcaagaaggtggccgacgcgctgaccaacgccgtggcgcacgtggacgacatgcccaacgcgctgtccgccctgagcgacctgcacgcgcacaagcttcgggtggacccggtcaacttcaagctcctaagccactgcctgctggtgaccctggccgcccacctccccgccgagttcacccctgcggtgcacgcctccctggacaagttcctggcttctgtgagcaccgtgctgacctccaaataccgttaagctggagcctcggtagccgttcctcctgcccgctgggcctcccaacgggccctcctcccctccttgcaccggcccttcctggtctttgaataaagtctgagtgggcagca

SEQ ID NO: 140165 - DNA, 628 bp, Homo sapiens
  Payload ID: 7486
  Gene Symbol: HBB
  Gene Name: hemoglobin, beta
  Uniprot ID: P68871
  ENST ID: ENST00000335295
  CDS Start-End: 51-494
acatttgcttctgacacaactgtgttcactagcaacctcaaacagacaccatggtgcatctgactcctgaggagaagtctgccgttactgccctgtggggcaaggtgaacgtggatgaagttggtggtgaggccctgggcaggctgctggtggtctacccttggacccagaggttctttgagtcctttggggatctgtccactcctgatgctgttatgggcaaccctaaggtgaaggctcatggcaagaaagtgctcggtgcctttagtgatggcctggctcacctggacaacctcaagggcacctttgccacactgagtgagctgcactgtgacaagctgcacgtggatcctgagaacttcaggctcctgggcaacgtgctggtctgtgtgctggcccatcactttggcaaagaattcaccccaccagtgcaggctgcctatcagaaagtggtggctggtgtggctaatgccctggcccacaagtatcactaagctcgctttcttgctgtccaatttctattaaaggttcctttgttccctaagtccaactactaaactgggggatattatgaagggccttgagcatctggattctgcctaataaaaaacatttattttcattgcaa

SEQ ID NO: 140166 - DNA, 502 bp, Homo sapiens
  Payload ID: 7486
  Gene Symbol: HBB
  Gene Name: hemoglobin, beta
  ENST ID: ENST00000380315
  CDS Start-End: 231-502
ttggaaaagcaacccctgccttgaagccaggatgatggtatctgcagcagttgccaacacaagagaaggatccatagttcatcatttaaaaaagaaaacaaaatagaaaaaggaaaactatttctgagcataagaagttgtaggaaggttttaatccaaataaggagaagatatgcttagaaccgaggtagagttttcatccattctgtcctcaacctcaaacagacaccatggtgcatctgactcctgaggagaagtctgccgttactgccctgtggggcaaggtgaacgtggatgaagttggtggtgaggccctgggcaggctgctggtggtctacccttggacccagaggttctttgagtcctttggggatctgtccactcctgatgctgttatgggcaaccctaaggtgaaggctcatggcaagaaagtgctcggtgcctttagtgatggcctggctcacctggacaacctcaagggcacctttgccacactgagtga

SEQ ID NO: 140167 - DNA, 609 bp, Homo sapiens
  Payload ID: 7486
  Gene Symbol: HBB
  Gene Name: hemoglobin, beta
  ENST ID: ENST00000633227
  CDS Start-End: 51-218
acatttgcttctgacacaactgtgttcactagcaacctcaaacagacaccatggtgcatctgactcctgaggagaagtctgccgttactgccctgtggggcaaggtgaacgtggatgaagttggtggctgctggtggtctacccttggacccagaggttctttgagtcctttggggatctgtccactcctgatgctgttatgggcaaccctaaggtgaaggctcatggcaagaaagtgctcggtgcctttagtgatggcctggctcacctggacaacctcaagggcacctttgccacactgagtgagctgcactgtgacaagctgcacgtggatcctgagaacttcaggctcctgggcaacgtgctggtctgtgtgctggcccatcactttggcaaagaattcaccccaccagtgcaggctgcctatcagaaagtggtggctggtgtggctaatgccctggcccacaagtatcactaagctcgctttcttgctgtccaatttctattaaaggttcctttgttccctaagtccaactactaaactgggggatattatgaagggccttgagcatctggattctgcctaataaaaaacatttattttcattg

SEQ ID NO: 140168 - DNA, 486 bp, Homo sapiens
  Payload ID: 7487
  Gene Symbol: HBD
  Gene Name: hemoglobin, delta
  ENST ID: ENST00000292901
  CDS Start-End: 51-476
acactttcttctgacataacagtgttcactagcaacctcaaacagacaccatggtgcatctgactcctgaggagaagactgctgtcaatgccctgtggggcaaagtgaacgtggatgcagttggtggtgaggccctgggcagattactggtggtctacccttggacccagaggttctttgagtcctttggggatctgtcctctcctgatgctgttatgggcaaccctaaggtgaaggctcatggcaagaaggtgctaggtgcctttagtgatggcctggctcacctggacaacctcaagggcactttttctcagctgagtgagctgcactgtgacaagctgcacgtggatcctgagaacttcagggtgtgtaagaaggttcctgaggctctacagatagggagcacttgtttattttacaaagagtacatgggaaaagagaaaagcaagggaaccgtacaaggcattaatgggtgacacttctacc

SEQ ID NO: 140169 - DNA, 785 bp, Homo sapiens
  Payload ID: 7487
  Gene Symbol: HBD
  Gene Name: hemoglobin, delta
  Uniprot ID: P02042
  ENST ID: ENST00000380299
  CDS Start-End: 216-659
atgacagaacagccaatctcagggcaagttaagggaatagtggaatgaaggttcatttttcattctcacaaactaatgaaaccctgcttatcttaaaccaacctgctcactggagcagggaggacaggaccagcataaaaggcagggcagagtcgactgttgcttacactttcttctgacataacagtgttcactagcaacctcaaacagacaccatggtgcatctgactcctgaggagaagactgctgtcaatgccctgtggggcaaagtgaacgtggatgcagttggtggtgaggccctgggcagattactggtggtctacccttggacccagaggttctttgagtcctttggggatctgtcctctcctgatgctgttatgggcaaccctaaggtgaaggctcatggcaagaaggtgctaggtgcctttagtgatggcctggctcacctggacaacctcaagggcactttttctcagctgagtgagctgcactgtgacaagctgcacgtggatcctgagaacttcaggctcttgggcaatgtgctggtgtgtgtgctggcccgcaactttggcaaggaattcaccccacaaatgcaggctgcctatcagaaggtggtggctggtgtggctaatgccctggctcacaagtaccattgagatcctggactgtttcctgataaccataagaagaccctatttccctagattctattttctgaacttgggaacacaatgcctacttcaagggtatggcttctgcctaataaagaatgttcagctcaa

SEQ ID NO: 140170 - DNA, 566 bp, Homo sapiens
  Payload ID: 7487
  Gene Symbol: HBD
  Gene Name: hemoglobin, delta
  ENST ID: ENST00000429817
  CDS Start-End: 254-566
attgtggcattatttgaattcagaaaagagtgaaaaactactgggatcttcattcctgggtctaattccacatttttttttaagaacacatctgtaaaaatgttctgtactagcatattcccaggaacttcgttaaatttaatctggctgaatatgggaggacaggaccagcataaaaggcagggcagagtcgactgttgcttacactttcttctgacataacagtgttcactagcaacctcaaacagacaccatggtgcatctgactcctgaggagaagactgctgtcaatgccctgtggggcaaagtgaacgtggatgcagttggtggtgaggccctgggcagattactggtggtctacccttggacccagaggttctttgagtcctttggggatctgtcctctcctgatgctgttatgggcaaccctaaggtgaaggctcatggcaagaaggtgctaggtgcctttagtgatggcctggctcacctggacaacctcaagggcactttttctcagctgagtgagctgcactgtgacaagctgcacgtggatcctgagaacttca

SEQ ID NO: 140171 - DNA, 305 bp, Homo sapiens
  Payload ID: 7487
  Gene Symbol: HBD
  Gene Name: hemoglobin, delta
  ENST ID: ENST00000417377
  CDS Start-End: 51-305
acactttcttctgacataacagtgttcactagcaacctcaaacagacaccatggtgcatctgactcctgaggagaagactgctgtcaatgccctgtggggcaaagtgaacgtggatgcagttggtggtgaggccctgggcagctcttgggcaatgtgctggtgtgtgtgctggcccgcaactttggcaaggaattcaccccacaaatgcaggctgcctatcagaaggtggtggctggtgtggctaatgccctggctcacaagtaccattgagatcctggactgtttcctgataaccataagaaga

SEQ ID NO: 140172 - DNA, 827 bp, Homo sapiens
  Payload ID: 7488
  Gene Symbol: HBE1
  Gene Name: hemoglobin, epsilon 1
  Uniprot ID: P02100
  ENST ID: ENST00000292896
  CDS Start-End: 269-712
agatagatgaggagccaacaaaaaagagcctcaggatccagcacacattatcacaaacttagtgtccatccatcactgctgaccctctccggacctgactccacccctgagggacacaggtcagccttgaccaatgacttttaagtaccatggagaacagggggccagaacttcggcagtaaagaataaaaggccagacagagaggcagcagcacatatctgcttccgacacagctgcaatcactagcaagctctcaggcctggcatcatggtgcattttactgctgaggagaaggctgccgtcactagcctgtggagcaagatgaatgtggaagaggctggaggtgaagccttgggcagactcctcgttgtttacccctggacccagagattttttgacagctttggaaacctgtcgtctccctctgccatcctgggcaaccccaaggtcaaggcccatggcaagaaggtgctgacttcctttggagatgctattaaaaacatggacaacctcaagcccgcctttgctaagctgagtgagctgcactgtgacaagctgcatgtggatcctgagaacttcaagctcctgggtaacgtgatggtgattattctggctactcactttggcaaggagttcacccctgaagtgcaggctgcctggcagaagctggtgtctgctgtcgccattgccctggcccataagtaccactgagttctcttccagtttgcaggtgttcctgtgaccctgacaccctccttctgcacatggggactgggcttggccttgagagaaagccttctgtttaataaagtacattttcttcagt

SEQ ID NO: 140173 - DNA, 913 bp, Homo sapiens
  Payload ID: 7488
  Gene Symbol: HBE1
  Gene Name: hemoglobin, epsilon 1
  Uniprot ID: P02100
  ENST ID: ENST00000380237
  CDS Start-End: 346-789
gccatggttgtgaggcctccccagctatgtggaactagacttcaagaagttaagcaacttgctcaagatcatctaagaaatagatgaggagccaacaaaaaagagcctcaggatccagcacacattatcacaaacttagtgtccatccatcactgctgaccctctccggacctgactccacccctgagggacacaggtcagccttgaccaatgacttttaagtaccatggagaacagggggccagaacttcggcagtaaagaataaaaggccagacagagaggcagcagcacatatctgcttccgacacagctgcaatcactagcaagctctcaggcctggcatcatggtgcattttactgctgaggagaaggctgccgtcactagcctgtggagcaagatgaatgtggaagaggctggaggtgaagccttgggcagactcctcgttgtttacccctggacccagagattttttgacagctttggaaacctgtcgtctccctctgccatcctgggcaaccccaaggtcaaggcccatggcaagaaggtgctgacttcctttggagatgctattaaaaacatggacaacctcaagcccgcctttgctaagctgagtgagctgcactgtgacaagctgcatgtggatcctgagaacttcaagctcctgggtaacgtgatggtgattattctggctactcactttggcaaggagttcacccctgaagtgcaggctgcctggcagaagctggtgtctgctgtcgccattgccctggcccataagtaccactgagttctcttccagtttgcaggtgttcctgtgaccctgacaccctccttctgcacatggggactgggcttggccttgagagaaagccttctgtttaataaagtacattttcttcagtaatcaaaaa

SEQ ID NO: 140174 - DNA, 578 bp, Homo sapiens
  Payload ID: 7488
  Gene Symbol: HBE1
  Gene Name: hemoglobin, epsilon 1
  ENST ID: ENST00000396895
  CDS Start-End: 316-578
cttgcttctcctggccatggttgtgaggcctccccagctatgtggaactatagatgaggagccaacaaaaaagagcctcaggatccagcacacattatcacaaacttagtgtccatccatcactgctgaccctctccggacctgactccacccctgagggacacaggtcagccttgaccaatgacttttaagtaccatggagaacagggggccagaacttcggcagtaaagaataaaaggccagacagagaggcagcagcacatatctgcttccgacacagctgcaatcactagcaagctctcaggcctggcatcatggtgcattttactgctgaggagaaggctgccgtcactagcctgtggagcaagatgaatgtggaagaggctggaggtgaagccttgggcagactcctcgttgtttacccctggacccagagattttttgacagctttggaaacctgtcgtctccctctgccatcctgggcaaccccaaggtcaaggcccatggcaagaaggtgctgacttcctttggagatgctattaaaaacatggacaacctcaagcccgcctttgctaa

SEQ ID NO: 140175 - DNA, 808 bp, Homo sapiens
  Payload ID: 7489
  Gene Symbol: HBG1
  Gene Name: hemoglobin, gamma A
  Uniprot ID: P69891
  ENST ID: ENST00000330597
  CDS Start-End: 89-532
gaagaataaaaggaagcacccttcagcagttccacacactcgcttctggaacgtctgaggttatcaataagctcctagtccagacgccatgggtcatttcacagaggaggacaaggctactatcacaagcctgtggggcaaggtgaatgtggaagatgctggaggagaaaccctgggaaggctcctggttgtctacccatggacccagaggttctttgacagctttggcaacctgtcctctgcctctgccatcatgggcaaccccaaagtcaaggcacatggcaagaaggtgctgacttccttgggagatgccacaaagcacctggatgatctcaagggcacctttgcccagctgagtgaactgcactgtgacaagctgcatgtggatcctgagaacttcaagctcctgggaaatgtgctggtgaccgttttggcaatccatttcggcaaagaattcacccctgaggtgcaggcttcctggcagaagatggtgactgcagtggccagtgccctgtcctccagataccactgagctcactgcccatgattcagagctttcaaggataggctttattctgcaagcaatacaaataataaatctattctgctgagagatcacacatgattttcttcagctcttttttttacatctttttaaatatatgagccacaaagggtttatattgagggaagtgtgtatgtgtatttctgcatgcctgtttgtgtttgtggtgtgtgcatgctcctcatttatttttatatgagatgtgcattttgatgagcaaataaaagcagtaaagacacttgt

SEQ ID NO: 140176 - DNA, 369 bp, Homo sapiens
  Payload ID: 7489
  Gene Symbol: HBG1
  Gene Name: hemoglobin, gamma A
  ENST ID: ENST00000632727
  CDS Start-End: 33-125
gaggttatcaataagctcctagtccagacgccatgggtcatttcacagaggaggacaaggctactatcacaagcctgtggggcaaggctcctggttgtctacccatggacccagaggttctttgacagctttggcaacctgtcctctgcctctgccatcatgggcaaccccaaagtcaaggcacatggcaagaaggtgctgacttccttgggagatgccacaaagcacctggatgatctcaagggcacctttgcccagctgagtgaactgcactgtgacaagctgcatgtggatcctgagaacttcaagctcctgggaaatgtgctggtgaccgttttggcaatccatttcggcaaagaattcacccct

SEQ ID NO: 140177 - DNA, 602 bp, Homo sapiens
  Payload ID: 7490
  Gene Symbol: HBG2
  Gene Name: hemoglobin, gamma G
  Uniprot ID: P69892
  ENST ID: ENST00000336906
  CDS Start-End: 84-527
ataaaaggaagcacccttcagcagttccacacactcgcttctggaacgtctgaggttatcaataagctcctagtccagacgccatgggtcatttcacagaggaggacaaggctactatcacaagcctgtggggcaaggtgaatgtggaagatgctggaggagaaaccctgggaaggctcctggttgtctacccatggacccagaggttctttgacagctttggcaacctgtcctctgcctctgccatcatgggcaaccccaaagtcaaggcacatggcaagaaggtgctgacttccttgggagatgccataaagcacctggatgatctcaagggcacctttgcccagctgagtgaactgcactgtgacaagctgcatgtggatcctgagaacttcaagctcctgggaaatgtgctggtgaccgttttggcaatccatttcggcaaagaattcacccctgaggtgcaggcttcctggcagaagatggtgactggagtggccagtgccctgtcctccagataccactgagctcactgcccatgatgcagagctttcaaggataggctttattctgcaagcaatcaaataataaatctattctgc

SEQ ID NO: 140178 - DNA, 694 bp, Homo sapiens
  Payload ID: 7490
  Gene Symbol: HBG2
  Gene Name: hemoglobin, gamma G
  ENST ID: ENST00000380252
  CDS Start-End: 194-607
ggccatggttgtgaggcctccccagctatgtggaactgtaagtccggtaaacctctttcttttataaattgcccagtctcgggtatatcttcattagcagcgtgaaaacggacaaatacagcttcagtttcccctcactccactccccattaggggatagtttttgtccagattaaagaaaaacctattgtttatggtggtgctaggggaaatgaagaggaaagtcttgcctctccattttcttccgttcatgaggctcctggttgtctacccatggacccagaggttctttgacagctttggcaacctgtcctctgcctctgccatcatgggcaaccccaaagtcaaggcacatggcaagaaggtgctgacttccttgggagatgccataaagcacctggatgatctcaagggcacctttgcccagctgagtgaactgcactgtgacaagctgcatgtggatcctgagaacttcaagctcctgggaaatgtgctggtgaccgttttggcaatccatttcggcaaagaattcacccctgaggtgcaggcttcctggcagaagatggtgactggagtggccagtgccctgtcctccagataccactgagctcactgcccatgatgcagagctttcaaggataggctttattctgcaagcaatcaaataataaatctattctgctaagagatcaca

SEQ ID NO: 140179 - DNA, 1772 bp, Homo sapiens
  Payload ID: 7490
  Gene Symbol: HBG2
  Gene Name: hemoglobin, gamma G
  Uniprot ID: P69892
  ENST ID: ENST00000380259
  CDS Start-End: 1242-1685
gaatgtatccagagaatcaacatacaatgagcaaaagtgaagcttttcctagacttgaccctcatcaaatctcctctgtccccactctcttctgaagaaggaaaggctggagtacaatggcgagatcttggctcactgcaacctccacctcctgggttcaactgattctcctgcctcagcctcccgagtagctgggactacaggcatccgccaccacacccggctaatttttgcatttttttagtagagacacagtttcaccacattggccaggctggtcttgaactcctgatctctggtgatcttcctgccttgtcctccctaagtgctgggattacaagcgtgaaccaccgcgcctggtctgatgaatacatgtaaagcttattgagcctcagaactctaactacagggtttcaatagcacagaaactctgagaagaaaaagaatgtcaaagttcctccctaaggagactgattagatgcaagtgtgtccggaattggtgggttcttggtctgacttcaagaatgaagccgcggaccctcacggtgagtattacagttcttgaagactgcgtgtccagagtttgttccttctgatgttcagatgtgtttggagttttttccttctggtgggttcgtggtctcgctagctcaggagtgaagctgcataccttcgcgtcctaggacagaatatggatgctgaaaaatgattctttcaaagtgctgagttgttgcctcacgcccagttgtctggcatctcttcactgaaactattacagttagatctcatctctatgggtggaaggcctcactggagctacagacaagaaggtgaaaaacggctgacaaaagaagtcctggtatcttctatggtgggagaagaaaactagctaaagggaagaataaattagagaaaaattggaatgactgaatcggaacaaggcaaaggctataaaaaaaattaagcagcagtatcctcttgggggccccttccccacactatctcaatgcaaatatctgtctgaaacggtccctggctaaactccacccatgggttggccagccttgccttgaccaatagccttgacaaggcaaacttgaccaatagtcttagagtatccagtgaggccaggggccggcggctggctagggatgaagaataaaaggaagcacccttcagcagttccacacactcgcttctggaacgtctgaggttatcaataagctcctagtccagacgccatgggtcatttcacagaggaggacaaggctactatcacaagcctgtggggcaaggtgaatgtggaagatgctggaggagaaaccctgggaaggctcctggttgtctacccatggacccagaggttctttgacagctttggcaacctgtcctctgcctctgccatcatgggcaaccccaaagtcaaggcacatggcaagaaggtgctgacttccttgggagatgccataaagcacctggatgatctcaagggcacctttgcccagctgagtgaactgcactgtgacaagctgcatgtggatcctgagaacttcaagctcctgggaaatgtgctggtgaccgttttggcaatccatttcggcaaagaattcacccctgaggtgcaggcttcctggcagaagatggtgactggagtggccagtgccctgtcctccagataccactgagctcactgcccatgatgcagagctttcaaggataggctttattctgcaagcaatcaaataataaatctattctgctaagagatcaca

SEQ ID NO: 140180 - DNA, 582 bp, Homo sapiens
  Payload ID: 7490
  Gene Symbol: HBG2
  Gene Name: hemoglobin, gamma G
  ENST ID: ENST00000620888
  CDS Start-End: 54-497
acactcgcttctggaacgtctgaggttatcaataagctcctagtccagacgccatgggtcatttcacagaggaggacaaggctactatcacaagcctgtggggcaaggtgaatgtggaagatgctggaggagaaaccctgggaaggctcctggttgtctacccatggacccagaggttctttgacagctttggcaacctgtcctctgcctctgccatcatgggcaaccccaaagtcaaggcacatggcaagaaggtgctgacttccttgggagatgccataaagcacctggatgatctcaagggcacctttgcccagctgagtgaactgcactgtgacaagctgcatgtggatcctgagaacttcaagctcctgggaaatgtgctggtgaccgttttggcaatccatttcggcaaagaattcacccctgaggtgcaggcttcctggcagaagatggtgactgcagtggccagtgccctgtcctccagataccactgagctcactgcccatgattcagagctttcaaggataggctttattctgcaagcaatacaaataataaatctattctgctgagagatc

SEQ ID NO: 140181 - DNA, 307 bp, Homo sapiens
  Payload ID: 7490
  Gene Symbol: HBG2
  Gene Name: hemoglobin, gamma G
  ENST ID: ENST00000444587
  CDS Start-End: 14-106
tagtccagacgccatgggtcatttcacagaggaggacaaggctactatcacaagcctgtggggcaaggctcctggttgtctacccatggacccagaggttctttgacagctttggcaacctgtcctctgcctctgccatcatgggcaaccccaaagtcaaggcacatggcaagaaggtgctgacttccttgggagatgccataaagcacctggatgatctcaagggcacctttgcccagctgagtgaactgcactgtgacaagctgcatgtggatcctgagaacttcaagctcctgggaaatgtgct

SEQ ID NO: 140182 - DNA, 506 bp, Homo sapiens
  Payload ID: 7491
  Gene Symbol: HBM
  Gene Name: hemoglobin, mu
  Uniprot ID: Q6B0K9
  ENST ID: ENST00000356815
  CDS Start-End: 21-446
agagcacgtcaggcggcgccatgctcagcgcccaggagcgcgcccaaatcgcgcaggtctgggacctgattgcgggccacgaggcgcaattcggggcggagctgctgctcaggctcttcacggtgtaccccagcaccaaggtctacttcccgcacctgagcgcctgccaggacgcgacgcagctgctgagccacgggcagcgcatgctggcggctgtgggcgcggcggtgcagcacgtggacaacctgcgcgccgcgctgagcccgctggcggacctgcacgcgctcgtgctgcgcgtggacccagccaactttccgctgctaatccagtgtttccacgtcgtgctggcctcccacctgcaggacgagttcaccgtgcaaatgcaagcggcgtgggacaagttcctgactggtgtggccgtggtgctgaccgaaaaataccgctgagccctgtgctgcgcaggccttggtctgtgcctgtcaataaacagaggcccgaaccatctg

SEQ ID NO: 140183 - DNA, 536 bp, Homo sapiens
  Payload ID: 7492
  Gene Symbol: HBQ1
  Gene Name: hemoglobin, theta 1
  Uniprot ID: P09105
  ENST ID: ENST00000199708
  CDS Start-End: 35-463
ggggtcgcagggcgcggcgggttccagcgcggggatggcgctgtccgcggaggaccgggcgctggtgcgcgccctgtggaagaagctgggcagcaacgtcggcgtctacacgacagaggccctggaaaggaccttcctggctttccccgccacgaagacctacttctcccacctggacctgagccccggctcctcacaagtcagagcccacggccagaaggtggcggacgcgctgagcctcgccgtggagcgcctggacgacctaccccacgcgctgtccgcgctgagccacctgcacgcgtgccagctgcgagtggacccggccagcttccagctcctgggccactgcctgctggtaaccctcgcccggcactaccccggagacttcagccccgcgctgcaggcgtcgctggacaagttcctgagccacgttatctcggcgctggtttccgagtaccgctgaactgtgggtgggtggccgcgggatccccaggcgaccttccccgtgtttgagtaaagcctctcccaggagcagc

SEQ ID NO: 140184 - DNA, 755 bp, Homo sapiens
  Payload ID: 7493
  Gene Symbol: HBZ
  Gene Name: hemoglobin, zeta
  Uniprot ID: P02008
  ENST ID: ENST00000252951
  CDS Start-End: 224-652
ggagtgatagcccccaaaccccagtcccaccaggccctgagggcccctttgtcactggatctgataagaaacaccacccctgcagccccctcccctcacctgaccaatggccacagcctggctgggcccagctccctgtatataaggggaccctgggggctgagcactaccaaggccagtcctgagcaggcccaactccagtgcagctgcccaccctgccgccatgtctctgaccaagactgagaggaccatcattgtgtccatgtgggccaagatctccacgcaggccgacaccatcggcaccgagactctggagaggctcttcctcagccacccgcagaccaagacctacttcccgcacttcgacctgcacccggggtccgcgcagttgcgcgcgcacggctccaaggtggtggccgccgtgggcgacgcggtgaagagcatcgacgacatcggcggcgccctgtccaagctgagcgagctgcacgcctacatcctgcgcgtggacccggtcaacttcaagctcctgtcccactgcctgctggtcaccctggccgcgcgcttccccgccgacttcacggccgaggcccacgccgcctgggacaagttcctatcggtcgtatcctctgtcctgaccgagaagtaccgctgagcgccgcctccgggacccccaggacaggctgcggcccctcccccgtcctggaggttccccagccccacttaccgcgtaatgcgccaataaaccaatgaacgaa

SEQ ID NO: 140185 - DNA, 1652 bp, Homo sapiens
  Payload ID: 7494
  Gene Symbol: HPX
  Gene Name: hemopexin
  Uniprot ID: P02790
  ENST ID: ENST00000265983
  CDS Start-End: 102-1490
cattcccagtagagttggaggtgggggtggtgctgctgccaactctatatagggagttcaactggtcacccagagctgtcctgtggcctctgcagctcagcatggctagggtactgggagcacccgttgcactggggttgtggagcctatgctggtctctggccattgccacccctcttcctccgactagtgcccatgggaatgttgctgaaggcgagaccaagccagacccagacgtgactgaacgctgctcagatggctggagctttgatgctaccaccctggatgacaatggaaccatgctgttttttaaaggggagtttgtgtggaagagtcacaaatgggaccgggagttaatctcagagagatggaagaatttccccagccctgtggatgctgcattccgtcaaggtcacaacagtgtctttctgatcaagggggacaaagtctgggtataccctcctgaaaagaaggagaaaggatacccaaagttgctccaagatgaatttcctggaatcccatccccactggatgcagctgtggaatgtcaccgtggagaatgtcaagctgaaggcgtcctcttcttccaaggtgaccgcgagtggttctgggacttggctacgggaaccatgaaggagcgttcctggccagctgttgggaactgctcctctgccctgagatggctgggccgctactactgcttccagggtaaccaattcctgcgcttcgaccctgtcaggggagaggtgcctcccaggtacccgcgggatgtccgagactacttcatgccctgccctggcagaggccatggacacaggaatgggactggccatgggaacagtacccaccatggccctgagtatatgcgctgtagcccacatctagtcttgtctgcactgacgtctgacaaccatggtgccacctatgccttcagtgggacccactactggcgtctggacaccagccgggatggctggcatagctggcccattgctcatcagtggccccagggtccttcagcagtggatgctgccttttcctgggaagaaaaactctatctggtccagggcacccaggtatatgtcttcctgacaaagggaggctataccctagtaagcggttatccgaagcggctggagaaggaagtcgggacccctcatgggattatcctggactctgtggatgcggcctttatctgccctgggtcttctcggctccatatcatggcaggacggcggctgtggtggctggacctgaagtcaggagcccaagccacgtggacagagcttccttggccccatgagaaggtagacggagccttgtgtatggaaaagtcccttggccctaactcatgttccgccaatggtcccggcttgtacctcatccatggtcccaatttgtactgctacagtgatgtggagaaactgaatgcagccaaggcccttccgcaaccccagaatgtgaccagtctcctgggctgcactcactgaggggccttctgacatgagtctggcctggccccacctcctagttcctcataataaagacagattgcttcttcgcttctcactgaggggccttctgacatgagtctggcctggccccacctccccagtttctcataataaagacagattgcttcttcacttgaa

SEQ ID NO: 140186 - DNA, 826 bp, Homo sapiens
  Payload ID: 7494
  Gene Symbol: HPX
  Gene Name: hemopexin
  ENST ID: ENST00000615166
  CDS Start-End: 62-826
aactctatatagggagttcaactggtcacccagagctgtcctgtggcctctgcagctcagcatggctagggtactgggagcacccgttgcactggggttgtggagcctatgctggtctctggccattgccacccctcttcctccgactagtgcccatgggaatgttgctgaaggcgagaccaagccagacccagacgtgactgaacgctgctcagatggctggagctttgatgctaccaccctggatgacaatggaaccatgctgttttttaaaggggagtttgtgtggaagagtcacaaatgggaccgggagttaatctcagagagatggaagaatttccccagccctgtggatgctgcattccgtcaaggtcacaacagtgtctttctgatcaagggggacaaagtctgggtataccctcctgaaaagaaggagaaaggatacccaaagttgctccaagatgaatttcctggaatcccatccccactggatgcagctgtggaatgtcaccgtggagaatgtcaagctgaaggcgtcctcttcttccaaggtgaccgcgagtggttctgggacttggctacgggaaccatgaaggagcgttcctggccagctgttgggaactgctcctctgccctgagatggctgggccgctactactgcttccagggtaaccaattcctgcgcttcgaccctgtcaggggagaggtgcctcccaggtacccgcgggatgtccgagactacttcatgccctgccctggcagaggccatggacacaggaatgggactggccatgggaacagtatatgcgctgtagcccacatctag

SEQ ID NO: 140187 - DNA, 1717 bp, Homo sapiens
  Payload ID: 7495
  Gene Symbol: HENMT1
  Gene Name: HEN1 methyltransferase homolog 1 (Arabidopsis)
  ENST ID: ENST00000370031
  CDS Start-End: 172-1446
tccgcgacgagctttgttttttcggttgggcatgctgcttaccgcaggatgatggaagcgacggcccgtacaaagacagaagcgttggtttcactgagtcagtgctgattctctcaaatagagcttgaaggataaatcttcatttttgtttcaacaaaacttcgaaacaaaatggaagaaaataatctacagtgcagtagtgtggttgacggtaattttgaagaagttcccagggagacggcaattcagtttaaacctccactatacagacagcggtaccagttcgttaaaaatttagtggatcaacatgagcctaagaaggttgcagacctgggatgtggtgatacttcactcttaaggctgctaaaagtcaatccatgcattgaattgcttgttggagtagatattaatgaggataaattacgatggagaggggattcgttagctcctttcctgggggattttctgaaacctcgggatctgaatttgaccatcacattgtatcatggctccgttgtggagagagactctcgtttgcttggatttgacttgataacgtgtattgaattaatagaacatttggattcaggtgatctggccagatttcctgaagtggtatttgggtacctgtctccatccatgattgtcatcagcacaccaaactctgaattcaatcccctgtttccatcagtgaccttaagagattcagatcataaatttgagtggaccagaatggagtttcagacctgggctttatatgtggcaaatcgctatgattactctgtggagtttactggtgtcggggaaccaccagctggagctgagaatgttggatactgtacccagataggaatcttccggaaaaatggaggaaaggcaacagaatcatgtctttcagagcagcatgatcagcatgtttataaagctagacagggtctcactatgttgcccaggctggtcttgaacttccatcctcaagcaatcctcctgccccatcttcctaaaatgctgagattacaggtttttaccacctcatacccaagcttacagcaggaaaggttctttaaacttgtgttggttaatgaggtgtcccaacaagtggaaagcttaagagtgagccacctgccaaggcggaaagaacaggctggggaacggggtgataagcccaaagacattggtggctcaaaggcccctgtcccatgctttggaccagtcttcacagaggttgagaaggccaagatagagaactctcccacacccttctgtgttggagataaatttttcgtacctctgcagagactccttgcgtatcccaagttgaaccgcttatgtgctaatgaagagatgatgagatcagtcattgctgactcaattcctctgagcagtgatggttctgcagtggtggctgacctgcgtaattattttgatgaacagtttgagttttgaaccatgtttatttcctgaaatttcagggtctcagcgatagttgtgctcacttagaatttagttttttttgtgtaatcctaattcaagtaatgtttttaaagtttcactgcaaaagtctatgttccaagccattggacagacctgcttgagatatggccagactgcagtgagccctgagaaagatatgagggtttaaaacgggtgctttcctttgattttggacttttttgttttctcaagaataaagaagttggatgtggtaatatgttaa

SEQ ID NO: 140188 - DNA, 1874 bp, Homo sapiens
  Payload ID: 7495
  Gene Symbol: HENMT1
  Gene Name: HEN1 methyltransferase homolog 1 (Arabidopsis)
  Uniprot ID: Q5T8I9
  ENST ID: ENST00000370032
  CDS Start-End: 422-1603
gtttttaggcctttgccacgcctcgggagcgccacgaactcaacagccgcccaagccgccttccggctcgcggtctgcggacgcgctcggagttgggggccttcgccaacagctgccgtaccgtgccgcgtcgcagccgcacgctagcggggtcaacggcgcggcaggcgcaggggtcctcgccaaggttcggaagaggaccttgaaaatggcttctgggcatgcgccacagcggccgttacgagacgcaaaaccgacgccttggaactgagagcctagagggacggagctcggcgcaccatgaggctcccggggcccaaggccgaccgtgagagcgcacgagctgagtcagtgctgattctctcaaatagagcttgaaggataaatcttcatttttgtttcaacaaaacttcgaaacaaaatggaagaaaataatctacagtgcagtagtgtggttgacggtaattttgaagaagttcccagggagacggcaattcagtttaaacctccactatacagacagcggtaccagttcgttaaaaatttagtggatcaacatgagcctaagaaggttgcagacctgggatgtggtgatacttcactcttaaggctgctaaaagtcaatccatgcattgaattgcttgttggagtagatattaatgaggataaattacgatggagaggggattcgttagctcctttcctgggggattttctgaaacctcgggatctgaatttgaccatcacattgtatcatggctccgttgtggagagagactctcgtttgcttggatttgacttgataacgtgtattgaattaatagaacatttggattcaggtgatctggccagatttcctgaagtggtatttgggtacctgtctccatccatgattgtcatcagcacaccaaactctgaattcaatcccctgtttccatcagtgaccttaagagattcagatcataaatttgagtggaccagaatggagtttcagacctgggctttatatgtggcaaatcgctatgattactctgtggagtttactggtgtcggggaaccaccagctggagctgagaatgttggatactgtacccagataggaatcttccggaaaaatggaggaaaggcaacagaatcatgtctttcagagcagcatgatcagcatgtttataaagctgtttttaccacctcatacccaagcttacagcaggaaaggttctttaaacttgtgttggttaatgaggtgtcccaacaagtggaaagcttaagagtgagccacctgccaaggcggaaagaacaggctggggaacggggtgataagcccaaagacattggtggctcaaaggcccctgtcccatgctttggaccagtcttcacagaggttgagaaggccaagatagagaactctcccacacccttctgtgttggagataaatttttcgtacctctgcagagactccttgcgtatcccaagttgaaccgcttatgtgctaatgaagagatgatgagatcagtcattgctgactcaattcctctgagcagtgatggttctgcagtggtggctgacctgcgtaattattttgatgaacagtttgagttttgaaccatgtttatttcctgaaatttcagggtctcagcgatagttgtgctcacttagaatttagttttttttgtgtaatcctaattcaagtaatgtttttaaagtttcactgcaaaagtctatgttccaagccattggacagacctgcttgagatatggccagactgcagtgagccctgagaaagatatgagggtttaaaacgggtgctttcctttgattttggacttttttgttttctcaagaataaagaagttggatgtggtaatatgttaa

SEQ ID NO: 140189 - DNA, 1696 bp, Homo sapiens
  Payload ID: 7495
  Gene Symbol: HENMT1
  Gene Name: HEN1 methyltransferase homolog 1 (Arabidopsis)
  Uniprot ID: Q5T8I9
  ENST ID: ENST00000402983
  CDS Start-End: 239-1420
agcgtcacgcagcgaggccgtgcgtgcgcgggcgtcagggcggcgctgagttgaggacgctggcggctccgcgacgagctttgttttttcggttgggcatgctgcttaccgcaggatgatggaagcgacggcccgtacaaagacagaagcgttggtttcactgagtcagtgctgattctctcaaatagagcttgaaggataaatcttcatttttgtttcaacaaaacttcgaaacaaaatggaagaaaataatctacagtgcagtagtgtggttgacggtaattttgaagaagttcccagggagacggcaattcagtttaaacctccactatacagacagcggtaccagttcgttaaaaatttagtggatcaacatgagcctaagaaggttgcagacctgggatgtggtgatacttcactcttaaggctgctaaaagtcaatccatgcattgaattgcttgttggagtagatattaatgaggataaattacgatggagaggggattcgttagctcctttcctgggggattttctgaaacctcgggatctgaatttgaccatcacattgtatcatggctccgttgtggagagagactctcgtttgcttggatttgacttgataacgtgtattgaattaatagaacatttggattcaggtgatctggccagatttcctgaagtggtatttgggtacctgtctccatccatgattgtcatcagcacaccaaactctgaattcaatcccctgtttccatcagtgaccttaagagattcagatcataaatttgagtggaccagaatggagtttcagacctgggctttatatgtggcaaatcgctatgattactctgtggagtttactggtgtcggggaaccaccagctggagctgagaatgttggatactgtacccagataggaatcttccggaaaaatggaggaaaggcaacagaatcatgtctttcagagcagcatgatcagcatgtttataaagctgtttttaccacctcatacccaagcttacagcaggaaaggttctttaaacttgtgttggttaatgaggtgtcccaacaagtggaaagcttaagagtgagccacctgccaaggcggaaagaacaggctggggaacggggtgataagcccaaagacattggtggctcaaaggcccctgtcccatgctttggaccagtcttcacagaggttgagaaggccaagatagagaactctcccacacccttctgtgttggagataaatttttcgtacctctgcagagactccttgcgtatcccaagttgaaccgcttatgtgctaatgaagagatgatgagatcagtcattgctgactcaattcctctgagcagtgatggttctgcagtggtggctgacctgcgtaattattttgatgaacagtttgagttttgaaccatgtttatttcctgaaatttcagggtctcagcgatagttgtgctcacttagaatttagttttttttgtgtaatcctaattcaagtaatgtttttaaagtttcactgcaaaagtctatgttccaagccattggacagacctgcttgagatatggccagactgcagtgagccctgagaaagatatgagggtttaaaacgggtgctttcctttgattttggacttttttgttttctcaagaataaagaagttggatgtggtaatatgttaattttg

SEQ ID NO: 140190 - DNA, 1244 bp, Homo sapiens
  Payload ID: 7495
  Gene Symbol: HENMT1
  Gene Name: HEN1 methyltransferase homolog 1 (Arabidopsis)
  ENST ID: ENST00000420055
  CDS Start-End: 297-1244
ggcgagccccgcggggaggccgaggcgcgggtgcgggcgccggcgtagccgcggcggtagcgtcacgcagcgaggccgtgcgtgcgcgggcgtcagggcggcgctgagttgaggacgctggcggctccgcgacgagctttgttttttcggttgggcatgctgcttaccgcaggatgatggaagcgacggcccgtacaaagacagaagcgttggtttcactgagtcagtgctgattctctcaaatagagcttgaaggataaatcttcatttttgtttcaacaaaacttcgaaacaaaatggaagaaaataatctacagtgcagtagtgtggttgacggtaattttgaagaagttcccagggagacggcaattcagtttaaacctccactatacagacagcggtaccagttcgttaaaaatttagtggatcaacatgagcctaagaaggttgcagacctgggatgtggtgatacttcactcttaaggctgctaaaagtcaatccatgcattgaattgcttgttggagtagatattaatgaggataaattacgatggagaggggattcgttagctcctttcctgggggattttctgaaacctcgggatctgaatttgaccatcacattgtatcatggctccgttgtggagagagactctcgtttgcttggatttgacttgataacgtgtattgaattaatagaacatttggattcaggtgatctggccagatttcctgaagtggtatttgggtacctgtctccatccatgattgtcatcagcacaccaaactctgaattcaatcccctgtttccatcagtgaccttaagagattcagatcataaatttgagtggaccagaatggagtttcagacctgggctttatatgtggcaaatcgctatgattactctgtggagtttactggtgtcggggaaccaccagctggagctgagaatgttggatactgtacccagataggaatcttccggaaaaatggaggaaaggcaacagaatcatgtctttcagagcagcatgatcagcatgtttataaagctgtttttaccacctcatacccaagcttacagcaggaaaggttctttaaacttgtgttggttaatgaggtgtcccaacaagtggaaagcttaagagtgagccacctgccaaggcggaaagaacaggctggggaacggggtgataagcccaaagacattggtggctcaaaggcccctgtcccatgctttggacca

SEQ ID NO: 140191 - DNA, 2122 bp, Homo sapiens
  Payload ID: 7496
  Gene Symbol: HEPACAM2
  Gene Name: HEPACAM family member 2
  Uniprot ID: A8MVW5
  ENST ID: ENST00000341723
  CDS Start-End: 89-1441
gaatagtcagtacctagaagccactcttctttgaaaaggattatcacctgatcaggttctctctgcatttgcccctttagattgtgaaatgtggctcaaggtcttcacaactttcctttcctttgcaacaggtgcttgctcggggctgaaggtgacagtgccatcacacactgtccatggcgtcagaggtcaggccctctacctacccgtccactatggcttccacactccagcatcagacatccagatcatatggctatttgagagaccccacacaatgcccaaatacttactgggctctgtgaataagtctgtggttcctgacttggaataccaacacaagttcaccatgatgccacccaatgcatctctgcttatcaacccactgcagttccctgatgaaggcaattacatcgtgaaggtcaacattcagggaaatggaactctatctgccagtcagaagatacaagtcacggttgatgatcctgtcacaaagccagtggtgcagattcatcctccctctggggctgtggagtatgtggggaacatgaccctgacatgccatgtggaagggggcactcggctagcttaccaatggctaaaaaatgggagacctgtccacaccagctccacctactccttttctccccaaaacaatacccttcatattgctccagtaaccaaggaagacattgggaattacagctgcctggtgaggaaccctgtcagtgaaatggaaagtgatatcattatgcccatcatatattatggaccttatggacttcaagtgaattctgataaagggctaaaagtaggggaagtgtttactgttgaccttggagaggccatcctatttgattgttctgctgattctcatccccccaacacctactcctggattaggaggactgacaatactacatatatcattaagcatgggcctcgcttagaagttgcatctgagaaagtagcccagaagacaatggactatgtgtgctgtgcttacaacaacataaccggcaggcaagatgaaactcatttcacagttatcatcacttccgtaggactggagaagcttgcacagaaaggaaaatcattgtcacctttagcaagtataactggaatatcactatttttgattatatccatgtgtcttctcttcctatggaaaaaatatcaaccctacaaagttataaaacagaaactagaaggcaggccagaaacagaatacaggaaagctcaaacattttcaggccatgaagatgctctggatgacttcggaatatatgaatttgttgcttttccagatgtttctggtgtttccaggatcccaagcaggtctgttccagcctctgattgtgtatcggggcaagatttgcacagtacagtgtatgaagttattcagcacatccctgcccagcagcaagaccatccagagtgaactttcatgggctaaacagtacattcgagtgaaattctgaagaaacattttaaggaaaaacagtggaaaagtatattaatctggaatcagtgaagaaaccaagaccaacacctcttactcattattcctttacatgcagaatagaggcatttatgcaaattgaactgcaggtttttcagcatatacacaatgtcttgtgcaacagaaaaacatgttggggaaatattcctcagtggagagtcgttctcatgctgacggggagaacgaaagtgacaggggtttcctcataagttttgtatgaaatatctctacaaacctcaattagttctactctacactttcactatcatcaacactgagactatcctgtctcacctacaaatgtggaaactttacattgttcgatttttcagcagactttgttttattaaatttttattagtgttaagaatgctaaatttatgtttcaattttatttccaaatttctatcttgttatttgtacaacaaagtaataaggatggttgtcacaaaaacaaaactatgccttctcttttttttcaatcaccagtagtatttttgagaagacttgtgaacacttaaggaaatgactattaaagtcttatttttatttttttcaaggaaagatggattcaaataaattattctgtttttgctttta

SEQ ID NO: 140192 - DNA, 2148 bp, Homo sapiens
  Payload ID: 7496
  Gene Symbol: HEPACAM2
  Gene Name: HEPACAM family member 2
  Uniprot ID: A8MVW5
  ENST ID: ENST00000394468
  CDS Start-End: 79-1467
acctcactgctaatttccctagcaaataaaccagcagctgctggtccaagttaccactgagaacagggcactgcatgcatgggacaggatgctttcatggagcccttcggtgacacacttggggtctttcagtgcaaaatatacctccttctcttcggtgcttgctcggggctgaaggtgacagtgccatcacacactgtccatggcgtcagaggtcaggccctctacctacccgtccactatggcttccacactccagcatcagacatccagatcatatggctatttgagagaccccacacaatgcccaaatacttactgggctctgtgaataagtctgtggttcctgacttggaataccaacacaagttcaccatgatgccacccaatgcatctctgcttatcaacccactgcagttccctgatgaaggcaattacatcgtgaaggtcaacattcagggaaatggaactctatctgccagtcagaagatacaagtcacggttgatgatcctgtcacaaagccagtggtgcagattcatcctccctctggggctgtggagtatgtggggaacatgaccctgacatgccatgtggaagggggcactcggctagcttaccaatggctaaaaaatgggagacctgtccacaccagctccacctactccttttctccccaaaacaatacccttcatattgctccagtaaccaaggaagacattgggaattacagctgcctggtgaggaaccctgtcagtgaaatggaaagtgatatcattatgcccatcatatattatggaccttatggacttcaagtgaattctgataaagggctaaaagtaggggaagtgtttactgttgaccttggagaggccatcctatttgattgttctgctgattctcatccccccaacacctactcctggattaggaggactgacaatactacatatatcattaagcatgggcctcgcttagaagttgcatctgagaaagtagcccagaagacaatggactatgtgtgctgtgcttacaacaacataaccggcaggcaagatgaaactcatttcacagttatcatcacttccgtaggactggagaagcttgcacagaaaggaaaatcattgtcacctttagcaagtataactggaatatcactatttttgattatatccatgtgtcttctcttcctatggaaaaaatatcaaccctacaaagttataaaacagaaactagaaggcaggccagaaacagaatacaggaaagctcaaacattttcaggccatgaagatgctctggatgacttcggaatatatgaatttgttgcttttccagatgtttctggtgtttccaggatcccaagcaggtctgttccagcctctgattgtgtatcggggcaagatttgcacagtacagtgtatgaagttattcagcacatccctgcccagcagcaagaccatccagagtgaactttcatgggctaaacagtacattcgagtgaaattctgaagaaacattttaaggaaaaacagtggaaaagtatattaatctggaatcagtgaagaaaccaagaccaacacctcttactcattattcctttacatgcagaatagaggcatttatgcaaattgaactgcaggtttttcagcatatacacaatgtcttgtgcaacagaaaaacatgttggggaaatattcctcagtggagagtcgttctcatgctgacggggagaacgaaagtgacaggggtttcctcataagttttgtatgaaatatctctacaaacctcaattagttctactctacactttcactatcatcaacactgagactatcctgtctcacctacaaatgtggaaactttacattgttcgatttttcagcagactttgttttattaaatttttattagtgttaagaatgctaaatttatgtttcaattttatttccaaatttctatcttgttatttgtacaacaaagtaataaggatggttgtcacaaaaacaaaactatgccttctcttttttttcaatcaccagtagtatttttgagaagacttgtgaacacttaaggaaatgactattaaagtcttatttttatttttttcaaggaaagatggattcaaataaattattctgtttttgctttta

SEQ ID NO: 140193 - DNA, 2060 bp, Homo sapiens
  Payload ID: 7496
  Gene Symbol: HEPACAM2
  Gene Name: HEPACAM family member 2
  ENST ID: ENST00000440868
  CDS Start-End: 52-1419
ggattatcacctgatcaggttctctctgcatttgcccctttagattgtgaaatgtggctcaaggtcttcacaactttcctttcctttgcaacaggtgcttgctcggggctgaaggtgacagtgccatcacacactgtccatggcgtcagaggtcaggccctctacctacccgtccactatggcttccacactccagcatcagacatccagatcatatggctatttgagagaccccacacaatgcccaaatacttactgggctctgtgaataagtctgtggttcctgacttggaataccaacacaagttcaccatgatgccacccaatgcatctctgcttatcaacccactgcagttccctgatgaaggcaattacatcgtgaaggtcaacattcagggaaatggaactctatctgccagtcagaagatacaagtcacggttgatgatcctgtcacaaagccagtggtgcagattcatcctccctctggggctgtggagtatgtggggaacatgaccctgacatgccatgtggaagggggcactcggctagcttaccaatggctaaaaaatgggagacctgtccacaccagctccacctactccttttctccccaaaacaatacccttcatattgctccagtaaccaaggaagacattgggaattacagctgcctggtgaggaaccctgtcagtgaaatggaaagtgatatcattatgcccatcatatattatggaccttatggacttcaagtgaattctgataaagggctaaaagtaggggaagtgtttactgttgaccttggagaggccatcctatttgattgttctgctgattctcatccccccaacacctactcctggattaggaggactgacaatactacatatatcattaagcatgggcctcgcttagaagttgcatctgagaaagtagcccagaagacaatggactatgtgtgctgtgcttacaacaacataaccggcaggcaagatgaaactcatttcacagttatcatcacttccgtaggactggagaagcttgcacagaaaggaaaatcattgtcacctttagcaagtataactggaatatcactatttttgattatatccatgtgtcttctcttcctatggaaaaaatatcaaccctacaaaggccagaaacagaatacaggaaagctcaaacattttcaggccatgaagatgctctggatgacttcggaatatatgaatttgttgcttttccagatgtttctggtgtttccaggatcccaagcaggtctgttccagcctctgattgtgtatcggggcaagatttgcacagtacagtgtatgaagttattcagcacatccctgcccagcagcaagaccatccagagtgaactttcatgggctaaacagtacattcgagtgaaattctgaagaaacattttaaggaaaaacagtggaaaagtatattaatctggaatcagtgaagaaaccaagaccaacacctcttactcattattcctttacatgcagaatagaggcatttatgcaaattgaactgcaggtttttcagcatatacacaatgtcttgtgcaacagaaaaacatgttggggaaatattcctcagtggagagtcgttctcatgctgacggggagaacgaaagtgacaggggtttcctcataagttttgtatgaaatatctctacaaacctcaattagttctactctacactttcactatcatcaacactgagactatcctgtctcacctacaaatgtggaaactttacattgttcgatttttcagcagactttgttttattaaatttttattagtgttaagaatgctaaatttatgtttcaattttatttccaaatttctatcttgttatttgtacaacaaagtaataaggatggttgtcacaaaaacaaaactatgccttctcttttttttcaatcaccagtagtatttttgagaagacttgtgaacacttaaggaaatgactattaaagtcttatttttatttttttcaaggaaagatggattcaaataaattattctgtttttgctttta

SEQ ID NO: 140194 - DNA, 1869 bp, Homo sapiens
  Payload ID: 7496
  Gene Symbol: HEPACAM2
  Gene Name: HEPACAM family member 2
  Uniprot ID: A8MVW5
  ENST ID: ENST00000453812
  CDS Start-End: 24-1481
actgagaacagggcactgcatgcatgggacaggatgctttcatggagcccttcggtgacacacttggggtctttcagtgcaaaatatacctccttctcttcgatattgttgcaaactgtttactgcttcgttttaagttatctgtctcatcttatgaaatatggaagaaaggtgcttgctcggggctgaaggtgacagtgccatcacacactgtccatggcgtcagaggtcaggccctctacctacccgtccactatggcttccacactccagcatcagacatccagatcatatggctatttgagagaccccacacaatgcccaaatacttactgggctctgtgaataagtctgtggttcctgacttggaataccaacacaagttcaccatgatgccacccaatgcatctctgcttatcaacccactgcagttccctgatgaaggcaattacatcgtgaaggtcaacattcagggaaatggaactctatctgccagtcagaagatacaagtcacggttgatgatcctgtcacaaagccagtggtgcagattcatcctccctctggggctgtggagtatgtggggaacatgaccctgacatgccatgtggaagggggcactcggctagcttaccaatggctaaaaaatgggagacctgtccacaccagctccacctactccttttctccccaaaacaatacccttcatattgctccagtaaccaaggaagacattgggaattacagctgcctggtgaggaaccctgtcagtgaaatggaaagtgatatcattatgcccatcatatattatggaccttatggacttcaagtgaattctgataaagggctaaaagtaggggaagtgtttactgttgaccttggagaggccatcctatttgattgttctgctgattctcatccccccaacacctactcctggattaggaggactgacaatactacatatatcattaagcatgggcctcgcttagaagttgcatctgagaaagtagcccagaagacaatggactatgtgtgctgtgcttacaacaacataaccggcaggcaagatgaaactcatttcacagttatcatcacttccgtaggactggagaagcttgcacagaaaggaaaatcattgtcacctttagcaagtataactggaatatcactatttttgattatatccatgtgtcttctcttcctatggaaaaaatatcaaccctacaaagttataaaacagaaactagaaggcaggccagaaacagaatacaggaaagctcaaacattttcaggccatgaagatgctctggatgacttcggaatatatgaatttgttgcttttccagatgtttctggtgtttccaggatcccaagcaggtctgttccagcctctgattgtgtatcggggcaagatttgcacagtacagtgtatgaagttattcagcacatccctgcccagcagcaagaccatccagagtgaactttcatgggctaaacagtacattcgagtgaaattctgaagaaacattttaaggaaaaacagtggaaaagtatattaatctggaatcagtgaagaaaccaagaccaacacctcttactcattattcctttacatgcagaatagaggcatttatgcaaattgaactgcaggtttttcagcatatacacaatgtcttgtgcaacagaaaaacatgttggggaaatattcctcagtggagagtcgttctcatgctgacggggagaacgaaagtgacaggggtttcctcataagttttgtatgaaatatctctacaaacctcaattagttctactctacactttcactatcatcaacactgagactatcctgtctcacctacaaatgtgga

SEQ ID NO: 140195 - DNA, 8031 bp, Homo sapiens
  Payload ID: 7497
  Gene Symbol: HS3ST1
  Gene Name: heparan sulfate (glucosamine) 3-O-sulfotransferase 1
  Uniprot ID: O14792
  ENST ID: ENST00000002596
  CDS Start-End: 1176-2099
agaacctcccagcttccggaatagaggagcggggcagaaatatcctgctttttatttcagagctgacgtttgcaatcctagtgcactagcggaaaaaaaaaaaaaaaaaaaaaaaaaaaaaagctgaattttccgcgctctcctggcaaattggcgtccgctctccgacgctaaaccaaaggaaaaggagtgttcaatggcgacagggcgctctttgaagccggctcctcacgcggattctggcccaggccgccgctccggtcccagtccggctgcagagcgaattggagaggatggcacctcctgcttcccggggggcggaaggagcgccagcgcctaaggtgggtcacctgccaggaagggaatacgcatggtgcagactcacgtgggaggagcacaggtcccgggtacaagtgccgagctggcgacttagagaagaggtagactcgggctcagaccaagcaggcgtaagggagtagacgggacgtcccgtgtttgcagtgacggcggagtcacccatcccagcagcctcaccttcttggagcgctggtccctccccttggactgaaaccccaggggccaccgcaccgggtgggcgggaccgactactacccgaccagccgctggagctgcgtgccaggcggggctgtgcggagcagctgagcgcagagcggagcaccaggcacctagcgggccggactctgggcggcacccgagcgggccgggcagcagtgggcgctcgcgatcctcctctgcccaacgcgctctccctccgggcccggcctcctccgtcccctccttttgctcccgctcctcctcccgctcctccccctcctcgggattgagcaccaaaacgcccgcctgcaaggtcctctgcgccctggcagccaggagtcgccgccacgacagccgggtctcagtgggtgcctgcgccttctccccgcccgcctgccccgggccatccagaaacttgctctacccgccgcgggtgctcggcagtgctgcccatggcccagcctaggagcctatttagggcgccggacgggctggacagaggcgcggctcagtaattgaaggcctgaaacgcccatgtgccactgactaggaggcttccctgctgcggcacttcatgacccagcggcgcgcggcccagtgaagccaccgtggtgtccagcatggccgcgctgctcctgggcgcggtgctgctggtggcccagccccagctagtgccttcccgccccgccgagctaggccagcaggagcttctgcggaaagcggggaccctccaggatgacgtccgcgatggcgtggccccaaacggctctgcccagcagttgccgcagaccatcatcatcggcgtgcgcaagggcggcacgcgcgcactgctggagatgctcagcctgcaccccgacgtggcggccgcggagaacgaggtccacttcttcgactgggaggagcattacagccacggcttgggctggtacctcagccagatgcccttctcctggccacaccagctcacagtggagaagacccccgcgtatttcacgtcgcccaaagtgcctgagcgagtctacagcatgaacccgtccatccggctgctgctcatcctgcgagacccgtcggagcgcgtgctatctgactacacccaagtgttctacaaccacatgcagaagcacaagccctacccgtccatcgaggagttcctggtgcgcgatggcaggctcaatgtggactacaaggccctcaaccgcagcctctaccacgtgcacatgcagaactggctgcgctttttcccgctgcgccacatccacattgtggacggcgaccgcctcatcagggaccccttccctgagatccaaaaggtcgagaggttcctaaagctgtcgccgcagatcaatgcttcgaacttctactttaacaaaaccaagggcttttactgcctgcgggacagcggccgggaccgctgcttacatgagtccaaaggccgggcgcacccccaagtcgatcccaaactactcaataaactgcacgaatattttcatgagccaaataagaagttcttcgagcttgttggcagaacatttgactggcactgatttgcaataagctaagctcagaaactttcctactgtaagttctggtgtacatctgaggggaaaaagaattttaaaaaagcatttaaggtataatttatttgtaaaatccataaagtacttctgtacagtattagattcacaattgccatatatactagttatatttttctacttgttaaatggagggcattttgtattgtttttcatggttgttaacattgtgtaatatgtctctatatgaaggaactaaactatttcactgaaaaaaaaaaaaagattttttctggagacgctatgtttttttgaatataattaacttgcccccaactcaaaatagctgtctgtgttgcaatcattgcaaaatctaaattcttttgttacttaaaaaaacatgtttttcatggctattacaatcctctctctcccctctcctttctgcattgctctttttaatttttaatgtctcattgtgatcatcagatttatttttacttggattgtaagatttatctcctcggcgattccttgtcatttttggaggtcacagttttactcattcccatgtgtaaacttcaagtaaacaaagcaatattcaggatggagaagcagttagtgactggctagaggtctcttgggatccatcttgacctcaaagaatatttgcacatgcttctgatctcagcagttataataaagaggattaaacccttggccttcagaatgatcttggacctggatactttgccccaggtggcagctggcctccagaaagccaattagaatagaaaagagaaactgcgaaatctatgcgtgtcttcatcctgtcggttctgtgaaaggctgactaaaagggtagtagtcttttgcttagtctgaaagtctgcttacttcctgaaagacacattggcattatagacatatattccatatgcactgagacataaatatgtgtatgtttcaaaatcaactctaaatttggagtcctgaatgtgaaagaaaaagtaagttcccaagtgttgaagttaaaaagagaaaagggcagagttgaaggtagcacctaagagaaccactgtacctgcccccagaggagtggctggagttcagttttacttctgcccctgagcagccagcttgttggagatggtcacataaacccttcttatcctcagttttttcatgcattcttcatgcagtcagccttttacagaattaaacccattggattttaataaaaataaaacattcattacagtaaaagagaaaatacaaacaagcaaaataaaccggcttcctgacatggtttataccgcaggaaaatgacagaaatggacgttattaatcatctcctacacttaagaactcattgaaatttctccaagcaaccccaggatgcagatattattatggaaatttcaaagaggaggaattaggcccagagaacatgagaaacttgcccaaggtcacattgactataaactcaggcttagaggctactcagagccaaagcacaggttatttatgtatttagtttttacccaactctttctgaactcaaaaggaaaagcccagactcagagccagttcttcctgacctgacttaacatttcttcccaggtgccaaatatcttccatcctaagaggtgtgtcccagatacaggaagggcaagaagaagcctgcatttttctcagcagtgttatcagggaagtgagtcaccttggtacgtttcagcagctccagcctgacctgaccttagcatggcctatgccccaccccatatcatgaacagagagcagagaggatgccttcctctttagaatccattgaagttgtcattaagccatcatctcccccagaggaagtagcagaaatatttacagcaggcccctggtggacatggtacttttcaataggcagagagcctccctctgcagcacatcgttggatcttgcttttaccatactccttgaagagctgaagaaataagagggcccagcaaggttaagtcaagtttccaagcctgttcaggaatatggtgactgaaaggaaactgcaatgagagtctctgactgaagaagatgctctttgcaaactgcctgtaaattcctgtcccctgacagggatggtctggtagaagcatgaactgtggatgcaagaggcagcggggaggagtggaggaagacaggaccagcacatggaatataatctagctgctgggactggcatagtcgatggaggcggtggtccagtgtaaaatgatcagtgaatgtaaattcaatatgttttcatttgggggtgcagagtcgtggctaaaggaatgttcaaatgagtctaccatgagcaagggatcagaggtcctagtggcactatctgttcattcatttttggtacaaccccagccagtcattgagaaggtacactgtgtaagaaaccatcactccagacttacccaaggtatttattgctagatctcaccaagcactgtcaaattcaaaggaggccctgtagtagaccctgggctgtccttacagggccaaaatgcagtgactcaggagcctaatagcacccggtccctccaaaacatgccttctaccaattccattaacagagacaggtgtcagtggaaggggtgggtctcctgtccagaccaccccggcccgggagcagcctgggggatctaggtgggtccttccagagaggcaagtgagaacaactgaaccaagcctcagctattagatttggaatattcacacacttgacactccagagtcagaacagccccttccctttcccttcctcctggaatcagatagggttgaaatccttttaacaccatttggttatcagctcacaacctgaaggtttgcaagtttaggaaaagtgacatgcctctgagcacagggtgctttactccttctgtgcttggaggcttacccaactgaaaggagatggagggcaggagaggccgatgcctagcgtgcctgctgcttacaggggtggtgtcacaggtcaccattattcattaaaattttacttttttgatcccctaccacatgctcaacatggtattgagtcctcaagaatataaaaagaaaatacaacaggaaccagtagtcattaactgtttgttctggactttaataaaagtacagagggtcttggagtacaaaggcaaagacatttagctgtgtatagaatgggtgggggaatgtgttccatggtttggcattcagttcagcaacattcctgagagaaatcaactagcccccttatagagaagaggaaactgagatttaaaaagtggtcctggccgggtgtagtggctcacgcctgtaatcccagcactttgggaggccaagacaggtgaatcacgaggtcaggagttcaagaccagcctgaccaacatggtgaaaccccatctctactaaaaatacaaaaatgtgccaggcatggtggcgagtgcctgtaatcccagctactcaggacactgaggcaagagaaccacttgaacctggcaggtggaggttgcagggggccgagatgatgccactgcactccagcctgggcaacagagcaagactccatctcaaaaaaaaaaaaaaaaaaaaaagataaattaataataaaaaaataaaaaagtaatcctgacttcaagtcatttttttcagaagaaaggattcttgctcactccagggaaatagtccagaaatggaaaatgttgacatcacaaatcacaaaagaaggtgaaaaatatcagagaccctctccagaatgtcatttctcagaaatattaagaaatagagaatcttcccagaggtcgcatgtcagggcaggtcacttaacttgtgggccacagagaccctgaccttcctgtgggaaggcttcatggaggaattgccataaagctggggcacgcacgaatggcagtagtgtcaccagagcagggcattctgaacaagggaagcttgagacatgaagacagtggtcacggggagaggctgggggtagagggtagaggtaggcaagagatttgtctgagtggcatgtcaaatgtgttaaactcaatgagaagctactgctttccaaggctggagtgttggaagcttacttagcaggcacccatgtgaatttggctcctgtgcaggtgtatctgttgcataaaaatagctatcatttgttgcacacctgccatgtgcttggtattttaaatatattgcttctaacctatataacaaccctaggaagtagaaaatgggctactaattttacagaaaaataaactcagaaattaaagggcttgcccatgttgatagagccattacttcttacaaatgaaattttgtctccgatgtctctgctccttttcagtccatctatttgtgggtaagtggaggaagatataaagcatatgcatctgtctattaggcagagcctgtaagggaaattatgggcatctaggatttggagttggacagttagggtgatatcaagattaccttcaagcaaagcagtggctgggatttgatgcaacagggacgtgataaaacatgctcctaaccggcagcagctcatttcggaagactgagcctgagttaaaggccagagcaacataacagagttctccaaacagcacacagtgagagaaggccaaagctaaagaggacatcatcggatttagctgcttcactaaagtgttttgatgtagaaaatgaccttggtgctttagttatccctgatgtcaagacctttactctattttgcccaaatttctcagttagataacagcaaagagagagagccagaagacctgggtgtgcatcctagctgtaccaatcactgaccatgggatcttagattcagactctgagaacctccatttccttctccataaaaatgggcagatatgtactgtactctgttgggggaaaactccaactcaatgagataaagtaggtaaaaactataaacccagtgcatatgttacttagtggttaaaaacatttgggactttaggagacagaccaaaactggttttgaaccagtcggcagaaatgcgctgccttttttcctcctctgcttcccagctatgtgactgtagctattgctgttaatgctccatccagagctcatttaccagggaagtgctctcaaccccagctgccacaaagattgtcttctgtactattttctgaaggatttctcttagttggcaggagttttcttacctgaagatgcctgagaaatgttgtccaccccactcccctgctttcctagggttagggcatgactaatgattgactgacccatgtgggatggggcatgggggtagtagggtaacagtccaccctcattgcctccaggcaggacaacctctggtgcaactcatgctcagagctcctcgtgagatcaggctgaggctagacttctcctgaaactgtacttttacttatttcttccgaaacttcatccttttcccacattaccttactcatttcttctgctaccctattctcagtaaatgtgtttcccaagaaaacaggaatcccccctcagactttgcttctagaccatccactctaaagtcttaaccttgcatgcatgttttcttctctctgtattttacatgtataacgtgatcaacccacggagttattagaattcttccaattaaatgagatatagcagagaatgagtctattttattggctagcaaatagcaaagtgttaaattcaataatggctgaaattgttaccaagtagtaggctcttttattagcttatcggactaccaaaatagtataatgcatcaatatcaaacttaaatttcaacttcataaaacaattctgggcccaacaaatatgaaggtattgctccatcttatgtagcaacatcttgtatttctattgtttgataaatattccacttagaactaa

SEQ ID NO: 140196 - DNA, 496 bp, Homo sapiens
  Payload ID: 7497
  Gene Symbol: HS3ST1
  Gene Name: heparan sulfate (glucosamine) 3-O-sulfotransferase 1
  ENST ID: ENST00000510712
  CDS Start-End: 249-496
gacagggcgctctttgaagccggctcctcacgcggattctggcccaggccgccgctccggtcccagtccggctgcagagcgaattggagaggatggcacctcctgcttcccggggggcggaaggagcgccagcgcctaagtaattgaaggcctgaaacgcccatgtgccactgactaggaggcttccctgctgcggcacttcatgacccagcggcgcgcggcccagtgaagccaccgtggtgtccagcatggccgcgctgctcctgggcgcggtgctgctggtggcccagccccagctagtgccttcccgccccgccgagctaggccagcaggagcttctgcggaaagcggggaccctccaggatgacgtccgcgatggcgtggccccaaacggctctgcccagcagttgccgcagaccatcatcatcggcgtgcgcaagggcggcacgcgcgcactgctggagatgctcagcctgcaccccgacgtggcggccgc

SEQ ID NO: 140197 - DNA, 491 bp, Homo sapiens
  Payload ID: 7497
  Gene Symbol: HS3ST1
  Gene Name: heparan sulfate (glucosamine) 3-O-sulfotransferase 1
  ENST ID: ENST00000514690
  CDS Start-End: 244-491
ctaagaagaatcgaggctggagcaggtggagtggatgcagagggaaccaggaagcaaaggctggggattttcccatcctcctcacctcctgccctagcacctctgctctggaagtcccgagggaccggttgatcttaattgaaggcctgaaacgcccatgtgccactgactaggaggcttccctgctgcggcacttcatgacccagcggcgcgcggcccagtgaagccaccgtggtgtccagcatggccgcgctgctcctgggcgcggtgctgctggtggcccagccccagctagtgccttcccgccccgccgagctaggccagcaggagcttctgcggaaagcggggaccctccaggatgacgtccgcgatggcgtggccccaaacggctctgcccagcagttgccgcagaccatcatcatcggcgtgcgcaagggcggcacgcgcgcactgctggagatgctcagcctgcaccccgacgtggcggccgc

SEQ ID NO: 140198 - DNA, 2314 bp, Homo sapiens
  Payload ID: 7498
  Gene Symbol: HS3ST2
  Gene Name: heparan sulfate (glucosamine) 3-O-sulfotransferase 2
  Uniprot ID: Q9Y278
  ENST ID: ENST00000261374
  CDS Start-End: 435-1538
gccagatcgcggccggcgccagcgccaccgtccggtccacccgccagcccgcacagccgcgccgccgccgagcgtttcgtgagcggcgctccgaggatcaggaatggggcttcgggcgctgggcgcgctccgaacccggcgcacgtaagagcctgggagcgcccgagccgcccggctgcccggagccccatcgcctaggaccgggagatgctggaaatgcaaccgcctgttccccgaggagccgctgcccccgggaccccctggcactgtgcgcaccctggtcagcagcccccggagaagacggcgcccccaacgcccgacccgcgtggccgtggcagcgccacgcgagccctctaggcgaccgcagggccacagcagctcagccgccggtgccccctcggaaaccatgacccccggcgcgggcccatggagccatggcctatagggtcctgggccgcgcggggccacctcagccgcggagggcgcgcaggctgctcttcgccttcacgctctcgctctcctgcacttacctgtgttacagcttcctgtgctgctgcgacgacctgggtcggagccgcctcctcggcgcgcctcgctgcctccgcggccccagcgcgggcggccagaaacttctccagaagtcccgcccctgtgatccctccgggccgacgcccagcgagcccagcgctcccagcgcgcccgccgccgccgtgcccgcccctcgcctctccggttccaaccactccggctcacccaagctgggtaccaagcggttgccccaagccctcattgtgggcgtgaagaaggggggcacccgggccgtgctggagtttatccgagtacacccggacgtgcgggccttgggcacggaaccccacttctttgacaggaactacggccgcgggctggattggtacaggagcctgatgcccaggaccctcgagagccagatcacgctggagaagacgcccagctactttgtcactcaagaggctcctcgacgcatcttcaacatgtcccgagacaccaagctgatcgtggttgtgcggaaccctgtgacccgtgccatctctgattacacgcagacactctccaagaagcccgacatcccgacctttgagggcctctccttccgcaaccgcaccctgggcctggtggacgtgtcatggaacgccatccgcatcggcatgtacgtgctgcacctggagagctggctgcagtacttcccgctagctcagattcacttcgtcagtggcgagcgactcatcactgacccggccggcgagatggggcgagtccaggacttcctgggcattaagagattcatcacggacaagcacttctatttcaacaagaccaaaggattcccttgcttgaaaaaaacagaatcgagcctcctgcctcgatgcttgggcaaatcaaaagggagaactcatgtacagattgatcctgaagtgatagaccagctccgagaattttatagaccgtataatatcaaattttatgaaaccgttgggcaggacttcaggtgggaataagcccacgaaaggaaagggctctcaagggctcttctgctcatctcttccgtgagatttgctcccagaccctctgatctccctccaacaaaccctggctccagccccctttcccaacttgagttgcatcatcttggaaccaggaagcccagctaaagccaagagaccagagagtccctgccactagttttcatcagtctgttcaagcaaagttgatctgctcctggcacgtccagtaaattccagaatcattctcctttctgcccataaagggccttggagaattgctttaagaagagtgaatgttccaatgatgatagatattataagcgatgatggttctgttgctatgaacacagcagtcggtccctgtcattgtccacccaggagtggccttgttaattccaagtggcatgtatcttccctctgagcttcatttcttcaagatgctctgggtggtgggatgggagaccatcctcagccctcctcagaccttatcaattcattgagagattgcaaagctgaaagcacctccggccactcctgggagacagaccctttggtgatgaaataaaccagtgacttcagagcctatggtctcaactgtgcttgaaaaacactgtctctgaaaacaactttgtgattctccctgctccctgtggacaaaagcacataattctgctgttacgggtactttgctcatacgagctttcatgttcagcatgcaatggaatcatgcttgtccatgtgaaataaatatggctctctcgtgtccttaa

SEQ ID NO: 140199 - DNA, 2266 bp, Homo sapiens
  Payload ID: 7498
  Gene Symbol: HS3ST2
  Gene Name: heparan sulfate (glucosamine) 3-O-sulfotransferase 2
  ENST ID: ENST00000473392
  CDS Start-End: 115-603
cccgcgtggccgtggcagcgccacgcgagccctctaggcgaccgcagggccacagcagctcagccgccggtgccccctcggaaaccatgacccccggcgcgggcccatggagccatggcctatagggtcctgggccgcgcggggccacctcagccgcggagggcgcgcaggctgctcttcgccttcacgctctcgctctcctgcacttacctgtgttacagcttcctgtgctgctgcgacgacctgggtcggagccgcctcctcggcgcgcctcgctgcctccgcggccccagcgcgggcggccagaaacttctccagaagtcccgcccctgtgatccctccgggccgacgcccagcgagcccagcgctcccagcgcgcccgccgccgccgtgcccgcccctcgcctctccggttccaaccactccggctcacccaagctgggtaccaagcggttgccccaagccctcattgtgggcgtgaagaaggggggcacccgggccgtgctggagtttatccgagtacacccggacgtgcgggccttgggcacggaaccccacttctttgacaggaactacggccgcgggctggattggtacaggtgactcagacactacctgtgtggttgtcggtgcacacacttgggtgattgtgctgaagctacctggactggagacaagaatgtgtgtcttgctaaactgtggatgataattaaattcatggaagcagcagcaatgacccaggagcacgtatagctggagaagaaggtcagagggtctcactctgtcattcaagcttgggtgcagtggaatgatcatagctcacttcaacctcaaactcctgggctcaagcggtcctcccacctcagcttcccaaggagctgacactacaggagcctgatgcccaggaccctcgagagccagatcacgctggagaagacgcccagctactttgtcactcaagaggctcctcgacgcatcttcaacatgtcccgagacaccaagctgatcgtggttgtgcggaaccctgtgacccgtgccatctctgattacacgcagacactctccaagaagcccgacatcccgacctttgagggcctctccttccgcaaccgcaccctgggcctggtggacgtgtcatggaacgccatccgcatcggcatgtacgtgctgcacctggagagctggctgcagtacttcccgctagctcagattcacttcgtcagtggcgagcgactcatcactgacccggccggcgagatggggcgagtccaggacttcctgggcattaagagattcatcacggacaagcacttctatttcaacaagaccaaaggattcccttgcttgaaaaaaacagaatcgagcctcctgcctcgatgcttgggcaaatcaaaagggagaactcatgtacagattgatcctgaagtgatagaccagctccgagaattttatagaccgtataatatcaaattttatgaaaccgttgggcaggacttcaggtgggaataagcccacgaaaggaaagggctctcaagggctcttctgctcatctcttccgtgagatttgctcccagaccctctgatctccctccaacaaaccctggctccagccccctttcccaacttgagttgcatcatcttggaaccaggaagcccagctaaagccaagagaccagagagtccctgccactagttttcatcagtctgttcaagcaaagttgatctgctcctggcacgtccagtaaattccagaatcattctcctttctgcccataaagggccttggagaattgctttaagaagagtgaatgttccaatgatgatagatattataagcgatgatggttctgttgctatgaacacagcagtcggtccctgtcattgtccacccaggagtggccttgttaattccaagtggcatgtatcttccctctgagcttcatttcttcaagatgctctgggtggtgggatgggagaccatcctcagccctcctcagaccttatcaattcattgagagattgcaaagctgaaagcacctccggccactcctgggagacagaccctttggtgatgaaataaaccagtgacttcagagcctatggtctcaactgtgcttgaaaaacactgtctctgaaaacaactttgtgattctccctgctccctgtggacaaaagcacataattctgctgttacgggtactttgctcatacgagctttcatgttcagcatgcaatggaatcatgcttgtccatgtgaaataaatat

SEQ ID NO: 140200 - DNA, 2527 bp, Homo sapiens
  Payload ID: 7499
  Gene Symbol: HS3ST3A1
  Gene Name: heparan sulfate (glucosamine) 3-O-sulfotransferase 3A1
  Uniprot ID: Q9Y663
  ENST ID: ENST00000284110
  CDS Start-End: 799-2019
cagcggcggcccaggaggcagccggtgagcgcctgcgagcagagtggcgggggccgctgacaggtcccgcgcagcccagcccagcccagccacgcggctcacaggtggggtccaagagcagtttggagcaacccggcgctacggagaggggtggacggctctgcacgggcctcctgtctcccgctcgggcagagggactcggggggacctcgctccttggctgagagaacctgaactcgggcggagagaacgcgcccaggcgggcaaggggaccagagaaagccggggctggaagtcactgtcgctcgccactgtctggagcgcacggagcgcagaggcccggcagccgcgcgtgccctcacggggaccgagccagtgatgcaggatcgctgagcggagatccgcgccgagaagtctctcggggccggggctgagacgcacgccttcgacaccgctgccaagaccccgattccggcgactcttgcggggaaccgaggggccaaggctgccccaagctcaggacttgggcgagtctaagacgatggtttcttaagcacggacccgcgttccccttcccgctccctcgactggaggcagggatcctgcgcggggcccccgggattccgtttccccgcggagccccggccgctgcctcccgggacagttcgcacggccacaggggcgcacggcgatgtggcctccgtccagcgcgctggcccgccggggggatgctctggcacctgtcggggtccaggcctagcatggccggcgcgttgcccgacgtcgcctccggctaggatggcccctccgggcccggccagtgccctctccacctcggccgagccgctgtcccgcagcatcttccggaagttcttgctgatgctctgctccctgctcacgtccctttacgtcttctactgcctggccgagcgctgccagaccctgtccggccccgtcgtggggctgtccggcggcggcgaggaggcgggggcccctggtggcggcgtcctggccggaggcccgagggagctggcggtgtggccggcggcggcacagagaaagcgcctcctgcaactgccgcagtggcggaggcgccggccgcccgcgccccgcgacgacggcgaggaggcggcctgggaagaagagtcccctggcctgtcagggggtccgggcggctccggggccggaagcaccgtggccgaggccccgccggggaccctggcgctgctcctggacgaaggcagcaagcagctgccgcaggccatcatcatcggagtgaagaagggcggcacgcgggcgctgctggagttcctgcgcgtgcaccccgacgtgcgcgccgtgggcgccgagccccacttcttcgaccgcagctacgacaagggcctcgcctggtaccgggacctgatgcccagaaccctggacgggcagatcaccatggagaagacgcccagttacttcgtcacgcgggaggcccccgcgcgcatctcggccatgtccaaggacaccaagctcatcgtggtggtgcgggacccggtgaccagggccatctcggactacacgcagacgctgtccaagcggcccgacatccccaccttcgagagcttgacgttcaaaaacaggacagcgggcctcatcgacacgtcgtggagcgccatccagatcggcatctacgccaagcacctggagcactggctgcgccacttccccatccgccagatgctcttcgtgagcggcgagcggctcatcagcgacccggccggggagctgggccgcgtgcaagacttcctgggcctcaagaggatcatcacggacaagcacttctacttcaacaagaccaagggcttcccctgcctgaagaaggcggagggcagcagccggccccattgcctgggcaagaccaagggcaggacccatcctgagatcgaccgcgaggtggtgcgcaggctgcgcgagttctaccggcctttcaacctcaagttctaccagatgaccgggcacgactttggctgggatggataaccatataatttaaaaagaaaaaaaaaatcaaaatataatatatttttttaccaatcggtagagaagagacagtttaatatttgtgctgaaaatatgtttcagtatttttttcaatgaatgttaagagattgttctcactcccgccccatcttaatgtataaccaacaccaaacacgtggatcaacagaaaaggaaaatttcactcgtctaaacactttcaattttcagtttttattttatgttctatatacccagtcataaagtataagcatcagttgtcattaaaagttttcagaaaatcttgaggttaaacatctctctctctttttttaaaatacaaggccctgataaaattgatatctatccttatatttttctccctttttcccgtgccactttttcttaaattatttcccagttagtattatcatatgtttgtacccgtcacagttttcatagtgctttcaaatacacctttttgatcattaaaataaaaaaataaatcttg

SEQ ID NO: 140201 - DNA, 750 bp, Homo sapiens
  Payload ID: 7499
  Gene Symbol: HS3ST3A1
  Gene Name: heparan sulfate (glucosamine) 3-O-sulfotransferase 3A1
  ENST ID: ENST00000578576
  CDS Start-End: 109-723
cagtactgaagaagggcttcccagatttttcttcttcttaggtcattttgcataagattgggagaaagacaagagaaggaggaaatctaacgaaaccaaagggacctgatgcccagaaccctggacgggcagatcaccatggagaagacgcccagttacttcgtcacgcgggaggcccccgcgcgcatctcggccatgtccaaggacaccaagctcatcgtggtggtgcgggacccggtgaccagggccatctcggactacacgcagacgctgtccaagcggcccgacatccccaccttcgagagcttgacgttcaaaaacaggacagcgggcctcatcgacacgtcgtggagcgccatccagatcggcatctacgccaagcacctggagcactggctgcgccacttccccatccgccagatgctcttcgtgagcggcgagcggctcatcagcgacccggccggggagctgggccgcgtgcaagacttcctgggcctcaagaggatcatcacggacaagcacttctacttcaacaagaccaagggcttcccctgcctgaagaaggcggagggcagcagccggccccattgcctgggcaagaccaagggcaggacccatcctgagatcgaccgcgaggtggtgcgcaggctgcgcgagttctaccggcctttcaacctcaagttctaccagatgaccgggcacgactttggctgggatggataaccatataatttaaaaagaaaaaaaaaa

SEQ ID NO: 140202 - DNA, 5367 bp, Homo sapiens
  Payload ID: 7500
  Gene Symbol: HS3ST3B1
  Gene Name: heparan sulfate (glucosamine) 3-O-sulfotransferase 3B1
  Uniprot ID: Q9Y662
  ENST ID: ENST00000360954
  CDS Start-End: 437-1609
agttcgcctctgcagcctctgcggggaagtgccggggctgctcgaggctcagttcttaggactgcaaggaggcagccccggcgtgcggcggtgcgcacagtctagagtggccagggcgcgagagtgcaacgtcctcctggccccgagcgcgtcgtcgcgccccgggagcagaccctcgcccagcagttaccgccgtcccgactttccgttccagttgcagctcctgccgggcaacatgtcaagagccgccgccgctacagctgccgccgccacctggggaagagcagcagcagcagcggcggccgcgggcacacgggggcaataaaccgagccacccgggcgtccagcgtgccggggaaccctctctgcgctcactgcccggcgggacccacgccatgtgctgagccatgtccctggccgcgcccgcgggcagcgcatggggcagcgcctgagtggcggcagatcttgcctcgatgtccccggccggctcctaccgcagccgccgccgcccccgccgccggtgaggaggaagctcgcgctgctcttcgccatgctctgcgtctggctctatatgttcctgtactcgtgcgccggctcctgcgccgccgcgccggggctgctgctcctgggctctgggtcccgcgccgcacacgacccgccagccctggccacagctccggacgggacgccccccaggctgccgttccgggcgccgccagccaccccactggcttcaggcaaggagatggccgagggcgctgcgagcccggaggagcagagtcccgaggtgccggactccccaagccccatctccagctttttcagtgggtctgggagcaagcagctgccgcaggccatcatcatcggcgtgaagaagggcggcacgcgggcgctgctggagtttctgcgcgtgcaccccgacgtgcgcgccgtgggcgccgagccccatttcttcgatcgcagctacgacaagggcctcgcttggtaccgggacctgatgcccagaaccctggacgggcagatcaccatggagaagacgcccagttacttcgtcacgcgggaggcccctgcgcgcatctcggccatgtccaaggacaccaagctcatcgtggtggtgcgggacccggtgaccagggccatctcggactacacgcagacgctgtccaagcggcccgacatccccaccttcgagagcttgacgttcaaaaacaggacagcgggcctcatcgacacgtcgtggagcgccatccagatcggcatctacgccaagcacctggagcactggctgcgccacttccccatccgccagatgctcttcgtgagcggcgagcggctcatcagcgacccggccggggagctgggccgcgtgcaagacttcctgggcctcaagaggatcatcacggacaagcacttctacttcaacaagaccaagggcttcccctgcctgaagaaggcggagggcagcagccggccccattgcctgggcaagaccaagggcaggacccatcctgagatcgaccgcgaggtggtgcgcaggctgcgcgagttctaccggcctttcaacctcaagttctaccagatgaccgggcacgactttggctgggattgagcagacccgggctatgtaccttacccacgtggcttatctattgacagagattatatgtatgtaaaatgtacagaaatctattttataataatttatttttaattcataagcaattaattcactaagctgcctagccacactctttagagagttagcttcataatctgttaacattccaaagtgtttaactctagtatttcgttctcttcttcacaattgatggtgcttctattttttcttctcccctacctgttatatttaaaacaaagaaaagcacaacttgagatttttgttgttacgggtattcagccttcagtcaccgtctgagttctccagttgctgcctccttgtcttgtcttgggtctcccattccagcttccctgtctcttcctgcctgtgtacctcgtaggaacgctgagctgcctcaacagggctgtattctgaagggcaggcctcatgcagcagcctccttgcagatgtggtgtcccgtccaatgatgtagcctgaaagccacagccctagggttctgtccctccctccattcagcacatggggaaatttctcactccctttacagggacatccacatcctttttttttcttttttttttttttttttttttgagatggagtcttgctcttgttgcccaggctggggcgtaatggtgtgatatatgcttaccacaacctctggctcccggttcaagcgattctcctgtctcagcctcccaagtatctgggattacaggcatgcaccaccatgcctggctaattttgtatttttagtagagacggggtttcttcatgttggtcaggctggtatcaaactcccgacctcaggtgatccgcctgccttggcctccaaagtgttgggattataggcgtgagccactgcgcccgctatccacatccttctagagtcagaatggtagggtctgttgacttcagcttttgattttgcaggatggccctgtgtcctcctctgccccattccctggttcattaaccagtttgaagtgtatgtagattgttgccccgtctttcccaggtcacatgtgtgagatgcctgggtgctgcttcagaaatcaagatgatctcctttaatttgcatgaaactacaccatgctgcgttccccaggcagacagttctgctttgacacaccaaagaatcccgtaggctagcagagccaccagcacaaaccaagggcgctgggtgtcgagactcagaggggtcagctgtgtccctcggcatcagcgtctaccaaggtgctgctaggtacagagccagccagtgttgggcagcaggctcacagcctcaatagggagaaaagacaaaggcctcaaaatgacaggcagcctgacagaggaaggagtctgacacctcagcttgatgcgtctttggaattcctagctcatctcagaattatatcttagagtgataatatgggtggtagccagtggccaaacagcaagaactaagagtggcccttgcaaaaaaaggttgggaaagctgggcccatattgcctgtaaacccttgagcctgatgctcatacagctgtcccttgttttagccaggtcttgacagaagggttaccagcactgtcactgctctacagaatgctctccccgtgcctctctgttgatttataacagttgggtaaccagatagcaatatagtggcaattgagtagccatatagtaatacaggggcagttggttaaacatatagcaatatcacataatgatatgtttaatttaacctcagttttttaaaccagaatgcttctaccataaaagaattgtgatttcagttatacttccatcaaggaatatgtgggaagatatacatattgtcaaaatggttgggatgggatagttacaaaggacacttttgtatgttgtatgggatcacttgcctgatagtataaggaacattgtatgaaaagatgaaaagatacttcatttttagaaactgatcagagatgtcactggtctttaagtgatgtcttgaaaatccagtatgtatttgcccaaaagttttagcctacatctagctagcttacacttagcagccaaaccatcattgtgtaggttctgttttggaggaagctcatgggggatctgtgtatttcttaggtttctccctgttctccaatgttttatccatttcgtagcttttttactgtctccagaaagtagtgtgggacctgcacttaggggaataccagaatcatagcgtggttctgccttcttgatgagtgattgtgaaaaacacctgcataagggtgctaattggttgtgtattttttcatttatttgaaatcaaactgagaacacctcttttcggtttacagcataacatggcttgaagtaaaaggcagtatccaagtccttcacctggtcttgccctgtctactttctgatcattctgatggtctgatgtggctgttgatgtggaactgcagaagagttcagagaagagtatgcaacaaagccataggaaaacacacaggagcttttccctccccttcaggtccccgccctctttccaagctggacaattttttattaagttgtttattccctgccttaaaactgaaacaggaaattttctggtagaaggagggtcatttagtcacgaacactgaagtgggtcaaaattctattctgggtcaaatccttgaattcaaacagatgtccataatcagtactgatggaatagagcaagtttttctatgtaagacaaataaatcaaacatcatgtgcatctcctcataagggtctgcaagggtctgatggtttaaagttcctaacagatctggttgcagcatctgccggagcttgcaccccatcatcggacggtcatcttcctgctgcagaagttaggtaacataagacttagatttcttcctgttctagcaatctgcaagaccaccaggcttaactttttagctgccagaagacaaacccccttttctgtttcggcaatttgtcctggcacgtgttttggacttcctccgatttacacgaaaagctctgatattcattggagtactttattttttttcctcagttttgtttcttttctcatgtaaaaacaaacaaaaaggtcaacaaaaaaaaattgaggtttttcttgtttctatctagttcatgctttctttgcggtgtttgaacagtagtctgttaacttagtaggtggtacctggaaaggtattttaagtatagtgactgtttaataaatacttaattggatgatggaggaggagaaattgttttcttcccaggattctctttgggggtcattttgtgtgacagatatattttagacatttggagaaacagtttcagatcctgccaggatatttttgtaaaaaaggaaaatggaagattccaataaactagaaacagtacgtatctaagatgctgacacagaagctaatgtgacttttcagcttatcaagaggatggccaataaaacttaaaggtgtggttagatgttttctcacttttgtgacattaatttatcactgagtctcattcaaccaagtaatctaaaatactgtgcaaattctagcagtatgtcttcgataacttggatgttaggatagccaatatgtacaaaaaattaaatcaagtattttgtcctatgtataacacaaattaattttacacagagaaagatgtttctaggcaagtgaaattctggtaattcatactatttctttgtatgaacaaataaaatatattttgccaa

SEQ ID NO: 140203 - DNA, 2808 bp, Homo sapiens
  Payload ID: 7500
  Gene Symbol: HS3ST3B1
  Gene Name: heparan sulfate (glucosamine) 3-O-sulfotransferase 3B1
  Uniprot ID: Q9Y662
  ENST ID: ENST00000466596
  CDS Start-End: 437-1609
agttcgcctctgcagcctctgcggggaagtgccggggctgctcgaggctcagttcttaggactgcaaggaggcagccccggcgtgcggcggtgcgcacagtctagagtggccagggcgcgagagtgcaacgtcctcctggccccgagcgcgtcgtcgcgccccgggagcagaccctcgcccagcagttaccgccgtcccgactttccgttccagttgcagctcctgccgggcaacatgtcaagagccgccgccgctacagctgccgccgccacctggggaagagcagcagcagcagcggcggccgcgggcacacgggggcaataaaccgagccacccgggcgtccagcgtgccggggaaccctctctgcgctcactgcccggcgggacccacgccatgtgctgagccatgtccctggccgcgcccgcgggcagcgcatggggcagcgcctgagtggcggcagatcttgcctcgatgtccccggccggctcctaccgcagccgccgccgcccccgccgccggtgaggaggaagctcgcgctgctcttcgccatgctctgcgtctggctctatatgttcctgtactcgtgcgccggctcctgcgccgccgcgccggggctgctgctcctgggctctgggtcccgcgccgcacacgacccgccagccctggccacagctccggacgggacgccccccaggctgccgttccgggcgccgccagccaccccactggcttcaggcaaggagatggccgagggcgctgcgagcccggaggagcagagtcccgaggtgccggactccccaagccccatctccagctttttcagtgggtctgggagcaagcagctgccgcaggccatcatcatcggcgtgaagaagggcggcacgcgggcgctgctggagtttctgcgcgtgcaccccgacgtgcgcgccgtgggcgccgagccccatttcttcgatcgcagctacgacaagggcctcgcttggtaccgggacctgatgcccagaaccctggacgggcagatcaccatggagaagacgcccagttacttcgtcacgcgggaggcccctgcgcgcatctcggccatgtccaaggacaccaagctcatcgtggtggtgcgggacccggtgaccagggccatctcggactacacgcagacgctgtccaagcggcccgacatccccaccttcgagagcttgacgttcaaaaacaggacagcgggcctcatcgacacgtcgtggagcgccatccagatcggcatctacgccaagcacctggagcactggctgcgccacttccccatccgccagatgctcttcgtgagcggcgagcggctcatcagcgacccggccggggagctgggccgcgtgcaagacttcctgggcctcaagaggatcatcacggacaagcacttctacttcaacaagaccaagggcttcccctgcctgaagaaggcggagggcagcagccggccccattgcctgggcaagaccaagggcaggacccatcctgagatcgaccgcgaggtggtgcgcaggctgcgcgagttctaccggcctttcaacctcaagttctaccagatgaccgggcacgactttggctgggattgagcagacccgggctatgtaccttacccacgtggcttatctattgacagagattatatcataacatggcttgaagtaaaaggcagtatccaagtccttcacctggtcttgccctgtctactttctgatcattctgatggtctgatgtggctgttgatgtggaactgcagaagagttcagagaagagtatgcaacaaagccataggaaaacacacaggagcttttccctccccttcaggtccccgccctctttccaagctggacaattttttattaagttgtttattccctgccttaaaactgaaacaggaaattttctggtagaaggagggtcatttagtcacgaacactgaagtgggtcaaaattctattctgggtcaaatccttgaattcaaacagatgtccataatcagtactgatggaatagagcaagtttttctatgtaagacaaataaatcaaacatcatgtgcatctcctcataagggtctgcaagggtctgatggtttaaagttcctaacagatctggttgcagcatctgccggagcttgcaccccatcatcggacggtcatcttcctgctgcagaagttaggtaacataagacttagatttcttcctgttctagcaatctgcaagaccaccaggcttaactttttagctgccagaagacaaacccccttttctgtttcggcaatttgtcctggcacgtgttttggacttcctccgatttacacgaaaagctctgatattcattggagtactttattttttttcctcagttttgtttcttttctcatgtaaaaacaaacaaaaaggtcaacaaaaaaaaattgaggtttttcttgtttctatctagttcatgctttctttgcggtgtttgaacagtagtctgttaacttagtaggtggtacctggaaaggtattttaagtatagtgactgtttaataaatacttaattggatgatggaggaggagaaattgttttcttcccaggattctctttgggggtcattttgtgtgacagatatattttagacatttggagaaacagtttcagatcctgccaggatatttttgtaaaaaaggaaaatggaagattccaataaactagaaacagtacgtatctaagatgctgacacagaagctaatgtgacttttcagcttatcaagaggatggccaataaaacttaaaggtgtggttag

SEQ ID NO: 140204 - DNA, 3203 bp, Homo sapiens
  Payload ID: 7501
  Gene Symbol: HS3ST4
  Gene Name: heparan sulfate (glucosamine) 3-O-sulfotransferase 4
  Uniprot ID: Q9Y661
  ENST ID: ENST00000331351
  CDS Start-End: 393-1763
cagcgcgcggcggcggcggcagaggctgaagcagaagccgcggcggagccggggaagcgggggcgctgcagacggagcaggtgccgccggcgggtccgcgcgcccccctcggtccccttgcctgaggctgaggggggggcggtggtgggggggccacccggactcggcgggcagcgtggggcggggggccatgcggccgggctcccccctggcgcagcgggacagcggccagggccgggggcgcagcggcgtcgcttcatgcagccggggcggctgggcagcggcggcggcggcggcggcggcggcggcggcgggggcggcggctgaaaccatgtccgggcagcgccgggggctgccgccgccgccgccgccgccgcgagccgggagccgcgatggcccggtggcccgcacctcctccgcctccgcctccgcctccacctctggccgcgccgccgccgcccggcgcctctgctaaggggccgccggcgcgcaagctgctttttatgtgcaccttgtccctgtctgtcacctacctgtgctacagcctcctgggcggctcgggctccctgcaattccctctggcgctgcaggagtcgccgggcgccgccgccgagcccccgccgagcccgccgccaccctctctgctgcctacccccgtgcgcctcggcgccccctcgcagccgcccgcgccgccgccgctggacaacgcgagccacggggagccgcccgagcccccagagcagccagccgcccccgggaccgacggctgggggctgccgagcggcggcggaggcgcccaggacgcctggctccggaccccgctggcccccagcgagatgatcacggctcagagcgcgctgccggagagggaagcgcaggagtccagcaccaccgacgaggatctcgcaggccggagagcggccaacgggagcagcgagaggggcggcgccgtcagcacccccgactatggggagaagaagctgccacaggcgctcatcatcggggtcaagaaaggagggacccgcgcgctgctggaggcgatccgcgtgcacccggacgtgcgggcggtgggcgtagagccgcacttcttcgacaggaactacgaaaaggggttggagtggtacagaaatgtgatgcccaagactttggatgggcaaataaccatggagaagactccaagttactttgtgacaaatgaggctcccaagcgcattcactccatggccaaggacatcaaactgattgtggtggtgagaaaccccgtgaccagggccatctctgactacacgcagacactgtcaaagaaacccgagatccccacctttgaggtgctggccttcaaaaaccggaccctcgggctgatcgatgcttcctggagtgccattcgaatagggatctatgcgctgcatctggaaaactggctccagtatttccccctctcccagatcctctttgtcagtggtgagcgactcattgtggaccccgccggggaaatggccaaagtacaggattttctaggcctcaaacgtgttgtgactgagaagcatttctatttcaacaaaaccaaggggttcccttgcctaaagaagccagaagacagcagtgccccgaggtgcttaggcaagagcaaaggtcggactcatcctcgcattgacccagatgtcatccacagactgaggaaattctacaaacccttcaacttgatgttttaccaaatgactggtcaagattttcagtgggaacaggaagagggtgataaatgaggctagagaggcagaggaaggctagtcaataagctaaggaggctccttgcctgagtccttgaataccccagcttctgcagcttcacttgctggagtgccaagtagatctcctcctccttcatgcagccaggattgcctccagtgctgttagcttaggcaaacaggtggatcccatggcatccccatggaggaaccaggcccatctgggcagcagcatctggttgaccagatggccaccagaacccactgttcattcttatcttctgctagttaatatagcctgaagacagaggataaatagttgtcaatgtcagagacagtgctattaatgtatatgtgagcgacaaaaaaggtctgctttataggggttctcactctagcttggggagccagggttctagccctgtatctgtcatgggcacctgctgtctaaacctctgcttgggcttctccccagaatgcactttgtggctgagtgctccaggactcctagggagcaaggtcctccctctaaggtgtttctagtcttctctttaaaggtctcatcccacaacccctgacttcctccctccccacatcatgaaggcagaggcatgcacattcctcactgaaaaagaaaacacacacccacccacacacacacacacagaagaaaatgaaagctgacacacctcgaagccttctttccaagagccctctaaatggggttgggtctcactcttcatgagtatcctgggttgtgcagaagcttagcatatgcccttgtgttcggatcaggcccacagggctgctcaaagagtagagtaattgtaaccgaggtcagagctctggggttggcagagatgagtggccatatctgggggtaaaagaagaaatcctgtcctcttggtgggaggttaccttacctgaagaccatctctcccaagcactgtagttctgagcatgtttttggggtggactctgtcccctagggtccctagaagggcaaagaccagagagttgacaagtctgttattaggaataatccttagccatgtaatggagaaaggagcagtcagcattcttccaatttgccccaccaccacctcctcgggcttcattttctctatttagagatggcagagagtgaggtagtggcgagaaagctgactccattcatcagatccagtttatgagggttgggggtgagcaagggctgtctgcagaaacccccatcaagagctgctgaatgaagtgtcccttcccatcagtttgattcaattaaaatgcatcatttgacataaagcacttgttcacagatctccaaaaccaggaattgttctagtaaaactggaaatttgtatgagtggggggagttaaatctgttcagctgttattaaactgtcatttctcccgctaaatgaaaaccgtgttgttataaagcttaatgcaacctgatta

SEQ ID NO: 140205 - DNA, 3901 bp, Homo sapiens
  Payload ID: 7502
  Gene Symbol: HS3ST5
  Gene Name: heparan sulfate (glucosamine) 3-O-sulfotransferase 5
  Uniprot ID: Q8IZT8
  ENST ID: ENST00000312719
  CDS Start-End: 1190-2230
gggagggtgtggactggcagccactctgcagctggtcgccagggacccggtccctcctgcgcgcccaagtgatggaggggaagagattcgcttagacacacacacgcgcacacagctgggcacgtctccgggaggcagctgccggctcgggcgctctgggggccgggcggcggccgtgacagcgccagccgcggggagcggggcgcccgcacagcttggcaccggaggctcgaggacgcaggaagggaagatcccagtcacactgagtgttgctcttttgggcggattgggagggagcgggctgcccgaggagctgtcaccgaggacgcccgaagtctcgccctctgcgcgcagggtccggggctgcgccggtgccctcgtggggcaaggaggatgcgcacctccccccgcagagcggctgcggtctccggcactgcgcggactccggctcctgcggccgcccgtgccgtgcccgcgccacgggagcgcgccctgccgcacctggttccagcctctcggggaagtgcaggaaacgcgccctaaactccactacttctcgcccgcctgcccccccgcccggctccccgcctcagacctcgccgccgccgccgccgccgccgccgcctgcgtgtggggcccgctcgcgtcttactcacacgcgccacgcacagccctgttggtttgctctcattcacgccgactcgctctccgccgagcctagcccgggcatccgaaactactggaccaactgccgtccggaccgcagcagcggccgggtgacccccacgcgacccgccgccgacccccgcgccctgaggctcccgcccgcgccgccaccgccggggaccacgagataatcagatactcactgtcttcagcattggtgtcttctattctcaacggcatttctggtggccaccccaggagtctccctgacctgttttaaaacccttggaaattaaggagagaatccactacatatattcctttgaaagtttccaccatatatgttcaaaaattgctgaatgagcacaaggatttgaaggtgctaaagcaagggataaaccaaaaggacagccagtaggtgaggagaggccatggaatacccgccaacaagataatcatcgctggaataatagggacctgtctgaatgtaggctgcagcagtcctgaaggttgatggagggccatgctattcaaacagcaggcgtggctgagacagaagctcctggtgctgggaagccttgccgttgggagtctcctgtatctagtcgccagagttgggagcttggataggctacaacccatttgccccattgaaggtcgactgggtggagcccgcactcaggctgaattcccacttcgcgccctgcagtttaagcgtggcctgctgcacgagttccggaagggcaacgcttccaaggagcaggttcgcctccatgacctggtccagcagctccccaaggccattatcattggggtgaggaaaggaggcacaagggccctgcttgaaatgctgaacctacatccggcagtagtcaaagcctctcaagaaatccacttttttgataatgatgagaattatggtaagggcattgagtggtataggaaaaagatgcctttttcctaccctcagcaaatcacaattgaaaagagcccagcatattttatcacagaggaggttccagaaaggatttacaaaatgaactcatccatcaagttgttgatcattgtcagggagccaaccacaagagctatttctgattatactcaggtgctagaggggaaggagaggaagaacaaaacttattacaagtttgagaagctggccatagaccctaatacatgcgaagtgaacacaaaatacaaagcagtaagaaccagcatctacaccaaacatctggaaaggtggttgaaatactttccaattgagcaatttcatgtcgtcgatggagatcgcctcatcacggaacctctgccagaacttcagctcgtggagaagttcctaaatctgcctccaaggataagtcaatacaatttatacttcaatgctaccagagggttttactgcttgcggtttaatattatctttaataagtgcctggcgggcagcaaggggcgcattcatccagaggtggacccctctgtcattactaaattgcgcaaattctttcatccttttaatcaaaaattttaccagatcactgggaggacattgaactggccctaaaataatatgtcatacaacactatgtgttgtgcctggagacacacaatgtctcctgtagattaaaatatgcacttttcctaggcagagctatccaagtcatttttccatgtatatttgtacatacgcagtgtgtgaccaaatataagatcagttctttttctactgaaaatttacgaaaaaaaaaaaattgctgtctgcatagtcgcatcttttaagctatttacaaaagagaagaggtggtggtattgggggaaagtgacttcagctattctcaaagagttagtcttcctttgattcagaatttgtcacccgccattttcatagatttaagccaaaagataaatgtgtgaaaatgtaccaatggctgcgaagcttcaggaagtagaggatccagtgatgcattttttttttcctaagggaaagctggctctttaattcagatgctgaattggtgccatgaaaacagaaaatgctattttcttattatttaaaagaacgtcttatctcataaaattgacattgttccaaagttcttgtggtgattttgcactattgttttctcgtatggaccatggtgtcacttgtagcatgtcaatcacacattggaaagtcaagtccttttacttccatgttgtatgtcaacagagagaaatgtcatgtacataatgtatattgttgtaaatactggtttcacactaagtaattctattttgtaaactgaatatggctatttaatttattgtgaaaattaaatttattgtggtatttaaaaatggaatggattaaaattactctatgtgcaattttttttttttttactcattttgttttacgtgccccctgctggcttccaaaatggaagctgtttacgtgcatatgagagcacttggaaagatgtgcttccctgctggatttctgtaccccagtgaaaatgtatttatgaagtgaggttgagtatattaaaaaagaaaaacctcaaccatctggaaatcaagtataatagccacctcaaagaaccctagtgctgctctgctacaactttgtaacaattaatttactcgcagttgctgctgctcaggaagagagacaaggaatattttaacagaatcaaggcatagaagaatcaccattttatttgaacctctaatcagagtcagaccagtagagaaattaaataagattagaaaactctgtactgaaagctgctgatgcttcaaaaatgaaaacaagatctcacaactctccctgttagttgaaaatatatcaatttgctctgaaaggattcagctgcctagtgttgccattactaacataaacatatggctcatatttccatccagagaaattaatgctaaattggtgcctcgctaacatcagatacactgtattatgcttaaatatattcagtaaaatgtggaaaggggtattaacaacgacaacaaaaagatggattttttttttctcacaatcacagttgctaatccagtgggagatgtttgagagagttttgttcaacatcacagtgagagtgcctagggaaatcagaaaattacaatggattcccctttgattgtaataagtgttgattttctccatgagttgtttatcctgtctagtgatttgatggtgaacttttctaaataaatagccctttcccctccggtgtcggta

SEQ ID NO: 140206 - DNA, 2744 bp, Homo sapiens
  Payload ID: 7502
  Gene Symbol: HS3ST5
  Gene Name: heparan sulfate (glucosamine) 3-O-sulfotransferase 5
  Uniprot ID: Q8IZT8
  ENST ID: ENST00000411826
  CDS Start-End: 33-1073
gctgcagcagtcctgaaggttgatggagggccatgctattcaaacagcaggcgtggctgagacagaagctcctggtgctgggaagccttgccgttgggagtctcctgtatctagtcgccagagttgggagcttggataggctacaacccatttgccccattgaaggtcgactgggtggagcccgcactcaggctgaattcccacttcgcgccctgcagtttaagcgtggcctgctgcacgagttccggaagggcaacgcttccaaggagcaggttcgcctccatgacctggtccagcagctccccaaggccattatcattggggtgaggaaaggaggcacaagggccctgcttgaaatgctgaacctacatccggcagtagtcaaagcctctcaagaaatccacttttttgataatgatgagaattatggtaagggcattgagtggtataggaaaaagatgcctttttcctaccctcagcaaatcacaattgaaaagagcccagcatattttatcacagaggaggttccagaaaggatttacaaaatgaactcatccatcaagttgttgatcattgtcagggagccaaccacaagagctatttctgattatactcaggtgctagaggggaaggagaggaagaacaaaacttattacaagtttgagaagctggccatagaccctaatacatgcgaagtgaacacaaaatacaaagcagtaagaaccagcatctacaccaaacatctggaaaggtggttgaaatactttccaattgagcaatttcatgtcgtcgatggagatcgcctcatcacggaacctctgccagaacttcagctcgtggagaagttcctaaatctgcctccaaggataagtcaatacaatttatacttcaatgctaccagagggttttactgcttgcggtttaatattatctttaataagtgcctggcgggcagcaaggggcgcattcatccagaggtggacccctctgtcattactaaattgcgcaaattctttcatccttttaatcaaaaattttaccagatcactgggaggacattgaactggccctaaaataatatgtcatacaacactatgtgttgtgcctggagacacacaatgtctcctgtagattaaaatatgcacttttcctaggcagagctatccaagtcatttttccatgtatatttgtacatacgcagtgtgtgaccaaatataagatcagttctttttctactgaaaatttacgaaaaaaaaaaaattgctgtctgcatagtcgcatcttttaagctatttacaaaagagaagaggtggtggtattgggggaaagtgacttcagctattctcaaagagttagtcttcctttgattcagaatttgtcacccgccattttcatagatttaagccaaaagataaatgtgtgaaaatgtaccaatggctgcgaagcttcaggaagtagaggatccagtgatgcattttttttttcctaagggaaagctggctctttaattcagatgctgaattggtgccatgaaaacagaaaatgctattttcttattatttaaaagaacgtcttatctcataaaattgacattgttccaaagttcttgtggtgattttgcactattgttttctcgtatggaccatggtgtcacttgtagcatgtcaatcacacattggaaagtcaagtccttttacttccatgttgtatgtcaacagagagaaatgtcatgtacataatgtatattgttgtaaatactggtttcacactaagtaattctattttgtaaactgaatatggctatttaatttattgtgaaaattaaatttattgtggtatttaaaaatggaatggattaaaattactctatgtgcaattttttttttttttactcattttgttttacgtgccccctgctggcttccaaaatggaagctgtttacgtgcatatgagagcacttggaaagatgtgcttccctgctggatttctgtaccccagtgaaaatgtatttatgaagtgaggttgagtatattaaaaaagaaaaacctcaaccatctggaaatcaagtataatagccacctcaaagaaccctagtgctgctctgctacaactttgtaacaattaatttactcgcagttgctgctgctcaggaagagagacaaggaatattttaacagaatcaaggcatagaagaatcaccattttatttgaacctctaatcagagtcagaccagtagagaaattaaataagattagaaaactctgtactgaaagctgctgatgcttcaaaaatgaaaacaagatctcacaactctccctgttagttgaaaatatatcaatttgctctgaaaggattcagctgcctagtgttgccattactaacataaacatatggctcatatttccatccagagaaattaatgctaaattggtgcctcgctaacatcagatacactgtattatgcttaaatatattcagtaaaatgtggaaaggggtattaacaacgacaacaaaaagatggattttttttttctcacaatcacagttgctaatccagtgggagatgtttgagagagttttgttcaacatcacagtgagagtgcctagggaaatcagaaaattacaatggattcccctttgattgtaataagtgttgattttctccatgagttgtttatcctgtctagtgatttgatggtgaacttttctaaataaatagccctttcccctccggtgtcggta

SEQ ID NO: 140207 - DNA, 1273 bp, Homo sapiens
  Payload ID: 7503
  Gene Symbol: HS3ST6
  Gene Name: heparan sulfate (glucosamine) 3-O-sulfotransferase 6
  Uniprot ID: Q96QI5
  ENST ID: ENST00000293937
  CDS Start-End: 118-1146
gctgcgggaccgccgggcgcagagcacaagccgggcacccacggactgagcggcgcgcgggccgagatgcgcgcccgcctgctgcccccgctcccgggcctggagcggcgcgaccccatggcaggtagcggcggcctgggcggcggggccgggggcggccagggcgcaggggccgggcaaggggccgctctgcgggcgtcccgcgcgccgatgctgctcgtggccctggtgctcggcgcctactgcctctgcgccctccccggccgctgcccgccggccgcccgcgcccccgcgccggcccccgcgccctccgagccgtccagctccgtccaccgcccgggagcacccggcctgcctttggccagcggtcccggccgccggcgcttcccgcaagcgctcatcgttggcgtgaagaagggcggcacgcgcgccctgctggagtttctgcggctgcaccccgacgtccgcgcgctgggctctgagccccacttcttcgacaggtgctacgagcgcggcctcgcctggtaccggagtctgatgccccgaaccctggatgggcagatcaccatggagaagacccccagctacttcgtgacgcgagaggccccccgccgcatccacgccatgtccccggacacgaagctgatcgtggtggtgcggaaccccgtgacccgggccatctccgactacgcccagacgctctccaagaccccgggcctgcccagcttccgcgccctggccttccgccacggcctgggccccgtggacacagcctggagcgccgtccgcatcggcctgtacgcccagcacctggaccactggctgcgctacttccccctgtcccacttcctgttcgtcagcggggagcgtctggtcagcgacccggccggagaggtcggccgcgtgcaggacttcctgggcctgaaacgggtcgtcacggacaagcacttctacttcaacgccaccaagggcttcccctgcctcaagaaggcccagggcggcagccgtccccgctgcctgggcaagtccaagggccggccacacccacgcgtgccccaggccctggtccggcgcctgcaggagttctaccggcccttcaaccgcaggttctaccagatgacgggccaggacttcggctggggctgagcggcaccctggggatgctcagcaccttgattgacacccgctcgcctggccagagcgggctgcgtgcacatgctgggcagagaggaatatttaagaaataaagcttggacccagatttttccacaaa

SEQ ID NO: 140208 - DNA, 1273 bp, Homo sapiens; identical to SEQ ID NO: 140207
  Payload ID: 7503
  Gene Symbol: HS3ST6
  Gene Name: heparan sulfate (glucosamine) 3-O-sulfotransferase 6
  Uniprot ID: Q96QI5
  ENST ID: ENST00000454677
  CDS Start-End: 118-1146

SEQ ID NO: 140209 - DNA, 6736 bp, Homo sapiens
  Payload ID: 7504
  Gene Symbol: HS2ST1
  Gene Name: heparan sulfate 2-O-sulfotransferase 1
  Uniprot ID: Q7LGA3
  ENST ID: ENST00000370550
  CDS Start-End: 364-1434
aaaggagggagggaaggaaggaagagagggaggcgggcaagcaggcgggcgcgggggtcggggactgaggcagtagagggaggcgagagcccggcagccgcttcgcgctgtttgctgcgcgggcttttggagggggcggccgtttagtcggctgaggagaagcggacaccagcggcgttggtgatagcgcctgggggagggggactggagaggcgagaaggggggtcgctgcggtggttctctcgctgtcgctctctctttgcctcgctcccggctcggcgggctcctcccggcgtctctctcgcctccggggtcccgctccccgccccccgcggtatgtcttgatcccgagcagcgggtttcatggggctcctcaggattatgatgccgcccaagttgcagctgctggcggtggtggccttcgcggtggcgatgctcttcttggaaaaccagatccagaaactggaggagtcccgctcgaagctagaaagggctattgcaagacacgaagtccgagaaattgagcagcgacatacaatggatggccctcggcaagatgccactttagatgaggaagaggacatggtgatcatttataacagagttcccaaaacggcaagcacttcatttaccaatatcgcctatgacctgtgtgcaaagaataaataccatgtccttcatatcaacactaccaaaaataatccagtgatgtcattgcaagatcaggtgcgctttgtaaagaatataacttcctggaaagagatgaaaccaggattttatcatggacacgtttcttacttggattttgcaaaatttggtgtgaagaagaaaccaatttacattaatgtcataagggatcctattgagaggctagtttcttattattactttctgagatttggagatgattatagaccagggttacggagacgaaaacaaggagacaaaaagacctttgatgaatgtgtagcagaaggtggctcagactgtgctccagagaagctctggcttcaaatcccgttcttctgtggccatagctccgaatgctggaatgtgggaagcaggtgggctatggatcaagccaagtataacctaattaatgaatattttctggtgggagttactgaagaacttgaagattttatcatgttattggaggcagcattgccccggtttttcaggggtgctactgaactctatcgcacaggaaagaaatctcatcttaggaaaaccacagagaagaaactccccactaaacaaaccattgcaaaactacagcaatctgatatttggaaaatggagaatgagttctatgaatttgcactagagcagttccaattcatcagagcccatgccgttcgagaaaaagatggagacctctacatcctcgcacaaaactttttctatgaaaagatttaccctaagtcgaactgagtataaggtgtgactattggattcttgaactaaaatttgaccctgtcttcacctttgttctcagctccacagtctggattgctgacagtaggtgtatatgacaatttgtattgagccaaattaggaaacagacagtaacgtcaaggaagtagatactggctggcattgtcagtgttctaagtttcaggcatttttatttttcctggctaaacgttggtgaaagttataacctcctgcctgggagaaaatatacatcacctaaaatgaacttatggcaggtctaatcaaaaggctaaatacaatttcagaaaaggttctgatactcttgtttttgataaagcattttttcaactaaccatgaattaagatgagtccatttgcctcttctgccttcactgagggtttgggttatacacctctactgaattgtgttaataactgtttggcagtgtgtactttgtttttgtgagtcatgtctcatgaaatttattggaatgtttaatcatatttgctaagaaatgtttctgctgtagttggatttgcccatatttatgtaggtggttttaattttttaaatggtgattagtgttaaaaatcaatttaaatcatgactaatatggtaaaaagataaagcatcaaagcagtatttctcattcctgcctcctcaatatctaatactgggaagatacttcaaagaatattgagattgtctgaagttttagttaagattttcacacattaatatcaaaaaagtaagtttagtatttgtttctccatgggttatttgtaaagctgtaaactgagatatcggtgactccgtattatgactccattagtgagctgtggtatgggtaggattttcctacttcttctgtacttttacctgtagactatttttactaaggtgctttataatgtgttttaaagcattgcatttacaaaacaaggaaaatgctgtaaatattgcatattttatgtatttggaccaaaaggttacaagtaattagacaaaagtggttttgcaccaattttatgtcaagtaaaaccatcagacctactgttcttgtatttctcatttaactttactgttaagacatcactgaaatgaacttcagtaagctttcaattttgatacacagttcattattcataacttgaggcagtaattacagtggaatgagtactggacaaggagtcaaaaaacttgatttcaggtcctagctctagcacttacagctgtgtgatcttgggcaagtcacttaacctctctttgcctcaatttcctcatcttgaaatgaggataataatacctgctgtacctacctcacagggctgttgtgaggattaaatgagatggcatgtgaaagcactttgaaaattgtaaagcgctatgtaaatgtaaggtattatagaaacatctttaacatatagtttcataccattcattttttaacaaagaaagggaaaagtctgcttgtaagctggttgaaaaagttaatcttgatataaatttgtgtttgataaatatcctctcagtgttttatcttccatgtttcaacaactattgaaatatgaaatgcctgtgaactcttaaagcttcatgagcagctgcttgagttcaggaagttcactgttagaaataggctttgttagctgactagggtcagggaaacttttctcttcaaatttgaaagctgtttctgttttcattttacattattattcagaaatggtagctattctatacctatggtttaagtaaatatttctgaataaggcttcaccatactgtaagcattttaggtagattgccttaaaggttatgggagggcatgagggaacacttcttatgagaaaacatttataaacaaaagaaacatttataaactaaagaaaaactaaaagaatgacagaacaatcatcttagcaccctttcctcacaataatataaaaatattaaaagaacataggcaggctttttttaaatttggcttttttctttccttttttcaaattgacttttataggtatttcctgaaagtgtatacaaattatttcctcgcccaaaataaagcaccacttcaaggtgtggtttgacattacatgctaatgaacaaacccagtatgcaagttattcttgcaccacatgctcaaatcttcttgaggtgcattaactcttttaggtaactagagcagtacttggtgaactagatcaggaggtcagtaaactttctgtggaagggccagagagtaaatattttaggctttgcagcccatacggtctctgtcacagctagtcaaccctgccattttaccacaaaagcagcaatagacattatgtaaacaaatgagcacagttatgttccaataaaactttatttacaaaaacagatgacatcccagatgcagaccatgggcaaccaaccattgcactggccaaatcattatttatggagaaatcctctttgtgtctctactctagatgcctaaaagagtttatatacttctaaaagctcctaacttatatccaaagaattgctttctgattcgtgtagtctctcccacagattcataaacttttatgacttatattgtttccaggtgggcatggtttatttcccagtttaacagttcagaataggggcatttattttatcatattttagggtgggttaggagtatcctttctggagactgagaaaggggtgtatttaattccatcaggtccagtacagtactaggagtcataatactttataatcaattaaataaatagaaccactgagacaataatgtatttttttaaagtggcaaatgtggttttcttttttcagcctttgcgctttttcagtattttgaccatagggagataatttttttataatacaaaagtaaccacttggaattttaaagataatgttatgtgtgtatgtgaaatatatatacatatatatatatatgtttatttcctaaaagaagaaaagatacctttctgttcaacttgtatcaactcctcttttctaattgctgtgaaatggcaactgttgataaattattgtgattgttttaaaatctaatgggaagtaaaatatattttgattttacccagcttaatctgtaaagtagcacttaaatatatctgatagcaacacttaagatattgcatggggattactttcctatcatccatatgcatttgtgcaacttcaaacatattgggtgcttctgaattcctgatgattggatttaagctattgaaaattggataatttaaacttaatgatttttataattttctgatcttaaaatttggttaatgcctataatctgttgctttttctcaatatgtgtcctattggaaattcctcaaatcgttggtgccatcagtgatttacaaacaatattttgatattgcagatgacttgcttactgtatttgcattgttagaaaacagtttgtagacaatgattcttttttaataaaatcaaataattctaaaagtgctagagaatttaactaaaagctggttcccaaatgcatagctggcattttaatttaaattcaaatctacatagagaacatctgtgtaaatcatctaactggatttttccattggtcattcccaaacacacctatggtcctagaatccttaagagaagcaccctgtaaccttttatgtggtttgcctttaagaggcccaggtgcttctcctttatgatttgagttggcctcttcataaattagtgctgtttactttcagaggaagcagagaagttgctgttatgtttttgcatccgtttaccctatgcaaagttgctgtatgatgccaactaaactactctttaggcagccttctgaggagaaaagcaaccctgtttcaaatccactgccaattcagctcctctggagtggagctttctgatttcttggagcaggaattttagagattgaaatgaatgatcatttagtcagatttatcctgtaatttcatgcagctttgtggcctttgcagtactatttataaaatggaccctgatggtgatgaactctttagaacgcattactgttaagcctgtgttgagacattgatgctgtctatctcattttttagacagtttttgtagctttctattgagagtcaggtatgtgagcatctctgaagcagtgttgaatgtaattttcggaaacatggattgtgtattttgacttttattttataaatacacagctcaacagtgccttttttttccctcatagtcctgttggaagatgctcactactttctctcttctctctccctgccctcccccactccattcagttgattcatttatgcaaattctgtttccaacttgaaaccattttgtcacatctgttggagagataatcactccttttccttaacattctgccagctttctgatgttgaagtgtttcagttgactacctgatgcaaaagctataaaataaacagtgggaaggggaaaaattggtgtcctgttttaatattttcttttgtagccttgacactgatggacattttccaagctgactcagtgttcagtgtcaacttaactctcagatagtgttgccatcaagaaagcatgcaacatcattggtttctaatgattttatggcttgtgacaatattttatctggactgacatgcctctgctgcttttgctttgtacttcattgctggtaataaaatttcagatggaaaacttacaaaatatatacttaattagaagaaaaaaatagagaaagggctattagaattaaaaaaatttgaaagtaacttaatctaacatttatggcacagtttggacatatccataattttttttgggaacacacatttctgattttttttttcccccttaaagaagaaagtctcaattccattgattttcaattcttagccactggctcattgctttgagcaatgcttgattgattctatttatattatatgatattgggttgataaaataccagttcaatgatgagttttcttaacagaatttggtttgtacttgcagtggctgaacaaagagcatggcttgagaatcaaagggatctgcatttagcaatgtgatgtcagtaaatggacataacaggattgttgtaaaggttgggcatgatgtatgcaaagtactggccagggtagactaataactgatggcatttatatgctgtgctggaatattgttaccaagctgatgtgccgttctcaccctgcagaatactggttttgtcatttcataaatgatatttttataaatatttttgaatgactgta

SEQ ID NO: 140210 - DNA, 1585 bp, Homo sapiens
  Payload ID: 7504
  Gene Symbol: HS2ST1
  Gene Name: heparan sulfate 2-O-sulfotransferase 1
  Uniprot ID: Q7LGA3
  ENST ID: ENST00000370551
  CDS Start-End: 390-1079
cggtggaggggcgcgcggccgcgagcaaaggagggagggaaggaaggaagagagggaggcgggcaagcaggcgggcgcgggggtcggggactgaggcagtagagggaggcgagagcccggcagccgcttcgcgctgtttgctgcgcgggcttttggagggggcggccgtttagtcggctgaggagaagcggacaccagcggcgttggtgatagcgcctgggggagggggactggagaggcgagaaggggggtcgctgcggtggttctctcgctgtcgctctctctttgcctcgctcccggctcggcgggctcctcccggcgtctctctcgcctccggggtcccgctccccgccccccgcggtatgtcttgatcccgagcagcgggtttcatggggctcctcaggattatgatgccgcccaagttgcagctgctggcggtggtggccttcgcggtggcgatgctcttcttggaaaaccagatccagaaactggaggagtcccgctcgaagctagaaagggctattgcaagacacgaagtccgagaaattgagcagcgacatacaatggatggccctcggcaagatgccactttagatgaggaagaggacatggtgatcatttataacagagttcccaaaacggcaagcacttcatttaccaatatcgcctatgacctgtgtgcaaagaataaataccatgtccttcatatcaacactaccaaaaataatccagtgatgtcattgcaagatcaggtgcgctttgtaaagaatataacttcctggaaagagatgaaaccaggattttatcatggacacgtttcttacttggattttgcaaaatttggtgtgaagaagaaaccaatttacattaatgtcataagggatcctattgagaggctagtttcttattattactttctgagatttggagatgattatagaccagggttacggagacgaaaacaaggagacaaaaagacctttgatgaatgtgtagcagaaggtggctcagactgtgctccagagaagctctggcttcaaatcccgttcttctgtggccatagctccgaatgctggtaggggagataaagttggctcagattgattatcatccttattatctctgtaatctgtgtttcatttcacaagggctagatatagggaaatcggtgaaagactagactaaaaataacatgtaattcagtaatatctagttttgcagttacttttaaatgcatttaaaagattcctcatgtagagtgatatcctaatatccttgcattgttttctgagatgccggtttttagtatttcttatttttggtgttatgttttgctgtattccagcagagctcttagagactgggggtgggggtgggtgtcataaatcttattttgtccaaagcttactgttttagctattcatgttaaattaagaaaaggcttagtgggttaaaattcacctggttttactgttaaactgattttgactttaagagaagccaaggttatggctgtggtttagtttgctagtaaatatcaagtggaaaataaagatactttaataagaactgtatttcctcagaa

SEQ ID NO: 140211 - DNA, 540 bp, Homo sapiens
  Payload ID: 7504
  Gene Symbol: HS2ST1
  Gene Name: heparan sulfate 2-O-sulfotransferase 1
  ENST ID: ENST00000591456
  CDS Start-End: 208-540
ctatggctgtagaaaaataacagtactgctcccatgaaaatctgattttcagcagtgtgaacctgcccagaaggaactgatggtgagaggttgaggaggaagaggaggagttggtcttgctgtctcaggagtggcaaaggtggaagaaaattcttgtaaagggctattgcaagacacgaagtccgagaaattgagcagcgacatacaatggatggccctcggcaagatgccactttagatgaggaagaggacatggtgatcatttataacagagttcccaaaacggcaagcacttcatttaccaatatcgcctatgacctgtgtgcaaagaataaataccatgtccttcatatcaacactaccaaaaataatccagtgatgtcattgcaagatcaggtgcgctttgtaaagaatataacttcctggaaagagatgaaaccaggattttatcatggacacgtttcttacttggattttgcaaaatttggtgtgaagaagaaaccaatttacattaatgtcataagggatcctattgagagg

SEQ ID NO: 140212 - DNA, 3932 bp, Homo sapiens
  Payload ID: 7505
  Gene Symbol: HS6ST1
  Gene Name: heparan sulfate 6-O-sulfotransferase 1
  Uniprot ID: O60243
  ENST ID: ENST00000259241
  CDS Start-End: 15-1250
ggcgatggtgacacatgcggcggcggcgcgccggcggcaggaccatggttgagcgcgccagcaagttcgtgctggtggtggcgggctcggtgtgcttcatgctcatcttgtaccagtacgcgggcccaggactgagcctgggcgcgcccggcggccgcgcgccgcccgacgacctggacctgttccccacacccgacccccactacgagaagaagtactacttcccggtccgcgagctggagcgctcgctgcgcttcgacatgaagggcgacgacgtgatcgtcttcctgcacatccagaagacgggcggcaccaccttcggccgccacctcgtgcagaacgtacgcctcgaggtgccgtgcgactgccggcccggccagaagaagtgcacctgctaccggcccaaccgccgcgagacttggctcttctcccgcttctccaccggctggagctgcgggctgcacgccgactggaccgagctcaccaactgcgtgcccggcgtgctggaccgccgcgactccgccgcgctgcgcacgcccaggaagttctactacatcaccctgctacgagaccccgtgtcccgctacctgagcgagtggcggcatgtgcagaggggtgccacgtggaagacgtcgttgcatatgtgtgatgggcgcacgcccacgcctgaggagctgccgccctgctacgagggcacggactggtcgggctgcacgctacaggagttcatggactgcccgtacaacctggccaacaaccgccaggtgcgcatgctggccgacctgagcctggtgggctgctacaacctgtccttcatccccgagggcaagcgggcccagctgctgctcgagagcgccaagaagaacctgcggggcatggccttcttcggcctgaccgagttccagcgcaagacgcagtacctgttcgagcggacgttcaacctcaagttcatccggcccttcatgcagtacaatagcacgcgggcgggcggcgtggaggtggatgaagacaccatccggcgcatcgaggagctcaacgacctggacatgcagctgtacgactacgccaaggacctcttccagcagcgctaccagtacaagcggcagctggagcgcagggagcagcgcctgaggagccgcgaggagcgtctgctgcaccgggccaaggaggcactgccgcgggaggatgccgacgagccgggccgcgtgcccaccgaggactacatgagccacatcattgagaagtggtagtggcggtggtggccacggggaggcctcttggggggtgtgggggataaaacaggacagacgacaggtccacccaagactgtcaagggatgagcatcccaaacctgctccacagaggtagctgcgtcctgaaaaaaaacagagcagggatgtagtggggctgggcagggatgggggcttgagaaatcaacaggtgcagcccagtgggtcagaggaaagcgtgctcgaaggatgccatggtcagggcagggcctccagagcaggtgttgtgcctggagctgctctcctggcctccttggatttatcgcaaaaactgaaggtttgcgcaagagacgaggacagcggaaagtggacctgccaggccgggagtgtgtccctcaccaactatgcacacagcactcgctcttagctcctctgtccgggctactaggagtgagaccagcttctggcaactgccccagctccaggccatcccatagcccctcctcttctggctgcccccaatgccccgaggcctggggagcccccagctcacccatctgtagctccctcaaagtcagggcccaccccatctgaggcagagaagactcgagtccagcccccaggaagcctgctcccctctctggcccatggtcctgcttcatgctttgggtcaggaggccaaagctgatgttcaggccccacccactccctacagtcctcagaccaaggaggggtttgggtagtaggcccgagctgcattgccggccttcctcgggccaactggcagcccaggagtggggaggctttggccagggatgctgccacttgtgcgtgagtccgcggctggcccttggaggtgaccatccaggcaggcctggctcagactggaagggctggggaccgagggctcccctgcctctgttctcctttctgacccactgggatttgctagcaggctgccccagccccatcaccgaaacacatactcaagagctcaaataccactgctcccaccagcgtacggattaagttcatcaggcttccatcggctggagcatgggaccatagcccctgcccaggagccgtaccctcggaccacagtggctctgtatggccaggaactgggactcgagctttcagattctcaactagccttggcaaaacagctgtaggtggcctccctgacaacagacactcagccctccccaccctggctctccttgcatttccccatgctccccaccccctggcaaaaggctggccatgctctgttcccagcagccgcgcaggtttccccactggctgcaatggccctaccaaaagccatgttgcatatccgttgtaagcacgtgccctgtgccctgtccccattccttatgccctaggaggccaagctggtgtctctaggagggcccacacaggcaccctggatcccccagagagtagattggtgtgctcaggccgcaggctgactcagaggtagggcagtgggctctgcaggccacctggctggggttggtgggggtcctctctcctgccccagcttccactcagccaccacagttgccacaccatggggtggagacgtgggtcaccacgggcttgggagcaagcgccttctgcagcacaggaagccgaagctggggtcaggtgaggtcgctacccctggaggtctggcataagggccccaccctcaggtctcctacactggccccattttactttggggtccaaggacaggatggtcaacagggcagggtggacagcgtgccagcgccgcgcagggccacctccctgggtggatgcatcacactaaggaagtgagtgccaaggggatttagtggtgtggttctttcaaagggaggtcagggtcaatgggaatctgctcggacactcaacatgggggtgggtgcactccttggaggaggaggaacacgttcaggggattgtgaggtcttgcacaagccacgtggggcaccttggcttcccggcaggaggtggacacccagccagaggcctggctcaaggtgacctcaccttcaccatgggcttcctgggtgcgcgggcctgagcgcaggttgttttgtacatattggaatatgtgttaacttatgccccgcatcccaactcacacggaagcacgggtcttgtctcagtctcttcgctgcatttggaaagcagtctcctctcgggccagcgccgggctgaggtgtccagaggcggcggcagctggcagtgccctcagcccccaagtgtccagcctggcacttcccattcaggccacctgctttgggtcaacagttcctttgccagcagcatctcctaaattgtaaggactctgtccaccggggccctcccagggctgtgaggacggaaacaggcagggagtggagctaacagcttagtcaccaggacccccagacctgcaaacgtcccctcctggaaggggaagccaggaacagcagaactgcccacaaaacaaggctgtgaacttttcgggaactggaactgtttaacttgaacccaggattgtttaaagctttatttatttatagcttcttcttaaaaaaaagtgttgaagaaattttttggttattcatacaaaaaaatgagttgatgatggaaaagcaagtcataatcatctaattgtttttgtctaggtcgagaatgaatgttagctgatgaaataaaccctgacaagga

SEQ ID NO: 140213 - DNA, 1938 bp, Homo sapiens
  Payload ID: 7506
  Gene Symbol: HS6ST2
  Gene Name: heparan sulfate 6-O-sulfotransferase 2
  Uniprot ID: Q96MM7
  ENST ID: ENST00000370833
  CDS Start-End: 1-1938
atggcactgcctgcgtgtgcagtccgggagttcgagccgccgcggcaaccggagcgaggagcgcccgtccgcaccacctgtccccgccggcattccagagtagaggccgaattggcagcgagccggcccgggtcggtcgccgcctcagttcgcgcgggccctcctaggggtgtgtctcacggattccacacccggccgctcctggacaagccccgaaaggcgtcttcttccctggcgggagccgcgtgcgccccgcttttcgcgctgctgtcccggggccgccgcaggcggatgcacgtcctcaggcgacgctgggacctgggctccctctgccgggccctgctcactcggggcctggccgccctgggccactcgctgaagcacgtgctcggtgcgatcttctccaagattttcggccccatggccagcgtcgggaacatggatgagaaatccaacaagctgctgctagctttggtgatgctcttcctatttgccgtgatcgtcctccaatacgtgtgccccggcacagaatgccagctcctccgcctgcaggcgttcagctccccggtgccggacccgtaccgctcggaggatgagagctccgccaggttcgtgccccgctacaatttcacccgcggcgacctcctgcgcaaggtagacttcgacatcaagggcgatgacctgatcgtgttcctgcacatccagaagaccgggggcaccactttcggccgccacttggtgcgtaacatccagctggagcagccgtgcgagtgccgcgtgggtcagaagaaatgcacttgccaccggccgggtaagcgggaaacctggctcttctccaggttctccacgggctggagctgcgggttgcacgccgactggaccgagctcaccagctgtgtgccctccgtggtggacggcaagcgcgacgccaggctgagaccgtccaggtggaggatttttcagattctagatgcagcaagtaaggataaacggggttctccaaacactaacgcaggcgccaactctccgtcatccacaaagacccggaacacatctaagagtgggaagaacttccactacatcaccatcctccgagacccagtgtcccggtacttgagtgagtggaggcatgtccagagaggggcaacatggaaagcatccctgcatgtctgcgatggaaggcctccaacctccgaagagctgcccagctgctacactggcgatgactggtctggctgccccctcaaagagtttatggactgtccctacaatctagccaacaaccgccaggtgcgcatgctctccgacctgaccctggtaggctgctacaacctctctgtcatgcctgaaaagcaaagaaacaaggtccttctggaaagtgccaagtcaaatctgaagcacatggcgttcttcggcctcactgagtttcagcggaagacccaatatctgtttgagaaaaccttcaacatgaactttatttcgccatttacccagtataataccactagggcctctagtgtagagatcaatgaggaaattcaaaagcgtattgagggactgaattttctggatatggagttgtacagctatgccaaagacctttttttgcagaggtatcagtttatgaggcagaaagagcatcaggaggccaggcgaaagcgtcaggaacaacgcaaatttctgaagggaaggctccttcagacccatttccagagccagggtcagggccagagccagaatccgaatcagaatcagagtcagaacccaaatccgaatgccaatcagaacctgactcagaatctgatgcagaatctgactcagagtttgagccagaaggagaaccgggaaagcccgaagcagaactcaggcaaggagcagaatgataacaccagcaatggcaccaacgactacataggcagtgtagagaaatggcgttaa

SEQ ID NO: 140214 - DNA, 4441 bp, Homo sapiens
  Payload ID: 7506
  Gene Symbol: HS6ST2
  Gene Name: heparan sulfate 6-O-sulfotransferase 2
  Uniprot ID: Q96MM7
  ENST ID: ENST00000370836
  CDS Start-End: 417-2234
aagccaggctgacctttatgctcccagaatcatcagccttttcattggaaaccatggaaggacggttctgggaaaataatgaaaatcataccacaccatagagacaaccagaagccctgctcagatgacagagttctcctcgccttccagaaaatgcccccgcttccgctggagaatggaaattggcaaagagagacggaaaagctccaatttgcgcctttgctattttaggagaggttgaaattacgagccaaagtggagtgatgcgctaagcggagtgacctccgtactccaagaaaagagaaaacccaggttctctgcttgtgaagtggctcgagctcttaggcgtgaggcattattatataaattcaagctcgctcgtgatccttagtaccctgagttgcctgaaggggggaatggcactgcctgcgtgtgcagtccgggagttcgagccgccgcggcaaccggagcgaggagcgcccgtccgcaccacctgtccccgccggcattccagagtagaggccgaattggcagcgagccggcccgggtcggtcgccgcctcagttcgcgcgggccctcctaggggtgtgtctcacggattccacacccggccgctcctggacaagccccgaaaggcgtcttcttccctggcgggagccgcgtgcgccccgcttttcgcgctgctgtcccggggccgccgcaggcggatgcacgtcctcaggcgacgctgggacctgggctccctctgccgggccctgctcactcggggcctggccgccctgggccactcgctgaagcacgtgctcggtgcgatcttctccaagattttcggccccatggccagcgtcgggaacatggatgagaaatccaacaagctgctgctagctttggtgatgctcttcctatttgccgtgatcgtcctccaatacgtgtgccccggcacagaatgccagctcctccgcctgcaggcgttcagctccccggtgccggacccgtaccgctcggaggatgagagctccgccaggttcgtgccccgctacaatttcacccgcggcgacctcctgcgcaaggtagacttcgacatcaagggcgatgacctgatcgtgttcctgcacatccagaagaccgggggcaccactttcggccgccacttggtgcgtaacatccagctggagcagccgtgcgagtgccgcgtgggtcagaagaaatgcacttgccaccggccgggtaagcgggaaacctggctcttctccaggttctccacgggctggagctgcgggttgcacgccgactggaccgagctcaccagctgtgtgccctccgtggtggacggcaagcgcgacgccaggctgagaccgtccaggaacttccactacatcaccatcctccgagacccagtgtcccggtacttgagtgagtggaggcatgtccagagaggggcaacatggaaagcatccctgcatgtctgcgatggaaggcctccaacctccgaagagctgcccagctgctacactggcgatgactggtctggctgccccctcaaagagtttatggactgtccctacaatctagccaacaaccgccaggtgcgcatgctctccgacctgaccctggtaggctgctacaacctctctgtcatgcctgaaaagcaaagaaacaaggtccttctggaaagtgccaagtcaaatctgaagcacatggcgttcttcggcctcactgagtttcagcggaagacccaatatctgtttgagaaaaccttcaacatgaactttatttcgccatttacccagtataataccactagggcctctagtgtagagatcaatgaggaaattcaaaagcgtattgagggactgaattttctggatatggagttgtacagctatgccaaagacctttttttgcagaggtatcagtttatgaggcagaaagagcatcaggaggccaggcgaaagcgtcaggaacaacgcaaatttctgaagggaaggctccttcagacccatttccagagccagggtcagggccagagccagaatccgaatcagaatcagagtcagaacccaaatccgaatgccaatcagaacctgactcagaatctgatgcagaatctgactcagagtttgagccagaaggagaaccgggaaagcccgaagcagaactcaggcaaggagcagaatgataacaccagcaatggcaccaacgactacataggcagtgtagagaaatggcgttaaatggctcaaaaaggcctgtacatacttctcccaaagcgccactgaaaagatggcatagcttaaaagatgaaagtgtccaaacacatcctgcttccttcattggggaagttttaaaaaaaagtttagatgttgcctttacagttgcctttcaattcagtgttatactgtgtgtaggtaaaacaaatctcaatatggaattaaattgtctttttggggttggactaaatatgaaatccgaaagccaaaccagactcaccagaaattgctgtttagatattttaagaagttcttaaattagttatggagacaaagtgaaaacataaaatgtgaccatttaacttatggctaagaaatggactttaaattattcatgatacactgttaaaacccaatcttggaatcaaatattttttccaggggtgagaataagtataaacataaagcaactaaaatgaaacataaaaccttttattttcttctgattttaacaaggaatctatttaaatagaataacaactgatggtgaatcttaccgagctgtagaaaataaaaaattcctctccaaacatgggtagttttatgtcaaaatattggcttttcaagaacaggactcatatcttgatatttaagagatgtttaaaattttaaactttttctaccttctactgtttaaaggttttacacagggtgtatctcacattaaacaaaacacctttttttcaaaatgaaataccaatgtaaagatctaatttccaggcgctttcagggcactgtaatttcaacaatactggaatcattttggcgctgcttctcattcattttaaggcttctctgaattgtgctcattccaaattaacccatgtatagaatctttcttcatcatctaaatggtgtgttgctgaagttattgtggtatataatcctggattaaagtcaggactttctttctatagaattattttatcaatatttgtgtagtgaggtcctaatcaagaaacttgaacaggataatgtgtctaaaaatattgctgaagttattcttgatcagatagaatttaacctaaaatgtgaactcttacttactttttgtacatctctattgtaatgtttccagttgggccaactatttctagccctttagttctttttcatgttgacagatttgtagacaattacaaaagccaaaaaaggataaaataagcattaggaaggctagccagttattcaatagcaccttgataatgtgggcaaacccttctacaaagtttttgttttgaaaagagcaaaagtaaaaagtgttctgtagtgaggttacatatcaggaacatatgagttgagcagagtaatttggtagtgtaagtcgatgcaaaaatacttctatggtacctattacaagctgaccaagataaaaagaagtatgtaacccactgtgctgtcaagcatcatgattccgggcagttttcattttactgtggattttgctatacttatgcaaggacttacactaacctcctggctgtaaatcaaacaaggtgactgaaagtggcatttatgttttcacaagggacatgcttagaagtgtgaccataaagtcacatcttgtacaatctgctcatgtgtttcatctgtagtaatatagccacaaactggacaagaagctgggtatttgggtttaaaatagattttcttgactctgagcttgtatcagtatttctagcttttgttttgtctgacagtattgcagtcttgaaaatcctgagagctaaaaaactgaaaggaatttttccacaccttgaagtcacagtgttttagagtaaaactattttgtgtacaattgtgtttttaaaatagttagtagatcactatggtatttcaattttctttagttttaattgaaaatgtttgcttttaaaactgataggtattgttggaaagcaggatgaagcctgagccagtggaaaagcttgttacagaaaaaacattttgtgttattgctgtggtgtgcatgatttgcaaagattaagtgcattttctctgtctatactgattattgtatatagaggatgttataaatatacatatacatttttgccattatgtaaatcccatgatttcaactgtaaacatctgtccattggtgtagctttacaaaccattcactgattttgtgtaatttaacaatagatatgaaataaagtttaaattac

SEQ ID NO: 140215 - DNA, 1818 bp, Homo sapiens
  Payload ID: 7506
  Gene Symbol: HS6ST2
  Gene Name: heparan sulfate 6-O-sulfotransferase 2
  Uniprot ID: Q96MM7
  ENST ID: ENST00000406696
  CDS Start-End: 1-1818
atggcactgcctgcgtgtgcagtccgggagttcgagccgccgcggcaaccggagcgaggagcgcccgtccgcaccacctgtccccgccggcattccagagtagaggccgaattggcagcgagccggcccgggtcggtcgccgcctcagttcgcgcgggccctcctaggggtgtgtctcacggattccacacccggccgctcctggacaagccccgaaaggcgtcttcttccctggcgggagccgcgtgcgccccgcttttcgcgctgctgtcccggggccgccgcaggcggatgcacgtcctcaggcgacgctgggacctgggctccctctgccgggccctgctcactcggggcctggccgccctgggccactcgctgaagcacgtgctcggtgcgatcttctccaagattttcggccccatggccagcgtcgggaacatggatgagaaatccaacaagctgctgctagctttggtgatgctcttcctatttgccgtgatcgtcctccaatacgtgtgccccggcacagaatgccagctcctccgcctgcaggcgttcagctccccggtgccggacccgtaccgctcggaggatgagagctccgccaggttcgtgccccgctacaatttcacccgcggcgacctcctgcgcaaggtagacttcgacatcaagggcgatgacctgatcgtgttcctgcacatccagaagaccgggggcaccactttcggccgccacttggtgcgtaacatccagctggagcagccgtgcgagtgccgcgtgggtcagaagaaatgcacttgccaccggccgggtaagcgggaaacctggctcttctccaggttctccacgggctggagctgcgggttgcacgccgactggaccgagctcaccagctgtgtgccctccgtggtggacggcaagcgcgacgccaggctgagaccgtccaggaacttccactacatcaccatcctccgagacccagtgtcccggtacttgagtgagtggaggcatgtccagagaggggcaacatggaaagcatccctgcatgtctgcgatggaaggcctccaacctccgaagagctgcccagctgctacactggcgatgactggtctggctgccccctcaaagagtttatggactgtccctacaatctagccaacaaccgccaggtgcgcatgctctccgacctgaccctggtaggctgctacaacctctctgtcatgcctgaaaagcaaagaaacaaggtccttctggaaagtgccaagtcaaatctgaagcacatggcgttcttcggcctcactgagtttcagcggaagacccaatatctgtttgagaaaaccttcaacatgaactttatttcgccatttacccagtataataccactagggcctctagtgtagagatcaatgaggaaattcaaaagcgtattgagggactgaattttctggatatggagttgtacagctatgccaaagacctttttttgcagaggtatcagtttatgaggcagaaagagcatcaggaggccaggcgaaagcgtcaggaacaacgcaaatttctgaagggaaggctccttcagacccatttccagagccagggtcagggccagagccagaatccgaatcagaatcagagtcagaacccaaatccgaatgccaatcagaacctgactcagaatctgatgcagaatctgactcagagtttgagccagaaggagaaccgggaaagcccgaagcagaactcaggcaaggagcagaatgataacaccagcaatggcaccaacgactacataggcagtgtagagaaatggcgttaa

SEQ ID NO: 140216 - DNA, 2607 bp, Homo sapiens
  Payload ID: 7506
  Gene Symbol: HS6ST2
  Gene Name: heparan sulfate 6-O-sulfotransferase 2
  Uniprot ID: Q96MM7
  ENST ID: ENST00000521489
  CDS Start-End: 417-2354
aagccaggctgacctttatgctcccagaatcatcagccttttcattggaaaccatggaaggacggttctgggaaaataatgaaaatcataccacaccatagagacaaccagaagccctgctcagatgacagagttctcctcgccttccagaaaatgcccccgcttccgctggagaatggaaattggcaaagagagacggaaaagctccaatttgcgcctttgctattttaggagaggttgaaattacgagccaaagtggagtgatgcgctaagcggagtgacctccgtactccaagaaaagagaaaacccaggttctctgcttgtgaagtggctcgagctcttaggcgtgaggcattattatataaattcaagctcgctcgtgatccttagtaccctgagttgcctgaaggggggaatggcactgcctgcgtgtgcagtccgggagttcgagccgccgcggcaaccggagcgaggagcgcccgtccgcaccacctgtccccgccggcattccagagtagaggccgaattggcagcgagccggcccgggtcggtcgccgcctcagttcgcgcgggccctcctaggggtgtgtctcacggattccacacccggccgctcctggacaagccccgaaaggcgtcttcttccctggcgggagccgcgtgcgccccgcttttcgcgctgctgtcccggggccgccgcaggcggatgcacgtcctcaggcgacgctgggacctgggctccctctgccgggccctgctcactcggggcctggccgccctgggccactcgctgaagcacgtgctcggtgcgatcttctccaagattttcggccccatggccagcgtcgggaacatggatgagaaatccaacaagctgctgctagctttggtgatgctcttcctatttgccgtgatcgtcctccaatacgtgtgccccggcacagaatgccagctcctccgcctgcaggcgttcagctccccggtgccggacccgtaccgctcggaggatgagagctccgccaggttcgtgccccgctacaatttcacccgcggcgacctcctgcgcaaggtagacttcgacatcaagggcgatgacctgatcgtgttcctgcacatccagaagaccgggggcaccactttcggccgccacttggtgcgtaacatccagctggagcagccgtgcgagtgccgcgtgggtcagaagaaatgcacttgccaccggccgggtaagcgggaaacctggctcttctccaggttctccacgggctggagctgcgggttgcacgccgactggaccgagctcaccagctgtgtgccctccgtggtggacggcaagcgcgacgccaggctgagaccgtccaggtggaggatttttcagattctagatgcagcaagtaaggataaacggggttctccaaacactaacgcaggcgccaactctccgtcatccacaaagacccggaacacatctaagagtgggaagaacttccactacatcaccatcctccgagacccagtgtcccggtacttgagtgagtggaggcatgtccagagaggggcaacatggaaagcatccctgcatgtctgcgatggaaggcctccaacctccgaagagctgcccagctgctacactggcgatgactggtctggctgccccctcaaagagtttatggactgtccctacaatctagccaacaaccgccaggtgcgcatgctctccgacctgaccctggtaggctgctacaacctctctgtcatgcctgaaaagcaaagaaacaaggtccttctggaaagtgccaagtcaaatctgaagcacatggcgttcttcggcctcactgagtttcagcggaagacccaatatctgtttgagaaaaccttcaacatgaactttatttcgccatttacccagtataataccactagggcctctagtgtagagatcaatgaggaaattcaaaagcgtattgagggactgaattttctggatatggagttgtacagctatgccaaagacctttttttgcagaggtatcagtttatgaggcagaaagagcatcaggaggccaggcgaaagcgtcaggaacaacgcaaatttctgaagggaaggctccttcagacccatttccagagccagggtcagggccagagccagaatccgaatcagaatcagagtcagaacccaaatccgaatgccaatcagaacctgactcagaatctgatgcagaatctgactcagagtttgagccagaaggagaaccgggaaagcccgaagcagaactcaggcaaggagcagaatgataacaccagcaatggcaccaacgactacataggcagtgtagagaaatggcgttaaatggctcaaaaaggcctgtacatacttctcccaaagcgccactgaaaagatggcatagcttaaaagatgaaagtgtccaaacacatcctgcttccttcattggggaagttttaaaaaaaagtttagatgttgcctttacagttgcctttcaattcagtgttatactgtgtgtaggtaaaacaaatctcaatatggaattaaattgtctttttggggttggactaaatatgaaatccgaaagccaaaccagact

SEQ ID NO: 140217 - DNA, 7804 bp, Homo sapiens
  Payload ID: 7507
  Gene Symbol: HS6ST3
  Gene Name: heparan sulfate 6-O-sulfotransferase 3
  Uniprot ID: Q8IZP7
  ENST ID: ENST00000376705
  CDS Start-End: 25-1440
gcctgccggcctgagagcgggaccatggatgaaaggttcaacaagtggctgctgacgccggtgctcactctcctcttcgtggtcatcatgtaccagtacgtgtccccctcctgcaccagctcctgcaccaacttcggggagcagccccgcgcgggggaggccggcccgcccgccgtcccgggtcccgcccgccgggctcaggcgccgccggaggagtgggagcggcggccccagttgcccccgccgccccgggggccccccgagggacctcggggggccgcggcgccggaggaggaggacgaggagcccggagacccccgggagggggaggaagaggaggaggaagacgagccggaccccgaggccccggaaaacggctccctgccccgattcgtgccgcgcttcaacttcagcctgaaggacctgacccgcttcgtggatttcaacatcaaagggcgcgacgtgatcgtgttcctccacatccagaagacggggggcaccactttcggccggcacctggtgaagaacatccggctggagcagccttgtagctgcaaagcgggtcagaagaagtgcacctgccaccggcctggcaagaaggagacgtggctcttctcccgcttctccaccggctggagctgcgggctgcacgccgactggacggagctcaccaactgcgtgccggccatcatggagaagaaggactgtccccgcaaccacagccacaccaggaatttctattacatcacaatgttacgggatccagtgtcacgttacctgagcgagtggaaacatgtccagagaggggccacttggaaaacctctcttcatatgtgtgatggaagaagccccaccccagatgagctgcctacctgctaccctggggatgactggtctggggtcagcttgcgggagtttatggattgcacctacaacctggctaacaatcgccaggtgcgcatgctggctgacctcagcctggtgggctgctataacttgactttcatgaacgagagtgaaagaaacaccatcctgttgcagagtgcaaagaacaacctgaagaacatggccttctttgggctcactgagttccagaggaagacacagtttctctttgagagaacattcaacctcaagttcatctcccccttcacacagttcaacatcacgcgggcttctaacgtggagatcaacgagggtgcccgccaacgcattgaggatctaaacttcctggacatgcagctttacgagtatgcaaaagatctcttccagcagcgctaccaccacaccaagcagctagagcaccagagggaccgccagaagcggcgggaggagcggaggctgcagcgagagcacagggaccaccagtggcccaaagaagatggggctgcagaagggactgtcaccgaggactacaacagccaggtggtgagatggtgacctcctgccctctcctctctcaggagggggagggtgagcaggcacattgactttctgttgaggtaccttggagaagctgagccattctgaggacatctggctgtgtgtgcttgatttggacatcttcttccttctttgtcttcatttttatccagctggagattatccgtcttgttcttttttttcttgacattttgcaattggtgatattaagtagggtaggagtgcatcccatataggccattttagaaggccaaggagagccacaccgaaaaaggagacagttcctgtgatctcctttgcaggagcatagaatagtttgggtaccaggaacccacagaggcacacatgaaaagccaaattatggcttggatgttctgctgaaactggtctatgtcatactgtctcctgttatgagaatatcagttggtataaagagagagaaagagaaaaacatttcagcccttagatgaggtcttacaccaacccccacttggctgttggctgtcatcttgaactctatttgaatgtgacttaaatcacaagtaacgtgttttgttgttgcagttgttttgaaacaaaattatcctattattgaccattgctagagacccacatcctacaaaatcctgacaccataaccttaagccatgcctttccttccatcttttagggaacggggagtggatccaggacaggggaggttgtaacccctgagaaatgaacattggtaggagcatttaagagaaaacttgcttatttgctaatgcctaaaggggtctcactttaccaattgttactttcaatgtgaggaatgaatgataaattaagagaaaaaaatatcaggaaggtcaatatatgcctaacatttctaaactggccacataaccttagatttttaaaggaatatttcagagtttaatctttttggagaagttatgttctttaatcgggtactaccagtcttgaaattttgccaccacagaaagaaagatgtttttaaaagcttggcccaaagaataggaacttagctagcatgtatacaaaatatatttgaggttactaaatgaataaaaactcggaattaggccaggagacatggaataccattcatgggatggttatcacaggagtttagaaagactctgcctcccagcatcttgaatatctccagcctgttcactgttttcttcctacatgatctttacctgttgttagactgtggccacagccagtaaatcaggccagagtgtctcaaactggacaagaaatgtgctgcattgccgagttcttattttcaccttttcataatcccaactacaataacaagaattttattgactaataagggaatatgtatggaagaaggaagagaaagcctttgtctagcatttattaggaggatcagagtgagtgggaagtttcacaacggattgatctgatcaatcccttcaaggagctgaaggcaaaatgtgtaaaacccctaaatcagattgaaaagcctatttcattgatatccaacatgtttgatgtttaagctagctttacctaagccacttctcagcctccagaatactctctctggggttgtgagtcagtcagcccacaagcattcacagagtgcttacctgccccgagggaagtccagcagctccaccagatagagatctggagatgcttctctcactgtgcttggcttcatctggggtgcaagggaaggcattatcgggtggctcccttgctccaggaactgaacgaggcccttttcataccttaaatatattctgcacaacaaatgggtattgttagtctccatttcatagatgaaaatagtgaagcccacagaaaataagtagctcctccacaggttgtaagctaggtctagctgactgcaaaggtcaagttctctttactccgtcaccatatccatatggaataagggctcgtcctacctaaagcttcctgccaataatgcaagaagccagctgcaatttcccagaagcatttgtctctaacccatgtgggtagcccgaccatgacagcaccacgctaacagtgacccagagccatactgccttgggtcagtccagccccctccacatcactgagccatcaatgagctgagagatcaatgactttttaggcagctgtgttttttaagccatatacaagagtaagttaaaaggggccaagtaaatgttgcttgttatttggtagagattaggctcacaaaatatttctccatttccagtgatttgttcctaaggtagaagggaaggaggattgcagctgggattaatgttcgtctctctctctctctctctctagcttctcatctcattgttaggatctaatgttctgcctagaatagcaggactgcaaattatccttctgcctgcccctgtgacacacacacacacacacacacacacacacaaacaatccagtgttttgtcatgtggaaaatcaaaacaagttagaaagcattcagattgtttcttttaaactcactttaaaattttggcaaggaattcatgcataactgagacttggaggcagcccctgctcacttcacgctgttccttaggcacctcgggattggtatcaaaggcttccactgccttctgctgaaggcatgatgtatgcggctccacttgagaccaggtatcaggatgttcagagggagccagctctttatgttggccccaggccagtactaagcaaattaaaaagaccgacatgggcttcctccctcatatcatttcattctaaagcagcaagcttgtcatacccatggggtcctatgttgatagaaatggagaggtagggatacagtttattctccaaaaatggactgcccacttccatgctgagtgatgctcagggaagtgatgcccgcagaaggcgtctgggcctaaggatccatggaagtcaggagcattaaatcccaaaccaaatcaactccagatatatcagtgtcaaaagcccaagaaaagacaaaaaagaaaaaaacaatccccaggggttctatgaccctattgactcctacagttctttcccttctcttggcaatggaagctccagtacccagattggagattaggatgagacaactttgtgtatatgtgcacgtgtgtggtgtgtgtgtgttttattaaggactaagatacacacttatctattctgtctccttctagcttttaggcagcctactcttggaaactggaggaaactgccctgagaattattagaatgctaataatagtaattggtaacattaacaatcagtgttagacaacagtgaggcatatcatgtgtttttattaaaaatgataaagatgtgtttcttctcatctaaaggaggtaactttgtgataattagtttgattaaaagtttgaagtatgaggactccttgttatgcctttaaggtaatttttaaaaaaaatctgagtagagatagtactaatattggcaagaaggtccccaggatagacctagcaaggagataagaatagatcattaaaaaataaatataaatggattggatagaattcccattcagctgttttaacacagaaattcaaaatagtgacttaacatggaagctatttctctcttacttaaaggcaaactggttttacagctctggtgtgtgatgttaccagacgcctaggccctctcctgttgctctgtcatcctaatgtgctgcatccacctcatggaccaagatggctgccacagctcctgccatcacatttacatttaagatagtagagaggaagtggagggaagttgcacatattgcttccagtcacatctcatgggttaaaacctagacatttgccacatctagctgcaaagaaggctagggaatgtctttattattgattgtcatgtgccttgataagcataggaggttctgttattaaagaaacaatgtgaaataatgtggaaattaatactgataaagactatcagtatctgatacaaaagggaaccaaacgatatttaagtgctttttaatgtcacttacttcatcatatgttttgcgaaagataagactaaaattcatcactttgtgtagcatttaatggttttcagaacatttttgcatgtgctgtctcatttggtcctcattacattcttgtgtgctaaataggacctctattcattacaccacttgctagtttgggatggagagtcagatatgttgaaagatttcccaacgactctaatttatgagcaagaaagttgcttagagccccagccttttgacttcatagtctttccgactactttatgcagctcagcatcagtactgggattgggaactgcaagaatatgaaatgtaaatctttattgatttatatccttccttaccttttttgacatggaaaatgccaaagacactggtcaagtttactctcagctccctacctccagtgagggggcctcttattaggaatgaaatatccaagagatgggcggtgctgcaggggagaccaaaactcagaggaggcattcaaacacttctagcaggttgtctactccatccaactcaaaacctattcaatatgaaggccgagggaatgtgctcacaactccctattaagggaaatcaatataaacccgcccccaccaaccaaaaaaaaaaaaagaaagaaaactctccctttttaatgtcttcttccccaggctcctggtactttgtcagcaacatactgctttcattcttaaaggtttcattggctgttaaatgagtccctttgcatactcactggagagaggaaatgctttaagttgtcctaagataacatctgcacacagagagtttatctgattccttatcaaccatgatctctatctgaggtcctgtatagtgggatcatttagagatgggggttagggagagtaggagtaactctagagaaaattgtggctcctaaaggaggcagatctttccaaggtggaaaggtaatgaattaaatatatgacatgtaatactgaaaaaatagaaaaatgactaagatacagtctctgtcctctagaactagggcagcctggaaacatatggactataattattttagctatttaaaagaaatgaatgaagaggatcttgagacaggaccagagcattggaatggttgtagggactgaaagctgagttggaaggatcagatcaaagagaaagctgggttggacttacacaagaataccctgatctgatcgcagctgtgactccaaggttttcctttcccatagttgctgtgaccccattggtcaccagagcaactgcatgtcttcaggctgggtattagggctggctgggtctgatgattctacccattttgtgccatctgaggagcatgcgagggttctttctccaaggcactttcggccttccttcttctccccttccgccatctccactggacataagccaatgcctgctctcttctcaccacattcacctggacaaatctgaactaattccttgagacttcaaattagcccttctgagcaagtgggcaggttctgaaacctgtgtgttttgtagcctaatgaattgatggaatgcacatgaacccatcttcacagcatgtgaaagaaccaacctgcctggcagaggtgcagaaatttccagaggactggcctagctataaacaccagcaacatctgcaacacaaaagcccttgaacttctaggcaaggactcatgctaacctagcagtactccagattgagaacgcagatggacaggtgtctcttgagcctgtgttccaagatgtctgtggaaaggattgcaactgtcatcctttggcacactcagtggaacctgtgtgagctacatgttctgctgcattatgggaactcatcaaagggccagattgacatcttgccagaaaaaccagtgttttgaggagcaaaagttttgtgtacttcagtaattgtcacatgtgtcttccacctccttgacatttatttgttaatcatatgatcatttttttttcactttcctttttttctttctcagaagtacttctggggctttgattgcattatttctcttttaatgtatcatttcagtgttggaaagaaaaatctggatctttatgtggggacctattttacatgtagatagttattcagtagatagtaaattatttctcttaagagatatttccttttatttctgtacaataatatgtatgaactcagttactaggggactgtattgtgacattatcaacctttattgctatttaaaaatgatagtttgtagaactgaagatttccattgatgtgaagcacaatttaatgaataagttaaaatattaaactgttgtgatgtcaagagcaa

SEQ ID NO: 140218 - DNA, 7073 bp, Homo sapiens
  Payload ID: 7507
  Gene Symbol: HS6ST3
  Gene Name: heparan sulfate 6-O-sulfotransferase 3
  ENST ID: ENST00000620595
  CDS Start-End: 1-711
aggaatttctattacatcacaatgttacgggatccagtgtcacgttacctgagcgagtggaaacatgtccagagaggggccacttggaaaacctctcttcatatgtgtgatggaagaagccccaccccagatgagctgcctacctgctaccctggggatgactggtctggggtcagcttgcgggagtttatggattgcacctacaacctggctaacaatcgccaggtgcgcatgctggctgacctcagcctggtgggctgctataacttgactttcatgaacgagagtgaaagaaacaccatcctgttgcagagtgcaaagaacaacctgaagaacatggccttctttgggctcactgagttccagaggaagacacagtttctctttgagagaacattcaacctcaagttcatctcccccttcacacagttcaacatcacgcgggcttctaacgtggagatcaacgagggtgcccgccaacgcattgaggatctaaacttcctggacatgcagctttacgagtatgcaaaagatctcttccagcagcgctaccaccacaccaagcagctagagcaccagagggaccgccagaagcggcgggaggagcggaggctgcagcgagagcacagggaccaccagtggcccaaagaagatggggctgcagaagggactgtcaccgaggactacaacagccaggtggtgagatggtgacctcctgccctctcctctctcaggagggggagggtgagcaggcacattgactttctgttgaggtaccttggagaagctgagccattctgaggacatctggctgtgtgtgcttgatttggacatcttcttccttctttgtcttcatttttatccagctggagattatccgtcttgttcttttttttcttgacattttgcaattggtgatattaagtagggtaggagtgcatcccatataggccattttagaaggccaaggagagccacaccgaaaaaggagacagttcctgtgatctcctttgcaggagcatagaatagtttgggtaccaggaacccacagaggcacacatgaaaagccaaattatggcttggatgttctgctgaaactggtctatgtcatactgtctcctgttatgagaatatcagttggtataaagagagagaaagagaaaaacatttcagcccttagatgaggtcttacaccaacccccacttggctgttggctgtcatcttgaactctatttgaatgtgacttaaatcacaagtaacgtgttttgttgttgcagttgttttgaaacaaaattatcctattattgaccattgctagagacccacatcctacaaaatcctgacaccataaccttaagccatgcctttccttccatcttttagggaacggggagtggatccaggacaggggaggttgtaacccctgagaaatgaacattggtaggagcatttaagagaaaacttgcttatttgctaatgcctaaaggggtctcactttaccaattgttactttcaatgtgaggaatgaatgataaattaagagaaaaaaatatcaggaaggtcaatatatgcctaacatttctaaactggccacataaccttagatttttaaaggaatatttcagagtttaatctttttggagaagttatgttctttaatcgggtactaccagtcttgaaattttgccaccacagaaagaaagatgtttttaaaagcttggcccaaagaataggaacttagctagcatgtatacaaaatatatttgaggttactaaatgaataaaaactcggaattaggccaggagacatggaataccattcatgggatggttatcacaggagtttagaaagactctgcctcccagcatcttgaatatctccagcctgttcactgttttcttcctacatgatctttacctgttgttagactgtggccacagccagtaaatcaggccagagtgtctcaaactggacaagaaatgtgctgcattgccgagttcttattttcaccttttcataatcccaactacaataacaagaattttattgactaataagggaatatgtatggaagaaggaagagaaagcctttgtctagcatttattaggaggatcagagtgagtgggaagtttcacaacggattgatctgatcaatcccttcaaggagctgaaggcaaaatgtgtaaaacccctaaatcagattgaaaagcctatttcattgatatccaacatgtttgatgtttaagctagctttacctaagccacttctcagcctccagaatactctctctggggttgtgagtcagtcagcccacaagcattcacagagtgcttacctgccccgagggaagtccagcagctccaccagatagagatctggagatgcttctctcactgtgcttggcttcatctggggtgcaagggaaggcattatcgggtggctcccttgctccaggaactgaacgaggcccttttcataccttaaatatattctgcacaacaaatgggtattgttagtctccatttcatagatgaaaatagtgaagcccacagaaaataagtagctcctccacaggttgtaagctaggtctagctgactgcaaaggtcaagttctctttactccgtcaccatatccatatggaataagggctcgtcctacctaaagcttcctgccaataatgcaagaagccagctgcaatttcccagaagcatttgtctctaacccatgtgggtagcccgaccatgacagcaccacgctaacagtgacccagagccatactgccttgggtcagtccagccccctccacatcactgagccatcaatgagctgagagatcaatgactttttaggcagctgtgttttttaagccatatacaagagtaagttaaaaggggccaagtaaatgttgcttgttatttggtagagattaggctcacaaaatatttctccatttccagtgatttgttcctaaggtagaagggaaggaggattgcagctgggattaatgttcgtctctctctctctctctctctagcttctcatctcattgttaggatctaatgttctgcctagaatagcaggactgcaaattatccttctgcctgcccctgtgacacacacacacacacacacacacacacacaaacaatccagtgttttgtcatgtggaaaatcaaaacaagttagaaagcattcagattgtttcttttaaactcactttaaaattttggcaaggaattcatgcataactgagacttggaggcagcccctgctcacttcacgctgttccttaggcacctcgggattggtatcaaaggcttccactgccttctgctgaaggcatgatgtatgcggctccacttgagaccaggtatcaggatgttcagagggagccagctctttatgttggccccaggccagtactaagcaaattaaaaagaccgacatgggcttcctccctcatatcatttcattctaaagcagcaagcttgtcatacccatggggtcctatgttgatagaaatggagaggtagggatacagtttattctccaaaaatggactgcccacttccatgctgagtgatgctcagggaagtgatgcccgcagaaggcgtctgggcctaaggatccatggaagtcaggagcattaaatcccaaaccaaatcaactccagatatatcagtgtcaaaagcccaagaaaagacaaaaaagaaaaaaacaatccccaggggttctatgaccctattgactcctacagttctttcccttctcttggcaatggaagctccagtacccagattggagattaggatgagacaactttgtgtatatgtgcacgtgtgtggtgtgtgtgtgttttattaaggactaagatacacacttatctattctgtctccttctagcttttaggcagcctactcttggaaactggaggaaactgccctgagaattattagaatgctaataatagtaattggtaacattaacaatcagtgttagacaacagtgaggcatatcatgtgtttttattaaaaatgataaagatgtgtttcttctcatctaaaggaggtaactttgtgataattagtttgattaaaagtttgaagtatgaggactccttgttatgcctttaaggtaatttttaaaaaaaatctgagtagagatagtactaatattggcaagaaggtccccaggatagacctagcaaggagataagaatagatcattaaaaaataaatataaatggattggatagaattcccattcagctgttttaacacagaaattcaaaatagtgacttaacatggaagctatttctctcttacttaaaggcaaactggttttacagctctggtgtgtgatgttaccagacgcctaggccctctcctgttgctctgtcatcctaatgtgctgcatccacctcatggaccaagatggctgccacagctcctgccatcacatttacatttaagatagtagagaggaagtggagggaagttgcacatattgcttccagtcacatctcatgggttaaaacctagacatttgccacatctagctgcaaagaaggctagggaatgtctttattattgattgtcatgtgccttgataagcataggaggttctgttattaaagaaacaatgtgaaataatgtggaaattaatactgataaagactatcagtatctgatacaaaagggaaccaaacgatatttaagtgctttttaatgtcacttacttcatcatatgttttgcgaaagataagactaaaattcatcactttgtgtagcatttaatggttttcagaacatttttgcatgtgctgtctcatttggtcctcattacattcttgtgtgctaaataggacctctattcattacaccacttgctagtttgggatggagagtcagatatgttgaaagatttcccaacgactctaatttatgagcaagaaagttgcttagagccccagccttttgacttcatagtctttccgactactttatgcagctcagcatcagtactgggattgggaactgcaagaatatgaaatgtaaatctttattgatttatatccttccttaccttttttgacatggaaaatgccaaagacactggtcaagtttactctcagctccctacctccagtgagggggcctcttattaggaatgaaatatccaagagatgggcggtgctgcaggggagaccaaaactcagaggaggcattcaaacacttctagcaggttgtctactccatccaactcaaaacctattcaatatgaaggccgagggaatgtgctcacaactccctattaagggaaatcaatataaacccgcccccaccaaccaaaaaaaaaaaaagaaagaaaactctccctttttaatgtcttcttccccaggctcctggtactttgtcagcaacatactgctttcattcttaaaggtttcattggctgttaaatgagtccctttgcatactcactggagagaggaaatgctttaagttgtcctaagataacatctgcacacagagagtttatctgattccttatcaaccatgatctctatctgaggtcctgtatagtgggatcatttagagatgggggttagggagagtaggagtaactctagagaaaattgtggctcctaaaggaggcagatctttccaaggtggaaaggtaatgaattaaatatatgacatgtaatactgaaaaaatagaaaaatgactaagatacagtctctgtcctctagaactagggcagcctggaaacatatggactataattattttagctatttaaaagaaatgaatgaagaggatcttgagacaggaccagagcattggaatggttgtagggactgaaagctgagttggaaggatcagatcaaagagaaagctgggttggacttacacaagaataccctgatctgatcgcagctgtgactccaaggttttcctttcccatagttgctgtgaccccattggtcaccagagcaactgcatgtcttcaggctgggtattagggctggctgggtctgatgattctacccattttgtgccatctgaggagcatgcgagggttctttctccaaggcactttcggccttccttcttctccccttccgccatctccactggacataagccaatgcctgctctcttctcaccacattcacctggacaaatctgaactaattccttgagacttcaaattagcccttctgagcaagtgggcaggttctgaaacctgtgtgttttgtagcctaatgaattgatggaatgcacatgaacccatcttcacagcatgtgaaagaaccaacctgcctggcagaggtgcagaaatttccagaggactggcctagctataaacaccagcaacatctgcaacacaaaagcccttgaacttctaggcaaggactcatgctaacctagcagtactccagattgagaacgcagatggacaggtgtctcttgagcctgtgttccaagatgtctgtggaaaggattgcaactgtcatcctttggcacactcagtggaacctgtgtgagctacatgttctgctgcattatgggaactcatcaaagggccagattgacatcttgccagaaaaaccagtgttttgaggagcaaaagttttgtgtacttcagtaattgtcacatgtgtcttccacctccttgacatttatttgttaatcatatgatcatttttttttcactttcctttttttctttctcagaagtacttctggggctttgattgcattatttctcttttaatgtatcatttcagtgttggaaagaaaaatctggatctttatgtggggacctattttacatgtagatagttattcagtagatagtaaattatttctcttaagagatatttccttttatttctgtacaataatatgtatgaactcagttactaggggactgtattgtgacattatcaacctttattgctatttaaaaatgatagtttgtagaactgaagatttccattgatgtgaagcacaatttaatgaataagttaaaatattaaactgttgtgatgtcaagagc

SEQ ID NO: 140219 - DNA, 411 bp, Homo sapiens
  Payload ID: 7508
  Gene Symbol: HSPG2
  Gene Name: heparan sulfate proteoglycan 2
  ENST ID: ENST00000374676
  CDS Start-End: 1-328
cgggacacccccactcaccttccagtggagccgcgtgggcagcagccttcctgggagggcgaccgccaggaacgagctgctgcactttgagcgtgcagcccctgaggactcaggccgctaccgctgccgggtcaccaacaaggtgggctcagccgaggcctttgcccagctgctcgtccaagaatccagaacttggaccagagctgccaagggacgtatatatgccaggcccatggaccttgggggaaggcccaggccagtgcccagctggttatccaaggtaggagggtggcttcaggcctctgctaagagcagggaacagagatgagaaaggcagagaggcacaaggcccagaccctgttccctaggaatccccctaaatgtgtcagaataaagagaattattccattt

SEQ ID NO: 140220 - DNA, 14327 bp, Homo sapiens
  Payload ID: 7508
  Gene Symbol: HSPG2
  Gene Name: heparan sulfate proteoglycan 2
  Uniprot ID: P98160
  ENST ID: ENST00000374695
  CDS Start-End: 81-13256
ggccggcgagcgggcggctgcgggcggcgcggagcgggcggcgcggagcgagcgagcgagagagcggcgcgggccgggccatggggtggcgggcggcgggcgcgctgctgctggcgctgctgctgcacgggcggctgctggcggtgacccatgggctgagggcatacgatggcttgtctctgcctgaggacatagagaccgtcacagcaagccaaatgcgctggacacattcgtacctttctgatgatgaggacatgctggctgacagcatctcaggagacgacctgggcagtggggacctgggcagcggggacttccagatggtttatttccgagccctggtgaatttcactcgctccatcgagtacagccctcagctggaggatgcaggctccagagagttccgagaggtgtccgaggctgtggtagacacgctggagtcggagtacttgaaaattcccggagaccaggttgtcagtgtggtgttcatcaaggagctggatggctgggtttttgtggagctggatgtgggctcggaagggaatgcggatggggctcagattcaggagatgctgctcagggtcatctccagcggctctgtggcctcctacgtcacctctccccagggattccagttccgacgcctgggcacagtgccccagttcccaagagcctgcacggaggccgagtttgcctgccacagctacaatgagtgtgtggccctggagtatcgctgtgaccggcggcccgactgcagggacatgtctgatgagctcaattgtgaggagccagtcctgggtatcagccccacattctctctccttgtggagacgacatctttaccgccccggccagagacaaccatcatgcgacagccaccagtcacccacgctcctcagcccctgcttcccggttccgtcaggcccctgccctgtgggccccaggaggccgcatgccgcaatgggcactgcatccccagagactacctctgcgacggacaggaggactgcgaggacggcagcgatgagctagactgtggccccccgccaccctgtgagcccaacgagttcccctgcgggaatggacattgtgccctcaagctgtggcgctgcgatggtgactttgactgtgaggaccgaactgatgaagccaactgccccaccaagcgtcctgaggaagtgtgcgggcccacacagttccgatgcgtctctaccaacatgtgcatcccagccagcttccactgtgacgaggagagcgactgtcctgaccggagcgacgagtttggctgcatgcccccccaggtggtgacacctccccgggagtccatccaggcttcccggggccagacagtgaccttcacctgcgtggccattggcgtccccacccccatcatcaattggaggctcaactggggccacatcccctctcatcccagggtgacagtgaccagcgagggtggccgtggcacactgatcatccgtgatgtgaaggagtcagaccagggtgcctacacctgtgaggccatgaacgcccggggcatggtgtttggcattcctgacggtgtccttgagctcgtcccacaacgaggcccctgccctgacggccacttctacctggagcacagcgccgcctgcctgccctgcttctgctttggcatcaccagcgtgtgccagagcacccgccgcttccgggaccagatcaggctgcgctttgaccaacccgatgacttcaagggtgtgaatgtgacaatgcctgcgcagcccggcacgccacccctctcctccacgcagctgcagatcgacccatccctgcacgagttccagctagtcgacctgtcccgccgcttcctcgtccacgactccttctgggctctgcctgaacagttcctgggcaacaaggtggactcctatggcggctccctgcgttacaacgtgcgctacgagttggcccgtggcatgctggagccagtgcagcggccggacgtggtcctcatgggtgccgggtaccgcctcctctcccgaggccacacacccacccaacctggtgctctgaaccagcgccaggtccagttctctgaggagcactgggtccatgagtctggccggccggtgcagcgcgcggagctgctgcaggtgctgcagagcctggaggccgtgctcatccagaccgtgtacaacaccaagatggccagcgtgggacttagcgacatcgccatggataccaccgtcacccatgccaccagccatggccgtgcccacagtgtggaggagtgcagatgccccattggctattctggcttgtcctgcgagagctgtgatgcccacttcactcgggtgcctggtgggccctacctgggcacctgctctggttgcaattgcaatggccatgccagctcctgtgaccctgtgtatggccactgcctgaattgccagcacaacacggaggggccacagtgcaacaagtgcaaggctggcttctttggggacgccatgaaggccacggccacttcctgccggccctgcccttgcccatacatcgatgcctcccgcagattctcagacacttgcttcctggacacggatggccaagccacatgtgacgcctgtgccccaggctacactggccgccgctgtgagagctgtgcccccggatacgagggcaaccccatccagcccggcgggaagtgcaggcccgtcaaccaggagattgtgcgctgtgacgagcgtggcagcatggggacctccggggaggcctgccgctgtaagaacaatgtggtggggcgcttgtgcaatgaatgtgctgacggctctttccacctgagtacccgaaaccccgatggctgcctcaagtgcttctgcatgggtgtcagtcgccactgcaccagctcttcatggagccgtgcccagttgcatggggcctctgaggagcctggtcacttcagcctgaccaacgccgcaagcacccacaccaccaacgagggcatcttctcccccacgcccggggaactgggattctcctccttccacagactcttatctggaccctacttctggagcctcccttcacgcttcctgggggacaaggtgacctcctatggaggagagctgcgcttcacagtgacccagaggtcccagccgggctccacacccctgcacgggcagccgttggtggtgctgcaaggtaacaacatcatcctagagcaccatgtggcccaggagcccagccccggccagcccagcaccttcattgtgcctttccgggagcaagcatggcagcggcccgatgggcagccagccacacgggagcacctgctgatggcactggcaggcatcgacaccctcctgatccgagcatcctacgcccagcagcccgctgagagcagggtctctggcatcagcatggacgtggctgtgcccgaggaaaccggccaggaccccgcgctggaagtggaacagtgctcctgcccacccgggtaccgtgggccgtcctgccaggactgtgacacaggctacacacgcacgcccagtggcctctacctgggtacctgtgaacgctgcagctgccatggccactcagaggcctgcgagccagaaacaggtgcctgccagggctgccagcatcacacggagggccctcggtgtgagcagtgccagccaggatactacggggacgcccagcgggggacaccacaggactgccagctgtgcccctgctacggagaccctgctgccggccaggctgcccacacttgttttctggacacagacggccaccccacctgtgatgcgtgctccccaggccacagtgggcgtcactgtgagaggtgcgcccctggctactatggcaaccccagccagggccagccatgccagagagacagccaggtgccagggcccataggctgcaactgtgacccccaaggcagcgtcagcagccagtgtgatgctgctggtcagtgccagtgcaaggcccaggtggaaggcctcacttgcagccactgccggccccaccacttccacctgagtgccagcaacccagacggctgcctgccctgcttctgtatgggcatcacccagcagtgcgccagctctgcctacacacgccacctgatctccacccactttgcccctggggacttccaaggctttgccctggtgaacccacagcgaaacagccgcctgacaggagaattcactgtggaacccgtgcccgagggtgcccagctctcttttggcaactttgcccaactcggccatgagtccttctactggcagctgccggagacataccagggagacaaggtggcggcctacggtgggaagttgcgatacaccctctcctacacagcaggcccacagggcagcccactctctgaccccgatgtgcagatcacgggcaacaacatcatgctagtggcctcccagccagcgctgcagggccctgagaggaggagctacgagatcatgttccgagaggaattctggcgccggcccgatgggcagccggccacacgcgagcacctcctgatggcactggccgacctggatgagctcctgatccgggccacgttctcctccgtgccgctggcggccagcatcagcgcagtcagcctggaggtcgcccagccggggccctcaaacagaccccgcgccctcgaggtggaggagtgccgctgcccgccaggctacatcggtctgtcctgccaggactgtgcccccggctacacgcgcaccgggagtgggctctacctcggccactgcgagctatgtgaatgcaatggccactcagacctgtgccacccagagactggggcctgctcgcaatgccagcacaacgccgcaggggagttctgcgagctttgtgcccctggctactacggagatgccacagccgggacgcctgaggactgccagccctgtgcctgcccactgaccaacccagagaacatgttttcccgcacctgtgagagcctgggagccggcgggtaccgctgcacggcctgcgaacccggctacactggccagtactgtgagcagtgtggcccaggttacgtgggtaaccccagtgtgcaagggggccagtgcctgccagagacaaaccaagccccactggtggtcgaggtccatcctgctcgaagcatagtgccccaaggtggctcccactccctgcggtgtcaggtcagtgggagcccaccccactacttctattggtcccgtgaggatgggcggcctgtgcccagcggcacccagcagcgacatcaaggctccgagctccacttccccagcgtccagccctcggatgctggggtctacatttgcacctgccgtaatctccaccaatccaataccagccgggcagagctgctggtcactgaggctccaagcaagcccatcacagtgactgtggaggagcagcggagccagagcgtgcgccccggagctgacgtcaccttcatctgcacagccaaaagcaagtccccagcctataccctggtgtggacccgcctgcacaacgggaaactgcccacccgagccatggatttcaatggcatcctgaccattcgcaacgtccagctgagtgatgcaggcacctacgtgtgcaccggctccaacatgtttgccatggaccagggcacagccactctacatgtgcaggcctcgggcaccttgtccgcccccgtggtctccatccatccgccacagctcacagtgcagcccgggcaactggcggagttccgctgcagcgccacagggagccccacgcccaccctcgagtggacagggggccccggcggccagctccctgcgaaggcacaaatccacggcggcatcctgcgcctgccagctgtcgagcccacggatcaggcccagtacttgtgccgagcccacagcagcgctgggcagcaggtggccagggctgtgctccacgtgcatgggggcggtgggcccagagtccaagtgagcccagagaggacccaggtccacgcaggccgcaccgtcaggctgtactgcagggctgcaggcgtgcctagcgccaccatcacctggaggaaggaagggggcagcctcccaccacaggcccggtcagagcgcacagacatcgcgacactgctcatcccagccatcacgactgctgacgccggcttctacctctgcgtggccaccagccctgcaggcactgcccaggcccggatccaagtggttgtcctttcagcctcagatgccagcccaccgccggtcaagattgagtcctcatcgccttctgtgacagaagggcaaacactcgacctcaactgtgtggtggcagggtcagcccatgcccaggtcacctggtacaggcgagggggtagcctgcctccccacacccaggtgcacggctcccgtctgcggctcccccaggtctcaccagctgattctggagaatatgtgtgccgtgtggagaatggatcgggccccaaggaggcctccattactgtgtctgtgctccacggcacccattctggccccagctacaccccagtgcccggcagcacccggcccatccgcatcgagccctcctcctcacacgtggcggaagggcagaccctggatctgaactgcgtggtgcccgggcaggcccacgcccaggtcacgtggcacaagcgtgggggcagcctccctgcccggcaccagacccacggctcgctgctgcggctgcaccaggtgaccccggccgactcaggcgagtatgtgtgccatgtggtgggcacctccggccccctagaggcctcagtcctggtcaccatcgaagcctctgtcatccctggacccatcccacctgtcaggatcgagtcttcatcctccacagtggccgagggccagaccctggatctgagctgcgtggtggcagggcaggcccacgcccaggtcacatggtacaagcgtgggggcagcctccctgcccggcaccaggttcgtggctcccgcctgtacatcttccaggcctcacctgccgatgcgggacagtacgtctgccgggccagcaacggcatggaggcctccatcacggtcacagtaactgggacccagggggccaacttagcctaccctgccggcagcacccagcccatccgcatcgagccctcctcctcgcaagtggcggaagggcagaccctggatctgaactgcgtggtgcccgggcagtcccatgcccaggtcacgtggcacaagcgtgggggcagcctccctgtccggcaccagacccacggctccctgctgagactctaccaagcgtcccccgccgactcgggcgagtacgtgtgccgagtgttgggcagctccgtgcctctagaggcctctgtcctggtcaccattgagcctgcgggctcagtgcctgcacttggggtcacccccacggtccggatcgagtcatcgtcttcgcaagtggccgaggggcagaccctggacctgaactgcctcgttgctggtcaggcccatgcccaggtcacgtggcacaagcgcgggggcagcctcccggcccggcaccaggtgcatggctcgaggctacgcctgctccaggtgaccccagctgattcaggggagtacgtgtgccgtgtggtcggcagctcaggtacccaggaagcctcagtccttgtcaccatccagcagcgccttagtggctcccactcccagggtgtggcgtaccccgtccgcatcgagtcctcctcagcctccctggccaatggacacaccctggacctcaactgcctggttgccagccaggctccccacaccatcacctggtataagcgtggaggcagcttacccagccggcaccagatcgtgggctcccggctgcggatccctcaggtgactccggcagactcgggcgagtacgtgtgtcacgtcagtaacggtgcaggctcccgggagacctcgctcatcgtcaccatccagggcagcggttcctcccacgtgcccagcgtctccccaccgatcaggatcgagtcgtcttcccccacggtggtggaagggcagaccttggatctgaactgcgtggtcgccaggcagccccaggctatcatcacatggtacaagcgtgggggcagccttccctcccgacaccagacccatggctcccacctgcggttgcaccaaatgtctgtggctgactcgggcgagtatgtgtgccgggccaacaacaacatcgatgccctggaggcctccatcgtcatctccgtctcccctagcgccggcagcccctccgcccctggcagctccatgcccatcagaattgagtcatcctcctcacacgtggccgaaggggagaccctggatctgaactgcgtggtccccgggcaggcccatgcccaggtcacttggcacaagcgtgggggcagcctccccagtcaccatcagacccgcggctcacggctgcggctgcaccatgtgtccccggccgactcgggtgaatacgtgtgccgggtgatgggcagctctggccccctggaggcctcagtcctggtcaccatcgaagcctctggctcaagtgctgtccacgtccccgccccaggtggagccccacccatccgcatcgagccctcctcctcccgagtggcagaagggcagaccctggatctgaagtgcgtggtgcccgggcaggcccacgcccaggtcacgtggcacaagcgtggaggaaacctccctgcccggcaccaggtccacggcccactgctgaggctgaaccaggtgtccccggctgactctggcgagtactcgtgccaagtgaccggaagctcaggcaccctggaggcatctgtcctggtcacaattgagccctccagcccaggacccattcctgctccaggactggcccagcccatctacatcgaggcctcctcttcacacgtgactgaagggcagactctggatctgaactgtgtggtgcccgggcaggcccatgcccaggtcacgtggtacaagcgcgggggcagcctccccgcccggcaccagacccatggctcccagctgcggctccacctcgtctcccctgccgactcaggcgagtatgtgtgtcgtgcagccagcggcccaggccctgagcaagaagcctccttcacagtcaccgtcccgcccagtgaggggtcttcctaccgccttaggagcccggtcatctccatcgacccgcccagcagcaccgtgcagcagggccaggatgccagcttcaagtgcctcatccatgacggggcagcccccatcagcctcgagtggaagacccggaaccaggagctggaggacaacgtccacatcagtcccaatggctccatcatcaccatcgtgggcacccggcccagcaaccacggtacctaccgctgcgtggcctccaatgcctacggtgtggcccagagtgtggtgaacctcagtgtgcacgggccccctacagtgtccgtgctccccgagggccccgtgtgggtgaaagtgggaaaggctgtcaccctggagtgtgtcagtgccggggagccccgctcctctgctcgttggacccggatcagcagcacccctgccaagttggagcagcggacatatgggctcatggacagccacgcggtgctgcagatttcatcagctaaaccatcagatgcgggcacttatgtgtgccttgctcagaatgcactaggcacagcacagaagcaggtggaggtgatcgtggacacgggcgccatggccccaggggcccctcaggtccaagctgaagaagctgagctgactgtggaggctggacacacggccaccttgcgctgctcagccacaggcagccccgcgcccaccatccactggtccaagctgcgttccccactgccctggcagcaccggctggaaggtgacacactcatcataccccgggtagcccagcaggactcgggccagtacatctgcaatgccactagccctgctgggcacgctgaggccaccatcatcctgcacgtggagagcccaccatatgccaccacggtcccagagcacgcttcggtgcaggcaggggagacggtgcagctccagtgcctggctcacgggacacccccactcaccttccagtggagccgcgtgggcagcagccttcctgggagggcgaccgccaggaacgagctgctgcactttgagcgtgcagcccctgaggactcaggccgctaccgctgccgggtcaccaacaaggtgggctcagccgaggcctttgcccagctgctcgtccaaggccctcccggctctctccctgccacctccatcccagcagggtccacgcccaccgtgcaggtcacgcctcagctagagaccaagagcattggggccagcgttgagttccactgtgctgtgcccagcgaccggggtacccagctccgttggttcaaggaagggggtcagctgcctccgggtcacagcgtgcaggatggggtgctccgaatccagaacttggaccagagctgccaagggacgtatatatgccaggcccatggaccttgggggaaggcccaggccagtgcccagctggttatccaagccctgccctcggtgctcatcaacatccggacctctgtgcagaccgtggtggttggccacgccgtggagttcgaatgcctggcactgggtgaccccaagcctcaggtgacatggagcaaagttggagggcacctgcggccaggcattgtgcagagcggaggtgtcgtcaggatcgcccacgtagagctggctgatgcgggacagtatcgctgcactgccaccaacgcagctggcaccacacaatcccacgtcctgctgcttgtgcaagccttgccccagatctcaatgccccaagaagtccgtgtgcctgctggttctgcagctgtcttcccctgcatagcctcaggctaccccactcctgacatcagctggagcaagctggatggcagcctgccacctgacagccgcctggagaacaacatgctgatgctgccctcagtccgaccccaggacgcaggtacctacgtctgcaccgccactaaccgccagggcaaggtcaaagcctttgcccacctgcaggtgccagagcgggtggtgccctacttcacgcagaccccctactccttcctaccgctgcccaccatcaaggatgcctacaggaagttcgagatcaagatcaccttccggcccgactcagccgatgggatgctgctgtacaatgggcagaagcgagtcccagggagccccaccaacctggccaaccggcagcccgacttcatctccttcggcctcgtggggggaaggcccgagttccggttcgatgcaggctcaggcatggccaccatccgccatcccacaccactggccctgggccatttccacaccgtgaccctgctgcgcagcctcacccagggctccctgattgtgggtgacctggccccggtcaatgggacctcccagggcaagttccagggcctggatctgaacgaggaactctacctgggtggctatcctgactatggtgccatccccaaggcggggctgagcagcggcttcataggctgtgtccgggagctgcgcatccagggcgaggagatcgtcttccatgacctcaacctcacggcgcacggcatctcccactgccccacctgtcgggaccggccctgccagaatggcggtcagtgccatgactctgagagcagcagctacgtgtgcgtctgcccagctggcttcaccgggagccgctgtgagcactcgcaggccctgcactgccatccagaggcctgtgggcccgacgccacctgtgtgaaccggcctgacggtcgaggctacacctgccgctgccacctgggccgctcggggttgcggtgtgaggaaggtgtgacagtgaccaccccctcgctgtcgggtgctggctcctacctggcactgcccgccctcaccaacacacaccacgagctacgcctggacgtggagttcaagccactcgcccctgacggggtcctgctgttcagcggggggaagagcgggcctgtggaggacttcgtgtccctggcgatggtgggcggccacctggagttccgctatgagttggggtcagggctggccgttctgcggagcgccgagccgctggccctgggccgctggcaccgtgtgtctgcagagcgtctcaacaaggacggcagcctgcgggtgaatggtggacgccctgtgctgcgctcctcgcccggcaagagccagggcctcaacctgcacaccctgctctacctggggggtgtggagccttccgtgccactgtccccggccaccaacatgagcgctcacttccgcggctgtgtgggcgaggtgtcagtgaatggcaaacggctggacctcacctacagtttcctaggcagccagggcatcgggcaatgctatgatagctccccatgtgagcgccagccttgccaacatggtgccacgtgcatgcccgctggcgagtatgagttccagtgcctgtgtcgagatggattcaaaggagacctgtgtgagcacgaggagaacccctgccagctccgtgaaccctgtctgcatgggggcacctgccagggcacccgctgcctctgcctccctggcttctctggcccacgctgccaacaaggctctggacatggcatagcagagtccgactggcatcttgaaggcagcgggggcaatgatgcccctgggcagtacggagcctatttccacgatgatggcttcctcgccttccctggccatgtcttctccaggagcctgcccgaggtgcccgagaccatcgagctggaggttcggaccagcacagccagtggcctcctgctctggcagggtgtggaggtgggagaggccggccaaggcaaggacttcatcagcctcgggcttcaagacgggcaccttgtcttcaggtaccagctgggtagtggggaggcccgcctggtctctgaggaccccatcaatgacggcgagtggcaccgggtgacagcactgcgggagggccgcagaggttccatccaagtcgacggtgaggagctggtcagcggccggtccccaggtcccaacgtggcagtcaacgccaagggcagcgtctacatcggcggagcccctgacgtggccacgctgaccgggggcagattctcctcaggcatcacaggctgtgtcaagaacctggtgctgcactcggcccgacccggcgccccgcccccacagcccctggacctgcagcaccgcgcccaggccggggccaacacacgcccctgcccctcgtaggcacctgcctgccccacacggactcccgggccacgccccagcccgacaatgtcgagtatattattattaatattattatgaatttttgtaagaaaccgaggcgatgccacgctttgctgctaccgccctgggctggactggaggtgggcatgccaccctcacacacacagctgggcaaagccacaaggctggccagcaaggcaggttggatgggagtgggcacctcagaaagtcaccaggacttggggtcaggaacagtggctgggtgggcccagaactgcccccactgtccccctacccaccgatggagcccccagatagagctgggtggcctgtttctgcagcccttgggcagttctcactcctaggagagccaacctcggcttgtgggctggtgccccacagctacctgagacgggcatcgcaggagtctctgccacccactcaggattgggaattgtctttagtgccggctgtggagcaaaaggcagctcacccctgggcaggcggtccccatccccaccagctcgtttttcagcacccccacccacctccacccagcccctggcacctcctctggcagactccccctcctaccacgtcctcctggcctgcattcccaccccctcctgccagcacacagcctggggtccctccctcaggggctgtaagggaaggcccaccccaactcttaccaggagctgctacaggcagagcccagcactgatagggccccgcccaccgggccccgcccaccccaggccacatccccacccatctggaagtgaaggcccagggactcctccaacagacaacggacggacggatgccgctggtgctcaggaagagctagtgccttaggtgggggaaggcaggactcacgactgagagagagaggagggggatatgaccaccctgccccatctgcaggagcctgaagatccagctcaagtgccatcctgccagtggcccccagactgtggggttgggacgcctggcctctgtgtcctagaagggaccctcctgtggtctttgtcttgatttttcttaataaacggtgctatccccgcc

SEQ ID NO: 140221 - DNA, 589 bp, Homo sapiens
  Payload ID: 7508
  Gene Symbol: HSPG2
  Gene Name: heparan sulfate proteoglycan 2
  ENST ID: ENST00000427897
  CDS Start-End: 1-589
cacgcccagtggcctctacctgggtacctgtgaacgctgcagctgccatggccactcagaggcctgcgagccagaaacaggtgcctgccagggctgccagcatcacacggagggccctcggtgtgagcagtgccagccaggatactacggggacgcccagcgggggacaccacaggactgccagctgtgcccctgctacggagaccctgctgccggccaggctgcccacacttgttttctggacacagacggccaccccacctgtgatgcgtgctccccaggccacagtgggcgtcactgtgagaggtgcgcccctggctactatggcaaccccagccagggccagccatgccagagagacagccaggtgccagggcccataggctgcaactgtgacccccaaggcagcgtcagcagccagtgtgatgctgctggtcagtgccagtgcaaggtcagtccgaatccctgtccctgcggggcctgctctgccccgctgcccagaccctgcggggaaatcaggcagcatctggtggaagccgagacctgggcatggggggcagggcatgggggacagggcaggggctgcccg

SEQ ID NO: 140222 - DNA, 921 bp, Homo sapiens
  Payload ID: 7508
  Gene Symbol: HSPG2
  Gene Name: heparan sulfate proteoglycan 2
  ENST ID: ENST00000635682
  CDS Start-End: 1-921
acaacatgctgatgctgccctcagtccgaccccaggacgcaggtacctacgtctgcaccgccactaaccgccagggcaaggtcaaagcctttgcccacctgcaggtgccagagcgggtggtgccctacttcacgcagaccccctactccttcctaccgctgcccaccatcaaggatgcctacaggaagttcgagatcaagatcaccttccggcccgactcagccgatggcctccttctctactcggggatgctgctgtacaatgggcagaagcgagtcccagggagccccaccaacctggccaaccggcagcccgacttcatctccttcggcctcgtggggggaaggcccgagttccggttcgatgcaggctcaggcatggccaccatccgccatcccacaccactggccctgggccatttccacaccgtgaccctgctgcgcagcctcacccagggctccctgattgtgggtgacctggccccggtcaatgggacctcccagggcaagttccagggcctggatctgaacgaggaactctacctgggtggctatcctgactatggtgccatccccaaggcggggctgagcagcggcttcataggctgtgtccgggagctgcgcatccagggcgaggagatcgtcttccatgacctcaacctcacggcgcacggcatctcccactgccccacctgtcgggaccggccctgccagaatggcggtcagtgccatgactctgagagcagcagctacgtgtgcgtctgcccagctggcttcaccgggagccgctgtgagcactcgcaggccctgcactgccatccagaggcctgtgggcccgacgccacctgtgtgaaccggcctgacggtcgaggctacacctgccgctgccacctgggccgctcggggttgcggtgtgaggaag

SEQ ID NO: 140223 - DNA, 5236 bp, Homo sapiens
  Payload ID: 7509
  Gene Symbol: HGSNAT
  Gene Name: heparan-alpha-glucosaminide N-acetyltransferase
  Uniprot ID: Q68CP4
  ENST ID: ENST00000379644
  CDS Start-End: 43-1950
gggcgcagcgggcaggcaagggcggccgagcgggcggcgggcatgagcggggcgggcagggcgctggccgcgctgctgctggccgcgtccgtgctgagcgccgcgctgctggcccccggcggctcttcggggcgcgatgcccaggccgcgccgccacgagacttagacaaaaaaagacatgcagagctgaagatggatcaggctttgctactcatccataatgaacttctctggaccaacttgaccgtctactggaaatctgaatgctgttatcactgcttgtttcaggttctggtaaacgttcctcagagtccaaaagcagggaagcctagtgctgcagctgcctctgtcagcacccagcacggatctatcctgcagctgaacgacaccttggaagagaaagaagtttgtaggttggaatacagatttggagaatttggaaactattctctcttggtaaagaacatccataatggagttagtgaaattgcctgtgacctggctgtgaacgaggatccagttgatagtaaccttcctgtgagcattgcattccttattggtcttgctgtcatcattgtgatatcctttctgaggctcttgttgagtttggatgactttaacaattggatttctaaagccataagttctcgagaaactgatcgcctcatcaattctgagctgggatctcccagcaggacagaccctctcgatggtgatgttcagccagcaacgtggcgtctatctgccctgccgccccgcctccgcagcgtggacaccttcagggggattgctcttatactcatggtctttgtcaattatggaggaggaaaatattggtacttcaaacatgcaagttggaatgggctgacagtggctgacctcgtgttcccgtggtttgtatttattatgggatcttccatttttctatcgatgacttctatactgcaacgggggtgttcaaaattcagattgctggggaagattgcatggaggagtttcctgttaatctgcataggaattatcattgtgaatcccaattattgccttggtccattgtcttgggacaaggtgcgcattcctggtgtgctgcagcgattgggagtgacatactttgtggttgctgtgttggagctcctctttgctaaacctgtgcctgaacattgtgcctcggagaggagctgcctttctcttcgagacatcacgtccagctggccccagtggctgctcatcctggtgctggaaggcctgtggctgggcttgacattcctcctgccagtccctgggtgccctactggttatcttggtcctgggggcattggagattttggcaagtatccaaattgcactggaggagctgcaggctacatcgaccgcctgctgctgggagacgatcacctttaccagcacccatcttctgctgtactttaccacaccgaggtggcctatgaccccgagggcatcctgggcaccatcaactccatcgtgatggcctttttaggagttcaggcaggaaaaatactattgtattacaaggctcggaccaaagacatcctgattcgattcactgcttggtgttgtattcttgggctcatttctgttgctctgacgaaggtttctgaaaatgaaggctttattccagtaaacaaaaatctctggtccctttcgtatgtcactacgctcagttcttttgccttcttcatcctgctggtcctgtacccagttgtggatgtgaaggggctgtggacaggaaccccattcttttatccaggaatgaattccattctggtatatgtcggccacgaggtgtttgagaactacttcccctttcagtggaagctgaaggacaaccagtcccacaaggagcacctgactcagaacatcgtcgccactgccctctgggtgctcattgcctacatcctctatagaaagaagattttttggaaaatctgatggctcccactgagatgtgctgctggaagactctagtaggcctgcagggaggactgaagcagcctttgttaaagggaagcattcattaggaaattgactggctgcgtgtttacagactctgggggaagacactgatgtcctcaaactggttaactgtgacacggctcgccagaactctgcctgtctatttgtgacttacagatttgaaatgtaattgtcttttttcctccatcttctgtggaaatggatgtctttggaacttcattccgaggagataagctttaactttccaaaagggaattgccatgggtgtttttcttctgtggtgagtgaaacaatctgaggtctggttcttgctgaccttgttgccctgcaaacttcctttccacgtgtacgcgcacaccaacacgaaatgccatcactcctactgcggctgctatgaagcttactggttgtgatgtgttataatttagtctgtttttttgattgaatgcagtttaatgtttccagaaagccaaagtaattttcttttcagatatgcaaggctttggtgggtccaaaaaatgtctatcacaagccattttttccttttcctctctcgaaaagttaaaatatctatgtgttattcccaaaccctcttacctatgtatctgcctgtctgtccatcatcttccttcctccctatctctgtgtatctggatggcagccgctgcccaggggagtggctgtggggagggcaggtactgtctttgcctgtgggtccagctgagccatccctgctgggtgatgctgggcaagacccttggcccgtctgggccttggcttcctcacttgtgaaatgagcgggaagatgactctcagttccttccacctcttagacatggtgaggtaacagacatcaaaagcttttctgaaatcttcagaagaaatagttccattacagaaaactcttcaaaataaatagtagtgaaaacttttaaaaactctcattggagtaagtcttttcaagatgatcctccacaatggaggcagcgttcctacttgtcatcacacagctgaagacattgtttcttaggtgtgaaatcggggacaaaggacaaacagagacacacggcattgttcatgggaggcatcgtcaccctcctgggtgttctgtgggaatttcctgtgtgaggaaaacgtggccacagggttgtgctgtacccacccttccccggcgagatggccctcggcctgtgccgctgcttccaccctcgccactccatggcagcttttggtctgtttccggctctgccctctgccctgaactctcatccggcttgtacctgcctgctggacccctccacctggaggccagcccatgtctcaggcccagccctagcctcttctcctcaaattctaagtgttttctctttaggtttccctggctttgtgaatggatcatgtgtctctaggtataaacctgacatcatctttccacccggcttacctccaccagatctccccagttctgtctccatcttctacctgcagctgctctgttctcatggtcactgctgcatcactgagtctggacccttgttatcattttcaaactggcctccttccctcgttccccacttcttaaagtcacctgtccattgccaccagattaagctttctccagccagatcacctctctctgagaaacctccattgacatggaaacaccattgtctggcacacatactcacatactcaccttcccgtcttgatccccacacatctttccagcctcccctcccactccactccctgctctctcctccacctccccatcctcttgtctcccctcccctctgaatccagcccagcggggcttctcctgcctccatcacatcacagaagtacctcctgcttctggttttaattagagccttccccgattacattttcctctgaattttttcctatctacatttgatctgtcatgtttaaaccccctacttctaagggaacttctctaatctcttatcctcatccccaaatagtgttttcttcctctgggttcttataatgttggtatcaatctcacagcatttagtgcttcctgcctggtgtgacagttacctgtgtgcatgtgcaatttctaatttcccacgctagactgtgagcttcctaaggcaagaatcatgccttgttggtttctgtattcctcatggtgccaaacacagtgccttctacattgcaggcgctgaataaacatttttaaagcaaaatgatgtggatttttaaaataaatatttaagtgctggtaagatgagcatgtatccggggtgcccatgaaatgttcttggggccgtgtggggacagtcgtcattcctcctcctgccacccttttctttcagtgagtcactgtggatggtcccagctgtgtcatcccaaagttcagcagggaaagctgagctgggcctctccaggtgagttttctagaagcatttctcaaactgtgggttacatcaacttgggtgtcttgagctgtaaggaaggaactccggagtcagctgggctacaggggagcttctctaagtcctgcgggaggccagacccagcctgagcttgctgttagctagcggaggcagctgctggtggcccaggtgctcgacaccaggcatcccctctcctcccacgaagggtgtgccataatccccttcaacaggaaatgcttcccagaagcctctcagcagcctcccctcctgtcctatcagctagaagcgcctcgcttgtcccaagaccagcagggacagggaactgtccgagcccgtggctgtgtggaggaaggcgacccccagcacaagattggtttcctttgggaagggaagagggagtgtgttggggtaaggggtagagcagaggaatggtcagggggcaacaaccgctgacagctgcaacaggtgcatggcatctcacagggaggcagggaggtgcgagctcctaagtaatggagcaaaaaaattctattctgtagaatggggagagaaaatgtgacattttaatttttttttgcatttatattcctaattcctacttaaagtgaatatactgccgctgtagatcataaaatgtatcttttccatggccaacaaggggcatcttttataaatgcataataacccagtttgtatcaaagggtatcgacttaagtgaaatttcaacatgctgttactttttccttttaatgtaattctgttttccaaataaatgggggagacaaatggactttgagtaaatttcttagcatatcaaa

SEQ ID NO: 140224 - DNA, 757 bp, Homo sapiens
  Payload ID: 7509
  Gene Symbol: HGSNAT
  Gene Name: heparan-alpha-glucosaminide N-acetyltransferase
  ENST ID: ENST00000524016
  CDS Start-End: 1-757
tatactgcaacgggggtgttcaaaattcagattgctggggaagattgcatggaggagtttcctgttaatctgcataggaattatcattgtgaatcccaattattgccttggtccattgtcttgggacaaggtgcgcattcctggtgtgctgcagcgattgggagtgacatactttgtggttgctgtgttggagctcctctttgctaaacctgtgcctgaacattgtgcctcggagaggagctgcctttctcttcgagacatcacgtccagctggccccagtggctgctcatcctggtgctggaaggcctgtggctgggcttgacattcctcctgccagtccctgggtgccctactggttatcttggtcctgggggcattggagattttggcaagtatccaaattgcactggaggagctgcaggctacatcgaccgcctgctgctgggagacgatcacctttaccagcacccatcttctgctgtactttaccacaccgaggtggcctatgaccccgagggcatcctgggcaccatcaactccatcgtgatggcctttttaggagttcagtgctgcccagactgggtcaccaaacaggcctgtctgacggaacccttgtcacctttgtggagaattctctttgggccctgcctggaagtaagagccacggagcctgcccaggcaggaaaaatactattgtattacaaggctcggaccaaagacatcctgattcgattcactgcttggtgttgtattctt

SEQ ID NO: 140225 - DNA, 2332 bp, Homo sapiens
  Payload ID: 7509
  Gene Symbol: HGSNAT
  Gene Name: heparan-alpha-glucosaminide N-acetyltransferase
  ENST ID: ENST00000521576
  CDS Start-End: 288-1346
atttcccagacggggtggttgccggacggaggggctcctcacttctcagacggggcggttgccaggcagagggtttcctcacttctcagacggagcggccgggcagagacgctccccacctcccagacagggctgcggcccagcagaggcactcctcacatcccagacagggcggcggggcagaggtgctccccacatctcagacgatgggcggccgggcagagacgctcctcacttcctagatgggatggcggcggggaagaggcgctcctcgcttcccagatgggatggcggccgggcagagacgctcctcactttccagactgggcagccaggcagaggggctcctcacatcccagacgatgggtggccaagcagagacgctcctcacttcccagacggggtggctgctgggcagaggctgcaatctcggctctccgggaggccaagtgtcttgggacaaggtgcgcattcctggtgtgctgcagcgattgggagtgacatactttgtggttgctgtgttggagctcctctttgctaaacctgtgcctgaacattgtgcctcggagaggagctgcctttctcttcgagacatcacgtccagctggccccagtggctgctcatcctggtgctggaaggcctgtggctgggcttgacattcctcctgccagtccctgggtgccctactggttatcttggtcctgggggcattggagattttggcaagtatccaaattgcactggaggagctgcaggctacatcgaccgcctgctgctgggagacgatcacctttaccagcacccatcttctgctgtactttaccacaccgaggtggcctatgaccccgagggcatcctgggcaccatcaactccatcgtgatggcctttttaggagttcaggcaggaaaaatactattgtattacaaggctcggaccaaagacatcctgattcgattcactgcttggtgttgtattcttgggctcatttctgttgctctgacgaaggtttctgaaaatgaaggctttattccagtaaacaaaaatctctggtccctttcgtatgtcactacgctcagttcttttgccttcttcatcctgctggtcctgtacccagttgtggatgtgaaggggctgtggacaggaaccccattcttttatccaggaatgaattccattctggtatatgtcggccacgaggtgtttgagaactacttcccctttcagtggaagctgaaggacaaccagtcccacaaggagcacctgactcagaacatcgtcgccactgccctctgggtgctcattgcctacatcctctatagaaagaagattttttggaaaatctgatggctcccactgagatgtgctgctggaagactctagtaggcctgcagggaggactgaagcagcctttgttaaagggaagcattcattaggaaattgactggctgcgtgtttacagactctgggggaagacactgatgtcctcaaactggttaactgtgacacggctcgccagaactctgcctgtctatttgtgacttacagatttgaaatgtaattgtcttttttcctccatcttctgtggaaatggatgtctttggaacttcattccgaggagataagctttaactttccaaaagggaattgccatgggtgtttttcttctgtggtgagtgaaacaatctgaggtctggttcttgctgaccttgttgccctgcaaacttcctttccacgtgtacgcgcacaccaacacgaaatgccatcactcctactgcggctgctatgaagcttactggttgtgatgtgttataatttagtctgtttttttgattgaatgcagtttaatgtttccagaaagccaaagtaattttcttttcagatatgcaaggctttggtgggtccaaaaaatgtctatcacaagccattttttccttttcctctctcgaaaagttaaaatatctatgtgttattcccaaaccctcttacctatgtatctgcctgtctgtccatcatcttccttcctccctatctctgtgtatctggatggcagccgctgcccaggggagtggctgtggggagggcaggtactgtctttgcctgtgggtccagctgagccatccctgctgggtgatgctgggcaagacccttggcccgtctgggccttggcttcctcacttgtgaaatgagcgggaagatgactctcagttccttccacctcttagacatggtgaggtaacagacatcaaaagcttttctgaaatcttcagaagaaatagttccattacagaaaactcttcaaaataaatagtagtgaaaacttttaaaaactc

SEQ ID NO: 140226 - DNA, 1451 bp, Homo sapiens
  Payload ID: 7509
  Gene Symbol: HGSNAT
  Gene Name: heparan-alpha-glucosaminide N-acetyltransferase
  ENST ID: ENST00000520704
  CDS Start-End: 144-662
gggcgggcagggcgctggccgcgctgctgctggccgcgtccgtgctgagcgccgcgctgctggcccccggcggctcttcggggcgcgatgcccaggccgcgccgccacgagacttagacaaaaaaagacatgcagagctgaagatggatcaggctttgctactcatccataatgaacttctctggaccaacttgaccgtctactggaaatctgaatgctgttatcactgcttgtttcaggttctggtaaacgttcctcagagtccaaaagcagggaagcctagtgctgcagctgcctctgtcagcacccagcacggatctatcctgcagctgaacgacaccttggaagagaaagaagtttgtaggttggaatacagatttggagaatttggaaactattctctcttggtaaagaacatccataatggagttagtgaaattgcctgtgacctggctgtgaacgaggatccagttgatagtaaccttcctgtgagcattgcattccttattggtcttgctgtcatcattgtgatatcctttctgaggctcttgttgagagtcttgctatgtcacccaggctggagtgcggtggcaccatctcggctcactccaagctctgcctcccgggttcacaccattctcctacctcagcctcctgagtagctggaactgcagtttggatgactttaacaattggatttctaaagccataagttctcgagaaactgatcgcctcatcaattctgagctgggatctcccagcaggacagaccctctcgatggtgatgttcagccagcaacgtggcgtctatctgccctgccgccccgcctccgcagcgtggacaccttcagggggattgctcttatactcatggtctttgtcaattatggaggaggaaaatattggtacttcaaacatgcaagttggaatgggctgacagtggctgacctcgtgttcccgtggtgagttgccggtctgccctcttctcttccacgggttgactccaatctcctgtttttcagatgatgctggagcctctcttctgagacgggcatgtgttatgtggttaggaagtccttccaaaagtcctgttactggatagttctcatacttgacccagtgcctacacgtgtgtataaaagagtgatttggggccgggcgcggtggctcacgcctgtaatcctagcactttgggaggctgaggcaggcgaattacctgaggtcaggagttcaagaccagcctggccaacatggtgaaactctgtctctactaaaaatacaaaaaattagctgggtgcagtggcacgtgcctgtaatcccagctactcgggaggctgaggaaggagaatcacttgaacccaggaggcgggggttgcggtgagcagagatcacgccactgcactccagcctgggcgacagagtgagacttcatctcaaaaaaaaaaaaataa

SEQ ID NO: 140227 - DNA, 491 bp, Homo sapiens
  Payload ID: 7509
  Gene Symbol: HGSNAT
  Gene Name: heparan-alpha-glucosaminide N-acetyltransferase
  ENST ID: ENST00000517319
  CDS Start-End: 1-294
atgagcggggcgggcagggcgctggccgcgctgctgctggccgcgtccgtgctgagcgccgcgctgctggcccccggcggctcttcggggcgcgatgcccaggccgcgccgccacgagacttagacaaaaaaagacatgcagagctgaagatggatcaggctttgctactcatccataatgaacttctctggaccaacttgaccgtctactggaaatctgaatgctgttatcacgttggaatacagatttggagaatttggaaactattctctcttggtaaagaacatccataatggagttagtgaaattgcctgtgacctggctgtgaacgaggatccagttgatagtaaccttcctgtgagcattgcattccttattggtcttgctgtcatcattgtgatatcctttctgaggctcttgttgagagtcttgctatgtcacccaggctggagtgcggtggcaccatctcggctcactccaagctctgcct

SEQ ID NO: 140228 - DNA, 560 bp, Homo sapiens
  Payload ID: 7509
  Gene Symbol: HGSNAT
  Gene Name: heparan-alpha-glucosaminide N-acetyltransferase
  ENST ID: ENST00000522082
  CDS Start-End: 9-560
ttatactcatggtctttgtcaattatggaggaggaaaatattggtacttcaaacatgcaagttggaatgggctgacagtggctgacctcgtgttcccgtggtttgtatttattatgggatcttccatttttctatcgatgacttctatactgcaacgggggtgttcaaaattcagattgctggggaagattgcatggaggagtttcctgttaatctgcataggaattatcattgtgaatcccaattattgccttggtccattgtcttgggacaaggtgcgcattcctggtgtgctgcagcgattgggagtgacatactttgtggttgctgtgttggagctcctctttgctaaacctgtgcctgaacattgtgcctcgactggtccctcactcctggcttcaagtgatcctcctgccttggccacccaaagcgccgggattacaggagaggagctgcctttctcttcgagacatcacgtccagctggccccagtggctgctcatcctggtgctggaaggcctgtggctgggcttgacattcctcctgccagtccctgggtg

SEQ ID NO: 140229 - DNA, 4615 bp, Homo sapiens
  Payload ID: 7510
  Gene Symbol: HPSE
  Gene Name: heparanase
  Uniprot ID: Q9Y251
  ENST ID: ENST00000311412
  CDS Start-End: 101-1732
aaggagaaaagggcgctggggctcggcgggaggaagtgctagagctctcgactctccgctgcgcggcagctggcggggggagcagccaggtgagcccaagatgctgctgcgctcgaagcctgcgctgccgccgccgctgatgctgctgctcctggggccgctgggtcccctctcccctggcgccctgccccgacctgcgcaagcacaggacgtcgtggacctggacttcttcacccaggagccgctgcacctggtgagcccctcgttcctgtccgtcaccattgacgccaacctggccacggacccgcggttcctcatcctcctgggttctccaaagcttcgtaccttggccagaggcttgtctcctgcgtacctgaggtttggtggcaccaagacagacttcctaattttcgatcccaagaaggaatcaacctttgaagagagaagttactggcaatctcaagtcaaccaggatatttgcaaatatggatccatccctcctgatgtggaggagaagttacggttggaatggccctaccaggagcaattgctactccgagaacactaccagaaaaagttcaagaacagcacctactcaagaagctctgtagatgtgctatacacttttgcaaactgctcaggactggacttgatctttggcctaaatgcgttattaagaacagcagatttgcagtggaacagttctaatgctcagttgctcctggactactgctcttccaaggggtataacatttcttgggaactaggcaatgaacctaacagtttccttaagaaggctgatattttcatcaatgggtcgcagttaggagaagattttattcaattgcataaacttctaagaaagtccaccttcaaaaatgcaaaactctatggtcctgatgttggtcagcctcgaagaaagacggctaagatgctgaagagcttcctgaaggctggtggagaagtgattgattcagttacatggcatcactactatttgaatggacggactgctaccaaggaagattttctaaaccctgatgtattggacatttttatttcatctgtgcaaaaagttttccaggtggttgagagcaccaggcctggcaagaaggtctggttaggagaaacaagctctgcatatggaggcggagcgcccttgctatccgacacctttgcagctggctttatgtggctggataaattgggcctgtcagcccgaatgggaatagaagtggtgatgaggcaagtattctttggagcaggaaactaccatttagtggatgaaaacttcgatcctttacctgattattggctatctcttctgttcaagaaattggtgggcaccaaggtgttaatggcaagcgtgcaaggttcaaagagaaggaagcttcgagtataccttcattgcacaaacactgacaatccaaggtataaagaaggagatttaactctgtatgccataaacctccataatgtcaccaagtacttgcggttaccctatcctttttctaacaagcaagtggataaataccttctaagacctttgggacctcatggattactttccaaatctgtccaactcaatggtctaactctaaagatggtggatgatcaaaccttgccacctttaatggaaaaacctctccggccaggaagttcactgggcttgccagctttctcatatagtttttttgtgataagaaatgccaaagttgctgcttgcatctgaaaataaaatatactagtcctgacactgaatttttcaagtatactaagagtaaagcaactcaagttataggaaaggaagcagataccttgcaaagcaactagtgggtgcttgagagacactgggacactgtcagtgctagatttagcacagtattttgatctcgctaggtagaacactgctaataataatagctaataataccttgttccaaatactgcttagcattttgcatgttttacttttatctaaagttttgttttgttttattatttatttatttatttattttgagacagaatctctctctgtcacccaggctggagtgccatggtgcgatcttggctcactgcaactttaagcaattctcctgcctcagcttcctgagtagctgggattataggcgtgtgccaccacgcccagctactttctatattttttgtagagatggagtttcgccatattggccaagctggtctcgaactcctgtcctcgaactcctgtcctcaagtgatccacccgcctcagcctctcaaagtgctgggattacaggtgtgagccaccacacccagcagtgttttatttttgagacagggtatcattctgttgcccaggcttgagtgcagtggtgcaatcatagatcactgcagccttttaactcctgggctcaagtcatcctcctgcttagcctcccaagtagctaggaccacagacacatgccatcacacttggctatttttaaaaaattttttgtagagatggggtctcgctatgttacccaaactggtcctgaactcctggactcaattgatcctcccaccttggccttccaggtgctgggatttctttgggagtacagcatggtacagcaggagatcatttgatgttacctctgtgcagtgttgctagtcagcgaaagactataatacctgtggggacagcgattagccaccacaaccagtctttatttaaagttattaaaaatggctgggcgcagtggctcacacctgtaatcctagcactttgggaggccgaggcagatggatcacctgacgtgaggaatttgataccagcctggccaacatggtgaaaccccatctctactaaaaaatacaaaaattagctgggtgtggtcctgtagtcccagctacttgggaggctggggcaggagaattacttgaacccaggaggcagaggttgcagtgagccgagattgtgccactgcactccagcctgggtgacagagagagattccatctcaaaaaaacaagttattaaaaatgtatatgaatgctcctaatatggtcaggaagcaaggaagcgaaggatatattatgagttttaagaaggtgcttagctgtatatttatctttcaaaatgtattagaagattttagaattctttccttcatgtgccatctctacaggcacccatcagaaaaagcatactgccgttaccgtgaaactggttgtaaaagagaaactatctatttgcaccttaaaagacagctagattttgctgattttcttctttcggttttctttgtcagcaataatatgtgagaggacagattgttagatatgatagtataaaaaatggttaatgacaattcagaggcgaggagattctgtaaacttaaaattactataaatgaaattgatttgtcaagaggataaattttagaaaacacccaataccttataactgtctgttaatgcttgctttttctctacctttcttccttgtttcagttgggaagcttttggctgcaagtaacagaaactcctaattcaaatggcttaagcaataaggaaatgtatattcccacataactagacgttcaaacaggccaggctccagcacttcagtacgtcaccagggatctgggttcttcccagctctctgctctgccatctttagcgctggcttcattctcagactctggtagcatgatggctgtagctgtttcatgggccccttcaaacctcatagcaaccagaggaagaaaatgagccattttttgagtctccttcatagacttgaataactctttttcagagcttctcacagcaaacctctcctcatgtctcctcatgtcttattgttcagaaatgggtaatgtggccatttcaccagtcactgccaacaacaacgaggttcctataattgtctctgagtaaccctttggaatggagagggtgttggtcagtctacaaactgaacactgcagttctgcgctttttaccagtgaaaaaatgtaattattttcccctcttaaggattaatattcttcaaatgtatgcctgttatggatatagtatctttaaaattttttattttaatagctttaggggtacacactttttgcttacaggggtgaattgtgtagtggtgaagactcggcttttaatgtacttgtcacctgagtgatgtacattgtacccaataggtaatttttcatccattaccctccttccgccctcttcccttctgagtctccaacatcccttataccactgtgtatgttcttgtgtacctacagctaagcttccacttataagtgagaacatgcagtatttggttttccattcctgagttacttcccttaggataacagcccccagttccgtccaagttgctgcaaaatacattattcttctttatggctgagtaatagtccatggtacatatataccacattttctttatccacttatcagttgatggacacttaggttaattccattcaatttcattcaatttaagtatatttgtaaggagctaaagctgaaaattaaattttagatctttcaatactcttaaattttatatgtaagtggtttttatattttcacatttgaaataaagtaatttttataatcttga

SEQ ID NO: 140230 - DNA, 4652 bp, Homo sapiens
  Payload ID: 7510
  Gene Symbol: HPSE
  Gene Name: heparanase
  Uniprot ID: Q9Y251
  ENST ID: ENST00000405413
  CDS Start-End: 138-1769
ccagcgctgctccccgggcgctcctccccgggcgctcctccccaggcctcccgggcgcttggatcccggccatctccgcacccttcaagtgggtgtgggtgatttcctggcggggggagcagccaggtgagcccaagatgctgctgcgctcgaagcctgcgctgccgccgccgctgatgctgctgctcctggggccgctgggtcccctctcccctggcgccctgccccgacctgcgcaagcacaggacgtcgtggacctggacttcttcacccaggagccgctgcacctggtgagcccctcgttcctgtccgtcaccattgacgccaacctggccacggacccgcggttcctcatcctcctgggttctccaaagcttcgtaccttggccagaggcttgtctcctgcgtacctgaggtttggtggcaccaagacagacttcctaattttcgatcccaagaaggaatcaacctttgaagagagaagttactggcaatctcaagtcaaccaggatatttgcaaatatggatccatccctcctgatgtggaggagaagttacggttggaatggccctaccaggagcaattgctactccgagaacactaccagaaaaagttcaagaacagcacctactcaagaagctctgtagatgtgctatacacttttgcaaactgctcaggactggacttgatctttggcctaaatgcgttattaagaacagcagatttgcagtggaacagttctaatgctcagttgctcctggactactgctcttccaaggggtataacatttcttgggaactaggcaatgaacctaacagtttccttaagaaggctgatattttcatcaatgggtcgcagttaggagaagattttattcaattgcataaacttctaagaaagtccaccttcaaaaatgcaaaactctatggtcctgatgttggtcagcctcgaagaaagacggctaagatgctgaagagcttcctgaaggctggtggagaagtgattgattcagttacatggcatcactactatttgaatggacggactgctaccaaggaagattttctaaaccctgatgtattggacatttttatttcatctgtgcaaaaagttttccaggtggttgagagcaccaggcctggcaagaaggtctggttaggagaaacaagctctgcatatggaggcggagcgcccttgctatccgacacctttgcagctggctttatgtggctggataaattgggcctgtcagcccgaatgggaatagaagtggtgatgaggcaagtattctttggagcaggaaactaccatttagtggatgaaaacttcgatcctttacctgattattggctatctcttctgttcaagaaattggtgggcaccaaggtgttaatggcaagcgtgcaaggttcaaagagaaggaagcttcgagtataccttcattgcacaaacactgacaatccaaggtataaagaaggagatttaactctgtatgccataaacctccataatgtcaccaagtacttgcggttaccctatcctttttctaacaagcaagtggataaataccttctaagacctttgggacctcatggattactttccaaatctgtccaactcaatggtctaactctaaagatggtggatgatcaaaccttgccacctttaatggaaaaacctctccggccaggaagttcactgggcttgccagctttctcatatagtttttttgtgataagaaatgccaaagttgctgcttgcatctgaaaataaaatatactagtcctgacactgaatttttcaagtatactaagagtaaagcaactcaagttataggaaaggaagcagataccttgcaaagcaactagtgggtgcttgagagacactgggacactgtcagtgctagatttagcacagtattttgatctcgctaggtagaacactgctaataataatagctaataataccttgttccaaatactgcttagcattttgcatgttttacttttatctaaagttttgttttgttttattatttatttatttatttattttgagacagaatctctctctgtcacccaggctggagtgccatggtgcgatcttggctcactgcaactttaagcaattctcctgcctcagcttcctgagtagctgggattataggcgtgtgccaccacgcccagctactttctatattttttgtagagatggagtttcgccatattggccaagctggtctcgaactcctgtcctcgaactcctgtcctcaagtgatccacccgcctcagcctctcaaagtgctgggattacaggtgtgagccaccacacccagcagtgttttatttttgagacagggtatcattctgttgcccaggcttgagtgcagtggtgcaatcatagatcactgcagccttttaactcctgggctcaagtcatcctcctgcttagcctcccaagtagctaggaccacagacacatgccatcacacttggctatttttaaaaaattttttgtagagatggggtctcgctatgttacccaaactggtcctgaactcctggactcaattgatcctcccaccttggccttccaggtgctgggatttctttgggagtacagcatggtacagcaggagatcatttgatgttacctctgtgcagtgttgctagtcagcgaaagactataatacctgtggggacagcgattagccaccacaaccagtctttatttaaagttattaaaaatggctgggcgcagtggctcacacctgtaatcctagcactttgggaggccgaggcagatggatcacctgacgtgaggaatttgataccagcctggccaacatggtgaaaccccatctctactaaaaaatacaaaaattagctgggtgtggtcctgtagtcccagctacttgggaggctggggcaggagaattacttgaacccaggaggcagaggttgcagtgagccgagattgtgccactgcactccagcctgggtgacagagagagattccatctcaaaaaaacaagttattaaaaatgtatatgaatgctcctaatatggtcaggaagcaaggaagcgaaggatatattatgagttttaagaaggtgcttagctgtatatttatctttcaaaatgtattagaagattttagaattctttccttcatgtgccatctctacaggcacccatcagaaaaagcatactgccgttaccgtgaaactggttgtaaaagagaaactatctatttgcaccttaaaagacagctagattttgctgattttcttctttcggttttctttgtcagcaataatatgtgagaggacagattgttagatatgatagtataaaaaatggttaatgacaattcagaggcgaggagattctgtaaacttaaaattactataaatgaaattgatttgtcaagaggataaattttagaaaacacccaataccttataactgtctgttaatgcttgctttttctctacctttcttccttgtttcagttgggaagcttttggctgcaagtaacagaaactcctaattcaaatggcttaagcaataaggaaatgtatattcccacataactagacgttcaaacaggccaggctccagcacttcagtacgtcaccagggatctgggttcttcccagctctctgctctgccatctttagcgctggcttcattctcagactctggtagcatgatggctgtagctgtttcatgggccccttcaaacctcatagcaaccagaggaagaaaatgagccattttttgagtctccttcatagacttgaataactctttttcagagcttctcacagcaaacctctcctcatgtctcctcatgtcttattgttcagaaatgggtaatgtggccatttcaccagtcactgccaacaacaacgaggttcctataattgtctctgagtaaccctttggaatggagagggtgttggtcagtctacaaactgaacactgcagttctgcgctttttaccagtgaaaaaatgtaattattttcccctcttaaggattaatattcttcaaatgtatgcctgttatggatatagtatctttaaaattttttattttaatagctttaggggtacacactttttgcttacaggggtgaattgtgtagtggtgaagactcggcttttaatgtacttgtcacctgagtgatgtacattgtacccaataggtaatttttcatccattaccctccttccgccctcttcccttctgagtctccaacatcccttataccactgtgtatgttcttgtgtacctacagctaagcttccacttataagtgagaacatgcagtatttggttttccattcctgagttacttcccttaggataacagcccccagttccgtccaagttgctgcaaaatacattattcttctttatggctgagtaatagtccatggtacatatataccacattttctttatccacttatcagttgatggacacttaggttaattccattcaatttcattcaatttaagtatatttgtaaggagctaaagctgaaaattaaattttagatctttcaatactcttaaattttatatgtaagtggtttttatattttcacatttgaaataaagtaatttttataatcttga

SEQ ID NO: 140231 - DNA, 1678 bp, Homo sapiens
  Payload ID: 7510
  Gene Symbol: HPSE
  Gene Name: heparanase
  Uniprot ID: Q9Y251
  ENST ID: ENST00000509906
  CDS Start-End: 138-1280
ccagcgctgctccccgggcgctcctccccgggcgctcctccccaggcctcccgggcgcttggatcccggccatctccgcacccttcaagtgggtgtgggtgatttcctggcggggggagcagccaggtgagcccaagatgctgctgcgctcgaagcctgcgctgccgccgccgctgatgctgctgctcctggggccgctgggtcccctctcccctggcgccctgccccgacctgcgcaagcacaggacgtcgtggacctggacttcttcacccaggagccgctgcacctggtgagcccctcgttcctgtccgtcaccattgacgccaacctggccacggacccgcggttcctcatcctcctgggttctccaaagcttcgtaccttggccagaggcttgtctcctgcgtacctgaggtttggtggcaccaagacagacttcctaattttcgatcccaagaaggaatcaacctttgaagagagaagttactggcaatctcaagtcaaccaggatatttgcaaatatggatccatccctcctgatgtggaggagaagttacggttggaatggccctaccaggagcaattgctactccgagaacactaccagaaaaagttcaagaacagcacctactcaagaagctctgtagatgtgctatacacttttgcaaactgctcaggactggacttgatctttggcctaaatgcgttattaagaacagcagatttgcagtggaacagttctaatgctcagttgctcctggactactgctcttccaaggggtataacatttcttgggaactaggcaatgaacctaacagtttccttaagaaggctgatattttcatcaatgggtcgcagttaggagaagattttattcaattgcataaacttctaagaaagtccaccttcaaaaatgcaaaactctatggtcctgatgttggtcagcctcgaagaaagacggctaagatgctgaagagcttcctgaaggctggtggagaagtgattgattcagttacatggcatcactactatttgaatggacggactgctaccaaggaagattttctaaaccctgatgtattggacatttttatttcatctgtgcaaaaagttttccaggtggttgagagcaccaggcctggcaagaaggtctggttaggagaaacaagctctgcatatggaggcggagcgcccttgctatccgacacctttgcagctggctttatgattattggctatctcttctgttcaagaaattggtgggcaccaaggtgttaatggcaagcgtgcaaggttcaaagagaaggaagcttcgagtataccttcattgcacaaacactgacaatccaaggtataaagaaggagatttaactctgtatgccataaacctccataatgtcaccaagtacttgcggttaccctatcctttttctaacaagcaagtggataaataccttctaagacctttgggacctcatggattactttccaaatctgtccaactcaatggtctaactctaaagatggtggatgatcaaaccttgccacctttaatggaaaaacctctccggccaggaagttcactgggcttgccagctttctcatatagtttttttgtgataagaaatgccaaagttgctgcttgcatctgaaaataaaatatactagtcctgaca

SEQ ID NO: 140232 - DNA, 1458 bp, Homo sapiens
  Payload ID: 7510
  Gene Symbol: HPSE
  Gene Name: heparanase
  Uniprot ID: Q9Y251
  ENST ID: ENST00000513463
  CDS Start-End: 1-1458
atgctgctgcgctcgaagcctgcgctgccgccgccgctgatgctgctgctcctggggccgctgggtcccctctcccctggcgccctgccccgacctgcgcaagcacaggacgtcgtggacctggacttcttcacccaggagccgctgcacctggtgagcccctcgttcctgtccgtcaccattgacgccaacctggccacggacccgcggttcctcatcctcctgggttctccaaagcttcgtaccttggccagaggcttgtctcctgcgtacctgaggtttggtggcaccaagacagacttcctaattttcgatcccaagaaggaatcaacctttgaagagagaagttactggcaatctcaagtcaaccaggatatttgcaaatatggatccatccctcctgatgtggaggagaagttacggttggaatggccctaccaggagcaattgctactccgagaacactaccagaaaaagttcaagaacagcacctactcaaaacctaacagtttccttaagaaggctgatattttcatcaatgggtcgcagttaggagaagattttattcaattgcataaacttctaagaaagtccaccttcaaaaatgcaaaactctatggtcctgatgttggtcagcctcgaagaaagacggctaagatgctgaagagcttcctgaaggctggtggagaagtgattgattcagttacatggcatcactactatttgaatggacggactgctaccaaggaagattttctaaaccctgatgtattggacatttttatttcatctgtgcaaaaagttttccaggtggttgagagcaccaggcctggcaagaaggtctggttaggagaaacaagctctgcatatggaggcggagcgcccttgctatccgacacctttgcagctggctttatgtggctggataaattgggcctgtcagcccgaatgggaatagaagtggtgatgaggcaagtattctttggagcaggaaactaccatttagtggatgaaaacttcgatcctttacctgattattggctatctcttctgttcaagaaattggtgggcaccaaggtgttaatggcaagcgtgcaaggttcaaagagaaggaagcttcgagtataccttcattgcacaaacactgacaatccaaggtataaagaaggagatttaactctgtatgccataaacctccataatgtcaccaagtacttgcggttaccctatcctttttctaacaagcaagtggataaataccttctaagacctttgggacctcatggattactttccaaatctgtccaactcaatggtctaactctaaagatggtggatgatcaaaccttgccacctttaatggaaaaacctctccggccaggaagttcactgggcttgccagctttctcatatagtttttttgtgataagaaatgccaaagttgctgcttgcatctga

SEQ ID NO: 140233 - DNA, 1450 bp, Homo sapiens
  Payload ID: 7510
  Gene Symbol: HPSE
  Gene Name: heparanase
  ENST ID: ENST00000508891
  CDS Start-End: 138-644
ccagcgctgctccccgggcgctcctccccgggcgctcctccccaggcctcccgggcgcttggatcccggccatctccgcacccttcaagtgggtgtgggtgatttcctggcggggggagcagccaggtgagcccaagatgctgctgcgctcgaagcctgcgctgccgccgccgctgatgctgctgctcctggggccgctgggtcccctctcccctggcgccctgccccgacctgcgcaagcacaggacgtcgtggacctggacttcttcacccaggagccgctgcacctggtgagcccctcgttcctgtccgtcaccattgacgccaacctggccacggacccgcggttcctcatcctcctgggttctccaaagcttcgtaccttggccagaggcttgtctcctgcgtacctgaggtttggtggcaccaagacagacttcctaattttcgatcccaagaaggaatcaacctttgaagagagaagttactggcaatctcaagtcaaccaggatatttgcaaatatggatccatccctcctgatgtggaggagaagttacggttggaatggccctaccaggagcaattgctactccgagaacactaccagaaaaagttcaagaacagcacctactcaacttcctgaaggctggtggagaagtgattgattcagttacatggcatcactactatttgaatggacggactgctaccaaggaagattttctaaaccctgatgtattggacatttttatttcatctgtgcaaaaagttttccaggtggttgagagcaccaggcctggcaagaaggtctggttaggagaaacaagctctgcatatggaggcggagcgcccttgctatccgacacctttgcagctggctttatgtggctggataaattgggcctgtcagcccgaatgggaatagaagtggtgatgaggcaagtattctttggagcaggaaactaccatttagtggatgaaaacttcgatcctttacctgattattggctatctcttctgttcaagaaattggtgggcaccaaggtgttaatggcaagcgtgcaaggttcaaagagaaggaagcttcgagtataccttcattgcacaaacactgacaatccaaggtataaagaaggagatttaactctgtatgccataaacctccataatgtcaccaagtacttgcggttaccctatcctttttctaacaagcaagtggataaataccttctaagacctttgggacctcatggattactttccaaatctgtccaactcaatggtctaactctaaagatggtggatgatcaaaccttgccacctttaatggaaaaacctctccggccaggaagttcactgggcttgccagctttctcatatagtttttttgtgataagaaatgccaaagttgctgcttgcatctgaaaataaaatatactagtcctgaca

SEQ ID NO: 140234 - DNA, 1571 bp, Homo sapiens
  Payload ID: 7510
  Gene Symbol: HPSE
  Gene Name: heparanase
  Uniprot ID: Q9Y251
  ENST ID: ENST00000512196
  CDS Start-End: 138-1547
ccagcgctgctccccgggcgctcctccccgggcgctcctccccaggcctcccgggcgcttggatcccggccatctccgcacccttcaagtgggtgtgggtgatttcctggcggggggagcagccaggtgagcccaagatgctgctgcgctcgaagcctgcgctgccgccgccgctgatgctgctgctcctggggccgctgggtcccctctcccctggcgccctgccccgacctgcgcaagcacaggacgtcgtggacctggacttcttcacccaggagccgctgcacctggtgagcccctcgttcctgtccgtcaccattgacgccaacctggccacggacccgcggttcctcatcctcctgggttctccaaagcttcgtaccttggccagaggcttgtctcctgcgtacctgaggtttggtggcaccaagacagacttcctaattttcgatcccaagaaggaatcaacctttgaagagagaagttactggcaatctcaagtcaaccaggatatttgcaaatatggatccatccctcctgatgtggaggagaagttacggttggaatggccctaccaggagcaattgctactccgagaacactaccagaaaaagttcaagaacagcacctactcaagaagctctgtagatgtgctatacacttttgcaaactgctcaggactggacttgatctttggcctaaatgcgttattaagaacagcagatttgcagtggaacagttctaatgctcagttgctcctggactactgctcttccaaggggtataacatttcttgggaactaggcaatgaacctaacagtttccttaagaaggctgatattttcatcaatgggtcgcagttaggagaagattttattcaattgcataaacttctaagaaagtccaccttcaaaaatgcaaaactctatggtcctgatgttggtcagcctcgaagaaagacggctaagatgctgaagagcttcctgaaggctggtggagaagtgattgattcagttacatggcatcactactatttgaatggacggactgctaccaaggaagattttctaaaccctgatgtattggacatttttatttcatctgtgcaaaaagttttccaggattattggctatctcttctgttcaagaaattggtgggcaccaaggtgttaatggcaagcgtgcaaggttcaaagagaaggaagcttcgagtataccttcattgcacaaacactgacaatccaaggtataaagaaggagatttaactctgtatgccataaacctccataatgtcaccaagtacttgcggttaccctatcctttttctaacaagcaagtggataaataccttctaagacctttgggacctcatggattactttccaaatctgtccaactcaatggtctaactctaaagatggtggatgatcaaaccttgccacctttaatggaaaaacctctccggccaggaagttcactgggcttgccagctttctcatatagtttttttgtgataagaaatgccaaagttgctgcttgcatctgaaaataaaatatactagtcctgaca

SEQ ID NO: 140235 - DNA, 1624 bp, Homo sapiens
  Payload ID: 7510
  Gene Symbol: HPSE
  Gene Name: heparanase
  ENST ID: ENST00000507150
  CDS Start-End: 138-818
ccagcgctgctccccgggcgctcctccccgggcgctcctccccaggcctcccgggcgcttggatcccggccatctccgcacccttcaagtgggtgtgggtgatttcctggcggggggagcagccaggtgagcccaagatgctgctgcgctcgaagcctgcgctgccgccgccgctgatgctgctgctcctggggccgctgggtcccctctcccctggcgccctgccccgacctgcgcaagcacaggacgtcgtggacctggacttcttcacccaggagccgctgcacctggtgagcccctcgttcctgtccgtcaccattgacgccaacctggccacggacccgcggttcctcatcctcctgggttctccaaagcttcgtaccttggccagaggcttgtctcctgcgtacctgaggtttggtggcaccaagacagacttcctaattttcgatcccaagaaggaatcaacctttgaagagagaagttactggcaatctcaagtcaaccaggatatttgcaaatatggatccatccctcctgatgtggaggagaagttacggttggaatggccctaccaggagcaattgctactccgagaacactaccagaaaaagttcaagaacagcacctactcaagaagctctgtagatgtgctatacacttttgcaaactgctcaggactggacttgatctttggcctaaatgcgttattaagaacagcagatttgcagtggaacagttctaatgctcagttgctcctggactactgctcttccaaggggtataacatttcttgggaactaggcaatgcttcctgaaggctggtggagaagtgattgattcagttacatggcatcactactatttgaatggacggactgctaccaaggaagattttctaaaccctgatgtattggacatttttatttcatctgtgcaaaaagttttccaggtggttgagagcaccaggcctggcaagaaggtctggttaggagaaacaagctctgcatatggaggcggagcgcccttgctatccgacacctttgcagctggctttatgtggctggataaattgggcctgtcagcccgaatgggaatagaagtggtgatgaggcaagtattctttggagcaggaaactaccatttagtggatgaaaacttcgatcctttacctgattattggctatctcttctgttcaagaaattggtgggcaccaaggtgttaatggcaagcgtgcaaggttcaaagagaaggaagcttcgagtataccttcattgcacaaacactgacaatccaaggtataaagaaggagatttaactctgtatgccataaacctccataatgtcaccaagtacttgcggttaccctatcctttttctaacaagcaagtggataaataccttctaagacctttgggacctcatggattactttccaaatctgtccaactcaatggtctaactctaaagatggtggatgatcaaaccttgccacctttaatggaaaaacctctccggccaggaagttcactgggcttgccagctttctcatatagtttttttgtgataagaaatgccaaagttgctgcttgcatctgaaaataaaatatactagtcctgaca

SEQ ID NO: 140236 - DNA, 1849 bp, Homo sapiens
  Payload ID: 7511
  Gene Symbol: HPSE2
  Gene Name: heparanase 2 (inactive)
  Uniprot ID: Q8WWQ2
  ENST ID: ENST00000370546
  CDS Start-End: 1-1647
atgagggtgctttgtgccttccctgaagccatgccctccagcaactcccgcccccccgcgtgcctagccccgggggctctctacttggctctgttgctccatctctccctttcctcccaggctggagacaggagacccttgcctgtagacagagctgcaggtttgaaggaaaagaccctgattctacttgatgtgagcaccaagaacccagtcaggacagtcaatgagaacttcctctctctgcagctggatccgtccatcattcatgatggctggctcgatttcctaagctccaagcgcttggtgaccctggcccggggactttcgcccgcctttctgcgcttcgggggcaaaaggaccgacttcctgcagttccagaacctgaggaacccggcgaaaagccgcgggggcccgggcccggattactatctcaaaaactatgaggatgacattgttcgaagtgatgttgccttagataaacagaaaggctgcaagattgcccagcaccctgatgttatgctggagctccaaagggagaaggcagctcagatgcatctggttcttctaaaggagcaattctccaatacttacagtaatctcatattaacagccaggtctctagacaaactttataactttgctgattgctctggactccacctgatatttgctctaaatgcactgcgtcgtaatcccaataactcctggaacagttctagtgccctgagtctgttgaagtacagcgccagcaaaaagtacaacatttcttgggaactgggtaatgagccaaataactatcggaccatgcatggccgggcagtaaatggcagccagttgggaaaggattacatccagctgaagagcctgttgcagcccatccggatttattccagagccagcttatatggccctaatattgggcggccgaggaagaatgtcatcgccctcctagatggattcatgaaggtggcaggaagtacagtagatgcagttacctggcaacattgctacattgatggccgggtggtcaaggtgatggacttcctgaaaactcgcctgttagacacactctctgaccagattaggaaaattcagaaagtggttaatacatacactccaggaaagaagatttggcttgaaggtgtggtgaccacctcagctggaggcacaaacaatctatccgattcctatgctgcaggattcttatggttgaacactttaggaatgctggccaatcagggcattgatgtcgtgatacggcactcattttttgaccatggatacaatcacctcgtggaccagaattttaacccattaccagactactggctctctctcctctacaagcgcctgatcggccccaaagtcttggctgtgcatgtggctgggctccagcggaagccacggcctggccgagtgatccgggacaaactaaggatttatgctcactgcacaaaccaccacaaccacaactacgttcgtgggtccattacactttttatcatcaacttgcatcgatcaagaaagaaaatcaagctggctgggactctcagagacaagctggttcaccagtacctgctgcagccctatgggcaggagggcctaaagtccaaaacccaaagatgtcaatactgtgggatcatctgaatctaaaagggcattacctaattcttcagaagaaaggtcagtgcaactgaatggccagcccttagtgatggtggacgacgggaccctcccagaattgaagccccgcccccttcgggccggccggacattggtcatccctccagtcaccatgggcttttatgtggtcaagaatgtcaatgctttggcctgccgctaccgataa

SEQ ID NO: 140237 - DNA, 2121 bp, Homo sapiens
  Payload ID: 7511
  Gene Symbol: HPSE2
  Gene Name: heparanase 2 (inactive)
  Uniprot ID: Q8WWQ2
  ENST ID: ENST00000370549
  CDS Start-End: 61-1665
aaggacaattagtcactagcgagacccagtaggaagagaggtttaaatcagagggattgaatgagggtgctttgtgccttccctgaagccatgccctccagcaactcccgcccccccgcgtgcctagccccgggggctctctacttggctctgttgctccatctctccctttcctcccaggctggagacaggagacccttgcctgtagacagagctgcaggtttgaaggaaaagaccctgattctacttgatgtgagcaccaagaacccagtcaggacagtcaatgagaacttcctctctctgcagctggatccgtccatcattcatgatggctggctcgatttcctaagctccaagcgcttggtgaccctggcccggggactttcgcccgcctttctgcgcttcgggggcaaaaggaccgacttcctgcagttccagaacctgaggaacccggcgaaaagccgcgggggcccgggcccggattactatctcaaaaactatgaggatgacattgttcgaagtgatgttgccttagataaacagaaaggctgcaagattgcccagcaccctgatgttatgctggagctccaaagggagaaggcagctcagatgcatctggttcttctaaaggagcaattctccaatacttacagtaatctcatattaacagagccaaataactatcggaccatgcatggccgggcagtaaatggcagccagttgggaaaggattacatccagctgaagagcctgttgcagcccatccggatttattccagagccagcttatatggccctaatattgggcggccgaggaagaatgtcatcgccctcctagatggattcatgaaggtggcaggaagtacagtagatgcagttacctggcaacattgctacattgatggccgggtggtcaaggtgatggacttcctgaaaactcgcctgttagacacactctctgaccagattaggaaaattcagaaagtggttaatacatacactccaggaaagaagatttggcttgaaggtgtggtgaccacctcagctggaggcacaaacaatctatccgattcctatgctgcaggattcttatggttgaacactttaggaatgctggccaatcagggcattgatgtcgtgatacggcactcattttttgaccatggatacaatcacctcgtggaccagaattttaacccattaccagactactggctctctctcctctacaagcgcctgatcggccccaaagtcttggctgtgcatgtggctgggctccagcggaagccacggcctggccgagtgatccgggacaaactaaggatttatgctcactgcacaaaccaccacaaccacaactacgttcgtgggtccattacactttttatcatcaacttgcatcgatcaagaaagaaaatcaagctggctgggactctcagagacaagctggttcaccagtacctgctgcagccctatgggcaggagggcctaaagtccaagtcagtgcaactgaatggccagcccttagtgatggtggacgacgggaccctcccagaattgaagccccgcccccttcgggccggccggacattggtcatccctccagtcaccatgggcttttatgtggtcaagaatgtcaatgctttggcctgccgctaccgataagctatcctcacactcacggctaccagtgggcctgctgggctgcttccactcctccactccagtagtatcctctgttttcagacatcctagcaaccagcccctgctgccccatcctgctggaatcaacacagacttgctctccaaagagactaaatgtcatagcgtgatcttagcctaggtaggccacatccatcccaaaggaaaatgtagacatcacctgtacctatataaggataaaggcatgtgtatagagcagaatgtttcccttcatgtgcactatgaaaacgagctgacagcacactcccaggagaaatgtttccagacaactccccatgatcctgtcacacagcattataaccacaaatccaaaccttagcctgctgctgctgctgccctcagaggaagatgaggaaggaaaaaaactgggtggacctacaaaaacccatcctctcccaa

SEQ ID NO: 140238 - DNA, 2295 bp, Homo sapiens
  Payload ID: 7511
  Gene Symbol: HPSE2
  Gene Name: heparanase 2 (inactive)
  Uniprot ID: Q8WWQ2
  ENST ID: ENST00000370552
  CDS Start-End: 61-1839
aaggacaattagtcactagcgagacccagtaggaagagaggtttaaatcagagggattgaatgagggtgctttgtgccttccctgaagccatgccctccagcaactcccgcccccccgcgtgcctagccccgggggctctctacttggctctgttgctccatctctccctttcctcccaggctggagacaggagacccttgcctgtagacagagctgcaggtttgaaggaaaagaccctgattctacttgatgtgagcaccaagaacccagtcaggacagtcaatgagaacttcctctctctgcagctggatccgtccatcattcatgatggctggctcgatttcctaagctccaagcgcttggtgaccctggcccggggactttcgcccgcctttctgcgcttcgggggcaaaaggaccgacttcctgcagttccagaacctgaggaacccggcgaaaagccgcgggggcccgggcccggattactatctcaaaaactatgaggatgacattgttcgaagtgatgttgccttagataaacagaaaggctgcaagattgcccagcaccctgatgttatgctggagctccaaagggagaaggcagctcagatgcatctggttcttctaaaggagcaattctccaatacttacagtaatctcatattaacagccaggtctctagacaaactttataactttgctgattgctctggactccacctgatatttgctctaaatgcactgcgtcgtaatcccaataactcctggaacagttctagtgccctgagtctgttgaagtacagcgccagcaaaaagtacaacatttcttgggaactgggtaatgagccaaataactatcggaccatgcatggccgggcagtaaatggcagccagttgggaaaggattacatccagctgaagagcctgttgcagcccatccggatttattccagagccagcttatatggccctaatattgggcggccgaggaagaatgtcatcgccctcctagatggattcatgaaggtggcaggaagtacagtagatgcagttacctggcaacattgctacattgatggccgggtggtcaaggtgatggacttcctgaaaactcgcctgttagacacactctctgaccagattaggaaaattcagaaagtggttaatacatacactccaggaaagaagatttggcttgaaggtgtggtgaccacctcagctggaggcacaaacaatctatccgattcctatgctgcaggattcttatggttgaacactttaggaatgctggccaatcagggcattgatgtcgtgatacggcactcattttttgaccatggatacaatcacctcgtggaccagaattttaacccattaccagactactggctctctctcctctacaagcgcctgatcggccccaaagtcttggctgtgcatgtggctgggctccagcggaagccacggcctggccgagtgatccgggacaaactaaggatttatgctcactgcacaaaccaccacaaccacaactacgttcgtgggtccattacactttttatcatcaacttgcatcgatcaagaaagaaaatcaagctggctgggactctcagagacaagctggttcaccagtacctgctgcagccctatgggcaggagggcctaaagtccaagtcagtgcaactgaatggccagcccttagtgatggtggacgacgggaccctcccagaattgaagccccgcccccttcgggccggccggacattggtcatccctccagtcaccatgggcttttatgtggtcaagaatgtcaatgctttggcctgccgctaccgataagctatcctcacactcacggctaccagtgggcctgctgggctgcttccactcctccactccagtagtatcctctgttttcagacatcctagcaaccagcccctgctgccccatcctgctggaatcaacacagacttgctctccaaagagactaaatgtcatagcgtgatcttagcctaggtaggccacatccatcccaaaggaaaatgtagacatcacctgtacctatataaggataaaggcatgtgtatagagcagaatgtttcccttcatgtgcactatgaaaacgagctgacagcacactcccaggagaaatgtttccagacaactccccatgatcctgtcacacagcattataaccacaaatccaaaccttagcctgctgctgctgctgccctcagaggaagatgaggaaggaaaaaaactgggtggacctacaaaaacccatcctctcccaa

SEQ ID NO: 140239 - DNA, 3681 bp, Homo sapiens
  Payload ID: 7511
  Gene Symbol: HPSE2
  Gene Name: heparanase 2 (inactive)
  ENST ID: ENST00000404542
  CDS Start-End: 15-1184
tctgcttcttcccagccaggtctctagacaaactttataactttgctgattgctctggactccacctgatatttgctctaaatgcactgcgtcgtaatcccaataactcctggaacagttctagtgccctgagtctgttgaagtacagcgccagcaaaaagtacaacatttcttgggaactgggtaatgagccaaataactatcggaccatgcatggccgggcagtaaatggcagccagttgggaaaggattacatccagctgaagagcctgttgcagcccatccggatttattccagagccagcttatatggccctaatattgggcggccgaggaagaatgtcatcgccctcctagatggattcatgaaggtggcaggaagtacagtagatgcagttacctggcaacattgctacattgatggccgggtggtcaaggtgatggacttcctgaaaactcgcctgttagacacactctctgaccagattaggaaaattcagaaagtggttaatacatacactccaggaaagaagatttggcttgaaggtgtggtgaccacctcagctggaggcacaaacaatctatccgattcctatgctgcaggattcttatggttgaacactttaggaatgctggccaatcagggcattgatgtcgtgatacggcactcattttttgaccatggatacaatcacctcgtggaccagaattttaacccattaccagactactggctctctctcctctacaagcgcctgatcggccccaaagtcttggctgtgcatgtggctgggctccagcggaagccacggcctggccgagtgatccgggacaaactaaggatttatgctcactgcacaaaccaccacaaccacaactacgttcgtgggtccattacactttttatcatcaacttgcatcgatcaagaaagaaaatcaagctggctgggactctcagagacaagctggttcaccagtacctgctgcagccctatgggcaggagggcctaaagtccaagtcagtgcaactgaatggccagcccttagtgatggtggacgacgggaccctcccagaattgaagccccgcccccttcgggccggccggacattggtcatccctccagtcaccatgggcttttatgtggtcaagaatgtcaatgctttggcctgccgctaccgataagctatcctcacactcacggctaccagtgggcctgctgggctgcttccactcctccactccagtagtatcctctgttttcagacatcctagcaaccagcccctgctgccccatcctgctggaatcaacacagacttgctctccaaagagactaaatgtcatagcgtgatcttagcctaggtaggccacatccatcccaaaggaaaatgtagacatcacctgtacctatataaggataaaggcatgtgtatagagcagaatgtttcccttcatgtgcactatgaaaacgagctgacagcacactcccaggagaaatgtttccagacaactccccatgatcctgtcacacagcattataaccacaaatccaaaccttagcctgctgctgctgctgccctcagaggaagatgaggaaggaaaaaaactgggtggacctacaaaaacccatcctctcccaactccttcttctctgcctctttcttgctgctgccctgagttttttgacacatctctttccataggggagtaatgggtgtgtcagccctggcctgctgggagagctgtttgtatgatttcccggctgatgtatgagcgtgcgcatctgggttcctgacagtggcatccatcactggcagttcttctgggaagcgggtgcttcaaaagtaaaattacaatcacactccagatttggtaagaaggttctattcctctgtgaatccagattcccccagagttgtaatgggagtcaagtaacaatattcattgagtggagagcagtttattaggcacaacaaaaagtagtcatcattcttcatgttgctatgagggagagtttgagtacaaagagaaagcatactgaaacatcaggtacacacacacaccccaactggacaaagcaaattagacctctccaaaattaagagaatattaggggctctatagggtaagcccttaattgtttggttaactcaaatcattatttttaaaaaagaagaaaaaagtgtgaatcaaggtcatcactggaagacacaactgaatctaacctttttgcctcttcccaagtagcctatttgagctagaacaaaactttgttagccattttgggagagaatagggaatctagagaatgaagatctggccaaaactatggaatggtaggtaggaagcttctgagttgggcaggtgtgaagtgggggatgaggacgttctatatgattcaaggggcatgagggtctttgccaatgagctacagctgaaatgactttcttttctgtggatgtgattttctttctcaggataaatgacaggaatgatgcttttgttagaaggaggagagatttgacactgttccaagtgagacggtgatacaatttctgctgtttgtgaaaggacaggaatggggcgggggcaaggcagggttgcctagggcagagactagggaggctgcctaagacgcacacggagttaaggatttgggccaagtctgcaaagtgagagatggaagggagattagaccaaagaggagggagagaattctgagcttggagaacggtggatttgggagagggaagctgactacctaattccaggaagcgaggggaccgggttttgacatgcttatcattaagcacaggaggaacagcatacagcagatgtactacagcgagcaagaaagggagagcccgaggaccaggctgcaccaggtcagtggctgtgctcagcatggaagcaactggagagagaggggcagaccctgagaccgccctgcaaggctgcccagaagggacccgtttctctgggaccaggcacctcccactgaggcttcagctctgagagggcaggaaagtgaagtaccaagatgggggcggggcggggggtaggaaataagagaaagaagaaacagattgacaggccaaagtgaggaaaagagaggaaaagagaaatgagactaaaaggtcgttcccccaactgttaaaaatgtgtgcagatatcaacgtctcttctacatactggtacaggtgcgactgcagggccccctgatataacaagagtaaccaaaggtccctaagagcctggccctggggacctatggtttgctttgcgtccttagtaaccccatgataaaggggtactactgttatccccatttttcctacgaggcatggagaggatccatggctcgcccaggggcacccggggaaatgggttgccgagcgcgaaataatccagagcctgcccactcagccacaaggctcagcggctccacaggtccagacacctccttcacatctttgtaggttctgctcattcagaacagccagaactccactcaaacacactttctgtaaataagtgttgatttttttttactaaaccttgcagaatatgggtaattcctgcttcttttatctttctctgtgtattaaatgctgctctcacgagatttaagttttgtttattttttagttaataaaaggaagagggaattactgaaattta

SEQ ID NO: 140240 - DNA, 447 bp, Homo sapiens
  Payload ID: 7511
  Gene Symbol: HPSE2
  Gene Name: heparanase 2 (inactive)
  ENST ID: ENST00000614306
  CDS Start-End: 1-447
atgagggtgctttgtgccttccctgaagccatgccctccagcaactcccgcccccccgcgtgcctagccccgggggctctctacttggctctgttgctccatctctccctttcctcccaggctggagacaggagacccttgcctgtagacagagctgcaggtttgaaggaaaagaccctgattctacttgatgtgagcaccaagaacccagtcaggacagtcaatgagaacttcctctctctgcagctggatccgtccatcattcatgatggctggctcgatttcctaagctccaagcgcttggtgaccctggcccggggactttcgcccgcctttctgcgcttcgggggcaaaaggaccgacttcctgcagttccagaacctgaggaacccggcgaaaagccgcgggggcccgggcccggattactatctcaaaaactatgaggat

SEQ ID NO: 140241 - DNA, 1760 bp, Homo sapiens
  Payload ID: 7511
  Gene Symbol: HPSE2
  Gene Name: heparanase 2 (inactive)
  Uniprot ID: Q8WWQ2
  ENST ID: ENST00000628193
  CDS Start-End: 61-1503
aaggacaattagtcactagcgagacccagtaggaagagaggtttaaatcagagggattgaatgagggtgctttgtgccttccctgaagccatgccctccagcaactcccgcccccccgcgtgcctagccccgggggctctctacttggctctgttgctccatctctccctttcctcccaggctggagacaggagacccttgcctgtagacagagctgcaggtttgaaggaaaagaccctgattctacttgatgtgagcaccaagaacccagtcaggacagtcaatgagaacttcctctctctgcagctggatccgtccatcattcatgatggctggctcgatttcctaagctccaagcgcttggtgaccctggcccggggactttcgcccgcctttctgcgcttcgggggcaaaaggaccgacttcctgcagttccagaacctgaggaacccggcgaaaagccgcgggggcccgggcccggattactatctcaaaaactatgaggatgagccaaataactatcggaccatgcatggccgggcagtaaatggcagccagttgggaaaggattacatccagctgaagagcctgttgcagcccatccggatttattccagagccagcttatatggccctaatattgggcggccgaggaagaatgtcatcgccctcctagatggattcatgaaggtggcaggaagtacagtagatgcagttacctggcaacattgctacattgatggccgggtggtcaaggtgatggacttcctgaaaactcgcctgttagacacactctctgaccagattaggaaaattcagaaagtggttaatacatacactccaggaaagaagatttggcttgaaggtgtggtgaccacctcagctggaggcacaaacaatctatccgattcctatgctgcaggattcttatggttgaacactttaggaatgctggccaatcagggcattgatgtcgtgatacggcactcattttttgaccatggatacaatcacctcgtggaccagaattttaacccattaccagactactggctctctctcctctacaagcgcctgatcggccccaaagtcttggctgtgcatgtggctgggctccagcggaagccacggcctggccgagtgatccgggacaaactaaggatttatgctcactgcacaaaccaccacaaccacaactacgttcgtgggtccattacactttttatcatcaacttgcatcgatcaagaaagaaaatcaagctggctgggactctcagagacaagctggttcaccagtacctgctgcagccctatgggcaggagggcctaaagtccaagtcagtgcaactgaatggccagcccttagtgatggtggacgacgggaccctcccagaattgaagccccgcccccttcgggccggccggacattggtcatccctccagtcaccatgggcttttatgtggtcaagaatgtcaatgctttggcctgccgctaccgataagctatcctcacactcacggctaccagtgggcctgctgggctgcttccactcctccactccagtagtatcctctgttttcagacatcctagcaaccagcccctgctgccccatcctgctggaatcaacacagacttgctctccaaagagactaaatgtcatagcgtgatcttagcctaggtaggccacatccatcccaaaggaaaatgtagacatcacctgtacctatataaggataaaggcatgtgtatagagcaga

SEQ ID NO: 140242 - DNA, 2386 bp, Homo sapiens
  Payload ID: 7512
  Gene Symbol: HBEGF
  Gene Name: heparin-binding EGF-like growth factor
  Uniprot ID: Q99075
  ENST ID: ENST00000230990
  CDS Start-End: 304-930
attcccggccgcgagccgggcagcgctcattcggccgaaggagctacgcgggccacgctgctggctggcctgacctaggcgcgcggggtcgggcggccgcgcgggcgggctgagtgagcaagacaagacactcaagaagagcgagctgcgcctgggtcccggccaggcttgcacgcagaggcgggcggcagacggtgcccggcggaatctcctgagctccgccgcccagctctggtgccagcgcccagtggccgccgcttcgaaagtgactggtgcctcgccgcctcctctcggtgcgggaccatgaagctgctgccgtcggtggtgctgaagctctttctggctgcagttctctcggcactggtgactggcgagagcctggagcggcttcggagagggctagctgctggaaccagcaacccggaccctcccactgtatccacggaccagctgctacccctaggaggcggccgggaccggaaagtccgtgacttgcaagaggcagatctggaccttttgagagtcactttatcctccaagccacaagcactggccacaccaaacaaggaggagcacgggaaaagaaagaagaaaggcaaggggctagggaagaagagggacccatgtcttcggaaatacaaggacttctgcatccatggagaatgcaaatatgtgaaggagctccgggctccctcctgcatctgccacccgggttaccatggagagaggtgtcatgggctgagcctcccagtggaaaatcgcttatatacctatgaccacacaaccatcctggccgtggtggctgtggtgctgtcatctgtctgtctgctggtcatcgtggggcttctcatgtttaggtaccataggagaggaggttatgatgtggaaaatgaagagaaagtgaagttgggcatgactaattcccactgagagagacttgtgctcaaggaatcggctggggactgctacctctgagaagacacaaggtgatttcagactgcagaggggaaagacttccatctagtcacaaagactccttcgtccccagttgccgtctaggattgggcctcccataattgctttgccaaaataccagagccttcaagtgccaaacagagtatgtccgatggtatctgggtaagaagaaagcaaaagcaagggaccttcatgcccttctgattcccctccaccaaaccccacttcccctcataagtttgtttaaacacttatcttctggattagaatgccggttaaattccatatgctccaggatctttgactgaaaaaaaaaaagaagaagaagaaggagagcaagaaggaaagatttgtgaactggaagaaagcaacaaagattgagaagccatgtactcaagtaccaccaagggatctgccattgggaccctccagtgctggatttgatgagttaactgtgaaataccacaagcctgagaactgaattttgggacttctacccagatggaaaaataacaactatttttgttgttgttgtttgtaaatgcctcttaaattatatatttattttattctatgtatgttaatttatttagtttttaacaatctaacaataatatttcaagtgcctagactgttactttggcaatttcctggccctccactcctcatccccacaatctggcttagtgccacccacctttgccacaaagctaggatggttctgtgacccatctgtagtaatttattgtctgtctacatttctgcagatcttccgtggtcagagtgccactgcgggagctctgtatggtcaggatgtaggggttaacttggtcagagccactctatgagttggacttcagtcttgcctaggcgattttgtctaccatttgtgttttgaaagcccaaggtgctgatgtcaaagtgtaacagatatcagtgtctccccgtgtcctctccctgccaagtctcagaagaggttgggcttccatgcctgtagctttcctggtccctcacccccatggccccaggcccacagcgtgggaactcactttcccttgtgtcaagacatttctctaactcctgccattcttctggtgctactccatgcaggggtcagtgcagcagaggacagtctggagaaggtattagcaaagcaaaaggctgagaaggaacagggaacattggagctgactgttcttggtaactgattacctgccaattgctaccgagaaggttggaggtggggaaggctttgtataatcccacccacctcaccaaaacgatgaagttatgctgtcatggtcctttctggaagtttctggtgccatttctgaactgttacaacttgtatttccaaacctggttcatatttatactttgcaatccaaataaagataacccttattccata

SEQ ID NO: 140243 - DNA, 3602 bp, Homo sapiens
  Payload ID: 7513
  Gene Symbol: HEPACAM
  Gene Name: hepatic and glial cell adhesion molecule
  Uniprot ID: Q14CZ8
  ENST ID: ENST00000298251
  CDS Start-End: 407-1657
gttaggtggagacagggtaggttgggacacaaagtccagttaagtgtgtgtcccagctcagtgctctgagcccagatcctcatctccctgggtagtgaggctcagcacagacaagcaaccaactgctgggctgccggtgccccccatgttggaacctgagttggagattatctcctaagcagatacctgcttccaaactggggatgtagggcttggaaactagaaaatgccaggtctgagggagaggaaagaacaagtccagcaatacacagagctctgtgtattcagagggaagttggcagggttgtgttcgggcagagaaactccgagtggtacaaaggggacgtgcccagagtggagaaatcatgctaattgtctgcactagagctggagaacgccacccaaaatgaagagagaaaggggagccctgtccagagcctccagggccctgcgccttgctccttttgtctaccttcttctgatccagacagaccccctggagggggtgaacatcaccagccccgtgcgcctgatccatggcaccgtggggaagtcggctctgctttctgtgcagtacagcagtaccagcagcgacaggcctgtagtgaagtggcagctgaagcgggacaagccagtgaccgtggtgcagtccattggcacagaggtcatcggcaccctgcggcctgactatcgagaccgtatccgactctttgaaaatggctccctgcttctcagcgacctgcagctggccgatgagggcacctatgaggtcgagatctccatcaccgacgacaccttcactggggagaagaccatcaaccttactgtagatgtgcccatttcgaggccacaggtgttggtggcttcaaccactgtgctggagctcagcgaggccttcaccttgaactgctcacatgagaatggcaccaagcccagctacacctggctgaaggatggcaagcccctcctcaatgactcgagaatgctcctgtcccccgaccaaaaggtgctcaccatcacccgcgtgctcatggaggatgacgacctgtacagctgcatggtggagaaccccatcagccagggccgcagcctgcctgtcaagatcaccgtatacagaagaagctccctttacatcatcttgtctacaggaggcatcttcctccttgtgaccttggtgacagtctgtgcctgctggaaaccctccaaaaggaaacagaagaagctagaaaagcaaaactccctggaatacatggatcagaatgatgaccgcctgaaaccagaagcagacaccctccctcgaagtggtgagcaggaacggaagaaccccatggcactctatatcctgaaggacaaggactccccggagaccgaggagaacccggccccggagcctcgaagcgcgacggagcccggcccgcccggctactccgtgtctcccgccgtgcccggccgctcgccggggctgcccatccgctctgcccgccgctacccgcgctccccagcgcgctccccagccaccggccggacacactcgtcgccgcccagggccccgagctcgcccggccgctcgcgcagcgcctcgcgcacactgcggactgcgggcgtgcacataatccgcgagcaagacgaggccggcccggtggagatcagcgcctgagccgcctcgggatcccctgagaggcgcccgcggtctgcggccagtggcccgggggaaagctggggctgggaagcccgggcgcggcgcgctggggacgaggggaggtcccgggggggcgctggtgtctcgggtgtgaacgtgtatgagcatgcgcagacggaggcgggtgcgcggaggcggcagtgttgatatggtgaaaccgggtcgcatttgcttccggtttactggctgtgtcctcacttggtataggttgtgccctcttaggaccacatagattattacatttctggcccaatacccaaaagggttttatggaaactaacatcagtaacctaacccccgtgactatcctgtgctcttcctagggagctgtgttgtttcccacccaccacccttccctctgaacaaatgcctgagtgctggggcactttttttttttttttttttttttttttttttgcaagttcagattagagaggccactttcccagaatccacagctgcactaagctaaggagaagccagatgccggttactgggtgtgcaggggctgttctgagctggggggatcattgtgaaggccttcttccctgggcacctggtacctggggacctacaaggtggtgagggaagggtacgagtacattccttttccctctgacctgggcgctagcaagggcaaagaacccgagcctgccagcttggcctcctcccacagcctccctcggaggcatgccatgccaagcactctttctgtctctgttcatgaataaaagagatggatgggcttattcttatagagaagtgaatttcacttactcccctggcccgaaaactagaccaaatgaggaactgttttagctcatcaaactcatatattcctcctggcttccttacaaaacaagcctttcaaacaatcattgtcctcaggaaagttgttgagcttcctccagctgtgagaataagtcctaatctccagagaaatggtggggggaggaggaggcttattgcttcccagcatttggggggaacatgatccaacccctggcctcctgccacccatctgccctgctcccacatgctcaggtcccagggcacagaaaaagggcagactccctaatcacactaacatcaaaataaagaggctgggccgctgtgtagccaggacatgcccatgccaccgcctattgaacagttcataggagtggcagtaatctactgtgtgaggagagagggcaattaaaaagctgaaagagaaggaggccctctgtgtattccattccctcctccttaatgcctccaagggtccttgcatccctagtctcctaaactccagctctgattcgccatcaacccatggagcaattccaaggccccagttacccatcacctccacaccaggtcaagttttgtctcagccccaaaggcactgacatttctagtttgccccctctgccctgaaccccacagcatgcctgtctcagctccctgtccctcggcacttccccaggctcatttgagcaggtgtgccttcgcagctcccctaaacttcccaggtgcctcatccataatgagataatgcatgtaggggaaaagtttctcaagaaggtggaagaggcagcaggacttggataaggagtacctgctggtcagccttgagatgcacaggtgaaggttagggtgagatgagaacatgccataccctggtgctgaatccctgaggggccagcttgccaggcttaagccaaatctgccttaaattgggggtggggaggggtaagtaaggaagtggggtttgtttttgtgttgttttcatcttcatctttgtattactagcatccagcagagtgcctagcacatactggatgctcaataaacttttgatgaaatgaaatgacaactttattccacataaacaagggtaacaaaacaagctgcttaaata

SEQ ID NO: 140244 - DNA, 5547 bp, Homo sapiens
  Payload ID: 7514
  Gene Symbol: HLF
  Gene Name: hepatic leukemia factor
  Uniprot ID: Q16534
  ENST ID: ENST00000226067
  CDS Start-End: 474-1361
tgcggggccgcggagcgctggggagcagcggccgccggcgcggggaggggggtggggtgggacggcgcaccgcctccggtgctggcactaggggctggggtcggcgcggtgtcttctgcccttctgcagccgtcgacatttttttttctttctttttttcaattttgaacattttgcaaaacgaggggttcgaggcaggtgagagcatcctgcacgtcgccggggagcccgcgggcacttggcgcgctctcctgggaccgtctgcactggaaacccgaaagtttttttttaatatatatttttatgcagatgtatttataaagatataagtaatttttttcttcccttttctccaccgccttgagagcgagtacttttggcaaaggacggaggaaaagctcagcaacattttagggggcggttgtttctttcttatttctttttttaaggggaaaaaatttgagtgcatcgcgatggagaaaatgtcccgaccgctccccctgaatcccacctttatcccgcctccctacggcgtgctcaggtccctgctggagaacccgctgaagctcccccttcaccacgaagacgcatttagtaaagataaagacaaggaaaagaagctggatgatgagagtaacagcccgacggtcccccagtcggcattcctggggcctaccttatgggacaaaacccttccctatgacggagatactttccagttggaatacatggacctggaggagtttttgtcagaaaatggcattccccccagcccatctcagcatgaccacagccctcaccctcctgggctgcagccagcttcctcggctgccccctcggtcatggacctcagcagccgggcctctgcaccccttcaccctggcatcccatctccgaactgtatgcagagccccatcagaccaggtcagctgttgccagcaaaccgcaatacaccaagtcccattgatcctgacaccatccaggtcccagtgggttatgagccagacccagcagatcttgccctttccagcatccctggccaggaaatgtttgaccctcgcaaacgcaagttctctgaggaagaactgaagccacagcccatgatcaagaaagctcgcaaagtcttcatccctgatgacctgaaggatgacaagtactgggcaaggcgcagaaagaacaacatggcagccaagcgctcccgcgacgcccggaggctgaaagagaaccagatcgccatccgggcctcgttcctggagaaggagaactcggccctccgccaggaggtggctgacttgaggaaggagctgggcaaatgcaagaacatacttgccaagtatgaggccaggcacgggcccctgtaggatggcatttttgcaggctggctttggaatagatggacagtttgtttcctgtctgatagcaccacacgcaaaccaacctttctgacatcagcactttaccagaggcataaacacaactgactcccattttggtgtgcatctgtgtgtgtgtgcgtgtatatgtgcttgtgctcatgtgtgtggtcagcggtatgtgcgtgtgcgtgttcctttgctcttgccattttaaggtagccctctcatcgtcttttagttccaacaaagaaaggtgccatgtctttactagactgaggagccctctcgcgggtctcccatcccctccctccttcactcctgcctcctcagctttgcttcatgttcgagcttacctactcttccaggactctctgcttggattcactaaaaagggccctggtaaaatagtggatctcagtttttaagagtacaagctcttgtttctgtttagtccgtaagttaccatgctaatgaggtgcacacaataacttagcactactccgcagctctagtcctttataagttgctttcctcttactttcagttttggtgataatcgtcttcaaattaaagtgctgtttagatttattagatcccatatttacttactgctatctactaagtttccttttaattctaccaaccccagataagtaagagtactattaatagaacacagagtgtgtttttgcactgtctgtacctaaagcaataatcctattgtacgctagagcatgctgcctgagtattactagtggacgtaggatattttccctacctaagaatttcactgtcttttaaaaaacaaaaagtaaagtaatgcatttgagcatggccagactattccctaggacaaggaagcagagggaaatgggaggtctaaggatgaggggttaatttatcagtacatgagccaaaaactgcgtcttggattagcctttgacattgatgtgttcggttttgttgttccccttccctcacaccctgcctcgcccccacttttctagttaactttttccatatccctcttgacattcaaaacagttacttaagattcagttttcccactttttggtaatatatatatttttgtgaattatactttgttgtttttaaaaagaaaatcagttgattaagttaataagttgatgttttctaaggccctttttcctagtggtgtcatttttgaatgcctcataaattaatgattctgaagcttatgtttcttattctctgtttgcttttgaacgtatgtgctcttataaagtggacttctgaaaaatgaatgtaaaagacactggtgtatctcagaaggggatggtgttgtcacaaactgtggttaatccaatcaatttaaatgtttactatagaccaaaaggagagattattaaatcgtttaatgtttatacagagtaattataggaagttcttttttgtacagtatttttcagatataaatactgacaatgtattttggaagacatatattatatatagaaaagaggagaggaaaactattccatgttttaaaattatatagcaaagatatatattcaccaatgttgtacagagaagaagtgcttgggggtttttgaagtctttaatattttaagccctatcactgacacatcagcatgttttctgctttaaattaaaattttatgacagtatcgaggcttgtgatgacgaatcctgctctaaaatacacaaggagctttcttgtttcttattaggcctcagaaagaagtcagttaacgtcacccaaaagcacaaaatggattttagtcaaatatttattggatgatacagtgttttttaggaaaagcatctgccacaaaaatgttcacttcgaaattctgagttcctggaatggcacgttgctgccagtgccccagacagttcttttctaccctgcgggcccgcacgttttatgaggttgatatcggtgctatgtgtttggtttataatttgatagatgtttgactttaaagatgattgttcttttgtttcattaagttgtaaaatgtcaagaaattctgctgttacgacaaagaaacattttacgctagattaaaatatcctttcatcaatgggattttctagtttcctgccttcagagtatctaatcctttaatgatctggtggtctcctcgtcaatccatcagcaatgcttctctcatagtgtcatagacttgggaaacccaaccagtaggatatttctacaaggtgttcattttgtcacaagctgtagataacagcaagagatgggggtgtattggaattgcaatacattgttcaggtgaataataaaatcaaaaacttttgcaatcttaagcagagataaataaaagatagcaatatgagacacaggtggacgtagagttggcctttttacaggcaaagaggcgaattgtagaattgttagatggcaatagtcattaaaaacatagaaaaatgatgtctttaagtggagaattgtggaaggattgtaacatggaccatccaaatttatggccgtatcaaatggtagctgaaaaaactatatttgagcactggtctctcttggaattagatgtttatatcaaatgagcatctcaaatgttttctgcagaaaaaaataaaaagattctaataaaatgtattctcttgtgtgccaggagaggtttcagaaacctacctcgtcttacaaatttaaacactttggagtctgtacaggtgccttatatgtaggtcattgtcacgatacacacacacgaacactccctctggactggctgcctctccatccagggcagttaactagcaaacaaggcagatctgcttcatggagcgggaggccatggcttgactctgagtgatttgggtcaaccggagtcagacgcatgtctgcacgctgcagctattatgagagtccctttgtcatttttcaccttttcatcctaagcatctttcagagattaattatttggccattaacaatgaatccaaatcatatcatactgacatcatctagacatgatttggaaggaacagcttaggacctcctgatgaggtcacattgttgtttcttttaactagacttggcaaagaaaggcaaaaattgaccagcctatctttctgctggtgctgccttaaggaggtagtttgttgaggggagggctgtagatcattacttctttctcttcaggaagtggccactttgaaccattcaaataccacattaggcaagactgtgataggccttttgtcttcaaatacaacaggcctccactgacccatccctcaaagcagaaggaccctttgaggagagtacagatgggattccacagtggggtgggtggaatggaaacctgtactagaccacccagaggttccttctaacccactggtttggtggggaactcacagtaattccaaatgtacaatcagatgtctagggtctgttttcggaagaagcaagaattatcagtggcaccctccccactgcccccagtgtaaaacaatagacattctgtgaaatgcaaagctattctttggtttttctagtagtttatctcattttaccctattcttcctttaaggaaaactcaatctttatcacagtcaattagagcgatcccaaggcatgggaccaggcctgcttgcctatgtgtgatggcaattggagatctggatttagcactggggtctcagcaccctgcaggtgtctgagactaagtgatctgccctccaggtggcgatcaccttctgctcctaggtacccccactggcaaggccaaggtctcctccacgttttttctgcaattaataatgtcatttaaaaaatgagcaaagccttatccgaatcggatatagcaactaaagtcaatacattttgcaggaggctaagtgtaagagtgtgtgtgtgtgtgtgtgcgtgcatgtgtgtgtgtgtgtatgtgtgtgaataagtcgacataaagtctttaattttgagcaccttaccaaacataacaataatccattatccttttggcaacaccacaaagatcgcatctgttaaacaggtacaagttgacatgaggttagtttaattgtacaccatgatattggtggtatttatgctgttaagtccaaacctttatctgtctgttattcttaatgttgaataaactttgaattttttcctttc

SEQ ID NO: 140245 - DNA, 1385 bp, Homo sapiens
  Payload ID: 7514
  Gene Symbol: HLF
  Gene Name: hepatic leukemia factor
  Uniprot ID: Q16534
  ENST ID: ENST00000430986
  CDS Start-End: 218-850
acatttaaaagagcttcgggcacccggcctccctgggtcccgctcctgcggcgcgggtgggaggtgtaacttgacagcatttagtaaagataaagacaaggaaaagaagctggatgatgagagtaacagcccgacggtcccccagtcggcattcctggggcctaccttatgggacaaaacccttccctatgacggagatactttccagttggaatacatggacctggaggagtttttgtcagaaaatggcattccccccagcccatctcagcatgaccacagccctcaccctcctgggctgcagccagcttcctcggctgccccctcggtcatggacctcagcagccgggcctctgcaccccttcaccctggcatcccatctccgaactgtatgcagagccccatcagaccaggtcagctgttgccagcaaaccgcaatacaccaagtcccattgatcctgacaccatccaggtcccagtgggttatgagccagacccagcagatcttgccctttccagcatccctggccaggaaatgtttgaccctcgcaaacgcaagttctctgaggaagaactgaagccacagcccatgatcaagaaagctcgcaaagtcttcatccctgatgacctgaaggatgacaagtactgggcaaggcgcagaaagaacaacatggcagccaagcgctcccgcgacgcccggaggctgaaagagaaccagatcgccatccgggcctcgttcctggagaaggagaactcggccctccgccaggaggtggctgacttgaggaaggagctgggcaaatgcaagaacatacttgccaagtatgaggccaggcacgggcccctgtaggatggcatttttgcaggctggctttggaatagatggacagtttgtttcctgtctgatagcaccacacgcaaaccaacctttctgacatcagcactttaccagaggcataaacacaactgactcccattttggtgtgcatctgtgtgtgtgtgcgtgtatatgtgcttgtgctcatgtgtgtggtcagcggtatgtgcgtgtgcgtgttcctttgctcttgccattttaaggtagccctctcatcgtcttttagttccaacaaagaaaggtgccatgtctttactagactgaggagccctctcgcgggtctcccatcccctccctccttcactcctgcctcctcagctttgcttcatgttcgagcttacctactcttccaggactctctgcttggattcactaaaaagggccctggtaaaatagtggatctcagtttttaagagtacaagctcttgtttctgtttagtccgtaagttaccatgctaatgaggtgcacacaataacttagcactactccgcagctctagtcctttat

SEQ ID NO: 140246 - DNA, 1310 bp, Homo sapiens
  Payload ID: 7514
  Gene Symbol: HLF
  Gene Name: hepatic leukemia factor
  ENST ID: ENST00000570962
  CDS Start-End: 277-510
aaaagacagcagccagagaaggaccctgccattcgtgagaaatagtcttataacaggccaggaaaagtgataaaagagcggtattgtttttcttttctttctttttttttaagtccagctttcccttcttctgcagcatttagtaaagataaagacaaggaaaagaagctggatgatgagagtaacagcccgacggtcccccagtcggcattcctggggcctaccttatgggacaaaacccttccctatgacggagatactttccagttggaatacatggacctggaggagtttttgtcagaaaatggcattccccccagcccatctcagcatgaccacagccctcaccctcctgggctgcagccagcttcctcggctgccccctcggtcatggacctcagcagccgggcctctgcaccccttcaccctggcatcccatctccgaactgtatgcagagccccatcagaccagctgttgccagcaaaccgcaatacaccaagtcccattgatcctgacaccatccaggtcccagtgggttatgagccagacccagcagatcttgccctttccagcatccctggccaggaaatgtttgaccctcgcaaacgcaagttctctgaggaagaactgaagccacagcccatgatcaagaaagctcgcaaagtcttcatccctgatgacctgaaggatgacaagtactgggcaaggcgcagaaagaacaacatggcagccaagcgctcccgcgacgcccggaggctgaaagagaaccagatcgccatccgggcctcgttcctggagaaggagaactcggccctccgccaggaggtggctgacttgaggaaggagctgggcaaatgcaagaacatacttgccaagtatgaggccaggcacgggcccctgtaggatggcatttttgcaggctggctttggaatagatggacagtttgtttcctgtctgatagcaccacacgcaaaccaacctttctgacatcagcactttaccagaggcataaacacaactgactcccattttggtgtgcatctgtgtgtgtgtgcgtgtatatgtgcttgtgctcatgtgtgtggtcagcggtatgtgcgtgtgcgtgttcctttgctcttgccattttaaggtagccctctcatcgtcttttagttccaacaaagaaaggtgccatgtctttactagactgaggagccctctcgcgggtctcccatcccctccctccttcactcctgcctcctcagctttgcttcatgttcgagcttacctactcttccaggactctctgcttggattcactaaaaa

SEQ ID NO: 140247 - DNA, 2977 bp, Homo sapiens
  Payload ID: 7514
  Gene Symbol: HLF
  Gene Name: hepatic leukemia factor
  Uniprot ID: Q16534
  ENST ID: ENST00000573945
  CDS Start-End: 235-867
actttcccggtgcactttttctggtgggaggggagagcggagcaggctcacgtgtaaccgcgcaggagcctcctctggcttgagccctttcttgcatttagtaaagataaagacaaggaaaagaagctggatgatgagagtaacagcccgacggtcccccagtcggcattcctggggcctaccttatgggacaaaacccttccctatgacggagatactttccagttggaatacatggacctggaggagtttttgtcagaaaatggcattccccccagcccatctcagcatgaccacagccctcaccctcctgggctgcagccagcttcctcggctgccccctcggtcatggacctcagcagccgggcctctgcaccccttcaccctggcatcccatctccgaactgtatgcagagccccatcagaccaggtcagctgttgccagcaaaccgcaatacaccaagtcccattgatcctgacaccatccaggtcccagtgggttatgagccagacccagcagatcttgccctttccagcatccctggccaggaaatgtttgaccctcgcaaacgcaagttctctgaggaagaactgaagccacagcccatgatcaagaaagctcgcaaagtcttcatccctgatgacctgaaggatgacaagtactgggcaaggcgcagaaagaacaacatggcagccaagcgctcccgcgacgcccggaggctgaaagagaaccagatcgccatccgggcctcgttcctggagaaggagaactcggccctccgccaggaggtggctgacttgaggaaggagctgggcaaatgcaagaacatacttgccaagtatgaggccaggcacgggcccctgtaggatggcatttttgcaggctggctttggaatagatggacagtttgtttcctgtctgatagcaccacacgcaaaccaacctttctgacatcagcactttaccagaggcataaacacaactgactcccattttggtgtgcatctgtgtgtgtgtgcgtgtatatgtgcttgtgctcatgtgtgtggtcagcggtatgtgcgtgtgcgtgttcctttgctcttgccattttaaggtagccctctcatcgtcttttagttccaacaaagaaaggtgccatgtctttactagactgaggagccctctcgcgggtctcccatcccctccctccttcactcctgcctcctcagctttgcttcatgttcgagcttacctactcttccaggactctctgcttggattcactaaaaagggccctggtaaaatagtggatctcagtttttaagagtacaagctcttgtttctgtttagtccgtaagttaccatgctaatgaggtgcacacaataacttagcactactccgcagctctagtcctttataagttgctttcctcttactttcagttttggtgataatcgtcttcaaattaaagtgctgtttagatttattagatcccatatttacttactgctatctactaagtttccttttaattctaccaaccccagataagtaagagtactattaatagaacacagagtgtgtttttgcactgtctgtacctaaagcaataatcctattgtacgctagagcatgctgcctgagtattactagtggacgtaggatattttccctacctaagaatttcactgtcttttaaaaaacaaaaagtaaagtaatgcatttgagcatggccagactattccctaggacaaggaagcagagggaaatgggaggtctaaggatgaggggttaatttatcagtacatgagccaaaaactgcgtcttggattagcctttgacattgatgtgttcggttttgttgttccccttccctcacaccctgcctcgcccccacttttctagttaactttttccatatccctcttgacattcaaaacagttacttaagattcagttttcccactttttggtaatatatatatttttgtgaattatactttgttgtttttaaaaagaaaatcagttgattaagttaataagttgatgttttctaaggccctttttcctagtggtgtcatttttgaatgcctcataaattaatgattctgaagcttatgtttcttattctctgtttgcttttgaacgtatgtgctcttataaagtggacttctgaaaaatgaatgtaaaagacactggtgtatctcagaaggggatggtgttgtcacaaactgtggttaatccaatcaatttaaatgtttactatagaccaaaaggagagattattaaatcgtttaatgtttatacagagtaattataggaagttcttttttgtacagtatttttcagatataaatactgacaatgtattttggaagacatatattatatatagaaaagaggagaggaaaactattccatgttttaaaattatatagcaaagatatatattcaccaatgttgtacagagaagaagtgcttgggggtttttgaagtctttaatattttaagccctatcactgacacatcagcatgttttctgctttaaattaaaattttatgacagtatcgaggcttgtgatgacgaatcctgctctaaaatacacaaggagctttcttgtttcttattaggcctcagaaagaagtcagttaacgtcacccaaaagcacaaaatggattttagtcaaatatttattggatgatacagtgttttttaggaaaagcatctgccacaaaaatgttcacttcgaaattctgagttcctggaatggcacgttgctgccagtgccccagacagttcttttctaccctgcgggcccgcacgttttatgaggttgatatcggtgctatgtgtttggtttataatttgatagatgtttgactttaaagatgattgttcttttgtttcattaagttgtaaaatgtcaagaaattctgctgttacgacaaagaaacattttacgctagattaaaatatcctttcatcaatggga

SEQ ID NO: 140248 - DNA, 3589 bp, Homo sapiens
  Payload ID: 7514
  Gene Symbol: HLF
  Gene Name: hepatic leukemia factor
  Uniprot ID: Q16534
  ENST ID: ENST00000575345
  CDS Start-End: 301-933
ctgaacttttaactctagatctacaaaagacagcagccagagaaggaccctgccattcgtgagaaatagtcttataacaggccaggaaaagtgataaaagagcggtattgtttttcttttctttctttttttttaagtccagctttcccttcttctgcagcatttagtaaagataaagacaaggaaaagaagctggatgatgagagtaacagcccgacggtcccccagtcggcattcctggggcctaccttatgggacaaaacccttccctatgacggagatactttccagttggaatacatggacctggaggagtttttgtcagaaaatggcattccccccagcccatctcagcatgaccacagccctcaccctcctgggctgcagccagcttcctcggctgccccctcggtcatggacctcagcagccgggcctctgcaccccttcaccctggcatcccatctccgaactgtatgcagagccccatcagaccaggtcagctgttgccagcaaaccgcaatacaccaagtcccattgatcctgacaccatccaggtcccagtgggttatgagccagacccagcagatcttgccctttccagcatccctggccaggaaatgtttgaccctcgcaaacgcaagttctctgaggaagaactgaagccacagcccatgatcaagaaagctcgcaaagtcttcatccctgatgacctgaaggatgacaagtactgggcaaggcgcagaaagaacaacatggcagccaagcgctcccgcgacgcccggaggctgaaagagaaccagatcgccatccgggcctcgttcctggagaaggagaactcggccctccgccaggaggtggctgacttgaggaaggagctgggcaaatgcaagaacatacttgccaagtatgaggccaggcacgggcccctgtaggatggcatttttgcaggctggctttggaatagatggacagtttgtttcctgtctgatagcaccacacgcaaaccaacctttctgacatcagcactttaccagaggcataaacacaactgactcccattttggtgtgcatctgtgtgtgtgtgcgtgtatatgtgcttgtgctcatgtgtgtggtcagcggtatgtgcgtgtgcgtgttcctttgctcttgccattttaaggtagccctctcatcgtcttttagttccaacaaagaaaggtgccatgtctttactagactgaggagccctctcgcgggtctcccatcccctccctccttcactcctgcctcctcagctttgcttcatgttcgagcttacctactcttccaggactctctgcttggattcactaaaaagggccctggtaaaatagtggatctcagtttttaagagtacaagctcttgtttctgtttagtccgtaagttaccatgctaatgaggtgcacacaataacttagcactactccgcagctctagtcctttataagttgctttcctcttactttcagttttggtgataatcgtcttcaaattaaagtgctgtttagatttattagatcccatatttacttactgctatctactaagtttccttttaattctaccaaccccagataagtaagagtactattaatagaacacagagtgtgtttttgcactgtctgtacctaaagcaataatcctattgtacgctagagcatgctgcctgagtattactagtggacgtaggatattttccctacctaagaatttcactgtcttttaaaaaacaaaaagtaaagtaatgcatttgagcatggccagactattccctaggacaaggaagcagagggaaatgggaggtctaaggatgaggggttaatttatcagtacatgagccaaaaactgcgtcttggattagcctttgacattgatgtgttcggttttgttgttccccttccctcacaccctgcctcgcccccacttttctagttaactttttccatatccctcttgacattcaaaacagttacttaagattcagttttcccactttttggtaatatatatatttttgtgaattatactttgttgtttttaaaaagaaaatcagttgattaagttaataagttgatgttttctaaggccctttttcctagtggtgtcatttttgaatgcctcataaattaatgattctgaagcttatgtttcttattctctgtttgcttttgaacgtatgtgctcttataaagtggacttctgaaaaatgaatgtaaaagacactggtgtatctcagaaggggatggtgttgtcacaaactgtggttaatccaatcaatttaaatgtttactatagaccaaaaggagagattattaaatcgtttaatgtttatacagagtaattataggaagttcttttttgtacagtatttttcagatataaatactgacaatgtattttggaagacatatattatatatagaaaagaggagaggaaaactattccatgttttaaaattatatagcaaagatatatattcaccaatgttgtacagagaagaagtgcttgggggtttttgaagtctttaatattttaagccctatcactgacacatcagcatgttttctgctttaaattaaaattttatgacagtatcgaggcttgtgatgacgaatcctgctctaaaatacacaaggagctttcttgtttcttattaggcctcagaaagaagtcagttaacgtcacccaaaagcacaaaatggattttagtcaaatatttattggatgatacagtgttttttaggaaaagcatctgccacaaaaatgttcacttcgaaattctgagttcctggaatggcacgttgctgccagtgccccagacagttcttttctaccctgcgggcccgcacgttttatgaggttgatatcggtgctatgtgtttggtttataatttgatagatgtttgactttaaagatgattgttcttttgtttcattaagttgtaaaatgtcaagaaattctgctgttacgacaaagaaacattttacgctagattaaaatatcctttcatcaatgggattttctagtttcctgccttcagagtatctaatcctttaatgatctggtggtctcctcgtcaatccatcagcaatgcttctctcatagtgtcatagacttgggaaacccaaccagtaggatatttctacaaggtgttcattttgtcacaagctgtagataacagcaagagatgggggtgtattggaattgcaatacattgttcaggtgaataataaaatcaaaaacttttgcaatcttaagcagagataaataaaagatagcaatatgagacacaggtggacgtagagttggcctttttacaggcaaagaggcgaattgtagaattgttagatggcaatagtcattaaaaacatagaaaaatgatgtctttaagtggagaattgtggaaggattgtaacatggaccatccaaatttatggccgtatcaaatggtagctgaaaaaactatatttgagcactggtctctcttggaattagatgtttatatcaaatgagcatctcaaatgttttctgcagaaaaaaataaaaagattctaataaaatgta

SEQ ID NO: 140249 - DNA, 1251 bp, Homo sapiens
  Payload ID: 7514
  Gene Symbol: HLF
  Gene Name: hepatic leukemia factor
  ENST ID: ENST00000572002
  CDS Start-End: 1-711
cagtcggcattcctggggcctaccttatgggacaaaacccttccctatgacggagatactttccagttggaatacatggacctggaggagtttttgtcagaaaatggcattccccccagcccatctcagcatgaccacagccctcaccctcctgggctgcagccagcttcctcggctgccccctcggtcatggacctcagcagccgggcctctgcaccccttcaccctggcatcccatctccgaactgtatgcagagccccatcagaccaggtcagctgttgccagcaaaccgcaatacaccaagtcccattgatcctgacaccatccaggtcccagtgggttatgagccagacccagcagatcttgccctttccagcatccctggccaggaaatgtttgaccctcgcaaacgcaagttctctgaggaagaactgaagccacagcccatgatcaagaaagctcgcaaagtcttcatccctgatgacctgaagcaggatgacaagtactgggcaaggcgcagaaagaacaacatggcagccaagcgctcccgcgacgcccggaggctgaaagagaaccagatcgccatccgggcctcgttcctggagaaggagaactcggccctccgccaggaggtggctgacttgaggaaggagctgggcaaatgcaagaacatacttgccaagtatgaggccaggcacgggcccctgtaggatggcatttttgcaggctggctttggaatagatggacagtttgtttcctgtctgatagcaccacacgcaaaccaacctttctgacatcagcactttaccagaggcataaacacaactgactcccattttggtgtgcatctgtgtgtgtgtgcgtgtatatgtgcttgtgctcatgtgtgtggtcagcggtatgtgcgtgtgcgtgttcctttgctcttgccattttaaggtagccctctcatcgtcttttagttccaacaaagaaaggtgccatgtctttactagactgaggagccctctcgcgggtctcccatcccctccctccttcactcctgcctcctcagctttgcttcatgttcgagcttacctactcttccaggactctctgcttggattcactaaaaagggccctggtaaaatagtggatctcagtttttaagagtacaagctcttgtttctgtttagtccgtaagttaccatgctaatgaggtgcacacaataacttagcactactccgcagctctagtcctttataagtt

SEQ ID NO: 140250 - DNA, 1845 bp, Homo sapiens
  Payload ID: 7515
  Gene Symbol: HAVCR1
  Gene Name: hepatitis A virus cellular receptor 1
  Uniprot ID: Q96D42
  ENST ID: ENST00000339252
  CDS Start-End: 534-1628
attctcctgcctcagcctcccgagtagctgggactacaggcgccagtgaccacgcccggctaattttttgtatttttagtagagacggggtttcacccttttagccaggatggtctcgatctcctgacttcgtgatctgcccgccttggcctcccaaagtgctaggattacaggtttgagccaccgcgcccggccctgtttcctttttgtttgttcccctgataccctgtatcaggaccaggagtcagtttggcggttatgtgtggggaagaagctgggaagtcaggggctgtttctgtggacagctttccctgtcctttggaaggcacagagctctcagctgcagggaactaacagagctctgaagccgttatatgtggtcttctctcatttccagcagagcaggctcatatgaatcaaccaactgggtgaaaagataagttgcaatctgagatttaagacttgatcagataccatctggtggagggtaccaaccagcctgtctgctcattttccttcaggctgatcccataatgcatcctcaagtggtcatcttaagcctcatcctacatctggcagattctgtagctggttctgtaaaggttggtggagaggcaggtccatctgtcacactaccctgccactacagtggagctgtcacatccatgtgctggaatagaggctcatgttctctattcacatgccaaaatggcattgtctggaccaatggaacccacgtcacctatcggaaggacacacgctataagctattgggggacctttcaagaagggatgtctctttgaccatagaaaatacagctgtgtctgacagtggcgtatattgttgccgtgttgagcaccgtgggtggttcaatgacatgaaaatcaccgtatcattggagattgtgccacccaaggtcacgactactccaattgtcacaactgttccaaccgtcacgactgttcgaacgagcaccactgttccaacgacaacgactgttccaatgacgactgttccaacgacaactgttccaacaacaatgagcattccaacgacaacgactgttctgacgacaatgactgtttcaacgacaacgagcgttccaacgacaacgagcattccaacaacaacaagtgttccagtgacaacaactgtctctacctttgttcctccaatgcctttgcccaggcagaaccatgaaccagtagccacttcaccatcttcacctcagccagcagaaacccaccctacgacactgcagggagcaataaggagagaacccaccagctcaccattgtactcttacacaacagatgggaatgacaccgtgacagagtcttcagatggcctttggaataacaatcaaactcaactgttcctagaacatagtctactgacggccaataccactaaaggaatctatgctggagtctgtatttctgtcttggtgcttcttgctcttttgggtgtcatcattgccaaaaagtatttcttcaaaaaggaggttcaacaactaagtgtttcatttagcagccttcaaattaaagctttgcaaaatgcagttgaaaaggaagtccaagcagaagacaatatctacattgagaatagtctttatgccacggactaagacccagtggtgctctttgagagtttacgcccatgagtgcagaagactgaacagacatcagcacatcagacgtcttttagaccccaagacaatttttctgtttcagtttcatctggcattccaacatgtcagtgatactgggtagagtaactctctcactccaaactgtgtatagtcaacctcatcattaatgtagtcctaattttttatgctaaaa

SEQ ID NO: 140251 - DNA, 1449 bp, Homo sapiens
  Payload ID: 7515
  Gene Symbol: HAVCR1
  Gene Name: hepatitis A virus cellular receptor 1
  Uniprot ID: Q96D42
  ENST ID: ENST00000523175
  CDS Start-End: 48-1142
cccagcattgtgagtgacagagcctggatctgaacgctgatcccataatgcatcctcaagtggtcatcttaagcctcatcctacatctggcagattctgtagctggttctgtaaaggttggtggagaggcaggtccatctgtcacactaccctgccactacagtggagctgtcacatccatgtgctggaatagaggctcatgttctctattcacatgccaaaatggcattgtctggaccaatggaacccacgtcacctatcggaaggacacacgctataagctattgggggacctttcaagaagggatgtctctttgaccatagaaaatacagctgtgtctgacagtggcgtatattgttgccgtgttgagcaccgtgggtggttcaatgacatgaaaatcaccgtatcattggagattgtgccacccaaggtcacgactactccaattgtcacaactgttccaaccgtcacgactgttcgaacgagcaccactgttccaacgacaacgactgttccaatgacgactgttccaacgacaactgttccaacaacaatgagcattccaacgacaacgactgttctgacgacaatgactgtttcaacgacaacgagcgttccaacgacaacgagcattccaacaacaacaagtgttccagtgacaacaactgtctctacctttgttcctccaatgcctttgcccaggcagaaccatgaaccagtagccacttcaccatcttcacctcagccagcagaaacccaccctacgacactgcagggagcaataaggagagaacccaccagctcaccattgtactcttacacaacagatgggaatgacaccgtgacagagtcttcagatggcctttggaataacaatcaaactcaactgttcctagaacatagtctactgacggccaataccactaaaggaatctatgctggagtctgtatttctgtcttggtgcttcttgctcttttgggtgtcatcattgccaaaaagtatttcttcaaaaaggaggttcaacaactaagtgtttcatttagcagccttcaaattaaagctttgcaaaatgcagttgaaaaggaagtccaagcagaagacaatatctacattgagaatagtctttatgccacggactaagacccagtggtgctctttgagagtttacgcccatgagtgcagaagactgaacagacatcagcacatcagacgtcttttagaccccaagacaatttttctgtttcagtttcatctggcattccaacatgtcagtgatactgggtagagtaactctctcactccaaactgtgtatagtcaacctcatcattaatgtagtcctaattttttatgctaaaactggctcaatccttctgatcattgcagttttctctcaaatatgaacactttataattgtatgttctttttagaccccataaatcctgtat

SEQ ID NO: 140252 - DNA, 774 bp, Homo sapiens
  Payload ID: 7515
  Gene Symbol: HAVCR1
  Gene Name: hepatitis A virus cellular receptor 1
  ENST ID: ENST00000518745
  CDS Start-End: 106-774
agagacggggtttcacccttttagccaggatggtctcgatctcctgacttcgtgatctgcccgccttggcctcccaaagtgctaggattacaggctgatcccataatgcatcctcaagtggtcatcttaagcctcatcctacatctggcagattctgtagctggttctgtaaaggttggtggagaggcaggtccatctgtcacactaccctgccactacagtggagctgtcacatccatgtgctggaatagaggctcatgttctctattcacatgccaaaatggcattgtctggaccaatggaacccacgtcacctatcggaaggacacacgctataagctattgggggacctttcaagaagggatgtctctttgaccatagaaaatacagctgtgtctgacagtggcgtatattgttgccgtgttgagcaccgtgggtggttcaatgacatgaaaatcaccgtatcattggagattgtgccacccaaggtcacgactactccaattgtcacaactgttccaaccgtcacgactgttcgaacgagcaccactgttccaacgacaacgactgttccaatgacgactgttccaacgacaactgttccaacaacaatgagcattccaacgacaacgactgttctgacgacaatgactgtttcaacgacaacgagcgttccaacgacaacgagcattccaacaacaacaagtgttccagtgacaacaactgtctctacctttgttcctccaatgcctttgcccaggcagaaccatgaa

SEQ ID NO: 140253 - DNA, 1713 bp, Homo sapiens
  Payload ID: 7515
  Gene Symbol: HAVCR1
  Gene Name: hepatitis A virus cellular receptor 1
  ENST ID: ENST00000522693
  CDS Start-End: 333-1538
agtgctattactgcatatgatgtaggtttagttttccaagttcttccgtggccctttttgcttattatatcaatccttggtgggagatagaggaagcatttttagtgctattttacaactgaggaaatagaggtttgaagagaactcaggaactctcagggttacccagcattgtgagtgacagagcctggatctgaacagcaggctcatatgaatcaaccaactgggtgaaaagataagttgcaatctgagatttaagacttgatcagataccatctggtggagggtaccaaccagcctgtctgctcattttccttcaggctgatcccataatgcatcctcaagtggtcatcttaagcctcatcctacatctggcagattctgtagctggttctgtaaaggttggtggagaggcaggtccatctgtcacactaccctgccactacagtggagctgtcacatccatgtgctggaatagaggctcatgttctctattcacatgccaaaatggcattgtctggaccaatggaacccacgtcacctatcggaaggacacacgctataagctattgggggacctttcaagaagggatgtctctttgaccatagaaaatacagctgtgtctgacagtggcgtatattgttgccgtgttgagcaccgtgggtggttcaatgacatgaaaatcaccgtatcattggagattgtgccacccaaggtcacgactactccaattgtcacaactgttccaaccgtcacgactgttcgaacgagcaccactgttccaacgacaacgactgttccaatgacgactgttccaacgacaactgttccaacaacaatgagcattccaacgacaacgactgttctgacgacaatgactgtttcaacgacaacgagcgttccaacgacaacgagcattccaacaacaacaagtgttccagtgacaacaactgtctctacctttgttcctccaatgcctttgcccaggcagaaccatgaaccagtagccacttcaccatcttcacctcagccagcagaaacccaccctacgacactgcagggagcaataaggagagaacccaccagctcaccattgtactcttacacaacagatgggaatgacaccgtgacagagtcttcagatggcctttggaataacaatcaaactcaactgttcctagaacatagtctactgacggccaataccactaaaggaatctatgctggagtctgtatttctgtcttggtgcttcttgctcttttgggtgtcatcattgccaaaatgtttcatttagcagccttcaaattaaagctttgcaaaatgcagttgaaaaggaagtccaagcagaagacaatatctacattgagaatagtctttatgccacggactaagacccagtggtgctctttgagagtttacgcccatgagtgcagaagactgaacagacatcagcacatcagacgtcttttagaccccaagacaatttttctgtttcagtttcatctggcattccaacatgtcagtgatactgggtagagtaactctctcactccaaactgtgtatagtcaacctcatcattaatgtagtcctaattttttatgctaaaactggctcaatccttctgatcattgcagttttctctcaaatatgaacactttataattgtatgttctttttagaccccataaatcctgtatacatcaaagagaa

SEQ ID NO: 140254 - DNA, 1807 bp, Homo sapiens
  Payload ID: 7515
  Gene Symbol: HAVCR1
  Gene Name: hepatitis A virus cellular receptor 1
  ENST ID: ENST00000625904
  CDS Start-End: 534-1739
attctcctgcctcagcctcccgagtagctgggactacaggcgccagtgaccacgcccggctaattttttgtatttttagtagagacggggtttcacccttttagccaggatggtctcgatctcctgacttcgtgatctgcccgccttggcctcccaaagtgctaggattacaggtttgagccaccgcgcccggccctgtttcctttttgtttgttcccctgataccctgtatcaggaccaggagtcagtttggcggttatgtgtggggaagaagctgggaagtcaggggctgtttctgtggacagctttccctgtcctttggaaggcacagagctctcagctgcagggaactaacagagctctgaagccgttatatgtggtcttctctcatttccagcagagcaggctcatatgaatcaaccaactgggtgaaaagataagttgcaatctgagatttaagacttgatcagataccatctggtggagggtaccaaccagcctgtctgctcattttccttcaggctgatcccataatgcatcctcaagtggtcatcttaagcctcatcctacatctggcagattctgtagctggttctgtaaaggttggtggagaggcaggtccatctgtcacactaccctgccactacagtggagctgtcacatccatgtgctggaatagaggctcatgttctctattcacatgccaaaatggcattgtctggaccaatggaacccacgtcacctatcggaaggacacacgctataagctattgggggacctttcaagaagggatgtctctttgaccatagaaaatacagctgtgtctgacagtggcgtatattgttgccgtgttgagcaccgtgggtggttcaatgacatgaaaatcaccgtatcattggagattgtgccacccaaggtcacgactactccaattgtcacaactgttccaaccgtcacgactgttcgaacgagcaccactgttccaacgacaacgactgttccaatgacgactgttccaacgacaactgttccaacaacaatgagcattccaacgacaacgactgttctgacgacaatgactgtttcaacgacaacgagcgttccaacgacaacgagcattccaacaacaacaagtgttccagtgacaacaactgtctctacctttgttcctccaatgcctttgcccaggcagaaccatgaaccagtagccacttcaccatcttcacctcagccagcagaaacccaccctacgacactgcagggagcaataaggagagaacccaccagctcaccattgtactcttacacaacagatgggaatgacaccgtgacagagtcttcagatggcctttggaataacaatcaaactcaactgttcctagaacatagtctactgacggccaataccactaaaggaatctatgctggagtctgtatttctgtcttggtgcttcttgctcttttgggtgtcatcattgccaaaatgtttcatttagcagccttcaaattaaagctttgcaaaatgcagttgaaaaggaagtccaagcagaagacaatatctacattgagaatagtctttatgccacggactaagacccagtggtgctctttgagagtttacgcccatgagtgcagaagactgaacagacatcagcacatcagacgtcttttagaccccaagacaatttttctgtttcagtttcatctggcattccaacatgtcagtgatactgggtagagtaactctctcactccaaactgtgtatagtcaacctcatcattaatgtagtcctaattttttatgct

SEQ ID NO: 140255 - DNA, 2907 bp, Homo sapiens
  Payload ID: 7516
  Gene Symbol: HAVCR2
  Gene Name: hepatitis A virus cellular receptor 2
  Uniprot ID: Q8TDQ0
  ENST ID: ENST00000307851
  CDS Start-End: 732-1637
agaatattagaacagagagccatgcatgtattatctaatacaattttctcattttataaattatataaatgaggaaactgagactcagcaaggttataggatacaacctaatctgtgttagaagaaggatgagagtgaggcttatgctgggagttgctatggtctgtaaatgtgaggataaggaacatgccattcactgttgtgttccacttcctagtccagtgcctggtgcaaagtaggggcttcataaactttggtcacaggcctgatgaagggactgatttgagtgaatgaatccatggatgatgcatctgtactttgtgttccccgctagtcagatggactcggacatgctccatttcaggtgtatctcatctgagacattattagagggttctctttatgtgccatgactgagtagcgttttcttccactgaagtattgcttcctctttgttgatatcacaggacagacatcagaacacttacaggatgtgtgtagtgtggcatgacagagaactttggtttcctttaatgtgactgtagacctggcagtgttactataagaatcactggcaatcagacacccgggtgtgctgagctagcactcagtgggggcggctactgctcatgtgattgtggagtagacagttggaagaagtacccagtccatttggagagttaaaactgtgcctaacagaggtgtcctctgacttttcttctgcaagctccatgttttcacatcttccctttgactgtgtcctgctgctgctgctgctactacttacaaggtcctcagaagtggaatacagagcggaggtcggtcagaatgcctatctgccctgcttctacaccccagccgccccagggaacctcgtgcccgtctgctggggcaaaggagcctgtcctgtgtttgaatgtggcaacgtggtgctcaggactgatgaaagggatgtgaattattggacatccagatactggctaaatggggatttccgcaaaggagatgtgtccctgaccatagagaatgtgactctagcagacagtgggatctactgctgccggatccaaatcccaggcataatgaatgatgaaaaatttaacctgaagttggtcatcaaaccagccaaggtcacccctgcaccgactcggcagagagacttcactgcagcctttccaaggatgcttaccaccaggggacatggcccagcagagacacagacactggggagcctccctgatataaatctaacacaaatatccacattggccaatgagttacgggactctagattggccaatgacttacgggactctggagcaaccatcagaataggcatctacatcggagcagggatctgtgctgggctggctctggctcttatcttcggcgctttaattttcaaatggtattctcatagcaaagagaagatacagaatttaagcctcatctctttggccaacctccctccctcaggattggcaaatgcagtagcagagggaattcgctcagaagaaaacatctataccattgaagagaacgtatatgaagtggaggagcccaatgagtattattgctatgtcagcagcaggcagcaaccctcacaacctttgggttgtcgctttgcaatgccatagatccaaccaccttatttttgagcttggtgttttgtctttttcagaaactatgagctgtgtcacctgactggttttggaggttctgtccactgctatggagcagagttttcccattttcagaagataatgactcacatgggaattgaactgggacctgcactgaacttaaacaggcatgtcattgcctctgtatttaagccaacagagttacccaacccagagactgttaatcatggatgttagagctcaaacgggcttttatatacactaggaattcttgacgtggggtctctggagctccaggaaattcgggcacatcatatgtccatgaaacttcagataaactagggaaaactgggtgctgaggtgaaagcataacttttttggcacagaaagtctaaaggggccactgattttcaaagagatctgtgatccctttttgttttttgtttttgagatggagtcttgctctgttgcccaggctggagtgcaatggcacaatctcggctcactgcaagctccgcctcctgggttcaagcgattctcctgcctcagcctcctgagtggctgggattacaggcatgcaccaccatgcccagctaatttgttgtatttttagtagagacagggtttcaccatgttggccagtgtggtctcaaactcctgacctcatgatttgcctgcctcggcctcccaaagcactgggattacaggcgtgagccaccacatccagccagtgatccttaaaagattaagagatgactggaccaggtctaccttgatcttgaagattcccttggaatgttgagatttaggcttatttgagcactgcctgcccaactgtcagtgccagtgcatagcccttcttttgtctcccttatgaagactgccctgcagggctgagatgtggcaggagctcccagggaaaaacgaagtgcatttgattggtgtgtattggccaagttttgcttgttgtgtgcttgaaagaaaatatctctgaccaacttctgtattcgtggaccaaactgaagctatatttttcacagaagaagaagcagtgacggggacacaaattctgttgcctggtggaaagaaggcaaaggccttcagcaatctatattaccagcgctggatcctttgacagagagtggtccctaaacttaaatttcaagacggtataggcttgatctgtcttgcttattgttgccccctgcgcctagcacaattctgacacacaattggaacttactaaaaatttttttttactgtt

SEQ ID NO: 140256 - DNA, 566 bp, Homo sapiens
  Payload ID: 7516
  Gene Symbol: HAVCR2
  Gene Name: hepatitis A virus cellular receptor 2
  ENST ID: ENST00000524219
  CDS Start-End: 344-566
gtttcggctgcagaggggaaggcggctaccagtgtaaagccagagctgagggtcctcagaagtggaatacagagcggaggtcggtcagaatgcctatctgccctgcttctacaccccagccgccccagggaacctcgtgcccgtctgctggggcaaaggagcctgtcctgtgtttgaatgtggcaacgtggtgctcaggactgatgaaagggatgtgaattattggacatccagatactggctaaatggggatttccgcaaaggagatgtgtccctgaccatagagaatgtgactctagcagacagtgggatctactgctgccggatccaaatcccaggcataatgaatgatgaaaaatttaacctgaagttggtcatcaaaccagccaaggtcacccctgcaccgactcggcagagagacttcactgcagcctttccaaggatgcttaccaccaggggacatggcccagcagagacacagacactggggagcctccctgatataaatctaacacaaatatccacattggccaatgagttacgggactctagattggccaatgact

SEQ ID NO: 140257 - DNA, 975 bp, Homo sapiens
  Payload ID: 7516
  Gene Symbol: HAVCR2
  Gene Name: hepatitis A virus cellular receptor 2
  ENST ID: ENST00000522593
  CDS Start-End: 140-961
gtgctgagctagcactcagtgggggcggctactgctcatgtgattgtggagtagacagttggaagaagtacccagtccatttggagagttaaaactgtgcctaacagaggtgtcctctgacttttcttctgcaagctccatgttttcacatcttccctttgactgtgtcctgctgctgctgctgctactacttacaaggtcctcagaagtggaatacagagcggaggtcggtcagaatgcctatctgccctgcttctacaccccagccgccccagggaacctcgtgcccgtctgctggggcaaaggagcctgtcctgtgtttgaatgtggcaacgtggtgctcaggactgatgaaagggatgtgaattattggacatccagatactggctaaatggggatttccgcaaaggagatgtgtccctgaccatagagaatgtgactctagcagacagtgggatctactgctgccggatccaaatcccaggcataatgaatgatgaaaaatttaacctgaagttggtcatcaaaccagcagagacacagacactggggagcctccctgatataaatctaacacaaatatccacattggccaatgagttacgggactctagattggccaatgacttacgggactctggagcaaccatcagaataggcatctacatcggagcagggatctgtgctgggctggctctggctcttatcttcggcgctttaattttcaaatggtattctcatagcaaagagaagatacagaatttaagcctcatctctttggccaacctccctccctcaggattggcaaatgcagtagcagagggaattcgctcagaagaaaacatctataccattgaagagaacgtatatgaagtggaggagcccaatgagtattattgctatgtcagcagcaggcagcaaccctcacaacctttgggttgtcgctttgcaatgccatagatccaaccacctta

SEQ ID NO: 140258 - DNA, 1434 bp, Homo sapiens
  Payload ID: 7517
  Gene Symbol: HEPN1
  Gene Name: hepatocellular carcinoma, down-regulated 1
  Uniprot ID: Q6WQI6
  ENST ID: ENST00000408930
  CDS Start-End: 508-774
tttcatttcatcaaaagtttattgagcatccagtatgtgctaggcactctgctggatgctagtaatacaaagatgaagatgaaaacaacacaaaaacaaaccccacttccttacttacccctccccacccccaatttaaggcagatttggcttaagcctggcaagctggcccctcagggattcagcaccagggtatggcatgttctcatctcaccctaaccttcacctgtgcatctcaaggctgaccagcaggtactccttatccaagtcctgctgcctcttccaccttcttgagaaacttttcccctacatgcattatctcattatggatgaggcacctgggaagtttaggggagctgcgaaggcacacctgctcaaatgagcctggggaagtgccgagggacagggagctgagacaggcatgctgtggggttcagggcagagggggcaaactagaaatgtcagtgcctttggggctgagacaaaacttgacctggtgtggaggtgatgggtaactggggccttggaattgctccatgggttgatggcgaatcagagctggagtttaggagactagggatgcaaggacccttggaggcattaaggaggagggaatggaatacacagagggcctccttctctttcagctttttaattgccctctctcctcacacagtagattactgccactcctatgaactgttcaataggcggtggcatgggcatgtcctggctacacagcggcccagcctctttattttgatgttagtgtgattagggagtctgccctttttctgtgccctgggacctgagcatgtgggagcagggcagatgggtggcaggaggccaggggttggatcatgttccccccaaatgctgggaagcaataagcctcctcctccccccaccatttctctggagattaggacttattctcacagctggaggaagctcaacaactttcctgaggacaatgattgtttgaaaggcttgttttgtaaggaagccaggaggaatatatgagtttgatgagctaaaacagttcctcatttggtctagttttcgggccaggggagtaagtgaaattcacttctctataagaataagcccatccatctcttttattcatgaacagagacagaaagagtgcttggcatggcatgcctccgagggaggctgtgggaggaggccaagctggcaggctcgggttctttgcccttgctagcgcccaggtcagagggaaaaggaatgtactcgtacccttccctcaccaccttgtaggtccccaggtaccaggtgcccagggaagaaggccttcacaatgatccccccagctcagaacagcccctgcacacccagtaaccggcatctggcttctccttagcttagtgcagctgtggattctgggaaagtggcctctctaatctgaacttg

SEQ ID NO: 140259 - DNA, 5989 bp, Homo sapiens
  Payload ID: 7518
  Gene Symbol: HGF
  Gene Name: hepatocyte growth factor (hepapoietin A
  scatter factor)
  Uniprot ID: P14210
  ENST ID: ENST00000222390
  CDS Start-End: 228-2414
gaggaaaggagggggctggaagagagtaaagggctgttgttaaacagtttcttaccgtaagagggagttcagacctagatctttccagttaatcacacaacaaacttagctcatcgcaataaaaagcagctcagagccgactggctcttttaggcactgactccgaacaggattctttcacccaggcatctcctccagagggatccgccagcccgtccagcagcaccatgtgggtgaccaaactcctgccagccctgctgctgcagcatgtcctcctgcatctcctcctgctccccatcgccatcccctatgcagagggacaaaggaaaagaagaaatacaattcatgaattcaaaaaatcagcaaagactaccctaatcaaaatagatccagcactgaagataaaaaccaaaaaagtgaatactgcagaccaatgtgctaatagatgtactaggaataaaggacttccattcacttgcaaggcttttgtttttgataaagcaagaaaacaatgcctctggttccccttcaatagcatgtcaagtggagtgaaaaaagaatttggccatgaatttgacctctatgaaaacaaagactacattagaaactgcatcattggtaaaggacgcagctacaagggaacagtatctatcactaagagtggcatcaaatgtcagccctggagttccatgataccacacgaacacagctttttgccttcgagctatcggggtaaagacctacaggaaaactactgtcgaaatcctcgaggggaagaagggggaccctggtgtttcacaagcaatccagaggtacgctacgaagtctgtgacattcctcagtgttcagaagttgaatgcatgacctgcaatggggagagttatcgaggtctcatggatcatacagaatcaggcaagatttgtcagcgctgggatcatcagacaccacaccggcacaaattcttgcctgaaagatatcccgacaagggctttgatgataattattgccgcaatcccgatggccagccgaggccatggtgctatactcttgaccctcacacccgctgggagtactgtgcaattaaaacatgcgctgacaatactatgaatgacactgatgttcctttggaaacaactgaatgcatccaaggtcaaggagaaggctacaggggcactgtcaataccatttggaatggaattccatgtcagcgttgggattctcagtatcctcacgagcatgacatgactcctgaaaatttcaagtgcaaggacctacgagaaaattactgccgaaatccagatgggtctgaatcaccctggtgttttaccactgatccaaacatccgagttggctactgctcccaaattccaaactgtgatatgtcacatggacaagattgttatcgtgggaatggcaaaaattatatgggcaacttatcccaaacaagatctggactaacatgttcaatgtgggacaagaacatggaagacttacatcgtcatatcttctgggaaccagatgcaagtaagctgaatgagaattactgccgaaatccagatgatgatgctcatggaccctggtgctacacgggaaatccactcattccttgggattattgccctatttctcgttgtgaaggtgataccacacctacaatagtcaatttagaccatcccgtaatatcttgtgccaaaacgaaacaattgcgagttgtaaatgggattccaacacgaacaaacataggatggatggttagtttgagatacagaaataaacatatctgcggaggatcattgataaaggagagttgggttcttactgcacgacagtgtttcccttctcgagacttgaaagattatgaagcttggcttggaattcatgatgtccacggaagaggagatgagaaatgcaaacaggttctcaatgtttcccagctggtatatggccctgaaggatcagatctggttttaatgaagcttgccaggcctgctgtcctggatgattttgttagtacgattgatttacctaattatggatgcacaattcctgaaaagaccagttgcagtgtttatggctggggctacactggattgatcaactatgatggcctattacgagtggcacatctctatataatgggaaatgagaaatgcagccagcatcatcgagggaaggtgactctgaatgagtctgaaatatgtgctggggctgaaaagattggatcaggaccatgtgagggggattatggtggcccacttgtttgtgagcaacataaaatgagaatggttcttggtgtcattgttcctggtcgtggatgtgccattccaaatcgtcctggtatttttgtccgagtagcatattatgcaaaatggatacacaaaattattttaacatataaggtaccacagtcatagctgaagtaagtgtgtctgaagcacccaccaatacaactgtcttttacatgaagatttcagagaatgtggaatttaaaatgtcacttacaacaatcctaagacaactactggagagtcatgtttgttgaaattctcattaatgtttatgggtgttttctgttgttttgtttgtcagtgttattttgtcaatgttgaagtgaattaaggtacatgcaagtgtaataacatatctcctgaagatacttgaatggattaaaaaaacacacaggtatatttgctggatgataaagatttcatgggaaaaaaaatcaattaatctgtctaagctgctttctgatgttggtttcttaataatgagtaaaccacaaattaaatgttattttaacctcaccaaaacaatttataccttgtgtccctaaattgtagccctatattaaattatattacatttcatatgctatatgttatagttcattcatttctcttcaccatgtatcctgcaatactggtacacgaacacactttttacaaaaccacatacccatgtacacatgcctaggtacacatgtgcatgcactacagtttaaattatggtgtacctaatgtaacccctaaatattttagaagtatgtacctatagttttacctcaaaaaaaccagaaatctctaaagaccagtagaaatattaaaaaatgatgcaagatcaaaatgattagctaattctccatacataatctgcagatgatcttctttggttggcatttcaggtgtggccatcacccagagttaaataacacctaatctaggtgtttacatgtattcattatcctagttatttcatgtagtttctaattcttaaaggaaagagggtaatagttctatttgtgtaatttgtttcctccaaacttaaggccacttatttacacaagatatttgtagatctattttcctaaagcatttcttaagtgctcagatcagtatctaattgaagaagtttaaaagtgttttggtcattaaaaatgtacttaaataggttaaatctaagccttgctgctgtgattggcttctagctcactgcctttaaattttaaaaaatttaagaggaaaatttccaagtctccaaagttttataaatacccttcatcaagtcatgcattaaagtatatattggagaaaaaaataaaaatacttttctcaacctggaagattttagcctaataaagcttttttgaagtaaaagacaacttgtaaaaggaaagaaactagtttgtctcaactctgtattcatttattttttttttgaagtagagtggaatctgttgaatcagatattttatcaagatatgtttattttttcttatttcattttacaaagttcactcctaatgccatatgtaacagacatttaaattttgtgttctgtataacagccaaattatcatatttatcattgtatttgtcatgcttagctaaagatcatgtatttgttgagaaatagaataacaaaaagtaataggataggctttgaatttttgcagaaatcttcctgtacaaaacacctttaaaaataattttttgaatggtgtgaatccagtagtcccatttctctgacttagttttcttgagtgatttttatcaaggccaagtccccaaacaattccctaccagctctttagagtactgttcaatctggactaaaatggttttaagtttatggagagcttagtccacagaatatagggcggcgagtccagaaatgcttatacaatttttttttcataataagatatgtgctggcatcaagaaacttaaagtggaagcaaaaagacatccaactagttgctggtctctatcatcttatctgatggtatttctattttccttatataatacaccattttagtaagaactcctagaaatttcaagagcatattgccaaaatataaagtatatttcatagtttcttctggctgaaccagtgaaattttattattgcatattaatgatatttgtaaaacttttataaaaattgtcataattttaaatactcacattttaaaaatacttctttaatgactcttcctctaaatttcctggaaatacagataaagattagctagatacaagatacagctaagtatttagacattttgaggctagtatttttcattttattaaaggctaaaaacaataccaccaataaatcatcaaacaaaccgtacaaagtaattctctctttgggaggctcctttcgtgatagagggacatgggtggaattgacaatgaaacttagatgaacaaggtccatgttattttaggtggtagaacagggtagagtcatgtcattatttgctggtggaagacactatttaccaggtgttctttgctgaataaatcattaaacatttttaaaaatccaacaatccactttattttgtgtcattgacaaaaggatcttttaaatcagaaggtttcaatgcaatttttggtttggctgtttgaataatggttatgtactgttataattgtagacattttctcacgtctaccaggaattgaagtgtaaaactaaaatatttttcataatgcctctgccgtgcagaaggaatgataatccttttgtatacttctttaattttattgtaaaatgtgtaatgacttttacctatatgctgtgggcaggtcctcagtaaaatctattgagtcaatttctagtattaacaggcttttgcttgctatctaagtgtttcaaattatgggaagtgtgagacactggaaggcaagaaaattaacaataatggcatgtgatagcaaaattgtatttcacttattcctgtgaatatttcttgttggtaccaatggtactgtacaaagtgaatgttatagccacaacattctcttgaaaagaacactgtcaagaagtgggaaattgctgtcaggcatttcattgttgtttttaaacttttttaaaagaaatactggttttgcaatatagagatcatgtggtaaagaattttaataagatcttatactaaaaagccttaaatcaatttattgagattcaaaaaatactattataattaattacatcccatacatataggcaaactcatttaaaaaataaaactaattttggtaaaagtacatggcctttgtttttaaaatacataattttaaaataaatcacttgtcatgataaagtccaaaaagaagttatcattcaacattcaactaaggttggagctaagaatttactaatacaaaaaaagttaaaattttttggaccatatatatcttgacagtgtaacttttaagtaggttcatttccatttgcacagaaagtttctgtctttaggaaactgaaaatgaaatactgtggatgctatgactgtttgtcttgtatgtaaataggaaattaataagctgcctattgagtggtatagctgtatgcttacccaaaaaagggaacactgtggttatgacttgtattataaactttctgtagttaataaagttgttatttttataaccatgattatattattattattaataaaatattttatcaaaatgct

SEQ ID NO: 140260 - DNA, 1425 bp, Homo sapiens
  Payload ID: 7518
  Gene Symbol: HGF
  Gene Name: hepatocyte growth factor (hepapoietin A
  scatter factor)
  ENST ID: ENST00000354224
  CDS Start-End: 1-555
atgtgggtgaccaaactcctgccagccctgctgctgcagcatgtcctcctgcatctcctcctgctccccatcgccatcccctatgcagagggacaaaggaaaagaagaaatacaattcatgaattcaaaaaatcagcaaagactaccctaatcaaaatagatccagcactgaagataaaaaccaaaaaagtgaatactgcagaccaatgtgctaatagatgtactaggaataaaggacttccattcacttgcaaggcttttgtttttgataaagcaagaaaacaatgcctctggttccccttcaatagcatgtcaagtggagtgaaaaaagaatttggccatgaatttgacctctatgaaaacaaagactacattagaaactgcatcattggtaaaggacgcagctacaagggaacagtatctatcactaagagtggcatcaaatgtcagccctggagttccatgataccacacgaacacagtggtggtgatgactgccttgttgaatccactttttattctattccattttggggacacaattctgcaagatgattcttcattaggaaacagagatgagttattgaccaacacagaaagaaaaagagtttgttgctccacactgggattaaacctatgatcttggcctaattaacactagctagtaagtgtccaagctgatcatctctacaacatttcaataacagaaaacaacaattttcaaaattagttacttacaattatgtagaaatgcctctaaaacacagtattttccttatattacaaaaacaaaaattataattggttttgtcctcttttgagagtttgcatggtgttactccctgcatagtgaagaaaacattttatttaagtagatggatctaagtttttcatgaacaaaggaatgacatttgaaatcaatcctaccctagtccaggagaatgcattagattaacctagtagaggtcttatttcaccctgagttttctatgatcgtgattctctgctggaggagtaattgtgaaatagatctctctgggaactggcttcctagtccaatcagctcttttaccaatgaacacttccttgtgatatagatgtttatggccgagaggatccagtatattaataaaatccctttttgtattcaatgagggaaacacataattttcatcaattagcagcttattggaatatctgcatgatggtttaacacttttaagtgttgactaaagattaattttacagaaaatagaaaaagaaatatgtttctgtctggaggaatgatttattgttgacccctaaattgaaatattttactagtggcttaatggaaagatgatgaaagatgatgaaattaatgtagaagcttaactagaaaatcaggtgacctgatatctacatctgtatccttcattggccacc

SEQ ID NO: 140261 - DNA, 545 bp, Homo sapiens
  Payload ID: 7518
  Gene Symbol: HGF
  Gene Name: hepatocyte growth factor (hepapoietin A
  scatter factor)
  ENST ID: ENST00000421558
  CDS Start-End: 191-545
attgagcgaattggtcccctgcctgtgccttgatttagccattgggctcagccttgctcctcccttccttactcggataggagccactgggatctggagctccagcttccaaattgaagctggcctcaggccaggtgaccttttctttgcatctcctccagagggatccgccagcccgtccagcagcaccatgtgggtgaccaaactcctgccagccctgctgctgcagcatgtcctcctgcatctcctcctgctccccatcgccatcccctatgcagagggacaaaggaaaagaagaaatacaattcatgaattcaaaaaatcagcaaagactaccctaatcaaaatagatccagcactgaagataaaaaccaaaaaagtgaatactgcagaccaatgtgctaatagatgtactaggaataaaggacttccattcacttgcaaggcttttgtttttgataaagcaagaaaacaatgcctctggttccccttcaatagcatgtcaagtggagtgaaaaaagaatttggccatgaatttgacctct

SEQ ID NO: 140262 - DNA, 1184 bp, Homo sapiens
  Payload ID: 7518
  Gene Symbol: HGF
  Gene Name: hepatocyte growth factor (hepapoietin A
  scatter factor)
  Uniprot ID: P14210
  ENST ID: ENST00000444829
  CDS Start-End: 61-933
caggattctttcacccaggcatctcctccagagggatccgccagcccgtccagcagcaccatgtgggtgaccaaactcctgccagccctgctgctgcagcatgtcctcctgcatctcctcctgctccccatcgccatcccctatgcagagggacaaaggaaaagaagaaatacaattcatgaattcaaaaaatcagcaaagactaccctaatcaaaatagatccagcactgaagataaaaaccaaaaaagtgaatactgcagaccaatgtgctaatagatgtactaggaataaaggacttccattcacttgcaaggcttttgtttttgataaagcaagaaaacaatgcctctggttccccttcaatagcatgtcaagtggagtgaaaaaagaatttggccatgaatttgacctctatgaaaacaaagactacattagaaactgcatcattggtaaaggacgcagctacaagggaacagtatctatcactaagagtggcatcaaatgtcagccctggagttccatgataccacacgaacacagctttttgccttcgagctatcggggtaaagacctacaggaaaactactgtcgaaatcctcgaggggaagaagggggaccctggtgtttcacaagcaatccagaggtacgctacgaagtctgtgacattcctcagtgttcagaagttgaatgcatgacctgcaatggggagagttatcgaggtctcatggatcatacagaatcaggcaagatttgtcagcgctgggatcatcagacaccacaccggcacaaattcttgcctgaaagatatcccgacaagggctttgatgataattattgccgcaatcccgatggccagccgaggccatggtgctatactcttgaccctcacacccgctgggagtactgtgcaattaaaacatgcgagacataacatgggctctcaactgatggtgaacttcttctggtgagtgacagaggctgcagtgaagaataatgagtctaatagaagtttatcacagatgtctctaatctttatagctgatccctacctctctcgctgtctttgtacccagcctgcattctgtttcgatctgtcttttagcagtccatacaatcatttttctacatgctggcccttacctagcttttctgaatttacaataaaaactattttttaacgtg

SEQ ID NO: 140263 - DNA, 2249 bp, Homo sapiens
  Payload ID: 7518
  Gene Symbol: HGF
  Gene Name: hepatocyte growth factor (hepapoietin A
  scatter factor)
  Uniprot ID: P14210
  ENST ID: ENST00000457544
  CDS Start-End: 78-2249
taggcactgactccgaacaggattctttcacccaggcatctcctccagagggatccgccagcccgtccagcagcaccatgtgggtgaccaaactcctgccagccctgctgctgcagcatgtcctcctgcatctcctcctgctccccatcgccatcccctatgcagagggacaaaggaaaagaagaaatacaattcatgaattcaaaaaatcagcaaagactaccctaatcaaaatagatccagcactgaagataaaaaccaaaaaagtgaatactgcagaccaatgtgctaatagatgtactaggaataaaggacttccattcacttgcaaggcttttgtttttgataaagcaagaaaacaatgcctctggttccccttcaatagcatgtcaagtggagtgaaaaaagaatttggccatgaatttgacctctatgaaaacaaagactacattagaaactgcatcattggtaaaggacgcagctacaagggaacagtatctatcactaagagtggcatcaaatgtcagccctggagttccatgataccacacgaacacagctatcggggtaaagacctacaggaaaactactgtcgaaatcctcgaggggaagaagggggaccctggtgtttcacaagcaatccagaggtacgctacgaagtctgtgacattcctcagtgttcagaagttgaatgcatgacctgcaatggggagagttatcgaggtctcatggatcatacagaatcaggcaagatttgtcagcgctgggatcatcagacaccacaccggcacaaattcttgcctgaaagatatcccgacaagggctttgatgataattattgccgcaatcccgatggccagccgaggccatggtgctatactcttgaccctcacacccgctgggagtactgtgcaattaaaacatgcgctgacaatactatgaatgacactgatgttcctttggaaacaactgaatgcatccaaggtcaaggagaaggctacaggggcactgtcaataccatttggaatggaattccatgtcagcgttgggattctcagtatcctcacgagcatgacatgactcctgaaaatttcaagtgcaaggacctacgagaaaattactgccgaaatccagatgggtctgaatcaccctggtgttttaccactgatccaaacatccgagttggctactgctcccaaattccaaactgtgatatgtcacatggacaagattgttatcgtgggaatggcaaaaattatatgggcaacttatcccaaacaagatctggactaacatgttcaatgtgggacaagaacatggaagacttacatcgtcatatcttctgggaaccagatgcaagtaagctgaatgagaattactgccgaaatccagatgatgatgctcatggaccctggtgctacacgggaaatccactcattccttgggattattgccctatttctcgttgtgaaggtgataccacacctacaatagtcaatttagaccatcccgtaatatcttgtgccaaaacgaaacaattgcgagttgtaaatgggattccaacacgaacaaacataggatggatggttagtttgagatacagaaataaacatatctgcggaggatcattgataaaggagagttgggttcttactgcacgacagtgtttcccttctcgagacttgaaagattatgaagcttggcttggaattcatgatgtccacggaagaggagatgagaaatgcaaacaggttctcaatgtttcccagctggtatatggccctgaaggatcagatctggttttaatgaagcttgccaggcctgctgtcctggatgattttgttagtacgattgatttacctaattatggatgcacaattcctgaaaagaccagttgcagtgtttatggctggggctacactggattgatcaactatgatggcctattacgagtggcacatctctatataatgggaaatgagaaatgcagccagcatcatcgagggaaggtgactctgaatgagtctgaaatatgtgctggggctgaaaagattggatcaggaccatgtgagggggattatggtggcccacttgtttgtgagcaacataaaatgagaatggttcttggtgtcattgttcctggtcgtggatgtgccattccaaatcgtcctggtatttttgtccgagtagcatattatgcaaaatggatacacaaaattattttaacatataaggtaccacagtcatag

SEQ ID NO: 140264 - DNA, 721 bp, Homo sapiens
  Payload ID: 7518
  Gene Symbol: HGF
  Gene Name: hepatocyte growth factor (hepapoietin A
  scatter factor)
  ENST ID: ENST00000453018
  CDS Start-End: 346-522
gaaatctagtatattgtcaagtaaaatcactttcttgtagatgatccttaggattttttttatatatgagccttaaaaacatttctccaatgtttatttttttaaaacattttgtatttaatagagggacaaaggaaaagaagaaatacaattcatgaattcaaaaaatcagcaaagactaccctaatcaaaatagatccagcactgaagataaaaaccaaaaaagtgaatactgcagaccaatgtgctaatagatgtactaggaataaaggacttccattcacttgcaaggcttttgtttttgataaagcaagaaaacaatgcctctggttccccttcaatagcatgtcaagtggagtgaaaaaagaatttggccatgaatttgacctctatgaaaacaaagactacattagaaactgcatcattggtaaaggacgcagctacaagggaacagtatctatcactaagagtggcatcaaatgtcagccctggagttccatgataccacacgaacacaggtaagaacagtatgaagaaaagagatgaagcctctgtcttttttacatgttaacagtctcatattagtccttcagaataattctacaatcctaaaataacttagccaacttgctgaattgtattacggcaaggtttatatgaattcatgactgatatttagcaaatgattaattaatatgttaataaaatgtagccaaaacaa

SEQ ID NO: 140265 - DNA, 590 bp, Homo sapiens
  Payload ID: 7518
  Gene Symbol: HGF
  Gene Name: hepatocyte growth factor (hepapoietin A
  scatter factor)
  ENST ID: ENST00000412881
  CDS Start-End: 166-590
attgggctcagccttgctcctcccttccttactcggataggagccactgggatctggagctccagcttccaaattgaagctggcctcaggccaggtgaccttttctttgattctttcacccaggcatctcctccagagggatccgccagcccgtccagcagcaccatgtgggtgaccaaactcctgccagccctgctgctgcagcatgtcctcctgcatctcctcctgctccccatcgccatcccctatgcagagggacaaaggaaaagaagaaatacaattcatgaattcaaaaaatcagcaaagactaccctaatcaaaatagatccagcactgaagataaaaaccaaaaaagtgaatactgcagaccaatgtgctaatagatgtactaggaataaaggacttccattcacttgcaaggcttttgtttttgataaagcaagaaaacaatgcctctggttccccttcaatagcatgtcaagtggagtgaaaaaagaatttggccatgaatttgacctctatgaaaacaaagactacattagaaactgcatcattggtaaaggacgcagctacaagggaacagtatctat

SEQ ID NO: 140266 - DNA, 1111 bp, Homo sapiens
  Payload ID: 7518
  Gene Symbol: HGF
  Gene Name: hepatocyte growth factor (hepapoietin A
  scatter factor)
  Uniprot ID: P14210
  ENST ID: ENST00000453411
  CDS Start-End: 44-901
ggcatctcctccagagggatccgccagcccgtccagcagcaccatgtgggtgaccaaactcctgccagccctgctgctgcagcatgtcctcctgcatctcctcctgctccccatcgccatcccctatgcagagggacaaaggaaaagaagaaatacaattcatgaattcaaaaaatcagcaaagactaccctaatcaaaatagatccagcactgaagataaaaaccaaaaaagtgaatactgcagaccaatgtgctaatagatgtactaggaataaaggacttccattcacttgcaaggcttttgtttttgataaagcaagaaaacaatgcctctggttccccttcaatagcatgtcaagtggagtgaaaaaagaatttggccatgaatttgacctctatgaaaacaaagactacattagaaactgcatcattggtaaaggacgcagctacaagggaacagtatctatcactaagagtggcatcaaatgtcagccctggagttccatgataccacacgaacacagctatcggggtaaagacctacaggaaaactactgtcgaaatcctcgaggggaagaagggggaccctggtgtttcacaagcaatccagaggtacgctacgaagtctgtgacattcctcagtgttcagaagttgaatgcatgacctgcaatggggagagttatcgaggtctcatggatcatacagaatcaggcaagatttgtcagcgctgggatcatcagacaccacaccggcacaaattcttgcctgaaagatatcccgacaagggctttgatgataattattgccgcaatcccgatggccagccgaggccatggtgctatactcttgaccctcacacccgctgggagtactgtgcaattaaaacatgcgagacataacatgggctctcaactgatggtgaacttcttctggtgagtgacagaggctgcagtgaagaataatgagtctaatagaagtttatcacagatgtctctaatctttatagctgatccctacctctctcgctgtctttgtacccagcctgcattctgtttcgatctgtcttttagcagtccatacaatcatttttctacatgctggcccttacc

SEQ ID NO: 140267 - DNA, 1990 bp, Homo sapiens
  Payload ID: 7518
  Gene Symbol: HGF
  Gene Name: hepatocyte growth factor (hepapoietin A
  scatter factor)
  Uniprot ID: P14210
  ENST ID: ENST00000423064
  CDS Start-End: 135-767
cacacaacaaacttagctcatcgcaataaaaagcagctcagagccgactggctcttttaggcactgactccgaacaggattctttcacccaggcatctcctccagagggatccgccagcccgtccagcagcaccatgtgggtgaccaaactcctgccagccctgctgctgcagcatgtcctcctgcatctcctcctgctccccatcgccatcccctatgcagagggacaaaggaaaagaagaaatacaattcatgaattcaaaaaatcagcaaagactaccctaatcaaaatagatccagcactgaagataaaaaccaaaaaagtgaatactgcagaccaatgtgctaatagatgtactaggaataaaggacttccattcacttgcaaggcttttgtttttgataaagcaagaaaacaatgcctctggttccccttcaatagcatgtcaagtggagtgaaaaaagaatttggccatgaatttgacctctatgaaaacaaagactacattagaaactgcatcattggtaaaggacgcagctacaagggaacagtatctatcactaagagtggcatcaaatgtcagccctggagttccatgataccacacgaacacagctttttgccttcgagctatcggggtaaagacctacaggaaaactactgtcgaaatcctcgaggggaagaagggggaccctggtgtttcacaagcaatccagaggtacgctacgaagtctgtgacattcctcagtgttcagaaggtaaataaacctgaatgccatgtgggccattctattccccctatgtgtagaactgtaactcacattaaaggttaacagcaacgaatcaatcataacaaatatgttgttcgtgcaaatgcaactacaaataattatttaaacatttttatacaatgtttttaaaactgttggattatcaccagattaatgcaaaataacagagcgagttatcagtttgaatttcaacactgcctgagacatccctctggggaaagtgaaagagagggtttacttacctactgtcttgagctcacatacctcaaaatctactactgtgtggcacctgaaaggagttgaatgaagcttagcctttcattagcaatgttaattctattcaaccagcacctgcttccacagaaattctgtccaaactatcatgaagtggtgtgacaagggtatatggacccagaagataatacaatataagaagggatcactggaagcttgaccccatgcacattttggtgaaaatgtgcctagaatcaaatgtgacacgtaggctggaactgagtaccattcagaataggatctgaagagatcaaagcaatggagaccaccaaactgtcttgaaggcatgtctatggaccttaagtccatgtctatgttttcagctcttctcacagcataaaagggcattgtccttacttttgcagtggaaaactgaatggctgacaagatggaagagtaaccatttcagcattgtatgtggtttcatttttcttagttatctggctactgaatagccggatttttcagttctgtcagaaactctaaatttccaaaaatctaagtgaaacatggatgaaactctgttagaaaattgttaggattttggagtatttggggagggggactactggaatgctgtccaagttttatactaagatatcttacctgtttgttattaaccaaatatttttaaaaatatttcctccataaatattcatttaatattaggttgatatttatcacataaaaagtaaaggctactgttagctaattgtcacagagaaggatttgttttctgttgttagtgaatttgaaatccttgactttatgtgctacagccagttccatctctgtttgtaaattcttactttccattccatatcatattctgttccctataacctcttcattgttttcttttcttttaaaaataataaacttttctatgatcacgttttgaaca

SEQ ID NO: 140268 - DNA, 2970 bp, Homo sapiens
  Payload ID: 7519
  Gene Symbol: HGS
  Gene Name: hepatocyte growth factor-regulated tyrosine kinase substrate
  Uniprot ID: O14964
  ENST ID: ENST00000329138
  CDS Start-End: 136-2469
cctcgcggctctagggccggcgcggtgacgtgcgcgtgcgcgcactggagggaaaaggcggaagcggaagtcggggggcgcgccagctcgtagcaggggagcgcccgcggcgtcgggtttgggctggaggtcgccatggggcgaggcagcggcaccttcgagcgtctcctagacaaggcgaccagccagctcctgttggagacagattgggagtccattttgcagatctgcgacctgatccgccaaggggacacacaagcaaaatatgctgtgaattccatcaagaagaaagtcaacgacaagaacccacacgtcgccttgtatgccctggaggtcatggaatctgtggtaaagaactgtggccagacagttcatgatgaggtggccaacaagcagaccatggaggagctgaaggacctgctgaagagacaagtggaggtaaacgtccgtaacaagatcctgtacctgatccaggcctgggcgcatgccttccggaacgagcccaagtacaaggtggtccaggacacctaccagatcatgaaggtggaggggcacgtctttccagaattcaaagagagcgatgccatgtttgctgccgagagagccccagactgggtggacgctgaggaatgccaccgctgcagggtgcagttcggggtgatgacccgtaagcaccactgccgggcgtgtgggcagatattctgtggaaagtgttcttccaagtactccaccatccccaagtttggcatcgagaaggaggtgcgcgtgtgtgagccctgctacgagcagctgaacaggaaagcggagggaaaggccacttccaccactgagctgccccccgagtacctgaccagccccctgtctcagcagtcccagctgccccccaagagggacgagacggccctgcaggaggaggaggagctgcagctggccctggcgctgtcacagtcagaggcggaggagaaggagaggctgagacagaagtccacgtacacttcgtaccccaaggcggagcccatgccctcggcctcctcagcgccccccgccagcagcctgtactcttcacctgtgaactcgtcggcgcctctggctgaggacatcgaccctgagctcgcacggtatctcaaccggaactactgggagaagaagcaggaggaggctcgcaagagccccacgccatctgcgcccgtgcccctgacggagccggctgcacagcctggggaagggcacgcagcccccaccaacgtggtggagaaccccctcccggagacagactctcagcccattcctccctctggtggcccctttagtgagccacagttccacaatggcgagtctgaggagagccacgagcagttcctgaaggcgctgcagaacgccgtcaccaccttcgtgaaccgcatgaagagtaaccacatgcggggccgcagcatcaccaatgactcggccgtgctctcactcttccagtccatcaacggcatgcacccgcagctgctggagctgctcaaccagctggacgagcgcaggctgtactatgaggggctgcaggacaagctggcacagatccgcgatgcccggggggcgctgagtgccctgcgcgaagagcaccgggagaagcttcgccgggcagccgaggaggcagagcgccagcgccagatccagctggcccagaagctggagataatgcggcagaagaagcaggagtacctggaggtgcagaggcagctggccatccagcgcctgcaggagcaggagaaggagcggcagatgcggctggagcagcagaagcagacggtccagatgcgcgcgcagatgcccgccttccccctgccctacgcccagctccaggccatgcccgcagccggaggtgtgctctaccagccctcgggaccagccagcttccccagcaccttcagccctgccggctcggtggagggctccccaatgcacggcgtgtacatgagccagccggcccctgccgctggcccctaccccagcatgcccagcactgcggctgatcccagcatggtgagtgcctacatgtacccagcaggggccactggggcgcaggcggccccccaggcccaggccggacccaccgccagccccgcttactcatcctaccagcctactcccacagcgggctaccagaacgtggcctcccaggccccacagagcctcccggccatctctcagcctccgcagtccagcaccatgggctacatggggagccagtcagtctccatgggctaccagccttacaacatgcagaatctcatgaccaccctcccaagccaggatgcgtctctgccaccccagcagccctacatcgcggggcagcagcccatgtaccagcagatggcaccctctggcggtcccccccagcagcagccccccgtggcccagcaaccgcaggcacaggggccgccggcacagggcagcgaggcccagctcatttcattcgactgacccaggccatgctcacgtccggagtaacactacatacagttcacctgaaacgcctcgtctctaactgccgtcgtcctgcctccctgtcctctactgccggtagtgtcccttctctgcgagtgagggggggccttcaccccaagcccacctcccttgtcctcagcctactgcagtccctgagttagtctctgctttctttccccagggctgggccatggggagggaaggactttctcccaggggaagcccccagccctgtgggtcatggtctgtgagaggtggcaggaatggggaccctcaccccccaagcagcctgtgccctctggccgcactgtgagctggctgtggtgtctgggtgtggcctggggctccctctgcaggggcctctctcggcagccacagccaagggtggaggcttcaggtctccagcttctctgcttctcagctgccatctccagtgccccagaatggtacagcgataataaaatgtatttcagaaag

SEQ ID NO: 140269 - DNA, 716 bp, Homo sapiens
  Payload ID: 7519
  Gene Symbol: HGS
  Gene Name: hepatocyte growth factor-regulated tyrosine kinase substrate
  ENST ID: ENST00000577012
  CDS Start-End: 503-716
cgcgtccccacccgacggctcggccttggtcagcccgcagcctccgcccggcgctgagtcagcgcggccccgagggcccgaggggcgcggaccggccgccctgcccgcctctccccggcccgctgtcctcccgggttcggagccgccgatcctggaccctcggcgcggccgtggggtcggcgtccgtcgggcgttggcaaatggggctctgcgagggtccgcgcagggcgccaggggcgctcggcgacctcgctcctccgcgggcccgggcattcggccgatttcctcttgaccgacgagcacccggccgagtgggccacaaggcctgagtcatgaaaacaaggcgaccagccagctcctgttggagacagattgggagtccattttgcagatctgcgacctgatccgccaaggggacacacaagcaaaatatgctgtgaattccatcaagaagaaagtcaacgacaagaacccacacgtcgccttgtatgccctggaggtcatggaatctgtggtaaagaactgtggccagacagttcatgatgaggtggccaacaagcagaccatggaggagctgaaggacctgctgaagagacaagtggaggtaaacgtccgtaacaagatcctgtacctgatccaggcctgggcgcatgccttccggaacgagcccaagtacaaggtggtccaggacacctaccagatcatgaaggtggagg

SEQ ID NO: 140270 - DNA, 878 bp, Homo sapiens
  Payload ID: 7519
  Gene Symbol: HGS
  Gene Name: hepatocyte growth factor-regulated tyrosine kinase substrate
  ENST ID: ENST00000571237
  CDS Start-End: 1-878
agacagaagtccacgtacacttcgtaccccaaggcggagcccatgccctcggcctcctcagcgccccccgccagcagcctgtactcttcacctgtgaactcgtcggcgcctctggctgaggacatcgaccctgagctcgcacggtatctcaaccggaactactgggagaagaagcaggaggaggctcgcaagagccccacgccatctgcgcccgtgcccctgacggagccggctgcacagcctggggaagggcacgcagcccccaccaacgtggtggagaaccccctcccggagacagactctcagcccattcctccctctggtggcccctttagtgagtccatcaacggcatgcacccgcagctgctggagctgctcaaccagctggacgagcgcaggctgtactatgaggggctgcaggacaagctggcacagatccgcgatgcccggggggcgctgagtgccctgcgcgaagagcaccgggagaagcttcgccgggcagccgaggaggcagagcgccagcgccagatccagctggcccagaagctggagataatgcggcagaagaagcaggagtacctggaggtgcagaggcagctggccatccagcgcctgcaggagcaggagaaggagcggcagatgcggctggagcagcagaagcagacggtccagatgcgcgcgcagatgcccgccttccccctgccctacgcccagctccaggccatgcccgcagccggaggtgtgctctaccagccctcgggaccagccagcttccccagcaccttcagccctgccggctcggtggagggctccccaatgcacggcgtgtacatgagccagccggcccctgccgctggcccctaccccagcatgcccag

SEQ ID NO: 140271 - DNA, 547 bp, Homo sapiens
  Payload ID: 7519
  Gene Symbol: HGS
  Gene Name: hepatocyte growth factor-regulated tyrosine kinase substrate
  ENST ID: ENST00000573320
  CDS Start-End: 1-191
gctaccagccttacaacatgcagaatctcatgaccaccctcccaagccaggatgcgtctctgccaccccagcagccctacatcgcggggcagcagcccatgtaccagcagcagccccccgtggcccagcaaccgcaggcacaggggccgccggcacagggcagcgaggcccagctcatttcattcgactgacccaggccatgctcacgtccggagtaacactacatacagttcacctgaaacgcctcgtctctaactgccgtcgtcctgcctccctgtcctctactgccggtagtgtcccttctctgcgagtgagggggggccttcaccccaagcccacctcccttgtcctcagcctactgcagtccctgagttagtctctgctttctttccccagggctgggccatggggagggaaggactttctcccaggggaagcccccagccctgtgggtcatggtctgtgagaggtggcaggaatggggaccctcaccccccaagcagcctgtgccctctggccgcactgtgagctggctgtggtgtctggg

SEQ ID NO: 140272 - DNA, 824 bp, Homo sapiens
  Payload ID: 7519
  Gene Symbol: HGS
  Gene Name: hepatocyte growth factor-regulated tyrosine kinase substrate
  ENST ID: ENST00000572392
  CDS Start-End: 35-824
cgcccgcggcgtcgggtttgggctggaggtcgccatggggcgaggcagcggcaccttcgagcgtctcctagacaaggcgaccagccagctcctgttggagacagattgggagtccattttgcagatctgcgacctgatccgccaaggggacacacaagcaaaatatgctgtgaattccatcaagaagaaagtcaacgacaagaacccacacgtcgccttgtatgccctggaggtcatggaatctgtggtaaagaactgtggccagacagttcatgatgaggtggccaacaagcagaccatggaggagctgaaggacctgctgaaggcctgggcgcatgccttccggaacgagcccaagtacaaggtggtccaggacacctaccagatcatgaaggtggaggggcacgtctttccagaattcaaagagagcgatgccatgtttgctgccgagagagccccagactgggtggacgctgaggaatgccaccgctgcagggtgcagttcggggtgatgacccgtaagcaccactgccgggcgtgtgggcagatattctgtggaaagtgttcttccaagtactccaccatccccaagtttggcatcgagaaggaggtgcgcgtgtgtgagccctgctacgagcagctgaacaggaaagcggagggaaaggccacttccaccactgagctgccccccgagtacctgaccagccccctgtctcagcagtcccagctgccccccaagagggacgagacggccctgcaggaggaggaggagctgcagctggccctggcgctgtcacagtcagaggcggaggagaaggagaggc

SEQ ID NO: 140273 - DNA, 644 bp, Homo sapiens
  Payload ID: 7519
  Gene Symbol: HGS
  Gene Name: hepatocyte growth factor-regulated tyrosine kinase substrate
  ENST ID: ENST00000571518
  CDS Start-End: 468-644
gcgaggggagaggaagtgcccgtggagggcggcaggccccctcatcccgcgccaattatcctcagctcgggccgtcccccgctcccgaaggctggccttaagtcacgacctgacccgctgcgcctcggcgtgcacttagaggagcccggagctcttcgccaagcgcagaactgaccccccgcaactccacccgcgggggcggacacctaccgtgggccgtgtcgggggcggctcccccaggtcgcctttcccatcccgggagctcacctgtgcgaagcggtcaaggacccgagcagctaaaggacaaggcgaccagccagctcctgttggagacagattgggagtccattttgcagatctgcgacctgatccgccaaggggacacacaagcaaaatatgctgtgaattccatcaagaagaaagtcaacgacaagaacccacacgtcgccttgtatgccctggaggtcatggaatctgtggtaaagaactgtggccagacagttcatgatgaggtggccaacaagcagaccatggaggagctgaaggacctgctgaagagacaagtggaggtaaacgtccgtaacaagatcctgtacctgatccaggcctgggcgcatgccttccggaacgagcccaagtacaag

SEQ ID NO: 140274 - DNA, 330 bp, Homo sapiens
  Payload ID: 7519
  Gene Symbol: HGS
  Gene Name: hepatocyte growth factor-regulated tyrosine kinase substrate
  ENST ID: ENST00000575078
  CDS Start-End: 1-330
cccacagcgggctaccagaacgtggcctcccaggccccacagagcctcccggccatctctcagcctccgcagtccagcaccatgggctacatggggagccagtcagtctccatgggctaccagccttacaacatgcagaatctcatgaccaccctcccaagccaggatgcgtctctgccaccccagcagccctacatcgcggggcagcagcccatgtaccagcagggggagacgcatacccgaggccccttctcagcagacagaacgaggacacaagtctcagggcagatacgcgcatccgcaagtgtagacaggaaaaaccgtgaattt

SEQ ID NO: 140275 - DNA, 523 bp, Homo sapiens
  Payload ID: 7519
  Gene Symbol: HGS
  Gene Name: hepatocyte growth factor-regulated tyrosine kinase substrate
  ENST ID: ENST00000570652
  CDS Start-End: 1-116
agcagatggcaccctctggcggtcccccccagcagcagccccccgtggcccagcaaccgcaggcacaggggccgccggcacagggcagcgaggcccagctcatttcattcgactgacccaggccatgctcacgtccggagtaacactacatacagttcacctgaaacgcctcgtctctaactgccgtcgtcctgcctccctgtcctctactgccggaaggaatggactccaacggacagggaaagaagaagtgtggagagacgggcaggataagcaggcactgggcccaagccgcccttggaggctctgcctgttctgatctgaaggcggaggctcagccgtgctctcccaggaagccacctgggcgtttggggctttagctaggaaagaggatgtcgcctgcggctgcgaaggcgccaaagcccagacctcgcgcctccgcccgcgacggcggcactgggggcccggagcgggcgggagacgtggattactgcgggcttcggggccctagcctcgaccgcga

SEQ ID NO: 140276 - DNA, 6445 bp, Homo sapiens
  Payload ID: 7520
  Gene Symbol: HNF4A
  Gene Name: hepatocyte nuclear factor 4, alpha
  Uniprot ID: P41235
  ENST ID: ENST00000316099
  CDS Start-End: 90-1514
gggaggaggcagtgggagggcggagggcgggggccttcggggtgggcgcccagggtagggcaggtggccgcggcgtggaggcagggagaatgcgactctccaaaaccctcgtcgacatggacatggccgactacagtgctgcactggacccagcctacaccaccctggaatttgagaatgtgcaggtgttgacgatgggcaatgacacgtccccatcagaaggcaccaacctcaacgcgcccaacagcctgggtgtcagcgccctgtgtgccatctgcggggaccgggccacgggcaaacactacggtgcctcgagctgtgacggctgcaagggcttcttccggaggagcgtgcggaagaaccacatgtactcctgcagatttagccggcagtgcgtggtggacaaagacaagaggaaccagtgccgctactgcaggctcaagaaatgcttccgggctggcatgaagaaggaagccgtccagaatgagcgggaccggatcagcactcgaaggtcaagctatgaggacagcagcctgccctccatcaatgcgctcctgcaggcggaggtcctgtcccgacagatcacctcccccgtctccgggatcaacggcgacattcgggcgaagaagattgccagcatcgcagatgtgtgtgagtccatgaaggagcagctgctggttctcgttgagtgggccaagtacatcccagctttctgcgagctccccctggacgaccaggtggccctgctcagagcccatgctggcgagcacctgctgctcggagccaccaagagatccatggtgttcaaggacgtgctgctcctaggcaatgactacattgtccctcggcactgcccggagctggcggagatgagccgggtgtccatacgcatccttgacgagctggtgctgcccttccaggagctgcagatcgatgacaatgagtatgcctacctcaaagccatcatcttctttgacccagatgccaaggggctgagcgatccagggaagatcaagcggctgcgttcccaggtgcaggtgagcttggaggactacatcaacgaccgccagtatgactcgcgtggccgctttggagagctgctgctgctgctgcccaccttgcagagcatcacctggcagatgatcgagcagatccagttcatcaagctcttcggcatggccaagattgacaacctgttgcaggagatgctgctgggagggtcccccagcgatgcaccccatgcccaccaccccctgcaccctcacctgatgcaggaacatatgggaaccaacgtcatcgttgccaacacaatgcccactcacctcagcaacggacagatgtgtgagtggccccgacccaggggacaggcagccacccctgagaccccacagccctcaccgccaggtggctcagggtctgagccctataagctcctgccgggagccgtcgccacaatcgtcaagcccctctctgccatcccccagccgaccatcaccaagcaggaagttatctagcaagccgctggggcttgggggctccactggctccccccagccccctaagagagcacctggtgatcacgtggtcacggcaaaggaagacgtgatgccaggaccagtcccagagcaggaatgggaaggatgaagggcccgagaacatggcctaagggccacatcccactgccacccttgacgccctgctctggataacaagactttgacttggggagacctctactgccttggacaacttttctcatgttgaagccactgccttcaccttcaccttcatccatgtccaacccccgacttcatcccaaaggacagccgcctggagatgacttgaggccttacttaaacccagctcccttcttccctagcctggtgcttctcctctcctagcccctgtcatggtgtccagacagagccctgtgaggctgggtccaattgtggcacttggggcaccttgctcctccttctgctgctgcccccacctctgctgcctccctctgctgtcaccttgctcagccatcccgtcttctccaacaccacctctccagaggccaaggaggccttggaaacgattcccccagtcattctgggaacatgttgtaagcactgactgggaccaggcaccaggcagggtctagaaggctgtggtgagggaagacgcctttctcctccaacccaacctcatcctccttcttcagggacttgggtgggtacttgggtgaggatccctgaaggccttcaacccgagaaaacaaacccaggttggcgactgcaacaggaacttggagtggagaggaaaagcatcagaaagaggcagaccatccaccaggcctttgagaaagggtagaattctggctggtagagcaggtgagatgggacattccaaagaacagcctgagccaaggcctagtggtagtaagaatctagcaagaattgaggaagaatggtgtgggagagggatgatgaagagagagagggcctgctggagagcatagggtctggaacaccaggctgaggtcctgatcagcttcaaggagtatgcagggagctgggcttccagaaaatgaacacagcagttctgcagaggacgggaggctggaagctgggaggtcaggtggggtggatgatataatgcgggtgagagtaatgaggcttggggctggagaggacaagatgggtaaaccctcacatcagagtgacatccaggaggaataagctcccagggcctgtctcaagctcttccttactcccaggcactgtcttaaggcatctgacatgcatcatctcatttaatcctcccttcctccctattaacctagagattgtttttgttttttattctcctcctccctccccgccctcacccgccccactccctcctaacctagagattgttacagaagctgaaattgcgttctaagaggtgaagtgattttttttctgaaactcacacaactaggaagtggctgagtcaggacttgaacccaggtctccctggatcagaacaggagctcttaactacagtggctgaatagcttctccaaaggctccctgtgttctcaccgtgatcaagttgaggggcttccggctcccttctacagcctcagaaaccagactcgttcttctgggaaccctgcccactcccaggaccaagattggcctgaggctgcactaaaattcacttagggtcgagcatcctgtttgctgataaatattaaggagaattcatgactcttgacagcttttctctcttcactccccaagtcaaggggaggggtggcaggggtctgtttcctggaagtcaggctcatctggcctgttggcatgggggtgggacagtgtgcacagtgtgggggcaggggagggctaagcaggcctgggtttgagggctgctccggagaccgtcactccaggtgcattctggaagcattagaccccaggatggagcgaccagcatgtcatccatgtggaatcttggtggctttgaggacattctggaaaatgccactgaccagtgtgaacaaaagggatgtgttatggggctggaggtgtgattaggtaggagggaaactgttggaccgactcctgccccctgctcaacactgacccctctgagtggttggaggcagtgccccagtgcccagaaatcccaccattagtgattgttttttatgagaaagaggcgtggagaagtattggggcaatgtgtcagggaggaatcaccacatccctacggcagtcccagccaagcccccaatcccagcggagactgtgccctgctcagagctcccaagccttcccccaccacctcactcaagtgcccctgaaatccctgccagacggctcagcctggtctgcggtaaggcagggaggctggaaccatttctgggcattgtggtcattcccactgtgttcctccacctcctccctccagcgttgctcagacctctgtcttgggagaaaggttgagataagaatgtcccatggagtgccgtgggcaacagtggcccttcatgggaacaatctgttggagcagggggtcagttctctgctgggaatctacccctttctggaggagaaacccattccaccttaataactttattgtaatgtgagaaacacaaaacaaagtttacttttttgactctaagctgacatgatattagaaaatctctcgctctcttttttttttttttttttttttttggctacttgagttgtggtcctaaaacataaaatctgatggacaaacagagggttgctggggggacaagcgtgggcacaatttccccaccaagacaccctgatcttcaggcgggtctcaggagcttctaaaaatccgcatggctctcctgagagtggacagaggagaggagagggtcagaaatgaacgctcttctatttcttgtcattaccaagccaattacttttgccaaatttttctgtgatctgccctgattaagatgaattgtgaaatttacatcaagcaattatcaaagcgggctgggtcccatcagaacgacccacatctttctgtgggtgtgaatgtcattaggtcttgcgctgacccctgagcccccatcactgccgcctgatggggcaaagaaacaaaaaacatttcttactcttctgtgttttaacaaaagtttataaaacaaaataaatggcgcatatgttttctaagtccttggataagtatcttttctttcaggtatcagaaataagactgaatcttctggttctacttgggggttaaaaaattttttttaaaggaagaatgagaatagttttatagttctttgtgatgtgcagaatgtttttgtgtccattataatttttcagtcttcacatcaagaggtaagcagttagacatgattactcccactttccagatgaggagactgaggcttgggggaagtgacttctcttggaaggcagaggtggacatctaaccctggtctcttgattccaagtacttagtatatcgagagagtgaaagttgatcccccttcttgaagaggggagtgatgaggggagagtgcaatggcaagatctggaagaatggcaagagggtccaagggtctgtcatcctccaccaaggttcaagacagaaccttttgctgggtcacctcaatctgccagcaatggaagatgagtagctgtggggacatttcataaaagcaagtggtttttttgttttgttttgttttgttttttgtttttttttctagaacaaggctgtgcacagtggctcacctctgtaatcccagcactttgggaggctgaggcgggaggatcacttgagctcaggagttcgagaccagccagagcaatataaggagaccccatctctacaaaaaatttaaaaattagccaggtatagtggtgtgtgcctatagtaccagctactctgaaggctgaggtgggaagattgcttcagcccaggagttcgaggatgcagtgagctatgaatgcaacactgcactacagcctggatgaaagaacaagactctgtctcaaaacataaataataagtaaaaagaataaaagcaagagatgcacttgagaatctccagccagatctgtagccactgggcttctctccaaggctaaactattacaggagggtggccttgtgtctcggtcaccacagaccacagcgttccattcactcggggttgtgctggagctggcttgtgagaactgactgttagcttctcttcccaactccatgtttgccagtgccacactgatagcttgaaattggttattgccggagtgtttacaccacaaggactagcaaactctacaaatccgggcttttgttcctggagagcccgttgttaacattcaccagcacaccacagcattcggcaatggctggaccatgggatgcctacatatggggacatcctccttggggatgagggtagagcagggcgatcctttcacctcttccttaagggaggggacaaaagttctggtctgggaagcacacgttttgctgatcagcgtaaccttgggcaggtcactccaccactccgagcctcatctgtaaagtgggaatgatatctccctccagggcagatgtcaggattcaatggaatgagatcacagtaactgtgagagctcccgttacatgaggagtacaagtgaactcttcatgcgcccctttttagcgagaagttaaccattaaactctccaggcttcagagcacccattcgctgtctacctgatccctagggccgctcccgccttcccctgtgccttccctccactagtcagcaccaggaaatgttttcgataacgttgcaacggaggccttgttcatgctgccgccatcggggacaagcgcgggggggggggggtggaggccagaggagactatttcagtcctaaattgtgcttaataaacccatatcaaaaccataaa

SEQ ID NO: 140277 - DNA, 1470 bp, Homo sapiens
  Payload ID: 7520
  Gene Symbol: HNF4A
  Gene Name: hepatocyte nuclear factor 4, alpha
  Uniprot ID: P41235
  ENST ID: ENST00000316673
  CDS Start-End: 106-1464
cactcaccgccttcctggtggacgggctcctggtggctgtgctgctgctgtgagcgggcccctgctcctccatgcccccagctctccggctgggtgggcttggccatggtcagcgtgaacgcgcccctcggggctccagtggagagttcttacgacacgtccccatcagaaggcaccaacctcaacgcgcccaacagcctgggtgtcagcgccctgtgtgccatctgcggggaccgggccacgggcaaacactacggtgcctcgagctgtgacggctgcaagggcttcttccggaggagcgtgcggaagaaccacatgtactcctgcagatttagccggcagtgcgtggtggacaaagacaagaggaaccagtgccgctactgcaggctcaagaaatgcttccgggctggcatgaagaaggaagccgtccagaatgagcgggaccggatcagcactcgaaggtcaagctatgaggacagcagcctgccctccatcaatgcgctcctgcaggcggaggtcctgtcccgacagatcacctcccccgtctccgggatcaacggcgacattcgggcgaagaagattgccagcatcgcagatgtgtgtgagtccatgaaggagcagctgctggttctcgttgagtgggccaagtacatcccagctttctgcgagctccccctggacgaccaggtggccctgctcagagcccatgctggcgagcacctgctgctcggagccaccaagagatccatggtgttcaaggacgtgctgctcctaggcaatgactacattgtccctcggcactgcccggagctggcggagatgagccgggtgtccatacgcatccttgacgagctggtgctgcccttccaggagctgcagatcgatgacaatgagtatgcctacctcaaagccatcatcttctttgacccagatgccaaggggctgagcgatccagggaagatcaagcggctgcgttcccaggtgcaggtgagcttggaggactacatcaacgaccgccagtatgactcgcgtggccgctttggagagctgctgctgctgctgcccaccttgcagagcatcacctggcagatgatcgagcagatccagttcatcaagctcttcggcatggccaagattgacaacctgttgcaggagatgctgctgggagggtcccccagcgatgcaccccatgcccaccaccccctgcaccctcacctgatgcaggaacatatgggaaccaacgtcatcgttgccaacacaatgcccactcacctcagcaacggacagatgtgtgagtggccccgacccaggggacaggcagccacccctgagaccccacagccctcaccgccaggtggctcagggtctgagccctataagctcctgccgggagccgtcgccacaatcgtcaagcccctctctgccatcccccagccgaccatcaccaagcaggaagttatctagcaagcc

SEQ ID NO: 140278 - DNA, 3340 bp, Homo sapiens
  Payload ID: 7520
  Gene Symbol: HNF4A
  Gene Name: hepatocyte nuclear factor 4, alpha
  ENST ID: ENST00000372920
  CDS Start-End: 104-427
gcagagagggcactgggaggaggcagtgggagggcggagggcgggggccttcggggtgggcgcccagggtagggcaggtggccgcggcgtggaggcagggagaatgcgactctccaaaaccctcgtcgacatggacatggccgactacagtgctgcactggacccagcctacaccaccctggaatttgagaatgtgcaggtgttgacgatgggcaatgattttgttgccgctgcgtctcgccagattgaggcatcccctccgacatcactggagcatatctggaggggtggacagttctccacagggagacacgtccccatcagaaggcaccaacctcaacgcgcccaacagcctgggtgtcagcgccctgtgtgccatctgcggggaccgggccacgggcaaacactacggtgcctcgagctgtgacggctgcaagggcttcttccggaggagcgtgcggaagaaccacatgtactcctgcagatttagccggcagtgcgtggtggacaaagacaagaggaaccagtgccgctactgcaggctcaagaaatgcttccgggctggcatgaagaaggaagccgtccagaatgagcgggaccggatcagcactcgaaggtcaagctatgaggacagcagcctgccctccatcaatgcgctcctgcaggcggaggtcctgtcccgacagatcacctcccccgtctccgggatcaacggcgacattcgggcgaagaagattgccagcatcgcagatgtgtgtgagtccatgaaggagcagctgctggttctcgttgagtgggccaagtacatcccagctttctgcgagctccccctggacgaccaggtggccctgctcagagcccatgctggcgagcacctgctgctcggagccaccaagagatccatggtgttcaaggacgtgctgctcctaggcaatgactacattgtccctcggcactgcccggagctggcggagatgagccgggtgtccatacgcatccttgacgagctggtgctgcccttccaggagctgcagatcgatgacaatgagtatgcctacctcaaagccatcatcttctttgacccagatgccaaggggctgagcgatccagggaagatcaagcggctgcgttcccaggtgcaggtgagcttggaggactacatcaacgaccgccagtatgactcgcgtggccgctttggagagctgctgctgctgctgcccaccttgcagagcatcacctggcagatgatcgagcagatccagttcatcaagctcttcggcatggccaagattgacaacctgttgcaggagatgctgctgggagggtcccccagcgatgcaccccatgcccaccaccccctgcaccctcacctgatgcaggaacatatgggaaccaacgtcatcgttgccaacacaatgcccactcacctcagcaacggacagatgtgtgagtggccccgacccaggggacaggcagccacccctgagaccccacagccctcaccgccaggtggctcagggtctgagccctataagctcctgccgggagccgtcgccacaatcgtcaagcccctctctgccatcccccagccgaccatcaccaagcaggaagttatctagcaagccgctggggcttgggggctccactggctccccccagccccctaagagagcacctggtgatcacgtggtcacggcaaaggaagacgtgatgccaggaccagtcccagagcaggaatgggaaggatgaagggcccgagaacatggcctaagggccacatcccactgccacccttgacgccctgctctggataacaagactttgacttggggagacctctactgccttggacaacttttctcatgttgaagccactgccttcaccttcaccttcatccatgtccaacccccgacttcatcccaaaggacagccgcctggagatgacttgaggccttacttaaacccagctcccttcttccctagcctggtgcttctcctctcctagcccctgtcatggtgtccagacagagccctgtgaggctgggtccaattgtggcacttggggcaccttgctcctccttctgctgctgcccccacctctgctgcctccctctgctgtcaccttgctcagccatcccgtcttctccaacaccacctctccagaggccaaggaggccttggaaacgattcccccagtcattctgggaacatgttgtaagcactgactgggaccaggcaccaggcagggtctagaaggctgtggtgagggaagacgcctttctcctccaacccaacctcatcctccttcttcagggacttgggtgggtacttgggtgaggatccctgaaggccttcaacccgagaaaacaaacccaggttggcgactgcaacaggaacttggagtggagaggaaaagcatcagaaagaggcagaccatccaccaggcctttgagaaagggtagaattctggctggtagagcaggtgagatgggacattccaaagaacagcctgagccaaggcctagtggtagtaagaatctagcaagaattgaggaagaatggtgtgggagagggatgatgaagagagagagggcctgctggagagcatagggtctggaacaccaggctgaggtcctgatcagcttcaaggagtatgcagggagctgggcttccagaaaatgaacacagcagttctgcagaggacgggaggctggaagctgggaggtcaggtggggtggatgatataatgcgggtgagagtaatgaggcttggggctggagaggacaagatgggtaaaccctcacatcagagtgacatccaggaggaataagctcccagggcctgtctcaagctcttccttactcccaggcactgtcttaaggcatctgacatgcatcatctcatttaatcctcccttcctccctattaacctagagattgtttttgttttttattctcctcctccctccccgccctcacccgccccactccctcctaacctagagattgttacagaagctgaaattgcgttctaagaggtgaagtgattttttttctgaaactcacacaactaggaagtggctgagtcaggacttgaacccaggtctccctggatcagaacaggagctcttaactacagtggctgaatagcttctccaaaggctccctgtgttctcaccgtgatcaagttgaggggcttccggctcccttctacagcctcagaaaccagactcgttcttctgggaaccctgcccactcccaggaccaagattggcctgaggctgcactaaaattcacttagggtcgagcatcctgtttgctgataaatattaaggagaa

SEQ ID NO: 140279 - DNA, 1339 bp, Homo sapiens
  Payload ID: 7520
  Gene Symbol: HNF4A
  Gene Name: hepatocyte nuclear factor 4, alpha
  Uniprot ID: P41235
  ENST ID: ENST00000457232
  CDS Start-End: 5-1333
ggccatggtcagcgtgaacgcgcccctcggggctccagtggagagttcttacgacacgtccccatcagaaggcaccaacctcaacgcgcccaacagcctgggtgtcagcgccctgtgtgccatctgcggggaccgggccacgggcaaacactacggtgcctcgagctgtgacggctgcaagggcttcttccggaggagcgtgcggaagaaccacatgtactcctgcagatttagccggcagtgcgtggtggacaaagacaagaggaaccagtgccgctactgcaggctcaagaaatgcttccgggctggcatgaagaaggaagccgtccagaatgagcgggaccggatcagcactcgaaggtcaagctatgaggacagcagcctgccctccatcaatgcgctcctgcaggcggaggtcctgtcccgacagatcacctcccccgtctccgggatcaacggcgacattcgggcgaagaagattgccagcatcgcagatgtgtgtgagtccatgaaggagcagctgctggttctcgttgagtgggccaagtacatcccagctttctgcgagctccccctggacgaccaggtggccctgctcagagcccatgctggcgagcacctgctgctcggagccaccaagagatccatggtgttcaaggacgtgctgctcctaggcaatgactacattgtccctcggcactgcccggagctggcggagatgagccgggtgtccatacgcatccttgacgagctggtgctgcccttccaggagctgcagatcgatgacaatgagtatgcctacctcaaagccatcatcttctttgacccagatgccaaggggctgagcgatccagggaagatcaagcggctgcgttcccaggtgcaggtgagcttggaggactacatcaacgaccgccagtatgactcgcgtggccgctttggagagctgctgctgctgctgcccaccttgcagagcatcacctggcagatgatcgagcagatccagttcatcaagctcttcggcatggccaagattgacaacctgttgcaggagatgctgctgggagggtcccccagcgatgcaccccatgcccaccaccccctgcaccctcacctgatgcaggaacatatgggaaccaacgtcatcgttgccaacacaatgcccactcacctcagcaacggacagatgtccacccctgagaccccacagccctcaccgccaggtggctcagggtctgagccctataagctcctgccgggagccgtcgccacaatcgtcaagcccctctctgccatcccccagccgaccatcaccaagcaggaagttatctagcaagcc

SEQ ID NO: 140280 - DNA, 1603 bp, Homo sapiens
  Payload ID: 7520
  Gene Symbol: HNF4A
  Gene Name: hepatocyte nuclear factor 4, alpha
  Uniprot ID: P41235
  ENST ID: ENST00000443598
  CDS Start-End: 90-1343
gggaggaggcagtgggagggcggagggcgggggccttcggggtgggcgcccagggtagggcaggtggccgcggcgtggaggcagggagaatgcgactctccaaaaccctcgtcgacatggacatggccgactacagtgctgcactggacccagcctacaccaccctggaatttgagaatgtgcaggtgttgacgatgggcaatgacacgtccccatcagaaggcaccaacctcaacgcgcccaacagcctgggtgtcagcgccctgtgtgccatctgcggggaccgggccacgggcaaacactacggtgcctcgagctgtgacggctgcaagggcttcttccggaggagcgtgcggaagaaccacatgtactcctgcagatttagccggcagtgcgtggtggacaaagacaagaggaaccagtgccgctactgcaggctcaagaaatgcttccgggctggcatgaagaaggaagccgtccagaatgagcgggaccggatcagcactcgaaggtcaagctatgaggacagcagcctgccctccatcaatgcgctcctgcaggcggaggtcctgtcccgacagatcacctcccccgtctccgggatcaacggcgacattcgggcgaagaagattgccagcatcgcagatgtgtgtgagtccatgaaggagcagctgctggttctcgttgagtgggccaagtacatcccagctttctgcgagctccccctggacgaccaggtggccctgctcagagcccatgctggcgagcacctgctgctcggagccaccaagagatccatggtgttcaaggacgtgctgctcctaggcaatgactacattgtccctcggcactgcccggagctggcggagatgagccgggtgtccatacgcatccttgacgagctggtgctgcccttccaggagctgcagatcgatgacaatgagtatgcctacctcaaagccatcatcttctttgacccagatgccaaggggctgagcgatccagggaagatcaagcggctgcgttcccaggtgcaggtgagcttggaggactacatcaacgaccgccagtatgactcgcgtggccgctttggagagctgctgctgctgctgcccaccttgcagagcatcacctggcagatgatcgagcagatccagttcatcaagctcttcggcatggccaagattgacaacctgttgcaggagatgctgctgggaggtccgtgccaagcccaggaggggcggggttggagtggggactccccaggagacaggcctcacacagtgagctcacccctcagctccttggcttccccactgtgccgctttgggcaagttgcttaacctgtctgtgcctcagtttcctcaccagaaaaatgggaacaaggcaatggtctatttgttcaggcaccgagaacctagcacgtgccagtcactgttctaagtgctggcaattcagcaaagaacaagatctttgccctcggggaggctgtgtgtgtgtgagtatgtatggatgcgtggatatctgtgtatatgcccgtatgtgcgtgcatgtgtatataaagcctcacattttatgattttgaaataaacaggtaatatga

SEQ ID NO: 140281 - DNA, 2302 bp, Homo sapiens
  Payload ID: 7520
  Gene Symbol: HNF4A
  Gene Name: hepatocyte nuclear factor 4, alpha
  Uniprot ID: P41235
  ENST ID: ENST00000415691
  CDS Start-End: 73-1467
gggcggagggcgggggccttcggggtgggcgcccagggtagggcaggtggccgcggcgtggaggcagggagaatgcgactctccaaaaccctcgtcgacatggacatggccgactacagtgctgcactggacccagcctacaccaccctggaatttgagaatgtgcaggtgttgacgatgggcaatgacacgtccccatcagaaggcaccaacctcaacgcgcccaacagcctgggtgtcagcgccctgtgtgccatctgcggggaccgggccacgggcaaacactacggtgcctcgagctgtgacggctgcaagggcttcttccggaggagcgtgcggaagaaccacatgtactcctgcagatttagccggcagtgcgtggtggacaaagacaagaggaaccagtgccgctactgcaggctcaagaaatgcttccgggctggcatgaagaaggaagccgtccagaatgagcgggaccggatcagcactcgaaggtcaagctatgaggacagcagcctgccctccatcaatgcgctcctgcaggcggaggtcctgtcccgacagatcacctcccccgtctccgggatcaacggcgacattcgggcgaagaagattgccagcatcgcagatgtgtgtgagtccatgaaggagcagctgctggttctcgttgagtgggccaagtacatcccagctttctgcgagctccccctggacgaccaggtggccctgctcagagcccatgctggcgagcacctgctgctcggagccaccaagagatccatggtgttcaaggacgtgctgctcctaggcaatgactacattgtccctcggcactgcccggagctggcggagatgagccgggtgtccatacgcatccttgacgagctggtgctgcccttccaggagctgcagatcgatgacaatgagtatgcctacctcaaagccatcatcttctttgacccagatgccaaggggctgagcgatccagggaagatcaagcggctgcgttcccaggtgcaggtgagcttggaggactacatcaacgaccgccagtatgactcgcgtggccgctttggagagctgctgctgctgctgcccaccttgcagagcatcacctggcagatgatcgagcagatccagttcatcaagctcttcggcatggccaagattgacaacctgttgcaggagatgctgctgggagggtcccccagcgatgcaccccatgcccaccaccccctgcaccctcacctgatgcaggaacatatgggaaccaacgtcatcgttgccaacacaatgcccactcacctcagcaacggacagatgtccacccctgagaccccacagccctcaccgccaggtggctcagggtctgagccctataagctcctgccgggagccgtcgccacaatcgtcaagcccctctctgccatcccccagccgaccatcaccaagcaggaagttatctagcaagccgctggggcttgggggctccactggctccccccagccccctaagagagcacctggtgatcacgtggtcacggcaaaggaagacgtgatgccaggaccagtcccagagcaggaatgggaaggatgaagggcccgagaacatggcctaagggccacatcccactgccacccttgacgccctgctctggataacaagactttgacttggggagacctctactgccttggacaacttttctcatgttgaagccactgccttcaccttcaccttcatccatgtccaacccccgacttcatcccaaaggacagccgcctggagatgacttgaggccttacttaaacccagctcccttcttccctagcctggtgcttctcctctcctagcccctgtcatggtgtccagacagagccctgtgaggctgggtccaattgtggcacttggggcaccttgctcctccttctgctgctgcccccacctctgctgcctccctctgctgtcaccttgctcagccatcccgtcttctccaacaccacctctccagaggccaaggaggccttggaaacgattcccccagtcattctgggaacatgttgtaagcactgactgggaccaggcaccaggcagggtctagaaggctgtggtgagggaagacgcctttctcctccaacccaacctcatcctccttcttcagggacttgggtgggtacttgggtgaggatccctgaaggccttcaacccgagaaaacaaacccaggttggcgactgcaacaggaacttggagtggagaggaaaagcatcagaaagaggcagaccatccaccaggcctttgag

SEQ ID NO: 140282 - DNA, 540 bp, Homo sapiens
  Payload ID: 7520
  Gene Symbol: HNF4A
  Gene Name: hepatocyte nuclear factor 4, alpha
  ENST ID: ENST00000609262
  CDS Start-End: 232-540
atggtcagcgtgaacgcgcccctcggggctccagtggagagttcttacggtctgcagtttccatggagaccgcctcccaccatccctgaaatctcattgtgaccagtattaagggattaactctgcccagcggccctcgcagggtctggggtgctgagaggggccagcaggagctccctcaaggatgaagaggttgtgcactgtgcgggaccccatagcagcaggaggaggatgtcggactggggccagggcttcccccaggacccaccagacacgtccccatcagaaggcaccaacctcaacgcgcccaacagcctgggtgtcagcgccctgtgtgccatctgcggggaccgggccacgggcaaacactacggtgcctcgagctgtgacggctgcaagggcttcttccggaggagcgtgcggaagaaccacatgtactcctgcagatttagccggcagtgcgtggtggacaaagacaagaggaaccagtgccgctactgcaggctcaagaaatgcttccgggctggcatgaagaaggaa

SEQ ID NO: 140283 - DNA, 1192 bp, Homo sapiens
  Payload ID: 7520
  Gene Symbol: HNF4A
  Gene Name: hepatocyte nuclear factor 4, alpha
  Uniprot ID: P41235
  ENST ID: ENST00000609795
  CDS Start-End: 5-1192
ggccatggtcagcgtgaacgcgcccctcggggctccagtggagagttcttacgacacgtccccatcagaaggcaccaacctcaacgcgcccaacagcctgggtgtcagcgccctgtgtgccatctgcggggaccgggccacgggcaaacactacggtgcctcgagctgtgacggctgcaagggcttcttccggaggagcgtgcggaagaaccacatgtactcctgcagatttagccggcagtgcgtggtggacaaagacaagaggaaccagtgccgctactgcaggctcaagaaatgcttccgggctggcatgaagaaggaagccgtccagaatgagcgggaccggatcagcactcgaaggtcaagctatgaggacagcagcctgccctccatcaatgcgctcctgcaggcggaggtcctgtcccgacagatcacctcccccgtctccgggatcaacggcgacattcgggcgaagaagattgccagcatcgcagatgtgtgtgagtccatgaaggagcagctgctggttctcgttgagtgggccaagtacatcccagctttctgcgagctccccctggacgaccaggtggccctgctcagagcccatgctggcgagcacctgctgctcggagccaccaagagatccatggtgttcaaggacgtgctgctcctaggcaatgactacattgtccctcggcactgcccggagctggcggagatgagccgggtgtccatacgcatccttgacgagctggtgctgcccttccaggagctgcagatcgatgacaatgagtatgcctacctcaaagccatcatcttctttgacccagatgccaaggggctgagcgatccagggaagatcaagcggctgcgttcccaggtgcaggtgagcttggaggactacatcaacgaccgccagtatgactcgcgtggccgctttggagagctgctgctgctgctgcccaccttgcagagcatcacctggcagatgatcgagcagatccagttcatcaagctcttcggcatggccaagattgacaacctgttgcaggagatgctgctgggaggtccgtgccaagcccaggaggggcggggttggagtggggactccccaggagacaggcctcacacagtgagctcacccctcagctccttggcttccccactgtgccgctttgggcaagttgcttaa

SEQ ID NO: 140284 - DNA, 4763 bp, Homo sapiens
  Payload ID: 7520
  Gene Symbol: HNF4A
  Gene Name: hepatocyte nuclear factor 4, alpha
  ENST ID: ENST00000619550
  CDS Start-End: 236-1585
ggccatggtcagcgtgaacgcgcccctcggggctccagtggagagttcttacggtctgcagtttccatggagaccgcctcccaccatccctgaaatctcattgtgaccagtattaagggattaactctgcccagcggccctcgcagggtctggggtgctgagaggggccagcaggagctccctcaaggatgaagaggttgtgcactgtgcgggaccccatagcagcaggaggaggatgtcggactggggccagggcttcccccaggacccaccagacacgtccccatcagaaggcaccaacctcaacgcgcccaacagcctgggtgtcagcgccctgtgtgccatctgcggggaccgggccacgggcaaacactacggtgcctcgagctgtgacggctgcaagggcttcttccggaggagcgtgcggaagaaccacatgtactcctgcagatttagccggcagtgcgtggtggacaaagacaagaggaaccagtgccgctactgcaggctcaagaaatgcttccgggctggcatgaagaaggaagccgtccagaatgagcgggaccggatcagcactcgaaggtcaagctatgaggacagcagcctgccctccatcaatgcgctcctgcaggcggaggtcctgtcccgacagatcacctcccccgtctccgggatcaacggcgacattcgggcgaagaagattgccagcatcgcagatgtgtgtgagtccatgaaggagcagctgctggttctcgttgagtgggccaagtacatcccagctttctgcgagctccccctggacgaccaggtggccctgctcagagcccatgctggcgagcacctgctgctcggagccaccaagagatccatggtgttcaaggacgtgctgctcctaggcaatgactacattgtccctcggcactgcccggagctggcggagatgagccgggtgtccatacgcatccttgacgagctggtgctgcccttccaggagctgcagatcgatgacaatgagtatgcctacctcaaagccatcatcttctttgacccagatgccaaggggctgagcgatccagggaagatcaagcggctgcgttcccaggtgcaggtgagcttggaggactacatcaacgaccgccagtatgactcgcgtggccgctttggagagctgctgctgctgctgcccaccttgcagagcatcacctggcagatgatcgagcagatccagttcatcaagctcttcggcatggccaagattgacaacctgttgcaggagatgctgctgggagggtcccccagcgatgcaccccatgcccaccaccccctgcaccctcacctgatgcaggaacatatgggaaccaacgtcatcgttgccaacacaatgcccactcacctcagcaacggacagatgtgtgagtggccccgacccaggggacaggcagccacccctgagaccccacagccctcaccgccaggtggctcagggtctgagccctataagctcctgccgggagccgtcgccacaatcgtcaagcccctctctgccatcccccagccgaccatcaccaagcaggaagttatctagcaagccgctggggcttgggggctccactggctccccccagccccctaagagagcacctggtgatcacgtggtcacggcaaaggaagacgtgatgccaggaccagtcccagagcaggaatgggaaggatgaagggcccgagaacatggcctaagggccacatcccactgccacccttgacgccctgctctggataacaagactttgacttggggagacctctactgccttggacaacttttctcatgttgaagccactgccttcaccttcaccttcatccatgtccaacccccgacttcatcccaaaggacagccgcctggagatgacttgaggccttacttaaacccagctcccttcttccctagcctggtgcttctcctctcctagcccctgtcatggtgtccagacagagccctgtgaggctgggtccaattgtggcacttggggcaccttgctcctccttctgctgctgcccccacctctgctgcctccctctgctgtcaccttgctcagccatcccgtcttctccaacaccacctctccagaggccaaggaggccttggaaacgattcccccagtcattctgggaacatgttgtaagcactgactgggaccaggcaccaggcagggtctagaaggctgtggtgagggaagacgcctttctcctccaacccaacctcatcctccttcttcagggacttgggtgggtacttgggtgaggatccctgaaggccttcaacccgagaaaacaaacccaggttggcgactgcaacaggaacttggagtggagaggaaaagcatcagaaagaggcagaccatccaccaggcctttgagaaagggtagaattctggctggtagagcaggtgagatgggacattccaaagaacagcctgagccaaggcctagtggtagtaagaatctagcaagaattgaggaagaatggtgtgggagagggatgatgaagagagagagggcctgctggagagcatagggtctggaacaccaggctgaggtcctgatcagcttcaaggagtatgcagggagctgggcttccagaaaatgaacacagcagttctgcagaggacgggaggctggaagctgggaggtcaggtggggtggatgatataatgcgggtgagagtaatgaggcttggggctggagaggacaagatgggtaaaccctcacatcagagtgacatccaggaggaataagctcccagggcctgtctcaagctcttccttactcccaggcactgtcttaaggcatctgacatgcatcatctcatttaatcctcccttcctccctattaacctagagattgtttttgttttttattctcctcctccctccccgccctcacccgccccactccctcctaacctagagattgttacagaagctgaaattgcgttctaagaggtgaagtgattttttttctgaaactcacacaactaggaagtggctgagtcaggacttgaacccaggtctccctggatcagaacaggagctcttaactacagtggctgaatagcttctccaaaggctccctgtgttctcaccgtgatcaagttgaggggcttccggctcccttctacagcctcagaaaccagactcgttcttctgggaaccctgcccactcccaggaccaagattggcctgaggctgcactaaaattcacttagggtcgagcatcctgtttgctgataaatattaaggagaattcatgactcttgacagcttttctctcttcactccccaagtcaaggggaggggtggcaggggtctgtttcctggaagtcaggctcatctggcctgttggcatgggggtgggacagtgtgcacagtgtgggggcaggggagggctaagcaggcctgggtttgagggctgctccggagaccgtcactccaggtgcattctggaagcattagaccccaggatggagcgaccagcatgtcatccatgtggaatcttggtggctttgaggacattctggaaaatgccactgaccagtgtgaacaaaagggatgtgttatggggctggaggtgtgattaggtaggagggaaactgttggaccgactcctgccccctgctcaacactgacccctctgagtggttggaggcagtgccccagtgcccagaaatcccaccattagtgattgttttttatgagaaagaggcgtggagaagtattggggcaatgtgtcagggaggaatcaccacatccctacggcagtcccagccaagcccccaatcccagcggagactgtgccctgctcagagctcccaagccttcccccaccacctcactcaagtgcccctgaaatccctgccagacggctcagcctggtctgcggtaaggcagggaggctggaaccatttctgggcattgtggtcattcccactgtgttcctccacctcctccctccagcgttgctcagacctctgtcttgggagaaaggttgagataagaatgtcccatggagtgccgtgggcaacagtggcccttcatgggaacaatctgttggagcagggggtcagttctctgctgggaatctacccctttctggaggagaaacccattccaccttaataactttattgtaatgtgagaaacacaaaacaaagtttacttttttgactctaagctgacatgatattagaaaatctctcgctctcttttttttttttttttttttttttggctacttgagttgtggtcctaaaacataaaatctgatggacaaacagagggttgctggggggacaagcgtgggcacaatttccccaccaagacaccctgatcttcaggcgggtctcaggagcttctaaaaatccgcatggctctcctgagagtggacagaggagaggagagggtcagaaatgaacgctcttctatttcttgtcattaccaagccaattacttttgccaaatttttctgtgatctgccctgattaagatgaattgtgaaatttacatcaagcaattatcaaagcgggctgggtcccatcagaacgacccacatctttctgtgggtgtgaatgtcattaggtcttgcgctgacccctgagcccccatcactgccgcctgatggggcaaagaaacaaaaaacatttcttactcttctgtgttttaacaaaagtttataaaacaaaataaatggcgcatatgttttct

SEQ ID NO: 140285 - DNA, 1728 bp, Homo sapiens
  Payload ID: 7521
  Gene Symbol: HNF4G
  Gene Name: hepatocyte nuclear factor 4, gamma
  Uniprot ID: Q14541
  ENST ID: ENST00000354370
  CDS Start-End: 271-1497
ggagcctcggttcccctcgggcggctgaaggaggggctgagcctcaggacccctaggccaggccgtgttgaaagcagataccccgaggcctcgcccagcctgcgctggagggaagaaggcgctggaggagcaccagcgaaagcagccagtctgagatattgacactacagaaaaaactgacagcttactccttgtattgattctactcttctctacaaatatagactccgttccctaccacagccttatagttctgccccagagacaagtatgaataccacagacaacggtgtcaactgtctgtgtgctatctgtggggacagagcaacaggaaaacactatggggcatccagctgtgatgggtgcaagggtttcttcagacgcagcattcgtaagagtcacgtttattcttgcaggttcagtcggcaatgtgttgttgacaaggacaaaaggaatcaatgtagatattgtcgattaagaaagtgttttagagcgggaatgaaaaaagaagctgtacaaaatgaacgtgacagaataagcaccagaagaagcacatttgatggcagcaacatcccctccattaacacactggcacaagctgaagttcggtctcgccagatctcagtctcaagccctgggtcaagcactgacataaacgttaagaaaattgcaagtattggtgatgtctgtgaatctatgaaacagcagctcttagtcttggtggaatgggctaaatatattcctgccttctgtgaattaccattggatgatcaggtggcactgttgagagctcacgcaggggagcacttactgcttggagctacaaagagatccatgatgtataaagatattttgcttttgggaaacaactatgttattcaccgcaacagctgtgaagttgagattagccgtgtggccaatcgtgttctagatgagctggttagaccatttcaagaaatccagattgatgacaatgagtatgcttgtttaaaggcaattgtattttttgatccagatgcaaaagggctaagcgatccagtaaaaattaagaacatgaggttccaagtgcagatcggtttggaggactacatcaatgatcggcagtatgactcccgggggaggtttggagagttgcttctgctcctgcccacactgcagagcatcacgtggcaaatgattgagcaaatacagtttgttaaactttttgggatggttaaaattgacaatctacttcaggaaatgctattaggtggggcttccaatgatggcagtcatctccatcatccaatgcatccacatttgtctcaagacccattaactggacaaactatacttttaggtcccatgtcaacactggttcatgcagaccagatctcaactcctgaaaccccactcccttccccaccacaaggctctgggcaagaacagtacaaaatagctgcaaaccaagcatcagtcatttcacaccagcatctctccaaacaaaagcaattgtgaaaatgtgtttacttcagaacggcactacataaatgtgaaaagttgttgatcttgaaatatctcaggatagcacttttggcaaactcttagccaaggcttcttcattggtgctgttataagatggtgtcctattttcttgtttatacgttcattctgtttgttattgctactatgtaaaactttcacatgcaaccaatgtatatctgagtttgaagatgtttatatagggta

SEQ ID NO: 140286 - DNA, 4209 bp, Homo sapiens
  Payload ID: 7521
  Gene Symbol: HNF4G
  Gene Name: hepatocyte nuclear factor 4, gamma
  Uniprot ID: Q14541
  ENST ID: ENST00000396423
  CDS Start-End: 125-1462
ggattagcactcacagattgaaagcaaaacacatcaaaacactcatcacgcactctgggcttgtggtgccacttgtatgtgtgtttctaaatcaatgatgagggtatcagaaccaatactggacatggacatggcaaattacagtgaagttttggacccaacttacacaactttggagtttgaaactatgcagattctatataattcaagtgatagttctgccccagagacaagtatgaataccacagacaacggtgtcaactgtctgtgtgctatctgtggggacagagcaacaggaaaacactatggggcatccagctgtgatgggtgcaagggtttcttcagacgcagcattcgtaagagtcacgtttattcttgcaggttcagtcggcaatgtgttgttgacaaggacaaaaggaatcaatgtagatattgtcgattaagaaagtgttttagagcgggaatgaaaaaagaagctgtacaaaatgaacgtgacagaataagcaccagaagaagcacatttgatggcagcaacatcccctccattaacacactggcacaagctgaagttcggtctcgccagatctcagtctcaagccctgggtcaagcactgacataaacgttaagaaaattgcaagtattggtgatgtctgtgaatctatgaaacagcagctcttagtcttggtggaatgggctaaatatattcctgccttctgtgaattaccattggatgatcaggtggcactgttgagagctcacgcaggggagcacttactgcttggagctacaaagagatccatgatgtataaagatattttgcttttgggaaacaactatgttattcaccgcaacagctgtgaagttgagattagccgtgtggccaatcgtgttctagatgagctggttagaccatttcaagaaatccagattgatgacaatgagtatgcttgtttaaaggcaattgtattttttgatccagatgcaaaagggctaagcgatccagtaaaaattaagaacatgaggttccaagtgcagatcggtttggaggactacatcaatgatcggcagtatgactcccgggggaggtttggagagttgcttctgctcctgcccacactgcagagcatcacgtggcaaatgattgagcaaatacagtttgttaaactttttgggatggttaaaattgacaatctacttcaggaaatgctattaggtggggcttccaatgatggcagtcatctccatcatccaatgcatccacatttgtctcaagacccattaactggacaaactatacttttaggtcccatgtcaacactggttcatgcagaccagatctcaactcctgaaaccccactcccttccccaccacaaggctctgggcaagaacagtacaaaatagctgcaaaccaagcatcagtcatttcacaccagcatctctccaaacaaaagcaattgtgaaaatgtgtttacttcagaacggcactacataaatgtgaaaagttgttgatcttgaaatatctcaggatagcacttttggcaaactcttagccaaggcttcttcattggtgctgttataagatggtgtcctattttcttgtttatacgttcattctgtttgttattgctactatgtaaaactttcacatgcaaccaatgtatatctgagtttgaagatgtttatatagggtattttttccaactgcccctgcattgtgcctgaaccaattgaatcttatgtatgagtttcatttgttttattaatgttaatttaaatctgtaaataattgctttattgtgatgtgatacagaacaaagtgttcgtttttgactgaaaatagtagatcagaaatctcagtttaatataaaatgagctaagtttttaaaaataaattataaacttggagattagaaaaataaagcagttgctgtagaataggctgtatctttttcaagaagaatctcttatggacagtctgtggtaaagaagcaactctttgctttagagttaaatattcctatcttaagtttagaaaaatacaaaaaaccattccaaggatgactggatactttttgaaatctgactttctttgaagatgtatgttaagcaaaaacatgttgcttttatcagttaggatacagggtgaactgtaacaaagaaacccctaaaacagtgactaaatcaagagaggaatctatttctttctcctgaaacaatttagaaaatagttatccattgactagaaattagtacatgcccacagctggctcccacggtagccaggagaattatctataggtggaaagtctgtgtcagccaaagccatgtcactctgagagaactgattctgaggacaagttagccatctaccacccatgtcccttatttggtcctcacaataacactttaggagagatatcattatcgctgttttataaataagggaaactttagcttgagggtttaaggaacataaccaaagttcacaaacataacgagtgagagaaacacattcaagcccaggtctagttgactttaatgaatctttggtgtggaatgaaaaatgtgaacttcttactcatagtgtggtttttaaatatatgcagttgagtgatgattggatactattcatcatattgcctataatatatatttaccgataagcagtgagtgtaaaattgttgtagcttgaataagaaaccacttttgtagttttaaccagactttctcttaaaaacattagataaaataaaagattcaccggatggattctgatgaaaacgaaaacaaagtaaaatgactggcttagcagattctttgaaatgtagcagcccagggatgtaccaaatgtcgaattctagactgaggagtagagttcattggagtcttaaactctctgatatcacttaaagctggagtttattttaaaacaaatgaagcatgggccacctcatgatgcagtggctcctctctggttgaggagagggaaaattggaaaaactggtcgagtaattatcaataattttttttaaaaagaggatcccaaactgtaaaagattgaaataatctttctcaggattttttaaatgtctaagattatgatgtcatatctcccacttaccttataagtaaaaaggttaatatcaagtaacttattagctcttaaagtaaaattgaacttattaaaagctatctatgatttaatagatttaataaaattccttcacgacctggtacccttgtgaaactgtaaaatatatcatatggggggagttttttaactcttattttttgaaaatttactgtagcttctatttcgtgaataagaatgttttgattttgatcatacaaataacttttgtagatttttgtttacttttgggggggttcccttagaagacattaaaaaaaaatactgccttggtctgtgcaggctgctgtaatgaaatactatgaacttggcagcttataaacaacagaaatttatttctcgctgttctcaatggtgggaagtccaagattaagggatcaacaaattaggcctctggatcatacatggcattttctagctgtgtccttatacataaaaggaaaaaggtagctctctcgagtctctttaataaagatactaattctcatgactgaatcaccctccaaaggccccacctcctaataccatcactctggggactaggtgtcagcatgtgaattttggaaaacacaaaaattcagaacatagcaaatacctttgaagtataaaagataaaattcatttttagtgaaccctgtaatttattcgtgtatatttactaaacagctgtatctttgaaattgttagtaatgattctgcttcaataactatggtcagggaatttataatattatatttttatatactgaactgccatagatgctggaaaaaaggaactgatgttttcagcatattttcaaaatattgataagggaagttattacttttatatagtattcaacttttttcaggtaatagaagtgaataatttattgtgaaataattcattttataaatgtataattatttttataaattttattgttggaaatcaaaaattagtagattttttaccatgttaaattatagtgagattaaagtattactaaactgtgatgctatgtttgtttcactaaactttctaaataaaaactgagaaaaaaaaaatcactgaaa

SEQ ID NO: 140287 - DNA, 2174 bp, Homo sapiens
  Payload ID: 7522
  Gene Symbol: HDGFL1
  Gene Name: hepatoma derived growth factor-like 1
  Uniprot ID: Q5TGJ6
  ENST ID: ENST00000510882
  CDS Start-End: 84-839
gcccagcagccgcccttactgcgcgcgcgcagacttcggcgtctacttccggtgtggcccaggcggggtccgcagaaccagctatgtcggcctacggcatgcccatgtacaagagcggggacctggtgtttgccaagttaaagggctatgcccactggccggcgaggatagagcacatgacccagcccaaccgctaccaggtgtttttcttcgggacccacgagacggccttcctgagtcccaaacgcctgttcccgtacaaggagtgcaaggagaagttcggcaagcccaacaagaggcgcggcttcagcgcggggctgtgggaaatcgagaacaaccccacggtccaggcctccgactgcccattagcctcagagaagggcagcggagacgggccttggccggagcccgaggccgcagagggcgacgaggacaagccgacccacgctggtggcggcggcgacgaattggggaagccggacgacgacaagcccactgaggaggagaaggggccgctgaagaggagcgcgggggacccgccggaggacgcccccaaacgacccaaggaggcagcccccgaccaagaggaggaggcggaggcggagagggcggcggaagcggagagggcggcggcggcggcggcggcgacggccgtcgacgaggagagtccgttcctcgtggcggtggagaacggcagcgcccctagcgagccgggcctggtctgcgagccgcctcagccagaggaggaggagctccgggaggaagaagtcgcggacgaggaggcctcccaggagtggcatgccgaggcaccgggcggcggagatcgcgacagcctgtagttaccagcgtttccagaagagcccctgccccgttcctgctgcggcctggccgttcttggggaatctgaccacggcgtgcaaactgggactgcctttccctctcctcagcccgtcctcctccaacccgcgctcctttgccctgccgggccccaggatggcaggccacctgactctcacctctgtgcccccacgcctctgtgatctgagtcagggcctcagttccctccctgggataaagtgaggccaccatcccagcttccggctccctcttctcccccctctacccgccaccccaccccaccccacccccgcccactcgttgcctgattccgtttccgacttggggttcaggcaggctgttttcacctctagacacccctctccacccctcctgcttccccaggcattatgaacctctgcttaggaatatgggtaggagtgaaaggcctggcagataaagagcagagggcacttgcagggcctgggatgagcagtcttcaagctgtggtagttagcgggcaggagagcgacatcttcctgagctcctgtccatgcctgccatacctgccagcttcagacatttagggaaaaggggcagcatgtggggaatgccccccgccttccacaaatccttttgctgacccaggaagttctgggagttgccgtttttcatcaaaacgtttgggggcttccaagttgtttgtgagatctgaaaacttaactttgcccaatatcctggttggggaccgtgagaaatatctgtcccatttagatctctggggccactgatgggatgccctgggaagatccttggctgccgctttctctccccacagcctcaaggccaccctaccgtcatatatatcactcaggcgtagaagaaaagacacatattttataaaatctttttaataaaaggaagttccaagaagaatttttaagaactacctctaggtgtgcctccacgctggccctagctttcccattgctgttccattgctgagacaaactggaaggctccctttctgtttgaagttttatgacttgtagtcaggctttgctgttcgtcacagtgtcattttccattcaggtaccatcacctggtcccatcaacaggtctagtatgtagctcactgataacagaggaagatgtgtctcctcccaccctcttcctaatggtcattatgcctttctccatctattgtctctttcaccccttcccctctcccttgggctctgatgaaaaattgttgactgcagtttcggaagtttgatctgagaaccaaccatagaatgtttcagttctaggaaataaaaccagttgattaaagcaaa

SEQ ID NO: 140288 - DNA, 2380 bp, Homo sapiens
  Payload ID: 7523
  Gene Symbol: HDGF
  Gene Name: hepatoma-derived growth factor
  Uniprot ID: P51858
  ENST ID: ENST00000357325
  CDS Start-End: 316-1038
gaggaggagtggggaccgggcggggggtggaggaagaggcctcgcgcagaggagggagcaattgaatttcaaacacaaacaactgcacgagcgcgcacccaccgcgccggagccttgccccgatccgcgcccgccccgtccgtgcggcgcgcgggcggagacgccgtggccgcgccggagctcgggccgggggccaccatcgaggcgggggccgcgcgagggccggagcggagcggcgccgccaccgccgcacgcgcaaacttgggctcgcgcttcccggcccggcgcggagcccggggcgcccggagccccgccatgtcgcgatccaaccggcagaaggagtacaaatgcggggacctggtgttcgccaagatgaagggctacccacactggccggcccggattgacgagatgcctgaggctgccgtgaaatcaacagccaacaaataccaagtcttttttttcgggacccacgagacggcattcctgggccccaaagacctcttcccttacgaggaatccaaggagaagtttggcaagcccaacaagaggaaagggttcagcgaggggctgtgggagatcgagaacaaccctactgtcaaggcttccggctatcagtcctcccagaaaaagagctgtgtggaagagcctgaaccagagcccgaagctgcagagggtgacggtgataagaaggggaatgcagagggcagcagcgacgaggaagggaagctggtcattgatgagccagccaaggagaagaacgagaaaggagcgttgaagaggagagcaggggacttgctggaggactctcctaaacgtcccaaggaggcagaaaaccctgaaggagaggagaaggaggcagccaccttggaggttgagaggccccttcctatggaggtggaaaagaatagcaccccctctgagcccggctctggccgggggcctccccaagaggaagaagaggaggaggatgaagaggaagaggctaccaaggaagatgctgaggccccaggcatcagagatcatgagagcctgtagccaccaatgtttcaagaggagcccccaccctgttcctgctgctgtctgggtgctactggggaaactggccatggcctgcaaactgggaacccctttcccaccccaacctgctctcctcttctactcacttttcccactccaagcccagcccatggagattgacctggatggggcaggccacctggctctcacctctaggtccccatactcctatgatctgagtcagagccatgtcttctccctggaatgagttgaggccactgtgttccttccgcttggagctattttccaggcttctgctggggcctgggacaactgctcccacctcctgacacccttctcccactctcctaggcattctggacctctgggttgggatcaggggtaggaatggaaaggatggagcatcaacagcagggtgggcttgtggggcctgggaggggcaatcctcaaatgcggggtgggggcagcacaggagggcggcctccttctgagctcctgtcccctgctacacctattatcccagctgcctagattcagggaaagtgggacagcttgtaggggaggggctcctttccataaatccttgatgattgacaacacccatttttccttttgccgaccccaagagttttgggagttgtagttaatcatcaagagaatttggggcttccaagttgttcgggccaaggacctgagacctgaagggttgactttacccatttgggtgggagtgttgagcatctgtccccctttagatctctgaagccacaaataggatgcttgggaagactcctagctgtcctttttcctctccacacagtgctcaaggccagcttatagtcatatatatcacccagacataaaggaaaagacacattttttaggaaatgtttttaataaaagaaaattacaaaaaaaaattttaaagacccctaaccctttgtgtgctctccattctgctccttccccatcgttgcccccatttctgaggtgcactgggaggctccccttctatttggggcttgatgactttctttttgtagctggggctttgatgttccttccagtgtcatttctcatccacataccctgacctggccccctcagtgttgtcaccagatctgatttgtaacccactgagaggacagagagaaataagtgccctctcccaccctcttcctactggtctctctatgcctctctacagtctcgtctcttttaccctggcccctctcccttgggctctgatgaaaaattgctgactgtagctttggaagtttagctctgagaaccgtagatgatttcagttctaggaaaataaaacccgttgattactata

SEQ ID NO: 140289 - DNA, 960 bp, Homo sapiens
  Payload ID: 7523
  Gene Symbol: HDGF
  Gene Name: hepatoma-derived growth factor
  Uniprot ID: P51858
  ENST ID: ENST00000368206
  CDS Start-End: 86-856
agaactgagctcatctttgcggggttagctagccgttgagtccaagtctccttggcaagacagtagcttagagaaacgagatcgaatgcacccggaaggtggccaatttgtgcctcaactccttggccatctcctggctaccaaactcaagcgtttcctccttagcaaaggcggacgtagggctcaaatccccgacgtttccagggccaccccccatacgattgacgagatgcctgaggctgccgtgaaatcaacagccaacaaataccaagtcttttttttcgggacccacgagacggcattcctgggccccaaagacctcttcccttacgaggaatccaaggagaagtttggcaagcccaacaagaggaaagggttcagcgaggggctgtgggagatcgagaacaaccctactgtcaaggcttccggctatcagtcctcccagaaaaagagctgtgtggaagagcctgaaccagagcccgaagctgcagagggtgacggtgataagaaggggaatgcagagggcagcagcgacgaggaagggaagctggtcattgatgagccagccaaggagaagaacgagaaaggagcgttgaagaggagagcaggggacttgctggaggactctcctaaacgtcccaaggaggcagaaaaccctgaaggagaggagaaggaggcagccaccttggaggttgagaggccccttcctatggaggtggaaaagaatagcaccccctctgagcccggctctggccgggggcctccccaagaggaagaagaggaggaggatgaagaggaagaggctaccaaggaagatgctgaggccccaggcatcagagatcatgagagcctgtagccaccaatgtttcaagaggagcccccaccctgttcctgctgctgtctgggtgctactggggaaactggccatggcctgcaaactgggaacccctttcccacccc

SEQ ID NO: 140290 - DNA, 2171 bp, Homo sapiens
  Payload ID: 7523
  Gene Symbol: HDGF
  Gene Name: hepatoma-derived growth factor
  Uniprot ID: P51858
  ENST ID: ENST00000368209
  CDS Start-End: 131-832
atacggtaagcacggcgaggtccagagaggaccccagtgcgcggagcggcacggcgcccactcctctcgccctcggcgcctagcacgctgccaagaaccgcgggtgcccagtaaatatttgtggattgagatggagcagagggcaggcggaaaccgtgtacagacgtccacacttaactgcgctggggccgcggtgattgacgagatgcctgaggctgccgtgaaatcaacagccaacaaataccaagtcttttttttcgggacccacgagacggcattcctgggccccaaagacctcttcccttacgaggaatccaaggagaagtttggcaagcccaacaagaggaaagggttcagcgaggggctgtgggagatcgagaacaaccctactgtcaaggcttccggctatcagtcctcccagaaaaagagctgtgtggaagagcctgaaccagagcccgaagctgcagagggtgacggtgataagaaggggaatgcagagggcagcagcgacgaggaagggaagctggtcattgatgagccagccaaggagaagaacgagaaaggagcgttgaagaggagagcaggggacttgctggaggactctcctaaacgtcccaaggaggcagaaaaccctgaaggagaggagaaggaggcagccaccttggaggttgagaggccccttcctatggaggtggaaaagaatagcaccccctctgagcccggctctggccgggggcctccccaagaggaagaagaggaggaggatgaagaggaagaggctaccaaggaagatgctgaggccccaggcatcagagatcatgagagcctgtagccaccaatgtttcaagaggagcccccaccctgttcctgctgctgtctgggtgctactggggaaactggccatggcctgcaaactgggaacccctttcccaccccaacctgctctcctcttctactcacttttcccactccaagcccagcccatggagattgacctggatggggcaggccacctggctctcacctctaggtccccatactcctatgatctgagtcagagccatgtcttctccctggaatgagttgaggccactgtgttccttccgcttggagctattttccaggcttctgctggggcctgggacaactgctcccacctcctgacacccttctcccactctcctaggcattctggacctctgggttgggatcaggggtaggaatggaaaggatggagcatcaacagcagggtgggcttgtggggcctgggaggggcaatcctcaaatgcggggtgggggcagcacaggagggcggcctccttctgagctcctgtcccctgctacacctattatcccagctgcctagattcagggaaagtgggacagcttgtaggggaggggctcctttccataaatccttgatgattgacaacacccatttttccttttgccgaccccaagagttttgggagttgtagttaatcatcaagagaatttggggcttccaagttgttcgggccaaggacctgagacctgaagggttgactttacccatttgggtgggagtgttgagcatctgtccccctttagatctctgaagccacaaataggatgcttgggaagactcctagctgtcctttttcctctccacacagtgctcaaggccagcttatagtcatatatatcacccagacataaaggaaaagacacattttttaggaaatgtttttaataaaagaaaattacaaaaaaaaattttaaagacccctaaccctttgtgtgctctccattctgctccttccccatcgttgcccccatttctgaggtgcactgggaggctccccttctatttggggcttgatgactttctttttgtagctggggctttgatgttccttccagtgtcatttctcatccacataccctgacctggccccctcagtgttgtcaccagatctgatttgtaacccactgagaggacagagagaaataagtgccctctcccaccctcttcctactggtctctctatgcctctctacagtctcgtctcttttaccctggcccctctcccttgggctctgatgaaaaattgctgactgtagctttggaagtttagctctgagaaccgtagatgatttcagttctaggaaaataaaacccgttgattact

SEQ ID NO: 140291 - DNA, 2073 bp, Homo sapiens
  Payload ID: 7523
  Gene Symbol: HDGF
  Gene Name: hepatoma-derived growth factor
  Uniprot ID: P51858
  ENST ID: ENST00000537739
  CDS Start-End: 170-892
gcgcgcgggcggagacgccgtggccgcgccggagctcgggccgggggccaccatcgaggcgggggccgcgcgagggccggagcggagcggcgccgccaccgccgcacgcgcaaacttgggctcgcgcttcccggcccggcgcggagcccggggcgcccggagccccgccatgtcgcgatccaaccggcagaaggagtacaaatgcggggacctggtgttcgccaagatgaagggctacccacactggccggcccggattgacgagatgcctgaggctgccgtgaaatcaacagccaacaaataccaagtcttttttttcgggacccacgagacggcattcctgggccccaaagacctcttcccttacgaggaatccaaggagaagtttggcaagcccaacaagaggaaagggttcagcgaggggctgtgggagatcgagaacaaccctactgtcaaggcttccggctatcagtcctcccagaaaaagagctgtgtggaagagcctgaaccagagcccgaagctgcagagggtgacggtgataagaaggggaatgcagagggcagcagcgacgaggaagggaagctggtcattgatgagccagccaaggagaagaacgagaaaggagcgttgaagaggagagcaggggacttgctggaggactctcctaaacgtcccaaggaggcagaaaaccctgaaggagaggagaaggaggcagccaccttggaggttgagaggccccttcctatggaggtggaaaagaatagcaccccctctgagcccggctctggccgggggcctccccaagaggaagaagaggaggaggatgaagaggaagaggctaccaaggaagatgctgaggccccaggcatcagagatcatgagagcctgtagccaccaatgtttcaagaggagcccccaccctgttcctgctgctgtctgggtgctactggggaaactggccatggcctgcaaactgggaacccctttcccaccccaacctgctctcctcttctactcacttttcccactccaagcccagcccatggagattgacctggatggggcaggccacctggctctcacctctaggtccccatactcctatgatctgagtcagagccatgtcttctccctggaatgagttgaggccactgtgttccttccgcttgggaggggcaatcctcaaatgcggggtgggggcagcacaggagggcggcctccttctgagctcctgtcccctgctacacctattatcccagctgcctagattcagggaaagtgggacagcttgtaggggaggggctcctttccataaatccttgatgattgacaacacccatttttccttttgccgaccccaagagttttgggagttgtagttaatcatcaagagaatttggggcttccaagttgttcgggccaaggacctgagacctgaagggttgactttacccatttgggtgggagtgttgagcatctgtccccctttagatctctgaagccacaaataggatgcttgggaagactcctagctgtcctttttcctctccacacagtgctcaaggccagcttatagtcatatatatcacccagacataaaggaaaagacacattttttaggaaatgtttttaataaaagaaaattacaaaaaaaaattttaaagacccctaaccctttgtgtgctctccattctgctccttccccatcgttgcccccatttctgaggtgcactgggaggctccccttctatttggggcttgatgactttctttttgtagctggggctttgatgttccttccagtgtcatttctcatccacataccctgacctggccccctcagtgttgtcaccagatctgatttgtaacccactgagaggacagagagaaataagtgccctctcccaccctcttcctactggtctctctatgcctctctacagtctcgtctcttttaccctggcccctctcccttgggctctgatgaaaaattgctgactgtagctttggaagtttagctctgagaaccgtagatgatttcagttctaggaaaataaaacccgttgattact

SEQ ID NO: 140292 - DNA, 805 bp, Homo sapiens
  Payload ID: 7524
  Gene Symbol:
  Gene Name: Hepatoma-derived growth factor-related protein 2 [Source:UniProtKB/Swiss-Prot
  Acc:Q7Z4V5]
  ENST ID: ENST00000589486
  CDS Start-End: 443-805
ccagctgcatcctctgggggaccgcccgtgagcccctctttgcgggaggggtccccaggaaaggtcctgggagtccatagacgctgagcttggccccaccccctggttgcttcagagggccggatctggctttgctcagatcgacgacatcgcggatggcgccgtgaagcccccacccaacaagtaccccatctttttctttggcacacacgaaacagccttcctgggacccaaggacctgttcccctacgacaaatgtaaagacaagtacgggaagcccaacaagaggaaaggcttcaatgaagggctgtgggagatccagaacaacccccacgccagctacagcgcccctccgccagtgagctcctccgacagcgaggcccccgaggccaaccccgccgacggcagtgacgctgacgaggacgatgaggaccggggggtcatggccgtcacagcggtaaccgccacagctgccagcgacaggatggagagcgactcagactcagacaagagtagcgacaacagtggcctgaagaggaagacgcctgcgctaaagatgtcggtctcgaaacgagcccgaaaggcctccagcgacctggatcaggccagcgtgtccccatccgaagaggagaactcggaaagctcatctgagtcggagaagaccagcgaccaggacttcacacctgagaagaaagcagcggtccgggcgccacggaggggccctctggggggacggaaaaaaaagaaggcgccatcagcctccgactccgactccaaggccgattcggacggggccaagcctgag

SEQ ID NO: 140293 - DNA, 1349 bp, Homo sapiens
  Payload ID: 7524
  Gene Symbol:
  Gene Name: Hepatoma-derived growth factor-related protein 2 [Source:UniProtKB/Swiss-Prot
  Acc:Q7Z4V5]
  ENST ID: ENST00000592417
  CDS Start-End: 1-462
aaggtcgacagcccggacgtgaagaggtgcctgaatgccctagaggagctgggaaccctgcaggtgacctctcagatcctccagaagaacacagacgtggtggccaccttgaagaagattcgccgttacaaagcgaacaaggacgtaatggagaaggcagcagaagtctatacccggctcaagtcgcgggtcctcggcccaaagatcgaggcggtgcagaaagtgaacaaggctgggatggagaaggagaaggccgaggagaagctggccggggaggagctggccggggaggaggccccccaggagaaggcggaggacaagcccagcaccgatctctcagccccagtgaatggcgaggccacatcacagaagggggagagcgcagaggacaaggagcacgaggagggtcgggactcggaggaggggccaaggtgtggctcctctgaagacctgcacgagtgagtgtcccgggccgtggggtttggactcctgagcggcagcggtgtgacgcgcaccctgggtccgagccgctcctcctgtgccagtccctctgggatgggtcccagggatgtcgtccttactcgggcctcccaccttcacagctgaccccagggccccgctggctggcacttccggcggcccctacagagaggcagctccagggctttgagctgcctgcccctggcctcctgggaaggtggcttcttgccgagcctccagggtggcccaggtaggtaggccccgagcacgggcacccggctatctgacggtgcctgtgcccatcactgtgggctgctgtctggtacaaggctcagtggagtcactcacttacccagcagctgccttgtgctatgcctggctggcgccagcgtggggaccctggagatggttgtggtctctagtggcagaagacaggcagataggagggcggcactcgagcctcaggtgccacaacgggggtacactcctcggtgcccatcccacccaaccgccctacaggcagggcaggggcgggagggcatcctcacaccgcctttgctgttcccaccagcagcgtacgggagggtcccgacctggacaggcctgggagcgaccggcaggagcgcgagagggcacggggggactcggaggccctggacgaggagagctgagccgcgggcagccaggcccagcccccgcccgagctcaggctgcccctctccttccccggctcgcaggagagcagagcagagaactgtggggaacgctgtgctgtttgtatttgttcccttgggtttttttttcctgcctaatttctgtgatttccaaccaacatgaaatgactataaatggttttttaatgaaaaaag

SEQ ID NO: 140294 - DNA, 740 bp, Homo sapiens
  Payload ID: 7524
  Gene Symbol:
  Gene Name: Hepatoma-derived growth factor-related protein 2 [Source:UniProtKB/Swiss-Prot
  Acc:Q7Z4V5]
  ENST ID: ENST00000592691
  CDS Start-End: 667-740
accgcccgtgagcccctctttgcgggaggggtccccaggaaaggtcctgggagtccatagacgctgagcttggccccaccccctggttgcttcagagggccggatctggctttgctcaggtggagcacctgccctggggccagctccgtccctggggtagggggagagctctctgggtggggcacagctttgcagtgaagggtacacagaagaatgcagcttcccatcgggaaggggctgctgcttcctgggttgaaggctcccctcctcccagcgtgatttgccccaagtaacttggctgatttctcggtgatttcctgggtcagtgggtaaagccaccccctcactggcctctcactgcagatcgacgacatcgcggatggcgccgtgaagcccccacccaacaagtaccccatctttttctttggcacacacgaaacagccttcctgggacccaaggacctgttcccctacgacaaatgtaaagacaagtacgggaagcccaacaagaggaaaggcttcaatgaagggctgtgggagatccagaacaacccccacgccagctacagcgcccctccgccagtgagctcctccgacagcgaggcccccgaggccaaccccgccgacggcagtgacgctgacgaggacgatgaggaccggggggtcatggccgtcacagcggtaaccgccacagctgccagcgacaggatggagagcgactcagactcagacaagagtag

SEQ ID NO: 140295 - DNA, 870 bp, Homo sapiens
  Payload ID: 7524
  Gene Symbol:
  Gene Name: Hepatoma-derived growth factor-related protein 2 [Source:UniProtKB/Swiss-Prot
  Acc:Q7Z4V5]
  ENST ID: ENST00000587016
  CDS Start-End: 1-527
caagcacagagcccgccaggaaacctggccagaaggagaagagagtgcggcccgaggagaagcaacaagccaagcccgtgaaggtggagcggacccggaagcggtccgagggcttctcgatggacaggaaggtagagaagaagaaagagccctccgtggaggagaagctgcagaagctgcacagtgagatcaagtttgccctaaaggtcgacagcccggacgtgaagaggtgcctgaatgccctagaggagctgggaaccctgcaggtgacctctcagatcctccagaagaacacagacgtggtggccaccttgaagaagattcgccgttacaaagcgaacaaggacgtaatggagaaggcagcagaagtctatacccggctcaagtcgcgggtcctcggcccaaagatcgaggcggtgcagaaagtgaacaaggctcagtggagtcactcacttacccagcagctgccttgtgctatgcctggctggcgccagcgtggggaccctggagatggttgtggtctctagtggcagaagacaggcagataggagggcggcactcgagcctcaggtgccacaacgggggtacactcctcggtgcccatcccacccaaccgccctacaggcagggcaggggcgggagggcatcctcacaccgcctttgctgttcccaccagcagcgtacgggagggtcccgacctggacaggcctgggagcgaccggcaggagcgcgagagggcacggggggactcggaggccctggacgaggagagctgagccgcgggcagccaggcccagcccccgcccgagctcaggctgcccctctccttccccggctcgcaggagagcagagcagagaactgtggggaac

SEQ ID NO: 140296 - DNA, 648 bp, Homo sapiens
  Payload ID: 7524
  Gene Symbol:
  Gene Name: Hepatoma-derived growth factor-related protein 2 [Source:UniProtKB/Swiss-Prot
  Acc:Q7Z4V5]
  ENST ID: ENST00000601353
  CDS Start-End: 44-337
ccgctgcagccgctttccgcggcctgggcctctcgccgtcagcatgccacacgccttcaagcccggggacttggtgttcgctaagatgaagggctaccctcactggcctgccaggatcgacgacatcgcggatggcgccgtgaagcccccacccaacaagtaccccatctttttctttggcacacacgaaacagccttcctgggacccaaggacctgttcccctacgacaaatgtaaagacaagtacgggaagcccaacaagaggaaaggcttcaatgaagggctgtgggagatccagaacaacccccacgccagctacagcgcccctccgcagtgagctcctccgacagcgaggcccccgaggccaaccccgccgacggcagtgacgctgacgaggacgatgaggaccggggggtcatggccgtcacagcggtaaccgccacagctgccagcgacaggatggagagcgactcagactcagacaagagtagcgacaacagtggcctgaagaggaagacgcctgcgctaaagatgtcggtctcgaaacgagcccgaaaggcctccagcgacctggatcaggccagcgtgtccccatccgaagaggagaactcggaaagctcatctgagtcggagaagaccagcgaccag

SEQ ID NO: 140297 - DNA, 3100 bp, Homo sapiens
  Payload ID: 7524
  Gene Symbol:
  Gene Name: Hepatoma-derived growth factor-related protein 2 [Source:UniProtKB/Swiss-Prot
  Acc:Q7Z4V5]
  ENST ID: ENST00000615225
  CDS Start-End: 1-1420
aacagccttcctgggacccaaggacctgttcccctacgacaaatgtaaagacaagtacgggaagcccaacaagaggaaaggcttcaatgaagggctgtgggagatccagaacaacccccacgccagctacagcgcccctccgccagtgagctcctccgacagcgaggcccccgaggccaaccccgccgacggcagtgacgctgacgaggacgatgaggaccggggggtcatggccgtcacagcggtaaccgccacagctgccagcgacaggatggagagcgactcagactcagacaagagtagcgacaacagtggcctgaagaggaagacgcctgcgctaaagatgtcggtctcgaaacgagcccgaaaggcctccagcgacctggatcaggccagcgtgtccccatccgaagaggagaactcggaaagctcatctgagtcggagaagaccagcgaccaggacttcacacctgagaagaaagcagcggtccgggcgccacggaggggccctctggggggacggaaaaaaaagaaggcgccatcagcctccgactccgactccaaggccgattcggacggggccaagcctgagccggtggccatggcgcggtcggcgtcctcctcctcctcttcctcctcctcctccgactccgatgtgtctgtgaagaagcctccgaggggcaggaagccagcggagaagcctctcccgaagccgcgagggcggaaaccgaagcctgaacggcctccgtccagctccagcagtgacagtgacagcgacgaggtggaccgcatcagtgagtggaagcggcgggacgaggcgcggaggcgcgagctggaggcccggcggcggcgagagcaggaggaggagctgcggcgcctgcgggagcaggagaaggaggagaaggagcggaggcgcgagcgggccgaccgcggggaggctgagcggggcagcggcggcagcagcggggacgagctcagggaggacgatgagcccgtcaagaagcggggacgcaagggccggggccggggtcccccgtcctcctctgactccgagcccgaggccgagctggagagagaggccaagaaatcagcgaagaagccgcagtcctcaagcacagagcccgccaggaaacctggccagaaggagaagagagtgcggcccgaggagaagcaacaagccaagctggagtgcaatggcgtgatctcagctcactgcaacctccgcctcccgggttcaagcgattctcctgcctcagccctcccgagtagctgggattacaggcacccgccaccacgcctggctaatttttgttgctttagtagacacggggtttcatcatgttggccaggctggtctcgatctcctgaccccgtgatctgcccgcctcagcctcccaaagtgctgggattacaagtgtgagccaccgtgcctggctgcagcccacgtttttgtttttgtttttgtttttttttgagacagagtcttgggcttgctctgtggcccaggctggagtgcagtggcgccatctcagctcactgcaacctctgcctcctgggttcaagcgattttcctagctcagcctccaaagtagctgggactacaggtgtgtgccaccacacccggctaattttttgtatttttagtagagacggggcttcaccgtgttggccaggatggtctctatctcctaaactcatgatccccccgcctcggcctcccaaagtgctgggattacaggcgtgagccaccgtgcttggtcccccagcccactttctaaatggccttgagtgggcaaacctgcccatgagaattcggcaggccggtatggcagtggcggggtacagagcagcacatggcaccgagcctcagcaatgggcctctctcctgcacgcgtgtcacccttgagggccttttcctagctcgctgactctggtagacaaagccagcccttggccatgtgaacgaggaaaagaatcctgggatttcatgagaactcgggaaaaggcttgtatctttgggcagctcgagcctgtggctgccctggtctgccctaggcctaggctgtggcagggcctccccgcctcccgtttcccggcttagctcccagggcctcccaaaggtttcctttgcagtgggtttgggtccaccccttcaggcgccagcccctcagtggcagagtgccggtgacggggcccgactgaggggagcacttctccacaggcccgtgaaggtggagcggacccggaagcggtccgagggcttctcgatggacaggaaggtagagaagaagaaagagccctccgtggaggagaagctgcagaagctgcacagtgagatcaagtttgccctaaaggtcgacagcccggacgtgaagaggtgcctgaatgccctagaggagctgggaaccctgcaggtgacctctcagatcctccagaagaacacagacgtggtggccaccttgaagaagattcgccgttacaaagcgaacaaggacgtaatggagaaggcagcagaagtctatacccggctcaagtcgcgggtcctcggcccaaagatcgaggcggtgcagaaagtgaacaaggctgggatggagaaggagaaggccgaggagaagctggccggggaggagctggccggggaggaggccccccaggagaaggcggaggacaagcccagcaccgatctctcagccccagtgaatggcgaggccacatcacagaagggggagagcgcagaggacaaggagcacgaggagggtcgggactcggaggaggggccaaggtgtggctcctctgaagacctgcacgacagcgtacgggagggtcccgacctggacaggcctgggagcgaccggcaggagcgcgagagggcacggggggactcggaggccctggacgaggagagctgagccgcgggcagccaggcccagcccccgcccgagctcaggctgcccctctccttccccggctcgcaggagagcagagcagagaactgtggggaacgctgtgctgtttgtatttgttcccttgggtttttttttcctgcctaatttctgtgatttccaaccaacatgaaatgactataaatggttttttaatg

SEQ ID NO: 140298 - DNA, 320 bp, Homo sapiens
  Payload ID: 7524
  Gene Symbol:
  Gene Name: Hepatoma-derived growth factor-related protein 2 [Source:UniProtKB/Swiss-Prot
  Acc:Q7Z4V5]
  ENST ID: ENST00000619255
  CDS Start-End: 1-207
gaggagaagctggccggggaggagctggccggggaggaggccccccaggagaaggcggaggacaagcccagcaccgatctctcagccccagtgaatggcgaggccacatcacagaagggggagagcgcagaggacaaggagcacgaggagggtcgggactcggaggaggggccaaggtgtggctcctctgaagacctgcacgactgaccccagggccccgctggctggcacttccggcggcccctacagagaggcagctccagggctttgagctgcctgcccctggcctcctgggaaggtggcttcttgccgagcctcca

SEQ ID NO: 140299 - DNA, 239 bp, Homo sapiens
  Payload ID: 7524
  Gene Symbol:
  Gene Name: Hepatoma-derived growth factor-related protein 2 [Source:UniProtKB/Swiss-Prot
  Acc:Q7Z4V5]
  ENST ID: ENST00000614903
  CDS Start-End: 1-216
gcagaaagtgaacaaggctgggatggagaaggagaaggccgaggagaagctggccggggaggagctggccggggaggaggccccccaggagaaggcggaggacaagcccagcaccgcagcgtacgggagggtcccgacctggacaggcctgggagcgaccggcaggagcgcgagagggcacggggggactcggaggccctggacgaggagagctgagccgcgggcagccaggcccagcc

SEQ ID NO: 140300 - DNA, 2281 bp, Homo sapiens
  Payload ID: 7524
  Gene Symbol:
  Gene Name: Hepatoma-derived growth factor-related protein 2 [Source:UniProtKB/Swiss-Prot
  Acc:Q7Z4V5]
  Uniprot ID: Q7Z4V5
  ENST ID: ENST00000616600
  CDS Start-End: 65-2080
ccgccgccgcagccgctaccgccgctgcagccgctttccgcggcctgggcctctcgccgtcagcatgccacacgccttcaagcccggggacttggtgttcgctaagatgaagggctaccctcactggcctgccaggatcgacgacatcgcggatggcgccgtgaagcccccacccaacaagtaccccatctttttctttggcacacacgaaacagccttcctgggacccaaggacctgttcccctacgacaaatgtaaagacaagtacgggaagcccaacaagaggaaaggcttcaatgaagggctgtgggagatccagaacaacccccacgccagctacagcgcccctccgccagtgagctcctccgacagcgaggcccccgaggccaaccccgccgacggcagtgacgctgacgaggacgatgaggaccggggggtcatggccgtcacagcggtaaccgccacagctgccagcgacaggatggagagcgactcagactcagacaagagtagcgacaacagtggcctgaagaggaagacgcctgcgctaaagatgtcggtctcgaaacgagcccgaaaggcctccagcgacctggatcaggccagcgtgtccccatccgaagaggagaactcggaaagctcatctgagtcggagaagaccagcgaccaggacttcacacctgagaagaaagcagcggtccgggcgccacggaggggccctctggggggacggaaaaaaaagaaggcgccatcagcctccgactccgactccaaggccgattcggacggggccaagcctgagccggtggccatggcgcggtcggcgtcctcctcctcctcttcctcctcctcctccgactccgatgtgtctgtgaagaagcctccgaggggcaggaagccagcggagaagcctctcccgaagccgcgagggcggaaaccgaagcctgaacggcctccgtccagctccagcagtgacagtgacagcgacgaggtggaccgcatcagtgagtggaagcggcgggacgaggcgcggaggcgcgagctggaggcccggcggcggcgagagcaggaggaggagctgcggcgcctgcgggagcaggagaaggaggagaaggagcggaggcgcgagcgggccgaccgcggggaggctgagcggggcagcggcggcagcagcggggacgagctcagggaggacgatgagcccgtcaagaagcggggacgcaagggccggggccggggtcccccgtcctcctctgactccgagcccgaggccgagctggagagagaggccaagaaatcagcgaagaagccgcagtcctcaagcacagagcccgccaggaaacctggccagaaggagaagagagtgcggcccgaggagaagcaacaagccaagcccgtgaaggtggagcggacccggaagcggtccgagggcttctcgatggacaggaaggtagagaagaagaaagagccctccgtggaggagaagctgcagaagctgcacagtgagatcaagtttgccctaaaggtcgacagcccggacgtgaagaggtgcctgaatgccctagaggagctgggaaccctgcaggtgacctctcagatcctccagaagaacacagacgtggtggccaccttgaagaagattcgccgttacaaagcgaacaaggacgtaatggagaaggcagcagaagtctatacccggctcaagtcgcgggtcctcggcccaaagatcgaggcggtgcagaaagtgaacaaggctgggatggagaaggagaaggccgaggagaagctggccggggaggagctggccggggaggaggccccccaggagaaggcggaggacaagcccagcaccgatctctcagccccagtgaatggcgaggccacatcacagaagggggagagcgcagaggacaaggagcacgaggagggtcgggactcggaggaggggccaaggtgtggctcctctgaagacctgcacgacagcgtacgggagggtcccgacctggacaggcctgggagcgaccggcaggagcgcgagagggcacggggggactcggaggccctggacgaggagagctgagccgcgggcagccaggcccagcccccgcccgagctcaggctgcccctctccttccccggctcgcaggagagcagagcagagaactgtggggaacgctgtgctgtttgtatttgttcccttgggtttttttttcctgcctaatttctgtgatttccaaccaacatgaaatgactataaatggttttttaatgaaaaaagaaa

SEQ ID NO: 140301 - DNA, 2255 bp, Homo sapiens
  Payload ID: 7524
  Gene Symbol:
  Gene Name: Hepatoma-derived growth factor-related protein 2 [Source:UniProtKB/Swiss-Prot
  Acc:Q7Z4V5]
  ENST ID: ENST00000621835
  CDS Start-End: 46-2058
cgccgctgcagccgctttccgcggcctgggcctctcgccgtcagcatgccacacgccttcaagcccggggacttggtgttcgctaagatgaagggctaccctcactggcctgccaggatcgacgacatcgcggatggcgccgtgaagcccccacccaacaagtaccccatctttttctttggcacacacgaaacagccttcctgggacccaaggacctgttcccctacgacaaatgtaaagacaagtacgggaagcccaacaagaggaaaggcttcaatgaagggctgtgggagatccagaacaacccccacgccagctacagcgcccctccgccagtgagctcctccgacagcgaggcccccgaggccaaccccgccgacggcagtgacgctgacgaggacgatgaggaccggggggtcatggccgtcacagcggtaaccgccacagctgccagcgacaggatggagagcgactcagactcagacaagagtagcgacaacagtggcctgaagaggaagacgcctgcgctaaagatgtcggtctcgaaacgagcccgaaaggcctccagcgacctggatcaggccagcgtgtccccatccgaagaggagaactcggaaagctcatctgagtcggagaagaccagcgaccaggacttcacacctgagaagaaagcagcggtccgggcgccacggaggggccctctggggggacggaaaaaaaagaaggcgccatcagcctccgactccgactccaaggccgattcggacggggccaagcctgagccggtggccatggcgcggtcggcgtcctcctcctcctcttcctcctcctcctccgactccgatgtgtctgtgaagaagcctccgaggggcaggaagccagcggagaagcctctcccgaagccgcgagggcggaaaccgaagcctgaacggcctccgtccagctccagcagtgacagtgacagcgacgaggtggaccgcatcagtgagtggaagcggcgggacgaggcgcggaggcgcgagctggaggcccggcggcggcgagagcaggaggaggagctgcggcgcctgcgggagcaggagaaggaggagaaggagcggaggcgcgagcgggccgaccgcggggaggctgagcggggcagcggcggcagcagcggggacgagctcagggaggacgatgagcccgtcaagaagcggggacgcaagggccggggccggggtcccccgtcctcctctgactccgagcccgaggccgagctggagagagaggccaagaaatcagcgaagaagccgcagtcctcaagcacagagcccgccaggaaacctggccagaaggagaagagagtgcggcccgaggagaagcaacaagccaagcccgtgaaggtggagcggacccggaagcggtccgagggcttctcgatggacaggaaggtagagaagaagaaagagccctccgtggaggagaagctgcagaagctgcacagtgagatcaagtttgccctaaaggtcgacagcccggacgtgaagaggtgcctgaatgccctagaggagctgggaaccctgcaggtgacctctcagatcctccagaagaacacagacgtggtggccaccttgaagaagattcgccgttacaaagcgaacaaggacgtaatggagaaggcagcagaagtctatacccggctcaagtcgcgggtcctcggcccaaagatcgaggcggtgcagaaagtgaacaaggctgggatggagaaggagaaggccgaggagaagctggccggggaggagctggccggggaggaggccccccaggagaaggcggaggacaagcccagcaccgatctctcagccccagtgaatggcgaggccacatcacagaagggggagagcgcagaggacaaggagcacgaggagggtcgggactcggaggaggggccaaggtgtggctcctctgaagacctgcacgacgtacgggagggtcccgacctggacaggcctgggagcgaccggcaggagcgcgagagggcacggggggactcggaggccctggacgaggagagctgagccgcgggcagccaggcccagcccccgcccgagctcaggctgcccctctccttccccggctcgcaggagagcagagcagagaactgtggggaacgctgtgctgtttgtatttgttcccttgggtttttttttcctgcctaatttctgtgatttccaaccaacatgaaatgactataaatggttttttaatgaaaaaa

SEQ ID NO: 140302 - DNA, 12733 bp, Homo sapiens
  Payload ID: 7525
  Gene Symbol:
  Gene Name: Hepatoma-derived growth factor-related protein 3 [Source:UniProtKB/Swiss-Prot
  Acc:Q9Y3E1]
  Uniprot ID: Q9Y3E1
  ENST ID: ENST00000299633
  CDS Start-End: 605-1216
gcccaccgcccgcccgccagccgagaagccgggctggcgcgctcggtttctccgcgaaagccggccgtgtacctaggaattaaccggcccgcgcgggagggaaggggaggggagcgggaagcgggaagcggggcgggggggggatgctgagcgcgcgcgagaacaataataagatcgtgtttgcggtcgctgcccgagaaggaattcggagcagacgcgaggcccggcgctcgcgccgcgcccgggagcccgggagggagaccggcagcggcggcatgaggcaggcgacgcggcgctggtgagcagcgcgcgcggcggcggcggcggcggcggcggggaccttggcgcggccggacgcgggcgagcgccgaacggccgggggctcccctcccccgctgccgggccgtgatttgccgggcctgctgcgccccccgcccaccccttgcctcagccgccgcctcgccgcttcccctcgtcggagcggccgctcgtccgcccggcttgaggcccgcggggagcgcggcgcaattcgtcggcccgcgggggggcggcctcccggcatcttcgcggcgaccaaggactaccaggaaggggagcggctgggatggcgcgtccgcggccccgcgagtacaaagcgggcgacctggtcttcgccaagatgaagggctacccgcactggccggcccggattgatgaactcccagagggcgctgtgaagcctccagcaaacaagtatcctatcttcttttttggcacccatgaaactgcatttctaggtcccaaagacctttttccatataaggagtacaaagacaagtttggaaagtcaaacaaacggaaaggatttaacgaaggattgtgggaaatagaaaataacccaggagtaaagtttactggctaccaggcaattcagcaacagagctcttcagaaactgagggagaaggtggaaatactgcagatgcaagcagtgaggaagaaggtgatagagtagaagaagatggaaaaggcaaaagaaagaatgaaaaagcaggctcaaaacggaaaaagtcatatacttcaaagaaatcctctaaacagtcccggaaatctccaggagatgaagatgacaaagactgcaaagaagaggaaaacaaaagcagctctgagggtggagatgcgggcaacgacacaagaaacacaacttcagacttgcagaaaaccagtgaagggacctaactaccataatgaatgctgcatattaagagaaaccacaagaaggttatatgtttggttgtctaatattcttggatttgatatgaaccaacacatagtccttgttgtcattgacagaaccccagtttgtatgtacattattcatattcctctctgttgtgtttcggggggaaaagacattttagccttttttaaaagttactgatttaatttcatgttatttggttgcatgaagttgcccttaaccactaaggattatcaagatttttgcgcagacttatacatgtctaggatccttttatcaaggcagttatgatcatcgttttcctgccttgaccccaccatcatcaaacactcagttaaatataaattaacattttttagatgaccactcaacataatgcttaagaatggaatttcctctctgtgacagaacccaggaattaattcctaaatacataacgttggtatattgaagacgaaattaaaattgtccttcagttttgaggccatgtgtaaagtttaaccatattgtaaaatatctattccgtattagaaatagctagttgacagcttatacttctcaaaattcatattgttatgtacacaaactaagtttctatatgtgaagttagtgagtctttttgtgttactccaaaataaaggcaatgatttatttttttcccagtgccaatacaattttgagctaagcactcaaggtggatactttacattttaaagctggaatcagcaacagccctatgggaaaccagacaaagcattgacttttaaatgtagacttttaaaataaactgttttcttttggaactacaattagaatagttaatattcatccttaaaccattattatgtgtacattattgttgctattgtgataatagagaattttatttatttttatgccagcttatattgtgagaacacatttagtcagtttgggttttatcaatcctgttaatgcttgtccttggaacatctttcgcgtattcacggtttgtagttgaaaagtttactgtaaaaaaatcaaaaacaaaaaaatgtattgtttttacagaataaatttattggaatgtgtactgggagtaagatttgaggttgtaagcaaactaagttagtgtaatttggcttcatatatgtaacgtgaggtattaatgtaattcatatattaaagcaaaaattgttcacagcaagctgacaatagaatcaagtgcaggtgagggtttttctttttctttctttttttttttttaaacactctctgggttttagattatttgaaaacactgtaggggatgatggggagatgactacatgatttgcttacacttacatatttaccagcccagtggaccctagattttgtaatttgatattatccatgcattgatttgtatcccattttcttttggttttcttgatgagagctaataaaaacatgagaaaatgtgagcagacctaaaagcctagggccgttaataatgatgatggtgatgatggcagctaagggtatgaaagcaccagtccatttatcattccagggcacagtgaggaggtggctgtttgtatttttggtgtgtttctttcatttagtgaatactgattttctctagtatactcaacatacaatcccaaacatgaaaagttcataaaaagatagtagggatgtcgatctaatacttcttccttaaaaggtcctttttaattttgaatatttgaatgtattttttaattaatgaaatttaattcatcaaaagacctcttcattgctcacactgaaacataaggggaatgtagatggcattttgaattggaatatacaactcacaaattttctttaaaagcgttttatgtgtatatatgaaatgtttcaaatttaataagatttgtctttataagaggccaaaaataattttattaaaaatatacacagaaatacaatagaaatatttccagccaccaataaaacaaatgttcattaaggatagagataaagttactgatccctatttagctgtttaaattcacacaaaaaaatttagtaaaagtaattttcttgaaacagcagcaaataataaactttccttgggaaaacatttttcaaacaacatttaaaaatattctgatgatttgccttttatattgagtttaataatgaagcatattcatcttatttgcaaaagttactcctccagtctgcattcactgttttgaattttttaatatgcacaggccatattctcttttgaatagtttcatttcatgctcactactgttggcactaaattgtaattttttacacttataattattttatatgtcaaacaatattgagatggatgatcaagtttattcacaaatgattttgaatatatttctttaaacaaactgtttctcaagaatttccattttccttcaaaaaaaatttacacaataccatatagctcacacatacagtgcagagcaagaatgtacatattcttaagtactcacgtatgagaagagagtgaaatgggacaaaatatcagtaccagtataacaaaagttagtaatttagaaaggaggaacatgaagtaatatttttattccactttttcttctgcctttgtttttatgaagaactctggtttgtagatacaacgataggccaagagctgaggaagaactccatatgctatgtttaatgctaaaaaaaggatttttgcttcttcagggactctgtagacataagcagttctagcatgaagagatgcaccaatgtgagaaaactgagcctgttgcatttaaaaaaaaaaaattgagtaagcatgaaacgtgttcagttggatgcatgatgagttctgaatggttcattcaggctacgtttctgtgccctcaaaaccagtctcacctgcaggcaaaataccttcaaacaatccagagtctttaatgtcagagtctttcattaaatttagtccttgattaaatttagggccattcttgatatgactgttcaaataaagtagatattatttagtgtagttttatcatgccagttgtgttttttaaccatcaagtgccccttaccgaacattagtggctcaatctaatagaaaaatctgaataaaatctcaaatttttttctgatttgcgttctggagatcctgcatacagactcagttgtggttcacaaattgcgttccaataaaaatgaagaaagcgcagagttttaaaaaacaaatatttttagcataaactattgaaagggaagcactggggggacctcagcttcatttatcagtctttcatctactccttgcagcaagagctcataccctttccctatgtgttttttgtttattcatttattcatgtatttgttttttctgcagcttttaaaatattaagggttgtttgtaagataaggttgttaccaacttgggtggaggtaggagtacggttgctctttgtaaaatggcaaatgtacatgcaggcaacctttttaaatcaaattataatttatttagaagtacgacatgtcagcattatccgcatttgcaaaatggcctccctctctacttatatacttattcagaaaacacattcagaatgtgccaattggtcttttttgatatttttcgcaagcacagaggaaaaccgtattggaaagggtaaaacagaccacagcaggattaaaagctcctgtcagaaaatttcctcagaaggcttgtatcattacaaaatgtacccctggagtctgcattttcatatcttgctgaaattcaagatacacatgaataaaggattgggaatctaaatgtaataagtagtaaattatcagttcatcaggatcaaagagacaaaagactgcactatagagaaggcatagaagtaacaagaatgaagaactagataatttgctttaaatacatataagttattttacatttcttccatatgaaaccaatttattctgctgagtgatttcacagataaaggtgttacttacttgacttcaccatgacaagaaaaggacaagtttttttaagcagcatctttatgaattttttatcagtggcagatattttaatgggctgcatttttacaaattcctgatatattctggagacctgtggtacatttttgctactctggagatataaattaaattagcatgatgtattgccaaggaccagcacgtggattgtctacattgtgatccatgaggcactgagaggactcggccctcagatacaactcccctgggtagatgcccaggcagaacccagcaaatgtatatgcatctctgggctctgaggacaaaatgccttgagagtaaagggcactttcagggctgccctgaggaggtgctttctggacattctaggaactctgagcaggagcatggctcccatactgtttttccttagggcctgttttgaataatagtgtttttctgaatatataaccaagcattttctctggactggaagccacatttgatccctggttctcagaaatctgggtttggtggttctgtctttatagatacttgtacacatcacaaaatcaccaaatttggggaaatgccaaccatactttgagagaataaatatgagcagttgtgcctacttgcataggggagcctgtgtaaaaagtcagtgattccgtaggctcttttcctgcactaaccagtgcagttaatacctcactttcatgaacagcaaactcatggcaacattaagtgaatcatggccgggcgcagtggctcacgcctgtaatcccagtactttgggaggccaaggcgggtggatcacctgaggtcaggagttcaagacgagcctggccaacatagtgaaaccccatctctactaaaaaatacaaaaaattagccgggcgtggtggcagacgcctgtaatctcagctgctcgggaggctgaggcaggagaattgcttgaacccggggagtggaggttgcagtgagccaagattgtgccactgcactccagcctgggtgacagagtgagactctgtctttaaaaaaaaaaaaagattcatgtccttagattagattgtaagcccactgggcaggtactgtgtctaatgttttgtgtggcacctgtcacattgttagagctcaataaacgttcaacaacaatggacttgtgactgtcaaaatacaaaaagggtctacaaagcatttctctagttttgtatgtattttagtaggcctctttattcagaattattaaacaaggcacaaaaattttaacattcataatcaaaagaggcatttgtatgtgagagaagaactctaaggccagtggtgtgcagctcccagtactgctcatagtcctaatggatgtacttatggtggccacacttccagctgagtgagcacctgaccatagctttctcctaaggcataggatgttaagtgttcagggttctgaagttcagaaaaacagtctcacctgaggaggtttctcttcccaagcacatagctaataaagggctgcaggttttctcctgggtgatgttcccagcagcacaaggcctctcatggcaggacctgaagagctcagcctgagcctgtgctggggtcaggtggctcagtgaactcaatgctgctgaattaacaggaggcccaggattacagatatgagttgttgatcctagaaatttctccagaatttagcaatgtgaggttgagtccctaataatttttcttccacttcattctaaatcattttcaccttacagaaataattaagagatatactctgatttttttttaagaatggatgattggaatggcaaatgagacaataaggtgaacaaaggttaaattttaagagctgttttcttacatgtatagagacaatctgtaaaggataactaaaaaagttaatcgtggttccacaaggaggaactgaaagagtgttatatgtccatgtgaatgttataggcagaaaacttaggtgaccattgggatgatagccagggtcttttgctaatacagtataaatagctaatctagaactgtgttatcttttcttagagttttctgagcaacatagttcattggttcagaacactgactttggaactagacatccagagtcaaatcacagctccaccacaaaccagccgtatggcctcgggtgaggtgtggaacccacctcataggttgttatgagggttcagtgaggtgatgtttgtgacatgcttagacagtgtcaagcacttggggctattctgtagacacaagtacaaaactgaaatacccattcatgatctggtgctcgactgtagaaaatctgggccctttgtttttagattctcttgaccttttgacctttttactgtgagtgtctccatgaaaggataagtacataaaagatgttaaatcagtataatttaatactaaataaagatgtttagcaatgaatcacaccagaagcaaatgaagaaaacaagatttgcattagtatcccaactatccgtgttcttcctaaactgttactttcagatttttcttaacgtctccatgagggaaaaaccgtatgaaatttacttccaggctgagcgtggtggctcatacctataatcccagcactttgggatgccaaggcgggagggtcacttgagtccaggagtttgagaccagcctgggcaacatagcaagaccctgtctcaagttaaaaaaaaaatgataaatttacttcagtaaactcttcacaaccaaattattcacacgtaagtttccatatctctttgtgagaaaaagacatgacatagcacctacatagccagggagttagagagtctgagggcagcacctgactgaagtaactgaacctccttcgctggctgtgggatggcaggctccttaccaagcccatggtgagtctgtcccaaagctttcacccagtttctttgttttcttggtaattatatacaatacacttaatttaattagtttgtcttcaggttaatcttcggaacaacataaggcatatctccaaattcttactgggaatcttctaccagtaatagtagcaacaaagggttacatagctgttatgtgccagacactgttttaagccctttacatgtattacctcatccaaccctaacagcaattccatgagaaagctactgttattatcctcactttacagaagaggaaactgaggatcagagaggtaaagtagccaaggtcattgtgctcatcagcaacaggctagaatctgaaccagttcacctccagagcttatgttcctaactatatgaactctactggctttggctttttttcattttcattgatattttagcagagaaaatgcttcaattgataggaaatgctaataagtggatctaagcagcctataatgcctttcagattacacttgcagctttaatcctatggttagcattttatatgaaaagatacctgggttatgagtaagtccccagtggaactctttggtctaaaatgtgtcctggtttcattttattcaatcttcttttactctttccttgatcttttgatttctgaaggcagcagatttggcagactcctacatggtctgaaatcaaggccccaataactactcactcttttttctttcttttttttgagacagtcttgctctgtcacccaggctgcagtgtagtgggcgtgatcttggcacactgcagcctctgcctcccaggttcaagcgattctcctgcctcagcctcccaagtagctgggattatagatgcccaccaccacacccagctaattttttgtatttttagtagagacggggtttcgtcatgttggccaggctggtctcaaactcctgacctcaggtgatccacctgcctggtcctcccaaagtgctagggttacatgtgtgagccactgcgcctggccactactcaatatttcttccattggcctatactgatctagaacttttcaaaggtggtttttttttcccttactaagttgcatagattcttgagagtttactagatgtttcagtaaaagtaagttttagtaaagttagtgggatcatgaatgcataaggtttctaaataagaatggcaattttagcaagcaaagatgctgattaaagttacagaaaaatgcctatttttgttttgttttgtttttttgtggtggtgggagagacagggtctctctctgtcacctgggctggagagtgcagtgacacagtctcggctcactgcaacctctgcctcctggttcaagtgatcctcccacctcagccttcctagtagctgggactgcaggcatatgccatcacgccagcctaatttttgtattttttgtagagatggggttttaccatgttgcccaggctggtttcaaactcctgacttcaagcagtccacccacctcgggctcccaaagtgctgggattacaggtgtgagccaccgtgccttgctggagagtgctttctgtgatgaatgtgtcagatactcccataagatgagactccatttcataagcgagtatttgctaagtacaaaacaaataacgtaattcagtattctggtcatatctattgttttgttgcggcatggcttctaacttttccttagcctacacactataagtgggtagatattaaagctcagccaagagctgtgggaatcagacccataattctttactcagtctgtcttcacctgctgggctgggagaaacatccttctgacatttacaggatctggtccttagccttaggctctggatctgggcattcaccatcaagagaggggcttcaggctgccttatcaactgggcagtgatggataagccccaggatgcctgacgtctgacatgaatgaggtaatgcccctgcggctgccagctgctctgtagtccacactgcccttctcagaaccacttggctggagtaataagtgcccacctgcaagcttagcttcaccaacagattagggtttgtcttattgctacaggcttaccacacccattttcctctaagctatgaccttcctaagcttcctgactgttgaccctggccatgtgactaggcttttgcctaggttttcctgctgtttccatttgtctcctgagacttgaccaggtccaacatctggtctctttaaccagcctgctggctgatgacacttagcattcctgcatcagggactggtaccaggccgaccaggcacatggcaggcagaggaggcctgattgtgcaggcaaagcacaattgacacaggtaataggtgtcaaactgaacagctgtcaaactgaacagtctaatcctctaaagaaagggctggcaagagtgaagtgggtatgcggccatctgttctgaaggatacaggagaataaggcagaggaaccaggccaaaaaaaaaggcaaggcttactctgccctcagacctgctgcatatgcccacacctcagtgtttccctgggttattccctggagaggctcagcctaataaagccccacttggccctcagagtccaactcggaatgtcactgccttccacccacaaggttctccagcacctcgtactacatacagtcttttgtgctgtaggactctgtgccatagttcattgtttgcatggggtgggtgagataacacaatggagaagaatatgagctttggagtcagacaggatttcataaacctattctgccatttaataactgtaatcttaggcaaataatttcaggtggactgagcctcagcctcctcatctttaaattggggtttttttcccagagctattacaaaagatattattatgtgtccattgtgctgtttattctgaggcaggcaggaagaccacagtcaccagcctcccctcagttgacctggtgccaggcctggaccttgaaaatatcccacatgatctttgcataaaaaagaattaaaattttaattgtgttaagctactctgagtatttgttacagcagcagagcacatagcctatccttagacaaataggtaagtaaaacttttaacgtggtttgcctggcatgaagtaaggtaatgagagctcagactagtgtaggggcagcggagctggaaaaaaaaaatgggttggagaatcactggagtaaaactaactggacctggttgggtgtggtggctcacacctgtaatcctaccactttgggaggctgaggcaggaggattacttgaagcaggcatttgagaataagctgggcaacaaaataagatcccatctctttaaaaaatttaaaaattagctgtgtgcggtggtgtatgtctgtagtcccagctactctggagacagaggcaggaggattgcttgagcctaggagtccgaggctgcggtgagctatgactgtgccatcacactccagcctgggagatggagcaagaccctgtctctttaaaagaaaaaaaaaaggacttagtggtggtctagatgtagaggatgaggagtgtaaataattactccaagtttctggcttgagttgctggatgcaattggactatttaaacagataatgaaaaaatggaagagaggttgtggggaggatcaggtcctattttatatattaaatctgaggtgctagtgaggcatgcaagtaaaaagactgagtttggaatgaaatacaggagtctgggaacggtgtgggccgaaggtagaaaactggaagttatcagcttatagttggtattgaaagatacaaagataaagacctaaaatacagaaataaaccccaaggactgaggaatcaggtatttagaggtctgcaaaggaaaaacaaccagcaaagagcaataaatgttagttctcttccttcttaagcccctcaaggaaaggacaggaaccattacttctggatgctacatcaactttttcgatactactatgctaattttataattaagaattacctcaaactgaaaggatttaatgcattgaccccttaaatactatatttttcaaccgtgtgaattctagtatgtcttacgatcatgattattataccatgcatataattgactgtacaagcctacagtttctagatgaacctcattcttataactgcttgaaaagaacaagatgaagctaatgtttttaaatgataagttcatttgttttatttctagtaagaaaaattaattttcttccttgttcagaagattgatttgttttgctaattatcttgtaaaaatgtgctttatgttatgtgtgaagttctccatagataatttcattttcagttaaacgcagtaagcattcactgaacacctactctaggccaaatatttggcaaggtgccagcggaaaaggaatgaaatgacaggcccagaacattttttaaaccagtttccctggttctgtatagcatagcgtagtggaattctgaagtcttaaatttggatggacattttgaaggtgacagctctcaatccttttttagtagccatggtattcagagattgtgaaacagtccaataaaacaacaatgccaca

SEQ ID NO: 140303 - DNA, 3397 bp, Homo sapiens
  Payload ID: 7525
  Gene Symbol:
  Gene Name: Hepatoma-derived growth factor-related protein 3 [Source:UniProtKB/Swiss-Prot
  Acc:Q9Y3E1]
  ENST ID: ENST00000568294
  CDS Start-End: 1-426
tttggaaagtcaaacaaacggaaaggatttaacgaaggattgtgggaaatagaaaataacccaggagtaaagtttactggctaccaggcaattcagcaacagagctcttcagaaactgagggagaaggtggaaatactgcagatgcaagcagtgaggaagaaggtgatagagtagaagaagatggaaaaggcaaaagaaagaatgaaaaagcaggctcaaaacggaaaaagtcatatacttcaaagaaatcctctaaacagtcccggaaatctccaggagatgaagatgacaaagactgcaaagaagaggaaaacaaaagcagctctgagggtggagatgcgggcaacgacacaagaaacacaacttcagacttgcagaaaaccagtgaagggaagatgctgtggacaattatcgagatagactaacagaataccccttctacacacccagctggacctccacctgtgttcgcagctctccccatccctgcctaagtactctcatcaagggaacactcatcacaggagtggagaatgatggtcactgccggctcagtcacagaagattctagcaggccaactccacccatcctccactcccctacaagtggctgcccagaatcaaacccacatcccacatgggcagtgggagcaaagccagtaactgagtggccaaggaagcatagaagtgaccactaagtttaagacaatgattcaggctgggcatggtggctcaagtctgtaatcccagcactttgggaggctgaagcaggcagatcacctgaggtcaggagttcaagaccagcctggccaacatattgaaaccccgtctctactaaaaatacaaaaattttctgggtgtggtggtgcacgcctgtaatcccagctactccagaggctgagacaagtgaattgcttgaacccaggaggcggaggttgcagtgagccgagatcacaccactgcactccagcctgggcgacagaacaagactctgtctcaaaaaaaaaaaaagacaatgacttgacgaagtgattcatctcaatgattcccaagcaggccacctcacagcgtgtccagtgtggttaccctattccacatggcgtatcctagagacagacaggtggctgatgtgcaagtgacaatggctttcagaaaaaagactagtgatgttaaaaatgaatacaagagggtataattgaatatgacagaaggaaagctatacctgtcagagaatcttaccagagttgtgagcatctcctaaatgggcttaaaactactagcacaaataactaagaaataatactttttaaacagcaggtgatcaaatttagtgcatgttagtttgtcaaagctgcattttcaagttgtaacagattggtgccttagactatgggatggacatggacagaagaaaaatctgatggtgaatataagaaaagctgtgaaaaaagaaatggagaggagtgtggggatggttaattcacagagaagggaagccggccttgcctggagtcagcagccaggagtccagcattcacattctccccagaaggaacaaaaggccacatgtgccctgttttgcagatgtgccttccccacgcctccatgggggcctttggcccagttctcattggcagtgtcacttcctgatactcattttccagaagcctcccaggtgattagccatcatatgtctccaagaaaggaagtgttcggcacataatctgccaatgattgctgatgacaacacaagtgtcagacactgtgttagcaatgacaaggacatggtctctgccttctagtacgtgaggagtctggccttgagcctcaccctgaggctgcagtgtactcaaagttgtaacagaccaggacagagggctgagggtacaggagaaagggtgcccagccttgaagagtcaggagagacatcagtacagttaatacaggctccatggagtggggaggaacaggagggacagacagcagcaggaaactcatctggaaaggtgtgcaagggtcagagcacaggctagtggagagagccaggaaaaggcatgtgggccttgaaagcagacggacccagctcatctaatgactggctgtaaaaccttaggcaaattacatcatttctgaagcttcagagcttcttatatgtggattgggagaaactagttactcacaattcttccttcccaccccacctttcccaaggcccactgtaggcagagaatgctccctatgctgttgctgatgggcttggccctatgcctcatctcagccattggaatatgggtgggagtaagatggggcagctccaagccaaggccttaagagccaccactttcttccttctagccccactgtgcctctgtatctgccatgagaagggcatgcctgggagctgctggtccaagaacaaggagtcagagaacagccctgaaatcaacccacagcctgatgcagagtggccccaacccacagacctgtgagcaagaaaaataaatgtttgttgctgtaggacttggggtgcatttgatatgcagcattactgaagcagaaactacagaacaaaatgcccagcaaggtacctggcacaggaagtgctcaaaggccggtagcagcttggctggggcagcatgcatgatggaagggcatgggctttaggggtcaacagccacacgacctttgccacatttcttagcatctccaagccagctgcttcactttcaagtggagggatggtgaggattaggtgaaagcctgctgctaaagtgctcagggtcatacaaggtgcactataggtgcttgtctctatggcaggttccattattttcctcttcatgcatatgtgcagacccagacaccacacagttaagttctgcactaagtgggggggactgctagtagcaggctgaagacaggaagcccaggaaggagctagcatgagagtcgaggtcagaggtcagaggtcaaagcatgctggggttggcagggtgccctgcctggcctggcagtaactctccaccgggatgccacctgggagagggtggagtccactgcctgagaggcaatagccagaggcgagggccagattgtcctgaaacacccctacacttgcagccactgttaccaaagggctcagagtattcacaaccaaggaggaatatgtgactgaggctgaaagtattgtgttattaatcagatacaaaagatttccctttgtggagacgtaccatagaacagtgggtcccggggtggttttcttttgacgaggacacgagccagcagtgctaccaggaacaggatgagggcagcaacccctacaatagtccaggaactgcaacgaccagaacagggaggtggtcactatcaaaataaacacattggtgcctggaa

SEQ ID NO: 140304 - DNA, 934 bp, Homo sapiens
  Payload ID: 7525
  Gene Symbol:
  Gene Name: Hepatoma-derived growth factor-related protein 3 [Source:UniProtKB/Swiss-Prot
  Acc:Q9Y3E1]
  ENST ID: ENST00000563790
  CDS Start-End: 128-262
ggagcggccgctcgtccgcccggcttgaggcccgcggggagcgcggcgcaattcgtcggcccgcgggggggcggcctcccggcatcttcgcggcgaccaaggactaccaggaaggggagcggctgggatggcgcgtccgcggccccgcgagtacaaagcgggcgacctggtcttcgccaagatgaagggctacccgcactggccggcccggattggaacttttggcagaaagtcaaaactgtcttcatatctgtatccttagaaagagattgatgaactcccagagggcgctgtgaagcctccagcaaacaagtatcctatcttcttttttggcacccatgaaactgcatttctaggtcccaaagacctttttccatataaggagtacaaagacaagtttggaaagtcaaacaaacggaaaggatttaacgaaggattgtgggaaatagaaaataacccaggagtaaagtttactggctaccaggcaattcagcaacagagctcttcagaaactgagggagaaggtggaaatactgcagatgcaagcagtgaggaagaaggtgatagagtagaagaagatggaaaaggcaaaagaaagaatgaaaaagcaggctcaaaacggaaaaagtcatatacttcaaagaaatcctctaaacagtcccggaaatctccaggagatgaagatgacaaagactgcaaagaagaggaaaacaaaagcagctctgagggtggagatgcgggcaacgacacaagaaacacaacttcagacttgcagaaaaccagtgaagggacctaactaccataatgaatgctgcatattaagagaaaccacaagaaggttatatgtttggttgtctaatattcttggatttgatatgaaccaacacatagtccttgttgtcattgacagaaccccagtttgtatgtacattat

SEQ ID NO: 140305 - DNA, 448 bp, Homo sapiens
  Payload ID: 7525
  Gene Symbol:
  Gene Name: Hepatoma-derived growth factor-related protein 3 [Source:UniProtKB/Swiss-Prot
  Acc:Q9Y3E1]
  ENST ID: ENST00000563404
  CDS Start-End: 115-249
gtccgcccggcttgaggcccgcggggagcgcggcgcaattcgtcggcccgcgggggggcggcctcccggcatcttcgcggcgaccaaggactaccaggaaggggagcggctgggatggcgcgtccgcggccccgcgagtacaaagcgggcgacctggtcttcgccaagatgaagggctacccgcactggccggcccggattggaacttttggcagaaagtcaaaactgtcttcatatctgtatccttagaaagaggaagacttctgtgaaaatgtgacacttcagcagagttggatgttctgaggaaaaagtaggaatgagctcagcataatcaaggaaaagcaagaaggcaaatgaggcgcagagtgagcgagctaggacctgggggagaaggacagaagatgaattcagattgatgaactcccagagggcgctgtgaagcctccag

SEQ ID NO: 140306 - DNA, 558 bp, Homo sapiens
  Payload ID: 7526
  Gene Symbol: HAMP
  Gene Name: hepcidin antimicrobial peptide
  Uniprot ID: P81172
  ENST ID: ENST00000222304
  CDS Start-End: 233-487
aacacacctctgccggctgagggtgacacaaccctgttccctgtcgctctgttcccgcttatctctcccgccttttcggcgccaccaccttcttggaaatgagacagagcaaaggggagggggctcagaccaccgcctcccctggcaggccccataaaagcgactgtcactcggtcccagacaccagagcaagctcaagacccagcagtgggacagccagacagacggcacgatggcactgagctcccagatctgggccgcttgcctcctgctcctcctcctcctcgccagcctgaccagtggctctgttttcccacaacagacgggacaacttgcagagctgcaaccccaggacagagctggagccagggccagctggatgcccatgttccagaggcgaaggaggcgagacacccacttccccatctgcattttctgctgcggctgctgtcatcgatcaaagtgtgggatgtgctgcaagacgtagaacctacctgccctgcccccgtcccctcccttccttatttattcctgctgccccagaacataggtcttgga

SEQ ID NO: 140307 - DNA, 652 bp, Homo sapiens
  Payload ID: 7526
  Gene Symbol: HAMP
  Gene Name: hepcidin antimicrobial peptide
  Uniprot ID: P81172
  ENST ID: ENST00000598398
  CDS Start-End: 297-551
gagcctcccacgtggtgtggatgaggaggcagatggcagggcctgtgcatttctgtgcttgagtgggccttgaaagtggttcagcaaccaggaagaagtgttcattcctcgacaacaacatccccgggctctggtgacttggctgacactggatggccctggaatgaaaaaggcaaagaggcaaaatgtgcaagggcccatctggaaccaaggccccataaaagcgactgtcactcggtcccagacaccagagcaagctcaagacccagcagtgggacagccagacagacggcacgatggcactgagctcccagatctgggccgcttgcctcctgctcctcctcctcctcgccagcctgaccagtggctctgttttcccacaacagacgggacaacttgcagagctgcaaccccaggacagagctggagccagggccagctggatgcccatgttccagaggcgaaggaggcgagacacccacttccccatctgcattttctgctgcggctgctgtcatcgatcaaagtgtgggatgtgctgcaagacgtagaacctacctgccctgcccccgtcccctcccttccttatttattcctgctgccccagaacataggtcttggaataaaatggctggttcttttgttttccaaa

SEQ ID NO: 140308 - DNA, 4228 bp, Homo sapiens
  Payload ID: 7527
  Gene Symbol: HEPH
  Gene Name: hephaestin
  Uniprot ID: Q9BQS7
  ENST ID: ENST00000336279
  CDS Start-End: 839-3514
ggaaaagagggcacccagcccttccccctccctcatcctcccatcccagtaaaccctgccaaattggaatcctggacttaatttaggagaaaggccctgtaaccaagatactgactgaacatggctggcggactcaggctggggtctgcagtgcagcattaatgggccgctgacatgaatatggagtagttttctctagcaaagagtggcttccagcttcttaaagtctgacaagaaccggatagggggaacctacaagaagaccatctataaagaatacaaggatgactcatacacagatgaagtggcccagcctgcctggttgggcttcctggggccagtgttgcaggctgaagtgggggatgtcattcttattcacctgaagaattttgccactcgtccctataccatccaccctcatggtgtcttctacgagaaggactctgaaggttccctatacccagatggctcctctgggccactgaaagctgatgactctgttcccccggggggcagccatatctacaactggaccattccagaaggccatgcacccaccgatgctgacccagcgtgcctcacctggatctaccattctcatgtagatgctccacgagacattgcaactggcctaattgggcctctcatcacctgtaaaagaggagccctggatgggaactcccctcctcaacgccaggatgtagaccatgatttcttcctcctcttcagtgtggtagatgagaacctcagctggcatctcaatgagaacattgccacttactgctcagatcctgcttcagtggacaaagaagatgagacatttcaggagagcaataggatgcatgcaatcaatggctttgtttttgggaatttacctgagctgaacatgtgtgcacagaaacgtgtggcctggcacttgtttggcatgggcaatgaaattgatgtccacacagcatttttccatggacagatgctgactacccgtggacaccacactgatgtggctaacatctttccagccacctttgtgactgctgagatggtgccctgggaacctggtacctggttaattagctgccaagtgaacagtcactttcgagatggcatgcaggcactctacaaggtcaagtcttgctccatggcccctcctgtggacctgctcacaggcaaagttcgacagtacttcattgaggcccatgagattcaatgggactatggcccgatggggcatgatgggagtactgggaagaatttgagagagccaggcagtatctcagataagtttttccagaagagctccagccgaattgggggcacttactggaaagtgcgatatgaagcctttcaagatgagacattccaagagaagatgcatttggaggaagataggcatcttggaatcctggggccagtgatccgggctgaggtgggtgacaccattcaggtggtcttctacaaccgtgcctcccagccattcagcatgcagccccatggggtcttttatgagaaagactatgaaggcactgtgtacaatgatggctcatcttaccctggcttggttgccaagccctttgagaaagtaacataccgctggacagtcccccctcatgccggtcccactgctcaggatcctgcttgtctcacttggatgtacttctctgctgcagatcccataagagacacaaattctggcctggtgggcccgctgctggtgtgcagggctggtgccttgggtgcagatggcaagcagaaaggggtggataaagaattctttcttctcttcactgtgttggatgagaacaagagctggtacagcaatgccaatcaagcagctgctatgttggatttccgactgctttcagaggatattgagggcttccaagactccaatcggatgcatgccattaatgggtttctgttctctaacctgcccaggctggacatgtgcaagggtgacacagtggcctggcacctgctcggcctgggcacagagactgatgtgcatggagtcatgttccagggcaacactgtgcagcttcagggcatgaggaagggtgcagctatgctctttcctcatacctttgtcatggccatcatgcagcctgacaaccttgggacatttgagatttattgccaggcaggcagccatcgagaagcagggatgagggcaatctataatgtctcccagtgtcctggccaccaagccacccctcgccaacgctaccaagctgcaagaatctactatatcatggcagaagaagtagagtgggactattgccctgaccggagctgggaacgggaatggcacaaccagtctgagaaggacagttatggttacattttcctgagcaacaaggatgggctcctgggttccagatacaagaaagctgtattcagggaatacactgatggtacattcaggatccctcggccaaggactggaccagaagaacacttgggaatcttgggtccacttatcaaaggtgaagttggtgatatcctgactgtggtattcaagaataatgccagccgcccctactctgtgcatgctcatggagtgctagaatctactactgtctggccactggctgctgagcctggtgaggtggtcacttatcagtggaacatcccagagaggtctggccctgggcccaatgactctgcttgtgtttcctggatctattattctgcagtggatcccatcaaggacatgtatagtggcctggtggggcccttggctatctgccaaaagggcatcctggagccccatggaggacggagtgacatggatcgggaatttgcattgttgttcttgatttttgatgaaaataagtcttggtatttggaggaaaatgtggcaacccatgggtcccaggatccaggcagtattaacctacaggatgaaactttcttggagagcaataaaatgcatgcaatcaatgggaaactctatgccaaccttaggggtcttaccatgtaccaaggagaacgagtggcctggtacatgctggccatgggccaagatgtggatctacacaccatccactttcatgcagagagcttcctctatcggaatggcgagaactaccgggcagatgtggtggatctgttcccagggacttttgaggttgtggagatggtggccagcaaccctgggacatggctgatgcactgccatgtgactgaccatgtccatgctggcatggagaccctcttcactgttttttctcgaacagaacacttaagccctctcaccgtcatcaccaaagagactgaaaaagcagtgccccccagagacattgaagaaggcaatgtgaagatgctgggcatgcagatccccataaagaatgttgagatgctggcctctgttttggttgccattagtgtcacccttctgctcgttgttctggctcttggtggagtggtttggtaccaacatcgacagagaaagctacgacgcaataggaggtccatcctggatgacagcttcaagcttctgtctttcaaacagtaacatctggagcctggagatatcctcaggaagcacatctgtagtgcactcccagcaggccatggactagtcactaaccccacactcaaaggggcatgggtggtggagaagcagaaggagcaatcaagcttatctggatatttctttctttatttattttacatggaaataatatgatttcactttttctttagtttctttgctctacgtgggcacctggcactaagggagtaccttattatcctacatcgcaaatttcaacagctacattatatttccttctgacacttggaaggtattgaaatttctagaaatgtatccttctcacaaagtagagaccaagagaaaaactcattgattgggtttctacttctttcaaggactcaggaaatttcactttgaactgaggccaagtgagctgttaagataacccacacttaaactaaaggctaagaatataggcttgatgggaaattgaaggtaggctgagtattgggaatccaaattgaattttgattctccttggcagtgaactactttgaagaagtggtcaatgggttgttgctgccatgagcatgtacaacctctggagctagaagctcctcaggaaagccagttctccaagttcttaacctgtggcactgaaaggaatgttgagttacctcttcatgttttagacagcaaaccctatccattaaagtacttgttagaacactg

SEQ ID NO: 140309 - DNA, 4854 bp, Homo sapiens
  Payload ID: 7527
  Gene Symbol: HEPH
  Gene Name: hephaestin
  Uniprot ID: Q9BQS7
  ENST ID: ENST00000343002
  CDS Start-End: 665-4141
tttgtgtctatttttttaaacattacatttgtcataatcattcatattgttgtgtgtagttgtagtttgttcattattattgctataaagaatttcattttatgaataaaatgcaatgtattcattcattatagtgttcacgaacattttgactgtttctattttgggtttatgaatattctagtaaatattttttagtaaattctcacttgttgttaagtacaatttatagaggataggaagtggcaacaacaatgagtgttccccttttgcctatgggaaaagagaggcaaagggagaattagtgttagtggcccaataaggcttctggtgcctgtttcctgattcttgggacagagcacattcttcctgctacaccattgaaaaaactggatccagatctctcttctgaaggaactagtaatacatgattagcagcacgggtgactttttaactatgcccttcaaaatccaatcattgaaaacttattgaattaaaaggaatcaggtaagttaaagaaactgggctaaatgggttttgctttctcagtcactcaacctggctcttgcctcttcagttttctggacacgtagaaagcccctttgttctctttcttctacaccagcagtttttatttgcctgtttcccagagtaatgtgggccatggagtcaggccacctcctctgggctctgctgttcatgcagtccttgtggcctcaactgactgatggagccactcgagtctactacctgggcatccgggatgtgcagtggaactatgctcccaagggaagaaatgtcatcacgaaccagcctctggacagtgacatagtggcttccagcttcttaaagtctgacaagaaccggatagggggaacctacaagaagaccatctataaagaatacaaggatgactcatacacagatgaagtggcccagcctgcctggttgggcttcctggggccagtgttgcaggctgaagtgggggatgtcattcttattcacctgaagaattttgccactcgtccctataccatccaccctcatggtgtcttctacgagaaggactctgaaggttccctatacccagatggctcctctgggccactgaaagctgatgactctgttcccccggggggcagccatatctacaactggaccattccagaaggccatgcacccaccgatgctgacccagcgtgcctcacctggatctaccattctcatgtagatgctccacgagacattgcaactggcctaattgggcctctcatcacctgtaaaagaggagccctggatgggaactcccctcctcaacgccaggatgtagaccatgatttcttcctcctcttcagtgtggtagatgagaacctcagctggcatctcaatgagaacattgccacttactgctcagatcctgcttcagtggacaaagaagatgagacatttcaggagagcaataggatgcatgcaatcaatggctttgtttttgggaatttacctgagctgaacatgtgtgcacagaaacgtgtggcctggcacttgtttggcatgggcaatgaaattgatgtccacacagcatttttccatggacagatgctgactacccgtggacaccacactgatgtggctaacatctttccagccacctttgtgactgctgagatggtgccctgggaacctggtacctggttaattagctgccaagtgaacagtcactttcgagatggcatgcaggcactctacaaggtcaagtcttgctccatggcccctcctgtggacctgctcacaggcaaagttcgacagtacttcattgaggcccatgagattcaatgggactatggcccgatggggcatgatgggagtactgggaagaatttgagagagccaggcagtatctcagataagtttttccagaagagctccagccgaattgggggcacttactggaaagtgcgatatgaagcctttcaagatgagacattccaagagaagatgcatttggaggaagataggcatcttggaatcctggggccagtgatccgggctgaggtgggtgacaccattcaggtggtcttctacaaccgtgcctcccagccattcagcatgcagccccatggggtcttttatgagaaagactatgaaggcactgtgtacaatgatggctcatcttaccctggcttggttgccaagccctttgagaaagtaacataccgctggacagtcccccctcatgccggtcccactgctcaggatcctgcttgtctcacttggatgtacttctctgctgcagatcccataagagacacaaattctggcctggtgggcccgctgctggtgtgcagggctggtgccttgggtgcagatggcaagcagaaaggggtggataaagaattctttcttctcttcactgtgttggatgagaacaagagctggtacagcaatgccaatcaagcagctgctatgttggatttccgactgctttcagaggatattgagggcttccaagactccaatcggatgcatgccattaatgggtttctgttctctaacctgcccaggctggacatgtgcaagggtgacacagtggcctggcacctgctcggcctgggcacagagactgatgtgcatggagtcatgttccagggcaacactgtgcagcttcagggcatgaggaagggtgcagctatgctctttcctcatacctttgtcatggccatcatgcagcctgacaaccttgggacatttgagatttattgccaggcaggcagccatcgagaagcagggatgagggcaatctataatgtctcccagtgtcctggccaccaagccacccctcgccaacgctaccaagctgcaagaatctactatatcatggcagaagaagtagagtgggactattgccctgaccggagctgggaacgggaatggcacaaccagtctgagaaggacagttatggttacattttcctgagcaacaaggatgggctcctgggttccagatacaagaaagctgtattcagggaatacactgatggtacattcaggatccctcggccaaggactggaccagaagaacacttgggaatcttgggtccacttatcaaaggtgaagttggtgatatcctgactgtggtattcaagaataatgccagccgcccctactctgtgcatgctcatggagtgctagaatctactactgtctggccactggctgctgagcctggtgaggtggtcacttatcagtggaacatcccagagaggtctggccctgggcccaatgactctgcttgtgtttcctggatctattattctgcagtggatcccatcaaggacatgtatagtggcctggtggggcccttggctatctgccaaaagggcatcctggagccccatggaggacggagtgacatggatcgggaatttgcattgttgttcttgatttttgatgaaaataagtcttggtatttggaggaaaatgtggcaacccatgggtcccaggatccaggcagtattaacctacaggatgaaactttcttggagagcaataaaatgcatgcaatcaatgggaaactctatgccaaccttaggggtcttaccatgtaccaaggagaacgagtggcctggtacatgctggccatgggccaagatgtggatctacacaccatccactttcatgcagagagcttcctctatcggaatggcgagaactaccgggcagatgtggtggatctgttcccagggacttttgaggttgtggagatggtggccagcaaccctgggacatggctgatgcactgccatgtgactgaccatgtccatgctggcatggagaccctcttcactgttttttctcgaacagaacacttaagccctctcaccgtcatcaccaaagagactgaaaaagcagtgccccccagagacattgaagaaggcaatgtgaagatgctgggcatgcagatccccataaagaatgttgagatgctggcctctgttttggttgccattagtgtcacccttctgctcgttgttctggctcttggtggagtggtttggtaccaacatcgacagagaaagctacgacgcaataggaggtccatcctggatgacagcttcaagcttctgtctttcaaacagtaacatctggagcctggagatatcctcaggaagcacatctgtagtgcactcccagcaggccatggactagtcactaaccccacactcaaaggggcatgggtggtggagaagcagaaggagcaatcaagcttatctggatatttctttctttatttattttacatggaaataatatgatttcactttttctttagtttctttgctctacgtgggcacctggcactaagggagtaccttattatcctacatcgcaaatttcaacagctacattatatttccttctgacacttggaaggtattgaaatttctagaaatgtatccttctcacaaagtagagaccaagagaaaaactcattgattgggtttctacttctttcaaggactcaggaaatttcactttgaactgaggccaagtgagctgttaagataacccacacttaaactaaaggctaagaatataggcttgatgggaaattgaaggtaggctgagtattgggaatccaaattgaattttgattctccttggcagtgaactactttgaagaagtggtcaatgggttgttgctgccatgagcatgtacaacctctggagctagaagctcctcaggaaagccagttctccaagttcttaacctgtggcactgaaaggaatgttgagttacctcttcatgttttagacagcaaaccctatccattaaagtacttgttagaacact

SEQ ID NO: 140310 - DNA, 569 bp, Homo sapiens
  Payload ID: 7527
  Gene Symbol: HEPH
  Gene Name: hephaestin
  ENST ID: ENST00000429547
  CDS Start-End: 178-369
ctcatcctcccatcccagtaaaccctgccaaattggaatcctggacttaatttaggagaaaggccctgtaaccaagatactgactgaacatggctggcggactcaggctggggtctgcagtgcagcattaatgggccgctgacatgaatatggagtagttttctctagcaaagagtaatgtgggccatggagtcaggccacctcctctgggctctgctgttcatgcagtccttgtggcctcaactgactgatggagccactcgagtctactacctgggcatccgggatgtgcagtggaactatgctcccaagggaagaaatgtcatcacgaaccagcctctggacagtgacatatatgtgaaaatgtgaaaaaagaaagtaagccttagaatcaaggaattaatggtaataattctcacttatgtaatactctgtgacacagaccatactagaaatttacatactttgtctcaactctcacaaaaactctagaagagtggcttccagcttcttaaagtctgacaagaaccggatagggggaacctacaagaagaccatctataaagaat

SEQ ID NO: 140311 - DNA, 838 bp, Homo sapiens
  Payload ID: 7527
  Gene Symbol: HEPH
  Gene Name: hephaestin
  ENST ID: ENST00000458621
  CDS Start-End: 215-838
aaagagggcacccagcccttccccctccctcatcctcccatcccagtaaaccctgccaaattggaatcctggacttaatttaggagaaaggccctgtaaccaagatactgactgaacatggctggcggactcaggctggggtctgcagtgcagcattaatgggccgctgacatgaatatggagtagttttctctagcaaagagtaatgtgggccatggagtcaggccacctcctctgggctctgctgttcatgcagtccttgtggcctcaactgactgatggagccactcgagtctactacctgggcatccgggatgtgcagtggaactatgctcccaagggaagaaatgtcatcacgaaccagcctctggacagtgacatagtggcttccagcttcttaaagtctgacaagaaccggatagggggaacctacaagaagaccatctataaagaatacaaggatgactcatacacagatgaagtggcccagcctgcctggttgggcttcctggggccagtgttgcaggctgaagtgggggatgtcattcttattcacctgaagaattttgccactcgtccctataccatccaccctcatggtgtcttctacgagaaggactctgaaggttccctatacccagatggctcctctgggccactgaaagctgatgactctgttcccccggggggcagccatatctacaactggaccattccagaaggccatgcacccaccgatgctgacccagcgtgcctcacctggatctaccattctcatgtagatgctccacgagacattgcaactggcctaattgggcctctcatcacctgtaaaaga

SEQ ID NO: 140312 - DNA, 2459 bp, Homo sapiens
  Payload ID: 7527
  Gene Symbol: HEPH
  Gene Name: hephaestin
  ENST ID: ENST00000425114
  CDS Start-End: 26-2459
cctgtttcccagagtaatgtgggccatggagtcaggccacctcctctgggctctgctgttcatgcagtccttgtggcctcaactgactgatggagccactcgagtctactacctgggcatccgggatgtgcagtggaactatgctcccaagggaagaaatgtcatcacgaaccagcctctggacagtgacatagtggcttccagcttcttaaagtctgacaagaaccggatagggggaacctacaagaagaccatctataaagaatacaaggatgactcatacacagatgaagtggcccagcctgcctggttgggcttcctggggccagtgttgcaggctgaagtgggggatgtcattcttattcacctgaagaattttgccactcgtccctataccatccaccctcatggtgtcttctacgagaaggactctgaaggttccctatacccagatggctcctctgggccactgaaagctgatgactctgttcccccggggggcagccatatctacaactggaccattccagaaggccatgcacccaccgatgctgacccagcgtgcctcacctggatctaccattctcatgtagatgctccacgagacattgcaactggcctaattgggcctctcatcacctgtaaaagaggagccctggatgggaactcccctcctcaacgccaggatgtagaccatgatttcttcctcctcttcagtgtggtagatgagaacctcagctggcatctcaatgagaacattgccacttactgctcagatcctgcttcagtggacaaagaagatgagacatttcaggagagcaataggatgcatgcaatcaatggctttgtttttgggaatttacctgagctgaacatgtgtgcacagaaacgtgtggcctggcacttgtttggcatgggcaatgaaattgatgtccacacagcatttttccatggacagatgctgactacccgtggacaccacactgatgtggctaacatctttccagccacctttgtgactgctgagatggtgccctgggaacctggtacctggttaattagctgccaagtgaacagtcactttcgagatggcatgcaggcactctacaaggtcaagtcttgctccatggcccctcctgtggacctgctcacaggcaaagttcgacagtacttcattgaggcccatgagattcaatgggactatggcccgatggggcatgatgggagtactgggaagaatttgagagagccaggcagtatctcagataagtttttccagaagagctccagccgaattgggggcacttactggaaagtgcgatatgaagcctttcaagatgagacattccaagagaagatgcatttggaggaagataggcatcttggaatcctggggccagtgatccgggctgaggtgggtgacaccattcaggtggtcttctacaaccgtgcctcccagccattcagcatgcagccccatggggtcttttatgagaaagactatgaaggcactgtgtacaatgatgatcccataagagacacaaattctggcctggtgggcccgctgctggtgtgcagggctggtgccttgggtgcagatggcaagcagaaaggggtggataaagaattctttcttctcttcactgtgttggatgagaacaagagctggtacagcaatgccaatcaagcagctgctatgttggatttccgactgctttcagaggatattgagggcttccaagactccaatcggatgcatgccattaatgggtttctgttctctaacctgcccaggctggacatgtgcaagggtgacacagtggcctggcacctgctcggcctgggcacagagactgatgtgcatggagtcatgttccagggcaacactgtgcagcttcagggcatgaggaagggtgcagctatgctctttcctcatacctttgtcatggccatcatgcagcctgacaaccttgggacatttgagatttattgccaggcaggcagccatcgagaagcagggatgagggcaatctataatgtctcccagtgtcctggccaccaagccacccctcgccaacgctaccaagctgcaagaatctactatatcatggcagaagaagtagagtgggactattgccctgaccggagctgggaacgggaatggcacaaccagtctgagaaggacagttatggttacattttcctgagcaacaaggatgggctcctgggttccagatacaagaaagctgtattcagggaatacactgatggtacattcaggatccctcggccaaggactggaccagaagaacacttgggaatcttgggtccacttatcaaaggtgaagttggtgatatcctgactgtggtattcaagaataatgccagccgcccctactctgtgcatgctcatggagtgctagaatctactactgtctggccactggctgctgagcctg

SEQ ID NO: 140313 - DNA, 4310 bp, Homo sapiens
  Payload ID: 7527
  Gene Symbol: HEPH
  Gene Name: hephaestin
  ENST ID: ENST00000441993
  CDS Start-End: 117-3599
ggccctgtaaccaagatactgactgaacatggctggcggactcaggctggggtctgcagtgcagcattaatgggccgctgacatgaatatggagtagttttctctagcaaagagtaatgtgggccatggagtcaggccacctcctctgggctctgctgttcatgcagtccttgtggcctcaactgactgatggagccactcgagtctactacctgggcatccgggatgtgcagtggaactatgctcccaagggaagaaatgtcatcacgaaccagcctctggacagtgacatagtggcttccagcttcttaaagtctgacaagaaccggatagggggaacctacaagaagaccatctataaagaatacaaggatgactcatacacagatgaagtggcccagcctgcctggttgggcttcctggggccagtgttgcaggctgaagtgggggatgtcattcttattcacctgaagaattttgccactcgtccctataccatccaccctcatggtgtcttctacgagaaggactctgaaggttccctatacccagatggctcctctgggccactgaaagctgatgactctgttcccccggggggcagccatatctacaactggaccattccagaaggccatgcacccaccgatgctgacccagcgtgcctcacctggatctaccattctcatgtagatgctccacgagacattgcaactggcctaattgggcctctcatcacctgtaaaagaggagccctggatgggaactcccctcctcaacgccaggatgtagaccatgatttcttcctcctcttcagtgtggtagatgagaacctcagctggcatctcaatgagaacattgccacttactgctcagatcctgcttcagtggacaaagaagatgagacatttcaggagagcaataggatgcatgcaatcaatggctttgtttttgggaatttacctgagctgaacatgtgtgcacagaaacgtgtggcctggcacttgtttggcatgggcaatgaaattgatgtccacacagcatttttccatggacagatgctgactacccgtggacaccacactgatgtggctaacatctttccagccacctttgtgactgctgagatggtgccctgggaacctggtacctggttaattagctgccaagtgaacagtcactttcgagatggcatgcaggcactctacaaggtcaagtcttgctccatggcccctcctgtggacctgctcacaggcaaagttcgacagtacttcattgaggcccatgagattcaatgggactatggcccgatggggcatgatgggagtactgggaagaatttgagagagccaggcagtatctcagataagtttttccagaagagctccagccgaattgggggcacttactggaaagtgcgatatgaagcctttcaagatgagacattccaagagaagatgcatttggaggaagataggcatcttggaatcctggggccagtgatccgggctgaggtgggtgacaccattcaggtggtcttctacaaccgtgcctcccagccattcagcatgcagccccatggggtcttttatgagaaagactatgaaggcactgtgtacaatgatggctcatcttaccctggcttggttgccaagccctttgagaaagtaacataccgctggacagtcccccctcatgccggtcccactgctcaggatcctgcttgtctcacttggatgtacttctctgctgcagatcccataagagacacaaattctggcctggtgggcccgctgctggtgtgcagggctggtgccttgggtgcagatggcaagcagaaaggggtggataaagaattctttcttctcttcactgtgttggatgagaacaagagctggtacagcaatgccaatcaagcagctgctatgttggatttccgactgctttcagaggatattgagggcttccaagactccaatcggatgcatgccattaatgggtttctgttctctaacctgcccaggctggacatgtgcaagggtgacacagtggcctggcacctgctcggcctgggcacagagactgatgtgcatggagtcatgttccagggcaacactgtgcagcttcagggcatgaggaagggtgcagctatgctctttcctcatacctttgtcatggccatcatgcagcctgacaaccttgggacatttgagatttattgccaggcaggcagccatcgagaagcagggatgagggcaatctataatgtctcccagtgtcctggccaccaagccacccctcgccaacgctaccaagctgcaagaatctactatatcatggcagaagaagtagagtgggactattgccctgaccggagctgggaacgggaatggcacaaccagtctgagaaggacagttatggttacattttcctgagcaacaaggatgggctcctgggttccagatacaagaaagctgtattcagggaatacactgatggtacattcaggatccctcggccaaggactggaccagaagaacacttgggaatcttgggtccacttatcaaaggtgaagttggtgatatcctgactgtggtattcaagaataatgccagccgcccctactctgtgcatgctcatggagtgctagaatctactactgtctggccactggctgctgagcctggtgaggtggtcacttatcagtggaacatcccagagaggtctggccctgggcccaatgactctgcttgtgtttcctggatctattattctgcagtggatcccatcaaggacatgtatagtggcctggtggggcccttggctatctgccaaaagggcatcctggagccccatggaggacggagtgacatggatcgggaatttgcattgttgttcttgatttttgatgaaaataagtcttggtatttggaggaaaatgtggcaacccatgggtcccaggatccaggcagtattaacctacaggatgaaactttcttggagagcaataaaatgcatgcaatcaatgggaaactctatgccaaccttaggggtcttaccatgtaccaaggagaacgagtggcctggtacatgctggccatgggccaagatgtggatctacacaccatccactttcatgcagagagcttcctctatcggaatggcgagaactaccgggcagatgtggtggatctgttcccagggacttttgaggttgtggagatggtggccagcaaccctgggacatggctgatgcactgccatgtgactgaccatgtccatgctggcatggagaccctcttcactgttttttctcgaacagaacacttaagccctctcaccgtcatcaccaaagagactgaaaaagtgccccccagagacattgaagaaggcaatgtgaagatgctgggcatgcagatccccataaagaatgttgagatgctggcctctgttttggttgccattagtgtcacccttctgctcgttgttctggctcttggtggagtggtttggtaccaacatcgacagagaaagctacgacgcaataggaggtccatcctggatgacagcttcaagcttctgtctttcaaacagtaacatctggagcctggagatatcctcaggaagcacatctgtagtgcactcccagcaggccatggactagtcactaaccccacactcaaaggggcatgggtggtggagaagcagaaggagcaatcaagcttatctggatatttctttctttatttattttacatggaaataatatgatttcactttttctttagtttctttgctctacgtgggcacctggcactaagggagtaccttattatcctacatcgcaaatttcaacagctacattatatttccttctgacacttggaaggtattgaaatttctagaaatgtatccttctcacaaagtagagaccaagagaaaaactcattgattgggtttctacttctttcaaggactcaggaaatttcactttgaactgaggccaagtgagctgttaagataacccacacttaaactaaaggctaagaatataggcttgatgggaaattgaaggtaggctgagtattgggaatccaaattgaattttgattctccttggcagtgaactactttgaagaagtggtcaatgggttgttgctgccatgagcatgtacaacctctggagctagaagctcctcaggaaagccagttctccaagttcttaacctgtggcactgaaaggaatgttgagttacctcttcatgttttagacagcaaaccctatccattaaagtacttgttagaaca

SEQ ID NO: 140314 - DNA, 3694 bp, Homo sapiens
  Payload ID: 7527
  Gene Symbol: HEPH
  Gene Name: hephaestin
  ENST ID: ENST00000419594
  CDS Start-End: 111-3020
gtaaccaagatactgactgaacatggctggcggactcaggctggggtctgcagtgcagcattaatgggccgctgacatgaatatggagtagttttctctagcaaagagtaatgtgggccatggagtcaggccacctcctctgggctctgctgttcatgcagtccttgtggcctcaactgactgatggagccactcgagtctactacctgggcatccgggatgtgcagtggaactatgctcccaagggaagaaatgtcatcacgaaccagcctctggacagtgacatagtggcttccagcttcttaaagtctgacaagaaccggatagggggaacctacaagaagaccatctataaagaatacaaggatgactcatacacagatgaagtggcccagcctgcctggttgggcttcctggggccagtgttgcaggctgaagtgggggatgtcattcttattcacctgaagaattttgccactcgtccctataccatccaccctcatggtgtcttctacgagaaggactctgaaggttccctatacccagatggctcctctgggccactgaaagctgatgactctgttcccccggggggcagccatatctacaactggaccattccagaaggccatgcacccaccgatgctgacccagcgtgcctcacctggatctaccattctcatgtagatgctccacgagacattgcaactggcctaattgggcctctcatcacctgtaaaagaggagccctggatgggaactcccctcctcaacgccaggatgtagaccatgatttcttcctcctcttcagtgtggtagatgagaacctcagctggcatctcaatgagaacattgccacttactgctcagatcctgcttcagtggacaaagaagatgagacatttcaggagagcaataggatgcatgcaatcaatggctttgtttttgggaatttacctgagctgaacatgtgtgcacagaaacgtgtggcctggcacttgtttggcatgggcaatgaaattgatgtccacacagcatttttccatggacagatgctgactacccgtggacaccacactgatgtggctaacatctttccagccacctttgtgactgctgagatggtgccctgggaacctggtacctggttaattagctgccaagtgaacagtcactttcgagatggcatgcaggcactctacaaggtcaagtcttgctccatggcccctcctgtggacctgctcacaggcaaagttcgacagtacttcattgaggcccatgagattcaatgggactatggcccgatggggcatgatgggagtactgggaagaatttgagagagccaggcagtatctcagataagtttttccagaagagctccagccgaattgggggcacttactggaaagtgcgatatgaagcctttcaagatgagacattccaagagaagatgcatttggaggaagataggcatcttggaatcctggggccagtgatccgggctgaggtgggtgacaccattcaggtggtcttctacaaccgtgcctcccagccattcagcatgcagccccatggggtcttttatgagaaagactatgaaggcactgtgtacaatgatgggacatttgagatttattgccaggcaggcagccatcgagaagcagggatgagggcaatctataatgtctcccagtgtcctggccaccaagccacccctcgccaacgctaccaagctgcaagaatctactatatcatggcagaagaagtagagtgggactattgccctgaccggagctgggaacgggaatggcacaaccagtctgagaaggacagttatggttacattttcctgagcaacaaggatgggctcctgggttccagatacaagaaagctgtattcagggaatacactgatggtacattcaggatccctcggccaaggactggaccagaagaacacttgggaatcttgggtccacttatcaaaggtgaagttggtgatatcctgactgtggtattcaagaataatgccagccgcccctactctgtgcatgctcatggagtgctagaatctactactgtctggccactggctgctgagcctggtgaggtggtcacttatcagtggaacatcccagagaggtctggccctgggcccaatgactctgcttgtgtttcctggatctattattctgcagtggatcccatcaaggacatgtatagtggcctggtggggcccttggctatctgccaaaagggcatcctggagccccatggaggacggagtgacatggatcgggaatttgcattgttgttcttgatttttgatgaaaataagtcttggtatttggaggaaaatgtggcaacccatgggtcccaggatccaggcagtattaacctacaggatgaaactttcttggagagcaataaaatgcatgcaatcaatgggaaactctatgccaaccttaggggtcttaccatgtaccaaggagaacgagtggcctggtacatgctggccatgggccaagatgtggatctacacaccatccactttcatgcagagagcttcctctatcggaatggcgagaactaccgggcagatgtggtggatctgttcccagggacttttgaggttgtggagatggtggccagcaaccctgggacatggctgatgcactgccatgtgactgaccatgtccatgctggcatggagaccctcttcactgttttttctcgaacagaacacttaagccctctcaccgtcatcaccaaagagactgaaaaagcagtgccccccagagacattgaagaaggcaatgtgaagatgctgggcatgcagatccccataaagaatgttgagatgctggcctctgttttggttgccattagtgtcacccttctgctcgttgttctggctcttggtggagtggtttggtaccaacatcgacagagaaagctacgacgcaataggaggtccatcctggatgacagcttcaagcttctgtctttcaaacagtaacatctggagcctggagatatcctcaggaagcacatctgtagtgcactcccagcaggccatggactagtcactaaccccacactcaaaggggcatgggtggtggagaagcagaaggagcaatcaagcttatctggatatttctttctttatttattttacatggaaataatatgatttcactttttctttagtttctttgctctacgtgggcacctggcactaagggagtaccttattatcctacatcgcaaatttcaacagctacattatatttccttctgacacttggaaggtattgaaatttctagaaatgtatccttctcacaaagtagagaccaagagaaaaactcattgattgggtttctacttctttcaaggactcaggaaatttcactttgaactgaggccaagtgagctgttaagataacccacacttaaactaaaggctaagaatataggcttgatgggaaattgaaggtaggctgagtattgggaatccaaattgaattttgattctccttggcagtgaactactttgaagaagtggtcaatgggttgttgctgccatgagcatgtacaacctctggagctagaagctcctcaggaaagccagttctccaagttcttaacctgtggcactgaaaggaatgttgagttacctcttcatgttttag

SEQ ID NO: 140315 - DNA, 6013 bp, Homo sapiens
  Payload ID: 7527
  Gene Symbol: HEPH
  Gene Name: hephaestin
  Uniprot ID: Q9BQS7
  ENST ID: ENST00000519389
  CDS Start-End: 180-3818
aattctaggggctgccatggcttggctaagcttcccttgaccactgagcatttctaagggagttgaggctggtggctcctccttccttcctactggtgcttccacctgccttggtctgagttgcagtccatggggcagcgcctaagtgtctgagcacacttaagaatctctagtggtttatgacccagactttgccctaccacctcagtcttctgaatgttctcttccctggaccctgctccagacactttaaattcagaagaggaaaatgtgcccagcctgcctggagaaaagtgtctgctcctagccaagatctcctcatcacaaaagtaatgtgggccatggagtcaggccacctcctctgggctctgctgttcatgcagtccttgtggcctcaactgactgatggagccactcgagtctactacctgggcatccgggatgtgcagtggaactatgctcccaagggaagaaatgtcatcacgaaccagcctctggacagtgacatagtggcttccagcttcttaaagtctgacaagaaccggatagggggaacctacaagaagaccatctataaagaatacaaggatgactcatacacagatgaagtggcccagcctgcctggttgggcttcctggggccagtgttgcaggctgaagtgggggatgtcattcttattcacctgaagaattttgccactcgtccctataccatccaccctcatggtgtcttctacgagaaggactctgaaggttccctatacccagatggctcctctgggccactgaaagctgatgactctgttcccccggggggcagccatatctacaactggaccattccagaaggccatgcacccaccgatgctgacccagcgtgcctcacctggatctaccattctcatgtagatgctccacgagacattgcaactggcctaattgggcctctcatcacctgtaaaagaggagccctggatgggaactcccctcctcaacgccaggatgtagaccatgatttcttcctcctcttcagtgtggtagatgagaacctcagctggcatctcaatgagaacattgccacttactgctcagatcctgcttcagtggacaaagaagatgagacatttcaggagagcaataggatgcatgcaatcaatggctttgtttttgggaatttacctgagctgaacatgtgtgcacagaaacgtgtggcctggcacttgtttggcatgggcaatgaaattgatgtccacacagcatttttccatggacagatgctgactacccgtggacaccacactgatgtggctaacatctttccagccacctttgtgactgctgagatggtgccctgggaacctggtacctggttaattagctgccaagtgaacagtcactttcgagatggcatgcaggcactctacaaggtcaagtcttgctccatggcccctcctgtggacctgctcacaggcaaagttcgacagtacttcattgaggcccatgagattcaatgggactatggcccgatggggcatgatgggagtactgggaagaatttgagagagccaggcagtatctcagataagtttttccagaagagctccagccgaattgggggcacttactggaaagtgcgatatgaagcctttcaagatgagacattccaagagaagatgcatttggaggaagataggcatcttggaatcctggggccagtgatccgggctgaggtgggtgacaccattcaggtggtcttctacaaccgtgcctcccagccattcagcatgcagccccatggggtcttttatgagaaagactatgaaggcactgtgtacaatgatggctcatcttaccctggcttggttgccaagccctttgagaaagtaacataccgctggacagtcccccctcatgccggtcccactgctcaggatcctgcttgtctcacttggatgtacttctctgctgcagatcccataagagacacaaattctggcctggtgggcccgctgctggtgtgcagggctggtgccttgggtgcagatggcaagcagaaaggggtggataaagaattctttcttctcttcactgtgttggatgagaacaagagctggtacagcaatgccaatcaagcagctgctatgttggatttccgactgctttcagaggatattgagggcttccaagactccaatcggatgcatgccattaatgggtttctgttctctaacctgcccaggctggacatgtgcaagggtgacacagtggcctggcacctgctcggcctgggcacagagactgatgtgcatggagtcatgttccagggcaacactgtgcagcttcagggcatgaggaagggtgcagctatgctctttcctcatacctttgtcatggccatcatgcagcctgacaaccttgggacatttgagatttattgccaggcaggcagccatcgagaagcagggatgagggcaatctataatgtctcccagtgtcctggccaccaagccacccctcgccaacgctaccaagctgcaagaatctactatatcatggcagaagaagtagagtgggactattgccctgaccggagctgggaacgggaatggcacaaccagtctgagaaggacagttatggttacattttcctgagcaacaaggatgggctcctgggttccagatacaagaaagctgtattcagggaatacactgatggtacattcaggatccctcggccaaggactggaccagaagaacacttgggaatcttgggtccacttatcaaaggtgaagttggtgatatcctgactgtggtattcaagaataatgccagccgcccctactctgtgcatgctcatggagtgctagaatctactactgtctggccactggctgctgagcctggtgaggtggtcacttatcagtggaacatcccagagaggtctggccctgggcccaatgactctgcttgtgtttcctggatctattattctgcagtggatcccatcaaggacatgtatagtggcctggtggggcccttggctatctgccaaaagggcatcctggagccccatggaggacggagtgacatggatcgggaatttgcattgttgttcttgatttttgatgaaaataagtcttggtatttggaggaaaatgtggcaacccatgggtcccaggatccaggcagtattaacctacaggatgaaactttcttggagagcaataaaatgcatgcaatcaatgggaaactctatgccaaccttaggggtcttaccatgtaccaaggagaacgagtggcctggtacatgctggccatgggccaagatgtggatctacacaccatccactttcatgcagagagcttcctctatcggaatggcgagaactaccgggcagatgtggtggatctgttcccagggacttttgaggttgtggagatggtggccagcaaccctgggacatggctgatgcactgccatgtgactgaccatgtccatgctggcatggagaccctcttcactgttttttctcgaacagaacacttaagccctctcaccgtcatcaccaaagagactgaaaaagcagtgccccccagagacattgaagaaggcaatgtgaagatgctgggcatgcagatccccataaagaatgttgagatgctggcctctgttttggttgccattagtgtcacccttctgctcgttgttctggctcttggtggagtggtttggtaccaacatcgacagagaaagctacgacgcaataggaggtccatcctggatgacagcttcaagcttctgtctttcaaacagtaacatctggagcctggagatatcctcaggaagcacatctgtagtgcactcccagcaggccatggactagtcactaaccccacactcaaaggggcatgggtggtggagaagcagaaggagcaatcaagcttatctggatatttctttctttatttattttacatggaaataatatgatttcactttttctttagtttctttgctctacgtgggcacctggcactaagggagtaccttattatcctacatcgcaaatttcaacagctacattatatttccttctgacacttggaaggtattgaaatttctagaaatgtatccttctcacaaagtagagaccaagagaaaaactcattgattgggtttctacttctttcaaggactcaggaaatttcactttgaactgaggccaagtgagctgttaagataacccacacttaaactaaaggctaagaatataggcttgatgggaaattgaaggtaggctgagtattgggaatccaaattgaattttgattctccttggcagtgaactactttgaagaagtggtcaatgggttgttgctgccatgagcatgtacaacctctggagctagaagctcctcaggaaagccagttctccaagttcttaacctgtggcactgaaaggaatgttgagttacctcttcatgttttagacagcaaaccctatccattaaagtacttgttagaacactgaaagactgaatttggtgatttttgacagtctctgtggcttctgtcactgtgattgaaacagaaaatacttagggggtgagtgagtatagtatgtatttgtctagcctttgtagaacctacaagtttttgttttagagatgaggaagctgttccagaggaagcatcaaagagtgctgggtaccaccctagaaaaggagctgtcgcataaatgacaaaaattttctgagtgtcaagaaaatttgccagagggaaatagaagtctgagacgagactcaaacctgtccagtgggccaggggaagtaggaccatatcttatggggcctttttggcagtggtggtgtgaaaggtctagttgcaactttgggggcttccttataggatggagtcattctttctggtattttacagcaatattcctttgttacatgcaaatttgagccaaatattggttagagagcacagataagtgataaattttagattgggtaagatggcccaccccactgcaatatccataatattgtaccacatggcaagtggagaacagaagaggtatcaaggagagaaaagatgataactatgtactgttttacactttaaaaagcattttaattcttgattgcgtttggattacctcagggcaagtcattttacatttgagtaatgttatccatttatacatttgagtgaacaaaagcttatggacattaagtaacttcatccaagatccctcaggtagaagttgagcagggattcatgtattcatctgtttgactccaaatacctatttcatcctcatatatcatggaaacatccactaatctccatccaccttacccatattgattccaacttttctgtctgtccagcaatctgtctgtctaggtagcaatctcttgaagataaaatgtagaaactcacagagctggtgttcagttacgatataagtttggaggagaaaacacaatccagaagctatgattcctcttgtttttccatggtcaatgggtttctggagagctttactgagaatctcagaaataaagtgtgggtggaagggggatttagatggctagttatccaagagttagtgtttaggccattgcagaatcaatgatttaacagcagcagaactgttttggcctgcagttaacatgaatgttaatgaagaccaagtacatgctaggaattccagtcaattaatggttataatttacatgcaactaggaggttcttagcttggtctcagttataactctaagagactaggagaggtagatgagatggaatgcatttcttcttattttgtaatcctgctccaggtcaaggaatagaaactcagagcccatgtatttaagaaagaaatgtatttttgtggtaagtttgctccaagtagggatacaagtatctatttttgacaatcaagtgacattgccatctattcagttgctcaagctggaaattatcagtgtcaacacatc

SEQ ID NO: 140316 - DNA, 5345 bp, Homo sapiens
  Payload ID: 7528
  Gene Symbol: HEPHL1
  Gene Name: hephaestin-like 1
  Uniprot ID: Q6MZM0
  ENST ID: ENST00000315765
  CDS Start-End: 9-3488
atccacaaatgcctcggaagcagccagctggctgcatctttctcctcacattcctgggtctgtctgggctggttggcacagttaccagaacgtactacattgggattgtggaagaatactggaactatgtaccccaagggaagaatgttattactgggaaaagtttcacagaagacaaacttgcaaccttatttctcgaaagagggcccaacaggataggcagtatttacaaaaaggctgtttacagacgcttcacggatggaacctactccatagagatccccaaacctccctggcttggattcctgggccccatcttgagggccgaagtgggtgatgtgattgtcattcatttaaagaactttgcttctcgaccttactctctgcatccacatggcgttttctacaacaaagattcagaaggagccctatacccagatggaacatctggaaggaacaaaaatgatgacatggttcctcctgggaaaaactacacctacgtctggccggtgagagaagaatatgcacctactccagccgatgccaactgcctgacctgggtgtaccattcgcacatcgacgccccaaaggacatctgctctgggctaattgggcccctgctggtctgcaaggaaggtatcctgaatagatattcagggacacggaatgatgtggatcgagagtttgttataatgtttactcttgtggatgagaatcaaagctggtacctcaatgaaaatatcaaacatttctgcaccaaccctgattcagttgacaagaaagatgctgttttccagaggagtaacaaaatgcatgccctcaatggatacctcttcggaaacttcccggagcctgatatgtgtgttggagaatctgtgtcctggcacctatttggaatggggaatgaaatagacatccattctatctatttctatggtaacaccttcatcagcagagggcatcggactgatgtcgtcaacctgttcccagccaccttccttacaacagaaatgatagccgagaatcctgggaagtggatgataacctgccaggtcagcgaccacctacaagctggtatgctggggcaatacaatgttgataactgcaaaagtgatattttctaccccaagatgaagggtcaacagaggcgctactttatagcagctgaaaaaattctttgggattatgctcctcaaggctataacaaattcagtggtcttcctctaaacgcctctggcagtgactctgatctctacttcacacaaggggacaacagaataggaggaaaatactggaaggttcggtatactgaatttgttgatgcaacttttactaaaagaaagagactctctgctgaagaagcccatcttggaattcttggcccagtcatcaaggcagaggtgggtgataccctgttagtgacctttgccaacaaagccgacaaggtctatagcattttaccccatggtgtgatctatgacaaggcatctgatgcagccccaaacctagatggatttgtgaaaccaggggcgcatgttaaaccaggtgaaaccttcacatacaagtggacagtgcctgagagcgtaagcccaactgctggtgatcctccctgtctgacctatctttacttctcagcagttgatccaattaaggacaccagctctggcctggtagggcctttgctagtctgtaaaaagggcgtcctcaatgctgatgggacacagaaaggaatagacaaggagttttacctactgttcacagtctttgatgagaatctgagcagatattttgatgaaaacattcagaagtttatctggcatcccttcagcattgacaaagaagataaagagtttgtgaaatccaaccgaatgcatgctgttaacggctacatgtatggcaaccagccaggcttaaacatgtgtaaaagggatagagtttcctggcatctgattggattgggcactgacactgacatgcatggaattgtttttcaagggaacaccatccacctacgagggactcaccgagactccctggccctgtttccccacatggccacaacagcattcatgcagccagaccatgcaggtatttttagggtgttttgtgccaccatgccccacctctcgagaggcatgggtcagatctatgaggtcagcagctgtgacaacagggacccttctgagcagcggtacgggatgataagaactttttacatcgccgctgaagaagtagaatgggattatgcccctaacaaaaactgggagttcgaaaagcagcacgtggacgcaagaggggaaagacatggagatatatttatgaaccgcactgaaaattggattggctctcagtacaagaaggtggtttacagggaatatacggatggagaatttgtggagatcaaagcccgaccaccacgagaggagcacttagaactcctgggcccaatgattcatgctgaggtgggcaacaccgtcctgatcatatttaagaacaaagccagtaggccctactccatctcagcccagggtgtggaggagatggatagtggaaagcaattccaagtgcccatgacaaaaccaggagaagtaaaaacttatagatggaatatccctaaaagatccggtccagggccttctgatcccaattgtattccatgggtttactattcaacagtaaactttgtgaaggatacgtatagtggtttgatgggtcctctgattacatgccgaaaaggagtcttgaatgaaaagggaagaagaagtgacgttgattatgaatttgctctcttgtttttggtatttaatgagaatgaatcctggtatctggatgacaatattaagaagtatctcaacaaagatccacgagattttaagcgcactgatgattttgaggaaagcaacagaatgcatgccattaatggaaagatttttgggaatctccatggcctcataatgaacgaagatacaatgacaaactggtatttgttagggataggaagtgaagtggacatacataccatccattatcatgctgagagctttcttttcaaaatagataaatcttaccgagaagatgtgtatgatctctttcctgggacattccaaaccattgaactgtttgcagatcacccagggacatggctgctacactgtcatgtgtctgaccacatccatgctggcatggagacaacctacacggtccttcgtaacatagacaacaggattccttactccaccacatctcctggagtggcatctcacccagccacggtgccatctaacgaacgacctggcaaagagcagctctatttctttggcaagaatctgggtccaacaggagccaaggcagccttggtcatccttttcatcattggactcctccttctaatcaccacggtgattctctccctcagactctgctctgcaatgaagcagacagattaccagcaagtccagtcctgtgctctccccacggatgctctgtgaaccatctggtctccctcaacaggaaagggtgatgtcccacagctggccagatggcagccaacagggaaactggaccaaggcatcactcaccaaggaaggttgacactgtatcctggatcagccttctgatcctctcaaacatcatccaaagcaatttgcttttatttatttatttttaaatgggctgcgaataatcctcaggtataaaacacagaaaaaggagaatgggcatggctgagaatgtcaactcttagtctattctttggttggattcactgaataggagacactctgaaagatatctttatattccatcttttataattcttgaacagtgctttcttagctaaccaccaaagtttctaggtgaacagcttctagaaaaagttagagtgcctcagacatttaactggaagggcactactttttcaacattgttgcataacatgcatcccttggttctgtggaaaatatctttcttaggagttcttggcaatgtctaagtcagtgtctgctgatagaattagaccaaataaattttttggaggctttaaccagctctcctggccttttcctctttgatataaatagcctgtgcagtgcttgttttaaaaagcaaagttatacgttttttaaaaaattgctgctgtttttattcaaacctgtagaaatacttgaatgtttacaactcacttcatgttacatgtttttacaatatgtttctgtggcaatgtttgtactttcaaaaatcaagtagagaaattgtatttctactgcagactgtgggagggctgaaatctgtaaaagaacatgttaggctctccctttatgaatcagggactccctgagagtttagagcaagctttctatcagggagggaagctttgcaggaggcaagtctgggcttgaatttggagtctgatttttcattcagttagagggaatctttacaagtcctcatcttctatgaaattataacattctcattgtatgagaaacatcaggaggaatttatcaatgtaggtgactagataggagaagggacctctaaatatcctagattctatggcttttaaagacatacctcttcatggaaggagaaaaaaggaaaaggaaaggtgagaaaaagataatcttggtggcagattctcttaaaccattaaaccagctttgaaaattaataaataatttccaaggttcaaatgcaaaaaaattattgaacaactaaactcaacccattatgaggcaatctacactgtccatacctatgcttagacagtaggtgtaagattgataaaagtaacattgtttattacaagactgagaaattgcttttagctctgggcgagatgccctgagattccaatgccaatgctagatgagtgatactggtatgcctgccttagcagtgggtaatttgaatgtcaaagtgagtgacaaggacctaagaaatattctggtggagggacctttcacactgtctcatcttcatcttcatgaggggaaatgggtaattggatagaagctatagtcttaacataaaaggggatgcaaatgctaatagttctgttcatagtttgcttgaatgtcatatcaaacagcatacacaaaagattttgaatttcaatctgctaaccattgacaatgtgatttcatagtacatgttctacagttttcatacatgtgtaggctgcataatttcataattatggtaaatgccttatttattacccaccttagtaagacaagttgttcagttgtttttttttcttttcagtttatttttttaatgaaaacaaaaccacaaagtagtttgattgcatcatttatcattttaataaagtgtcacataaggtg

SEQ ID NO: 140317 - DNA, 2363 bp, Homo sapiens
  Payload ID: 7529
  Gene Symbol: HPN
  Gene Name: hepsin
  Uniprot ID: P05981
  ENST ID: ENST00000262626
  CDS Start-End: 826-2079
tcgagcccgctttccagggaccctacctgagggcccacaggtgaggcagcctggcctagcaggccccacgccaccgcctctgcctccaggccgcccgctgctgcggggccaccatgctcctgcccaggcctggagactgacccgaccccggcactacctcgaggctccgcccccacctgctggaccccagggtaaggacaagggcccccagactcacagttccagccctgaggacaggggttccctcatccccccacccagcctaatgcccacctcctaatagaggggttcctggggacctgaagagggggcactatgacgtccccccaagcacctaggtgttctgtcctgctcttccttcagactcagccgttggaccccagtcctttcctccccagacccaggagttccagccctcaggcccctcctccctcatactagggagtcctggcccccaaattcctcctttcccaagacttatgatttcaggtcctcagctgtctcctccctcaaaccgggatcctcagtcccctgctccaccaggctcaggcatgggggtccccatccctgcaaatccaggcgtccccccgctgctggtcagacactgaccccatccttgaacccagcccaatctgcgtccgtgatcacggcgtgctctggccaaggcccagtccctacagcctgcctggatggacgcctgggactgggggcgccaggactgggctgggctgggctcccccaggccctgcctccccgtccatctcctcacaggtcccaccctggcccaggaggtcagccagggaatcattaacaagaggcagtgacatggcgcagaaggagggtggccggactgtgccatgctgctccagacccaaggtggcagctctcactgcggggaccctgctacttctgacagccatcggggcggcatcctgggccattgtggctgttctcctcaggagtgaccaggagccgctgtacccagtgcaggtcagctctgcggacgctcggctcatggtctttgacaagacggaagggacgtggcggctgctgtgctcctcgcgctccaacgccagggtagccggactcagctgcgaggagatgggcttcctcagggcactgacccactccgagctggacgtgcgaacggcgggcgccaatggcacgtcgggcttcttctgtgtggacgaggggaggctgccccacacccagaggctgctggaggtcatctccgtgtgtgattgccccagaggccgtttcttggccgccatctgccaagactgtggccgcaggaagctgcccgtggaccgcatcgtgggaggccgggacaccagcttgggccggtggccgtggcaagtcagccttcgctatgatggagcacacctctgtgggggatccctgctctccggggactgggtgctgacagccgcccactgcttcccggagcggaaccgggtcctgtcccgatggcgagtgtttgccggtgccgtggcccaggcctctccccacggtctgcagctgggggtgcaggctgtggtctaccacgggggctatcttccctttcgggaccccaacagcgaggagaacagcaacgatattgccctggtccacctctccagtcccctgcccctcacagaatacatccagcctgtgtgcctcccagctgccggccaggccctggtggatggcaagatctgtaccgtgacgggctggggcaacacgcagtactatggccaacaggccggggtactccaggaggctcgagtccccataatcagcaatgatgtctgcaatggcgctgacttctatggaaaccagatcaagcccaagatgttctgtgctggctaccccgagggtggcattgatgcctgccagggcgacagcggtggtccctttgtgtgtgaggacagcatctctcggacgccacgttggcggctgtgtggcattgtgagttggggcactggctgtgccctggcccagaagccaggcgtctacaccaaagtcagtgacttccgggagtggatcttccaggccataaagactcactccgaagccagcggcatggtgacccagctctgaccggtggcttctcgctgcgcagcctccagggcccgaggtgatcccggtggtgggatccacgctgggcctaggatgggacgtttttcttcttgggcccggtccacaggtccaaggacaccctccctccagggtcctctcttccacagtggcgggcccactcagccccgagaccacccaacctcaccctcctgacccccatgtaaatattgttctgctgtctgggactcctgtctaggtgcccctgatgacgggatgctctttaaataataaagatggttttgatt

SEQ ID NO: 140318 - DNA, 1783 bp, Homo sapiens
  Payload ID: 7529
  Gene Symbol: HPN
  Gene Name: hepsin
  Uniprot ID: P05981
  ENST ID: ENST00000392226
  CDS Start-End: 246-1499
tcgagcccgctttccagggaccctacctgagggcccacaggtgaggcagcctggcctagcaggccccacgccaccgcctctgcctccaggccgcccgctgctgcggggccaccatgctcctgcccaggcctggagactgacccgaccccggcactacctcgaggctccgcccccacctgctggaccccagggtcccaccctggcccaggaggtcagccagggaatcattaacaagaggcagtgacatggcgcagaaggagggtggccggactgtgccatgctgctccagacccaaggtggcagctctcactgcggggaccctgctacttctgacagccatcggggcggcatcctgggccattgtggctgttctcctcaggagtgaccaggagccgctgtacccagtgcaggtcagctctgcggacgctcggctcatggtctttgacaagacggaagggacgtggcggctgctgtgctcctcgcgctccaacgccagggtagccggactcagctgcgaggagatgggcttcctcagggcactgacccactccgagctggacgtgcgaacggcgggcgccaatggcacgtcgggcttcttctgtgtggacgaggggaggctgccccacacccagaggctgctggaggtcatctccgtgtgtgattgccccagaggccgtttcttggccgccatctgccaagactgtggccgcaggaagctgcccgtggaccgcatcgtgggaggccgggacaccagcttgggccggtggccgtggcaagtcagccttcgctatgatggagcacacctctgtgggggatccctgctctccggggactgggtgctgacagccgcccactgcttcccggagcggaaccgggtcctgtcccgatggcgagtgtttgccggtgccgtggcccaggcctctccccacggtctgcagctgggggtgcaggctgtggtctaccacgggggctatcttccctttcgggaccccaacagcgaggagaacagcaacgatattgccctggtccacctctccagtcccctgcccctcacagaatacatccagcctgtgtgcctcccagctgccggccaggccctggtggatggcaagatctgtaccgtgacgggctggggcaacacgcagtactatggccaacaggccggggtactccaggaggctcgagtccccataatcagcaatgatgtctgcaatggcgctgacttctatggaaaccagatcaagcccaagatgttctgtgctggctaccccgagggtggcattgatgcctgccagggcgacagcggtggtccctttgtgtgtgaggacagcatctctcggacgccacgttggcggctgtgtggcattgtgagttggggcactggctgtgccctggcccagaagccaggcgtctacaccaaagtcagtgacttccgggagtggatcttccaggccataaagactcactccgaagccagcggcatggtgacccagctctgaccggtggcttctcgctgcgcagcctccagggcccgaggtgatcccggtggtgggatccacgctgggcctaggatgggacgtttttcttcttgggcccggtccacaggtccaaggacaccctccctccagggtcctctcttccacagtggcgggcccactcagccccgagaccacccaacctcaccctcctgacccccatgtaaatattgttctgctgtctgggactcctgtctaggtgcccctgatgacgggatgctctttaaataataaagatggttttgatt

SEQ ID NO: 140319 - DNA, 1212 bp, Homo sapiens
  Payload ID: 7529
  Gene Symbol: HPN
  Gene Name: hepsin
  ENST ID: ENST00000597419
  CDS Start-End: 162-941
tccaggccgcccgctgctgcggggccaccatgctcctgcccaggcctggagactgacccgaccccggcactacctcgaggctccgcccccacctgctggaccccagggtcccaccctggcccaggaggtcagccagggaatcattaacaagaggcagtgacatggcgcagaaggaggtgcaggtcagctctgcggacgctcggctcatggtctttgacaagacggaagggacgtggcggctgctgtgctcctcgcgctccaacgccagggtagccggactcagctgcgaggagatgggcttcctcaggcggaaccgggtcctgtcccgatggcgagtgtttgccggtgccgtggcccaggcctctccccacggtctgcagctgggggtgcaggctgtggtctaccacgggggctatcttccctttcgggaccccaacagcgaggagaacagcaacgatattgccctggtccacctctccagtcccctgcccctcacagaatacatccagcctgtgtgcctcccagctgccggccaggccctggtggatggcaagatctgtaccgtgacgggctggggcaacacgcagtactatggccaacaggccggggtactccaggaggctcgagtccccataatcagcaatgatgtctgcaatggcgctgacttctatggaaaccagatcaagcccaagatgttctgtgctggctaccccgagggtggcattgatgcctgccagggcgacagcggtggtccctttgtgtgtgaggacagcatctctcggacgccacgttggcggctgtgtggcattgtgagttggggcactggctgtgccctggcccagaagccaggcgtctacaccaaagtcagtgacttccgggagtggatcttccaggccataaagactcactccgaagccagcggcatggtgacccagctctgaccggtggcttctcgctgcgcagcctccagggcccgaggtgatcccggtggtgggatccacgctgggcctaggatgggacgtttttcttcttgggcccggtccacaggtccaaggacaccctccctccagggtcctctcttccacagtggcgggcccactcagccccgagaccacccaacctcaccctcctgacccccatgtaaatattgttctgctgtctgggactcctgtctaggtgcccctgatgacgggatgctctttaaataataaa

SEQ ID NO: 140320 - DNA, 564 bp, Homo sapiens
  Payload ID: 7529
  Gene Symbol: HPN
  Gene Name: hepsin
  ENST ID: ENST00000600390
  CDS Start-End: 324-564
acgccaccgcctctgcctccaggccgcccgctgctgcggggccaccatgctcctgcccaggcctggagactgacccgaccccggcactacctcgaggctccgcccccacctgctggaccccaggcccaatctgcgtccgtgatcacggcgtgctctggccaaggcccagtccctacagcctgcctggatggacgcctgggactgggggcgccaggactgggctgggctgggctcccccaggccctgcctccccgtccatctcctcacaggtcccaccctggcccaggaggtcagccagggaatcattaacaagaggcagtgacatggcgcagaaggagggtggccggactgtgccatgctgctccagacccaaggtggcagctctcactgcggggaccctgctacttctgacagccatcggggcggcatcctgggccattgtggctgttctcctcaggagtgaccaggagccgctgtacccagtgcaggtcagctctgcggacgctcggctcatggtctttgacaagacggaagggacgtggcggctgctgtgctcctcgcgct

SEQ ID NO: 140321 - DNA, 3703 bp, Homo sapiens
  Payload ID: 7530
  Gene Symbol: HPS1
  Gene Name: Hermansky-Pudlak syndrome 1
  Uniprot ID: Q92902
  ENST ID: ENST00000325103
  CDS Start-End: 235-2337
cgggctcctgcaggcggggcgctgtgcgcgccgcgatccggtacgtgggcctccgggctgtcccctctgggggcggcgatcctccctccggagccccccttcaaccctcccggaagtgagcatttgcaggaccagggatgctgtgctgctctcccatgagccagtcaccgagtcggtctgctgcagccctttctgaacctctggccgtctggatgctccactgtgcttgccaagatgaagtgcgtcttggtggccactgagggcgcagaggtcctcttctactggacagatcaggagtttgaagagagtctccggctgaagttcgggcagtcagagaatgaggaagaagagctccctgccctggaggaccagctcagcaccctcctagccccggtcatcatctcctccatgacgatgctggagaagctctcggacacctacacctgcttctccacggaaaatggcaacttcctgtatgtccttcacctgtttggagaatgcctgttcattgccatcaatggtgaccacaccgagagcgagggggacctgcggcggaagctgtatgtgctcaagtacctgtttgaagtgcactttgggctggtgactgtggacggtcatcttatccgaaaggagctgcggcccccagacctggcgcagcgtgtccagctgtgggagcacttccagagcctgctgtggacctacagccgcctgcgggagcaggagcagtgcttcgccgtggaggccctggagcgactgattcacccccagctctgtgagctgtgcatagaggcgctggagcggcacgtcatccaggctgtcaacaccagccccgagcggggaggcgaggaggccctgcatgccttcctgctcgtgcactccaagctgctggcattctactctagccacagtgccagctccctgcgcccggccgacctgcttgccctcatcctcctggttcaggacctctaccccagcgagagcacagcagaggacgacattcagccttccccgcggagggcccggagcagccagaacatccccgtgcagcaggcctggagccctcactccacgggcccaactggggggagctctgcagagacggagacagacagcttctccctccctgaggagtacttcacaccagctccttcccctggcgatcagagctcaggtagcaccatctggctggaggggggcaccccccccatggatgcccttcagatagcagaggacaccctccaaacactggttccccactgccctgtgccttccggccccagaaggatcttcctggatgccaacgtgaaggaaagctactgccccctagtgccccacaccatgtactgcctgcccctgtggcagggcatcaacctggtgctcctgaccaggagccccagcgcgcccctggccctggttctgtcccagctgatggatggcttctccatgctggagaagaagctgaaggaagggccggagcccggggcctccctgcgctcccagcccctcgtgggagacctgcgccagaggatggacaagtttgtcaagaatcgaggggcacaggagattcagagcacctggctggagtttaaggccaaggctttctccaaaagtgagcccggatcctcctgggagctgctccaggcatgtgggaagctgaagcggcagctctgcgccatctaccggctgaactttctgaccacagcccccagcaggggaggcccacacctgccccagcacctgcaggaccaagtgcagaggctcatgcgggagaagctgacggactggaaggacttcttgctggtgaagagcaggaggaacatcaccatggtgtcctacctagaagacttcccaggcttggtgcacttcatctatgtggaccgcaccactgggcagatggtggcgccttccctcaactgcagtcaaaagacctcgtcggagttgggcaaggggccgctggctgcctttgtcaaaactaaggtctggtctctgatccagctggcgcgcagatacctgcagaagggctacaccacgctgctgttccaggagggggatttctactgctcctacttcctgtggttcgagaatgacatggggtacaaactccagatgatcgaggtgcccgtcctctccgacgactcagtgcctatcggcatgctgggaggagactactacaggaagctcctgcgctactacagcaagaaccgcccaaccgaggctgtcaggtgctacgagctgctggccctgcacctgtctgtcatccccactgacctgctggtgcagcaggccggccagctggcccggcgcctctgggaggcctcccgtatccccctgctctaggccaaggtggccgcagtctgcctttgcatcctgtcctccagccacccttgcttgccactgttccccatgacgagagcctcctgtctgcagtggccatcctgaggatagggcagagtgcccagggtggccccagggcttctaaaaccccacctagaccaccctccatgtcaggtactgagcaaggccccagatccttctctctggaggaagagggaagcccaggggtcctgtttgtaaaacaacggtggcaacagctcctcttccagagctgcctctgcctttatcctgggagatggggaggaagccccatctctgctgttccctgcgtggaggaagcccacccagcaagctctctcctaccccaggtaaaaggtgctcctttgcctgggtttgaattccagcgctgccacttcctctctgcacctcctggcaagtttcttctattccccacgtttaaagcgatggcacctccgtcccagggtggtgtgaggattacccagtgtggtaggtgctcaataaatgttggtcattgttatcactgaagcccaacatgctagtgcttctagacccttctgtcagtgctgataagcccttgctaagtcccagccccttcatgcttggctggcgtctgccctagggctggggttctcaagcccctggccctggcccagagatttggattcccttggcggccgtggagcccagcctttgatgtctttcaaagcttctgtggtgcgccctggattgagaaccaccacccgaggggtacagcccctctcttccaaccgagaagttcctgtcccagaatggacccagggacaagagaccctgagagccctgggactgggagtgtctgctcctctgaggccaggaggccggtgctgggccagagaggacggcgtggcgaaagtcagcgtccactgcagcacaggatcagatggccgtgtgctgtgcatgcaggagcctcgccttctgtgtctttagtcttgagccaaaatttgctcaaagactgatctcttccttgcagggaacagctttggggctgggggaactagaacccacatgttggtctaaaccctgagaaggtggcagtgaggaagtatcccctcaggtgactggatctgtgttcctccttaacatcatctgatggaatggcaatgaaaagcgtggattgtggaaaatacagaaaaacataaaggaaaaaactccaatcccctgagcccaccactgttcaggacccctgcttttgtcacctactatttccctttagtttttagcagcggctggatgtgatatgtctagtttaaccagtccccttgatctttctatataataaataacacaggagtgaacatcctgaatcaga

SEQ ID NO: 140322 - DNA, 1580 bp, Homo sapiens
  Payload ID: 7530
  Gene Symbol: HPS1
  Gene Name: Hermansky-Pudlak syndrome 1
  Uniprot ID: Q92902
  ENST ID: ENST00000338546
  CDS Start-End: 222-1196
gcggggcgctgtgcgcgccgcgatccggtacgtgggcctccgggctgtcccctctgggggcggcgatcctccctccggagccccccttcaaccctcccggaagtgagcatttgcaggaccagggatgctgtgctgctctcccatgagccagtcaccgagtcggtctgctgcagccctttctgaacctctggccgtctggatgctccactgtgcttgccaagatgaagtgcgtcttggtggccactgagggcgcagaggtcctcttctactggacagatcaggagtttgaagagagtctccggctgaagttcgggcagtcagagaatgaggaagaagagctccctgccctggaggaccagctcagcaccctcctagccccggtcatcatctcctccatgacgatgctggagaagctctcggacacctacacctgcttctccacggaaaatggcaacttcctgtatgtccttcacctgtttggagaatgcctgttcattgccatcaatggtgaccacaccgagagcgagggggacctgcggcggaagctgtatgtgctcaagtacctgtttgaagtgcactttgggctggtgactgtggacggtcatcttatccgaaaggagctgcggcccccagacctggcgcagcgtgtccagctgtgggagcacttccagagcctgctgtggacctacagccgcctgcgggagcaggagcagtgcttcgccgtggaggccctggagcgactgattcacccccagctctgtgagctgtgcatagaggcgctggagcggcacgtcatccaggctgtcaacaccagccccgagcggggaggcgaggaggccctgcatgccttcctgctcgtgcactccaagctgctggcattctactctagccacagtgccagctccctgcgcccggccgacctgcttgccctcatcctcctggttcaggacctctaccccagcgagagcacagcagaggacgacattcagccttccccgcggagggcccggagcagccagaacatccccgtgcagcaggcctggagccctcactccacgggcccaactggggggagctctgcagagacggagacagacagcttctccctccctgaggagtacttcacaccagctccttcccctggcgatcagagctcaggtgaggaccggaggaaagcaggaggaaacaatagctagctgcgagcgacaggcagcccaggacatctgtcttaggctccagtggacccccgtgcctcctaaggcttgagtgcaggtacccgtgttcctagagcacaggacgctgtctgcggctccccatcttccctgccagctccagcctgaactcaaggattgttaagaccactccactgatccctaaagctgttgatgacaagttgattcatttaaaacttctgtacatgcattctcagactcatcttttttgtaattaaaattaaaaattaagttaaatttagtaataatcatctaatttctatacattctaaaatatattcagcatctgtagtttatactttgtttctccaaagtatgtgggtaaacaataaaaaaaaactataaata

SEQ ID NO: 140323 - DNA, 978 bp, Homo sapiens
  Payload ID: 7530
  Gene Symbol: HPS1
  Gene Name: Hermansky-Pudlak syndrome 1
  ENST ID: ENST00000359632
  CDS Start-End: 1-978
cgactgattcacccccagctctgtgagctgtgcatagaggcgctggagcggcacgtcatccaggctgtcaacaccagccccgagcggggaggcgaggaggccctgcatgccttcctgctcgtgcactccaagctgctggcattctactctagccacagtgccagctccctgcgcccggccgacctgcttgccctcatcctcctggttcaggacctctaccccagcgagagcacagcagaggacgacattcaggagacagacagcttctccctccctgaggagtacttcacaccagctccttcccctggcgatcagagctcaggtagcaccatctggctggaggggggcaccccccccatggatgcccttcagatagcagaggacaccctccaaacactggttccccactgccctgtgccttccggccccagaaggatcttcctggatgccaacgtgaaggaaagctactgccccctagtgccccacaccatgtactgcctgcccctgtggcagggcatcaacctggtgctcctgaccaggagccccagcgcgcccctggccctggttctgtcccagctgatggatggcttctccatgctggagaagaagctgaaggaagggccggagcccggggcctccctgcgctcccagcccctcgtgggagacctgcgccagaggatggacaagtttgtcaagaatcgaggggcacaggagattcagagcacctggctggagtttaaggccaaggctttctccaaaagtgagcccggatcctcctgggagctgctccaggcatgtgggaagctgaagcggcagctctgcgccatctaccggctgaactttctgaccacagcccccagcaggggaggcccacacctgccccagcacctgcaggaccaagtgcagaggctcatgcgggagaagctgacggactggaaggacttcttgctggtgaagagcaggaggaacatcaccatg

SEQ ID NO: 140324 - DNA, 3678 bp, Homo sapiens
  Payload ID: 7530
  Gene Symbol: HPS1
  Gene Name: Hermansky-Pudlak syndrome 1
  Uniprot ID: Q92902
  ENST ID: ENST00000361490
  CDS Start-End: 210-2312
gggcgctgtgcgcgccgcgatccggtacgtgggcctccgggctgtcccctctgggggcggcgatcctccctccggagccccccttcaaccctcccggaagtgaggaccagggatgctgtgctgctctcccatgagccagtcaccgagtcggtctgctgcagccctttctgaacctctggccgtctggatgctccactgtgcttgccaagatgaagtgcgtcttggtggccactgagggcgcagaggtcctcttctactggacagatcaggagtttgaagagagtctccggctgaagttcgggcagtcagagaatgaggaagaagagctccctgccctggaggaccagctcagcaccctcctagccccggtcatcatctcctccatgacgatgctggagaagctctcggacacctacacctgcttctccacggaaaatggcaacttcctgtatgtccttcacctgtttggagaatgcctgttcattgccatcaatggtgaccacaccgagagcgagggggacctgcggcggaagctgtatgtgctcaagtacctgtttgaagtgcactttgggctggtgactgtggacggtcatcttatccgaaaggagctgcggcccccagacctggcgcagcgtgtccagctgtgggagcacttccagagcctgctgtggacctacagccgcctgcgggagcaggagcagtgcttcgccgtggaggccctggagcgactgattcacccccagctctgtgagctgtgcatagaggcgctggagcggcacgtcatccaggctgtcaacaccagccccgagcggggaggcgaggaggccctgcatgccttcctgctcgtgcactccaagctgctggcattctactctagccacagtgccagctccctgcgcccggccgacctgcttgccctcatcctcctggttcaggacctctaccccagcgagagcacagcagaggacgacattcagccttccccgcggagggcccggagcagccagaacatccccgtgcagcaggcctggagccctcactccacgggcccaactggggggagctctgcagagacggagacagacagcttctccctccctgaggagtacttcacaccagctccttcccctggcgatcagagctcaggtagcaccatctggctggaggggggcaccccccccatggatgcccttcagatagcagaggacaccctccaaacactggttccccactgccctgtgccttccggccccagaaggatcttcctggatgccaacgtgaaggaaagctactgccccctagtgccccacaccatgtactgcctgcccctgtggcagggcatcaacctggtgctcctgaccaggagccccagcgcgcccctggccctggttctgtcccagctgatggatggcttctccatgctggagaagaagctgaaggaagggccggagcccggggcctccctgcgctcccagcccctcgtgggagacctgcgccagaggatggacaagtttgtcaagaatcgaggggcacaggagattcagagcacctggctggagtttaaggccaaggctttctccaaaagtgagcccggatcctcctgggagctgctccaggcatgtgggaagctgaagcggcagctctgcgccatctaccggctgaactttctgaccacagcccccagcaggggaggcccacacctgccccagcacctgcaggaccaagtgcagaggctcatgcgggagaagctgacggactggaaggacttcttgctggtgaagagcaggaggaacatcaccatggtgtcctacctagaagacttcccaggcttggtgcacttcatctatgtggaccgcaccactgggcagatggtggcgccttccctcaactgcagtcaaaagacctcgtcggagttgggcaaggggccgctggctgcctttgtcaaaactaaggtctggtctctgatccagctggcgcgcagatacctgcagaagggctacaccacgctgctgttccaggagggggatttctactgctcctacttcctgtggttcgagaatgacatggggtacaaactccagatgatcgaggtgcccgtcctctccgacgactcagtgcctatcggcatgctgggaggagactactacaggaagctcctgcgctactacagcaagaaccgcccaaccgaggctgtcaggtgctacgagctgctggccctgcacctgtctgtcatccccactgacctgctggtgcagcaggccggccagctggcccggcgcctctgggaggcctcccgtatccccctgctctaggccaaggtggccgcagtctgcctttgcatcctgtcctccagccacccttgcttgccactgttccccatgacgagagcctcctgtctgcagtggccatcctgaggatagggcagagtgcccagggtggccccagggcttctaaaaccccacctagaccaccctccatgtcaggtactgagcaaggccccagatccttctctctggaggaagagggaagcccaggggtcctgtttgtaaaacaacggtggcaacagctcctcttccagagctgcctctgcctttatcctgggagatggggaggaagccccatctctgctgttccctgcgtggaggaagcccacccagcaagctctctcctaccccaggtaaaaggtgctcctttgcctgggtttgaattccagcgctgccacttcctctctgcacctcctggcaagtttcttctattccccacgtttaaagcgatggcacctccgtcccagggtggtgtgaggattacccagtgtggtaggtgctcaataaatgttggtcattgttatcactgaagcccaacatgctagtgcttctagacccttctgtcagtgctgataagcccttgctaagtcccagccccttcatgcttggctggcgtctgccctagggctggggttctcaagcccctggccctggcccagagatttggattcccttggcggccgtggagcccagcctttgatgtctttcaaagcttctgtggtgcgccctggattgagaaccaccacccgaggggtacagcccctctcttccaaccgagaagttcctgtcccagaatggacccagggacaagagaccctgagagccctgggactgggagtgtctgctcctctgaggccaggaggccggtgctgggccagagaggacggcgtggcgaaagtcagcgtccactgcagcacaggatcagatggccgtgtgctgtgcatgcaggagcctcgccttctgtgtctttagtcttgagccaaaatttgctcaaagactgatctcttccttgcagggaacagctttggggctgggggaactagaacccacatgttggtctaaaccctgagaaggtggcagtgaggaagtatcccctcaggtgactggatctgtgttcctccttaacatcatctgatggaatggcaatgaaaagcgtggattgtggaaaatacagaaaaacataaaggaaaaaactccaatcccctgagcccaccactgttcaggacccctgcttttgtcacctactatttccctttagtttttagcagcggctggatgtgatatgtctagtttaaccagtccccttgatctttctatataataaataacacaggagtgaacatcctgaatcaga

SEQ ID NO: 140325 - DNA, 857 bp, Homo sapiens
  Payload ID: 7530
  Gene Symbol: HPS1
  Gene Name: Hermansky-Pudlak syndrome 1
  ENST ID: ENST00000414009
  CDS Start-End: 1-478
gctgcggcccccagacctggcgcagcgtgtccagctgtgggagcacttccagagcctgctgtggacctacagccgcctgcgggagcaggagcagtgcttcgccgtggaggccctggagcgactgattcacccccagctctgtgagctgtgcatagaggcgctggagcggcacgtcatccaggctgtcaacaccagccccgagcggggaggcgaggaggccctgcatgccttcctgctcgtgcactccaagctgctggcattctactctagccacagtgccagctccctgcgcccggccgacctgcttgccctcatcctcctggttcaggacctctaccccagcgagagcacagcagaggacgacattcaggagacagacagcttctccctccctgaggagtacttcacaccagctccttcccctggcgatcagagctcaggtgaggaccggaggaaagcaggaggaaacaatagctagctgcgagcgacaggcagcccaggacatctgtcttaggctccagtggacccccgtgcctcctaaggcttgagtgcaggtacccgtgttcctagagcacaggacgctgtctgcggctccccatcttccctgccagctccagcctgaactcaaggattgttaagaccactccactgatccctaaagctgttgatgacaagttgattcatttaaaacttctgtacatgcattctcagactcatcttttttgtaattaaaattaaaaattaagttaaatttagtaataatcatctaatttctatacattctaaaatatattcagcatctgtagtttatactttgtttctccaaagtatgtgggtaaacaataaaaaaaaactat

SEQ ID NO: 140326 - DNA, 3714 bp, Homo sapiens
  Payload ID: 7530
  Gene Symbol: HPS1
  Gene Name: Hermansky-Pudlak syndrome 1
  Uniprot ID: Q92902
  ENST ID: ENST00000613394
  CDS Start-End: 247-2349
ggtcctacccggaagcgcgcccgggctcctgcaggcggggcgctgtgcgcgccgcgatccggtacgtgggcctccgggctgtcccctctgggggcggcgatcctccctccggagccccccttcaaccctcccggaagtgaggaccagggatgctgtgctgctctcccatgagccagtcaccgagtcggtctgctgcagccctttctgaacctctggccgtctggatgctccactgtgcttgccaagatgaagtgcgtcttggtggccactgagggcgcagaggtcctcttctactggacagatcaggagtttgaagagagtctccggctgaagttcgggcagtcagagaatgaggaagaagagctccctgccctggaggaccagctcagcaccctcctagccccggtcatcatctcctccatgacgatgctggagaagctctcggacacctacacctgcttctccacggaaaatggcaacttcctgtatgtccttcacctgtttggagaatgcctgttcattgccatcaatggtgaccacaccgagagcgagggggacctgcggcggaagctgtatgtgctcaagtacctgtttgaagtgcactttgggctggtgactgtggacggtcatcttatccgaaaggagctgcggcccccagacctggcgcagcgtgtccagctgtgggagcacttccagagcctgctgtggacctacagccgcctgcgggagcaggagcagtgcttcgccgtggaggccctggagcgactgattcacccccagctctgtgagctgtgcatagaggcgctggagcggcacgtcatccaggctgtcaacaccagccccgagcggggaggcgaggaggccctgcatgccttcctgctcgtgcactccaagctgctggcattctactctagccacagtgccagctccctgcgcccggccgacctgcttgccctcatcctcctggttcaggacctctaccccagcgagagcacagcagaggacgacattcagccttccccgcggagggcccggagcagccagaacatccccgtgcagcaggcctggagccctcactccacgggcccaactggggggagctctgcagagacggagacagacagcttctccctccctgaggagtacttcacaccagctccttcccctggcgatcagagctcaggtagcaccatctggctggaggggggcaccccccccatggatgcccttcagatagcagaggacaccctccaaacactggttccccactgccctgtgccttccggccccagaaggatcttcctggatgccaacgtgaaggaaagctactgccccctagtgccccacaccatgtactgcctgcccctgtggcagggcatcaacctggtgctcctgaccaggagccccagcgcgcccctggccctggttctgtcccagctgatggatggcttctccatgctggagaagaagctgaaggaagggccggagcccggggcctccctgcgctcccagcccctcgtgggagacctgcgccagaggatggacaagtttgtcaagaatcgaggggcacaggagattcagagcacctggctggagtttaaggccaaggctttctccaaaagtgagcccggatcctcctgggagctgctccaggcatgtgggaagctgaagcggcagctctgcgccatctaccggctgaactttctgaccacagcccccagcaggggaggcccacacctgccccagcacctgcaggaccaagtgcagaggctcatgcgggagaagctgacggactggaaggacttcttgctggtgaagagcaggaggaacatcaccatggtgtcatatctagaagacttcccaggcttggtgcacttcatctatgtggaccgcaccactgggcagatggtggcgccttccctcaactgcagtcaaaagacctcgtcggagttgggcaaggggccgctggctgcctttgtcaaaactaaggtctggtctctgatccagctggcgcgcagatacctgcagaagggctacaccacgctgctgttccaggagggggatttctactgctcctacttcctgtggttcgagaatgacatggggtacaaactccagatgatcgaggtgcccgtcctctccgacgactcagtgcctatcggcatgctgggaggagactactacaggaagctcctgcgctactacagcaagaaccgcccaaccgaggctgtcaggtgctacgagctgctggccctgcacctgtctgtcatccccactgacctgctggtgcagcaggccggccagctggcccggcgcctctgggaggcctcccgtatccccctgctctaggccaaggtggccgcagtctgcctttgcatcctgtcctccagccacccttgcttgccactgttccccatgacgagagcctcctgtctgcagtggccatcctgaggatagggcagagtgcccagggtggccccagggcttctaaaaccccacctagaccaccctccatgtcaggtactgagcaaggccccagatccttctctctggaggaagagggaagcccaggggtcctgtttgtaaaacaacggtggcaacagctcctcttccagagctgcctctgcctttatcctgggagatggggaggaagccccatctctgctgttccctgcgtggaggaagcccacccagcaagctctctcctaccccaggtaaaaggtgctcctttgcctgggtttgaattccagcgctgccacttcctctctgcacctcctggcaagtttcttctattccccacgtttaaagcgatggcacctccgtcccagggtggtgtgaggattacccagtgtggtaggtgctcaataaatgttggtcattgttatcactgaagcccaacatgctagtgcttctagacccttctgtcagtgctgataagcccttgctaagtcccagccccttcatgcttggctggcgtctgccctagggctggggttctcaagcccctggccctggcccagagatttggattcccttggcggccgtggagcccagcctttgatgtctttcaaagcttctgtggtgcgccctggattgagaaccaccacccgaggggtacagcccctctcttccaaccgagaagttcctgtcccagaatggacccagggacaagagaccctgagagccctgggactgggagtgtctgctcctctgaggccaggaggccggtgctgggccagagaggacggcgtggcgaaagtcagcgtccactgcagcacaggatcagatggccgtgtgctgtgcatgcaggagcctcgccttctgtgtctttagtcttgagccaaaatttgctcaaagactgatctcttccttgcagggaacagctttggggctgggggaactagaacccacatgttggtctaaaccctgagaaggtggcagtgaggaagtatcccctcaggtgactggatctgtgttcctccttaacatcatctgatggaatggcaatgaaaagcgtggattgtggaaaatacagaaaaacataaaggaaaaaactccaatcccctgagcccaccactgttcaggacccctgcttttgtcacctactatttccctttagtttttagcagcggctggatgtgatatgtctagtttaaccagtccccttgatctttctatataataaataacacaggagtgaacatcctgaatcag

SEQ ID NO: 140327 - DNA, 4665 bp, Homo sapiens
  Payload ID: 7531
  Gene Symbol: HPS3
  Gene Name: Hermansky-Pudlak syndrome 3
  Uniprot ID: Q969F9
  ENST ID: ENST00000296051
  CDS Start-End: 141-3155
ccgcgggcggggccggctggcgttcacgtgacccggcgtcattggctcgctcgcggaagtagtcctacattcgcggtcagcgcggggtctccgggcgccctgcagggcgggcaggctgtgccatcccgccggacgtcgggatggtgcagctgtacaacctgcacccgttcgggtcgcagcaggtggtgccctgcaagctggagccggaccggttctgtggcggggggcgtgacgcgcttttcgtggcggcgggctgcaaggtggaggcgttcgcggtggccggccaggagctgtgccagccgcggtgcgccttctccacgctgggccgggtgttgcgcctggcctacagcgaggctggagattatttggtagcaattgaagagaaaaacaaagctacatttctacgtgcttatgtgaactggagaaataaaaggactgaaaactctcgtgtgtgtatccgaatgattgggcataatgtggagggaccattcagcaaagccttcagagaccagatgtacattattgaaatgccgctttcggaggcccccttgtgcatttcctgttgccctgtgaaaggagaccttctcgttggctgcacaaataaattagtcttatttagtttgaagtaccagatcattaatgaggaattctcactattggactttgaacgttctttaattatacacatagataatatcactcctgttgaggtttctttttgtgttggatatgttgctgtcatgtcagacttagaagtcttaatcgtaaaactggagtcaggccctaaaaatggagagagagttcaccaccatccacataagaccaacaatcgaataagacggacagaagaaggcatcagtaatgaaatttcacagcttgagtcagatgattttgtcatctgccagaagcccctggaacttcttggtgaaaaaagtgaacagtctggattatctgttacactggagtctacgggattagctgatgaaaaaagaaaatattcccactttcagcacctgctctatagacgttttgctcctgatatttcgtcctatgtcttgtctgatgacatcaagctacattccctccagctgctacccatttaccagaccggttctcttacatctgatggaaaaaatttgtctcaggaaaaagaattgctgagtctcttttgctttttctccttacctcatgtgggctatctctacatggttgtcaaatctgttgaattgatgtcagtctaccagtatcctgaaaagtctcagcaggcagtactcacgccacaatttttgcacgtcattacaagtaacaacctgcagtgtttcactgtgcggtgcagtgcggcggcagctcgtgaggaggacccgtacatggacaccaccctgaaggcttgcccacctgtcagtatggatgtctgtgctttaagaatacagcttttcataggcttgaaagccatctgtcactttaaaaaccacatcatacttttgactaaagcagaacctgaagccattccagagagaagacagtcacccaagaggcttctttcgagaaaagataccagtgttaaaatcaaaatacctcctgtagctgaggctgggtggaatttgtatattgtgaatacgatctcaccagtgcagctgtacaaagagatggtagactatagcaatacctataagactgtcaaaacccagagctgcattcaccttctcagtgaggctcatctgttagtgcgagctgccctgatggatgccagtcagctggaacctggagagaaggcagagcttttggaagcatttaaggaaagctgtgggcaccttggggactgttacagcaggcttgactcccagcattctcatctcaccttgccatactataagatgtctggtttgtctatggctgaagttctggcccgcacggactggacagtagaggatggattacagaaatacgagagaggattaatcttttacattaatcattcactttatgaaaacctggatgaagaattaaatgaagaattagcagcaaaagtggttcagatgttttatgtggctgagccaaagcaagtgccccatattctctgtagtccttctatgaagaatattaatcctttaactgccatgagctatctaaggaagctggatacttctgggttttcatcgatcttagtgacattgaccaaggcagcagtggctctgaaaatgggagatcttgacatgcacagaaatgaaatgaaaagccattcagagatgaagttggtatgtggcttcattctggaacctcggctgttgattcaacagagaaagggacagattgttccaaccgagcttgcacttcacttgaaggaaactcagcctggattgcttgtggcttcagttctgggcttgcagaagaacaacaaaattggaattgaagaagcagattccttttttaaggtgctttgtgctaaggatgaagatacaattcctcagctcttggtagacttttgggaagctcagctagtggcatgtctcccagatgtggtacttcaggaactctttttcaaactcacatcacagtacatctggagattgtctaagaggcagcctcctgacaccacaccattgcgaacatcggaggatctgataaatgcctgtagtcattatggcttaatttatccatgggttcacgtcgtaatatcatctgattctttagctgataaaaattatacagaagatctttcaaaattacagtctcttatatgtggtccttcatttgacatagcttccattattccgttcttggagccactttcagaagacactattgccggcctcagtgtccatgttctgtgtcgtacacgcttgaaagagtatgaacagtgcatagacatactgttagagagatgcccggaggcagtcattccatatgctaatcatgaactgaaagaagagaaccggactctgtggtggaaaaaactgttgcctgaactttgtcagagaataaaatgtggtggagagaagtatcaactctacctgtcatcattaaaagaaacattgtcaattgttgctgtggaactagaactgaaggatttcatgaatgttctcccagaagatggtactgcaacatttttcttgccatatcttctctattgcagtcgaaagaaaccattgacttaaaggtatcatttgaaaaataccataatggcatttgagactgaatttctaaaaattgaatgccaaagtacaagtagaggagttttttattttatatatcacacacacacacacacacacacacacacacacacacatatatgatacaaatgctttcaggctgcttaccttaccgtgtagtggtaactattcacttcttaatttatgacctcaatcaatttaattgtctagaatgtaaaaagtctttaagacataagaattcctcaaagaagccatacattttttaaggtggggattgacttttattccaaggaacaacatcagttcactgttgttggagacatgacaatcattttcatcccaagaacactttaaggaaacattttacaagtatgcttgaaagaatgtcactaactggtccagaattttatcttcttgatttttccagatttctctatgtttttgagaaagatgttaatgttttgccatggtaaaagatttcaaacctcattttttttgttccttttcttgttacttttaagaaaactcatgctctgtttctctgaatcaaatgaagtagaagtttacaaagctaactttcttcttgtctagctattaacatgatttgtcaaatgcatgtttttttcagccaaagccttgtttccatttttgttgatgtgtactcttgctcttttagctagagtgtatgtgaaaataaagaaatacatcattgtattcacaaccatgtgtcttcatttataactttttgtttaaaaaatttttagttcaagtttagttcattgatattatcctctgaatgcagttaaggctgggcagaaattctactcatgtgacatctgccacaggtctattttgaagcttttcttctaatggcaatgtttgtccttaccaggatttaatctatagaattgtctctcaactctgcttttctccagttccagataacgtccttaagaccatctgttcaggggttcacaaaactcaaatttgtgtcattctattttatttattttattttttatttccttccctcataccttgcccattccctctgaatattaggtgtgatgtcaacagcatgttagaaggatcaatgggaaggcaatgattgaaaacatttcaatgaaccttaatagtgttcctttgaggagcacccaggagaatatctggtcatagatctttttttaaatgcagttttataaaaccctaacagcggtgatatcattagactgtatgaatcagttttattacctagtgtacaagtgtcagtcatgtatcattatatagtctgttgatctttccatttgcaaaaaattaatagttttcccccacaaatgtacaaagttgtatgcttccagtcttcttttaatgtttatagtcattccaaagtaacattctattttacactttcacatacattgttatgaatcattggtttttctcttttttccacttatcaccaatttatttcattcagccagatttggtgtct

SEQ ID NO: 140328 - DNA, 2745 bp, Homo sapiens
  Payload ID: 7531
  Gene Symbol: HPS3
  Gene Name: Hermansky-Pudlak syndrome 3
  ENST ID: ENST00000460120
  CDS Start-End: 87-2606
ggaagtagtcctacattcgcggtcagcgcggggtctccgggcgccctgcagggcgggcaggctgtgccatcccgccggacgtcgggatggtgcagctgtacaacctgcacccgttcgggtcgcagcaggtggtgccctgcaagctggagccggaccggttctgtggcggggggcgtgacgcgcttttcgtggcggcgggctgcaaggtggaggcgttcgcggtggccggccaggagctgtgccagccgcggtgcgccttctccacgctgggccgggtgttgcgcctggcctacagcgaggctggcatcagtaatgaaatttcacagcttgagtcagatgattttgtcatctgccagaagcccctggaacttcttggtgaaaaaagtgaacagtctggattatctgttacactggagtctacgggattagctgatgaaaaaagaaaatattcccactttcagcacctgctctatagacgttttgctcctgatatttcgtcctatgtcttgtctgatgacatcaagctacattccctccagctgctacccatttaccagaccggttctcttacatctgatggaaaaaatttgtctcaggaaaaagaattgctgagtctcttttgctttttctccttacctcatgtgggctatctctacatggttgtcaaatctgttgaattgatgtcagtctaccagtatcctgaaaagtctcagcaggcagtactcacgccacaatttttgcacgtcattacaagtaacaacctgcagtgtttcactgtgcggtgcagtgcggcggcagctcgtgaggaggacccgtacatggacaccaccctgaaggcttgcccacctgtcagtatggatgtctgtgctttaagaatacagcttttcataggcttgaaagccatctgtcactttaaaaaccacatcatacttttgactaaagcagaacctgaagccattccagagagaagacagtcacccaagaggcttctttcgagaaaagataccagtgttaaaatcaaaatacctcctgtagctgaggctgggtggaatttgtatattgtgaatacgatctcaccagtgcagctgtacaaagagatggtagactatagcaatacctataagactgtcaaaacccagagctgcattcaccttctcagtgaggctcatctgttagtgcgagctgccctgatggatgccagtcagctggaacctggagagaaggcagagcttttggaagcatttaaggaaagctgtgggcaccttggggactgttacagcaggcttgactcccagcattctcatctcaccttgccatactataagatgtctggtttgtctatggctgaagttctggcccgcacggactggacagtagaggatggattacagaaatacgagagaggattaatcttttacattaatcattcactttatgaaaacctggatgaagaattaaatgaagaattagcagcaaaagtggttcagatgttttatgtggctgagccaaagcaagtgccccatattctctgtagtccttctatgaagaatattaatcctttaactgccatgagctatctaaggaagctggatacttctgggttttcatcgatcttagtgacattgaccaaggcagcagtggctctgaaaatgggagatcttgacatgcacagaaatgaaatgaaaagccattcagagatgaagttggtatgtggcttcattctggaacctcggctgttgattcaacagagaaagggacagattgttccaaccgagcttgcacttcacttgaaggaaactcagcctggattgcttgtggcttcagttctgggcttgcagaagaacaacaaaattggaattgaagaagcagattccttttttaaggtgctttgtgctaaggatgaagatacaattcctcagctcttggtagacttttgggaagctcagctagtggcatgtctcccagatgtggtacttcaggaactctttttcaaactcacatcacagtacatctggagattgtctaagaggcagcctcctgacaccacaccattgcgaacatcggaggatctgataaatgcctgtagtcattatggcttaatttatccatgggttcacgtcgtaatatcatctgattctttagctgataaaaattatacagaagatctttcaaaattacagtctcttatatgtggtccttcatttgacatagcttccattattccgttcttggagccactttcagaagacactattgccggcctcagtgtccatgttctgtgtcgtacacgcttgaaagagtatgaacagtgcatagacatactgttagagagatgcccggaggcagtcattccatatgctaatcatgaactgaaagaagagaaccggactctgtggtggaaaaaactgttgcctgaactttgtcagagaataaaatgtggtggagagaagtatcaactctacctgtcatcattaaaagaaacattgtcaattgttgctgtggaactagaactgaaggatttcatgaatgttctcccagaagatggtactgcaacatttttcttgccatatcttctctattgcagtcgaaagaaaccattgacttaaaggtatcatttgaaaaataccataatggcatttgagactgaatttctaaaaattgaatgccaaagtacaagtagaggagttttttattttatatatcacacacacacacacacacacacacacacacacacacatatat

SEQ ID NO: 140329 - DNA, 1958 bp, Homo sapiens
  Payload ID: 7531
  Gene Symbol: HPS3
  Gene Name: Hermansky-Pudlak syndrome 3
  ENST ID: ENST00000460822
  CDS Start-End: 1-801
gaattagcagcaaaagtggttcagatgttttatgtggctgagccaaagcaagtgccccatattctctgtagtccttctatgaagaatattaatcctttaactgccatgagctatctaaggaagctggatacttctgggttttcatcgatcttagtgacattgaccaaggcagcagtggctctgaaaatgggagatcttgacatgcacagaaatgaaatgaaaagccattcagagatgaagttggtatgtggcttcattctggaacctcggctgttgattcaacagagaaagggacagattgttccaaccgagcttgcacttcacttgaaggaaactcagcctggattgcttgtggcttcagttctgggcttgcagaagaacaacaaaattggaattgaagaagcagattccttttttaaggtgctttgtgctaaggatgaagatacaattcctcagctcttggtagacttttgggaagctcagctagtggcatgtctcccagatgtggtacttcaggaactctttttcaaactcacatcacagtacatctggagattgtctaagaggcagcctcctgacaccacaccattgcgaacatcggaggatctgataaatgcctgtagtcattatggcttaatttatccatgggttcacgtcgtaatatcatctgattctttagctgataaaaattatacagaagatctttcaaaattacagcttccattattccgttcttggagccactttcagaagacactattgccggcctcagtgtccatgttctgtgtcgtacacgcttgaaagagtatgaacagtgcatagacatactgttagagagatgcccggaggcagtcattccatatgctaatcatgaactgaaagaagagaaccggatagactctgtggtggaaaaaactgttgcctgaactttgtcagagaataaaatgtggtggagagaagtatcaactctacctgtcatcattaaaagcttaattttcacgggaactgtggaagctagcagacagtaccactacattataaatgaggaacctaggacttggaagattaagtgactttcttaaagccactcgaaacattgtcaattgttgctgtggaactagaactgaaggatttcatgaatgttctcccagaagatggtactgcaacatttttcttgccatatcttctctattgcagtcgaaagaaaccattgacttaaaggtatcatttgaaaaataccataatggcatttgagactgaatttctaaaaattgaatgccaaagtacaagtagaggagttttttattttatatatcacacacacacacacacacacacacacacacacacacatatatgatacaaatgctttcaggctgcttaccttaccgtgtagtggtaactattcacttcttaatttatgacctcaatcaatttaattgtctagaatgtaaaaagtctttaagacataagaattcctcaaagaagccatacattttttaaggtggggattgacttttattccaaggaacaacatcagttcactgttgttggagacatgacaatcattttcatcccaagaacactttaaggaaacattttacaagtatgcttgaaagaatgtcactaactggtccagaattttatcttcttgatttttccagatttctctatgtttttgagaaagatgttaatgttttgccatggtaaaagatttcaaacctcattttttttgttccttttcttgttacttttaagaaaactcatgctctgtttctctgaatcaaatgaagtagaagtttacaaagctaactttcttcttgtctagctattaacatgatttgtcaaatgcatgtttttttcagccaaagccttgtttccatttttgttgatgtgtactcttgctcttttagctagagtgtatgtgaaaataaagaaatacatcattgtattcacaa

SEQ ID NO: 140330 - DNA, 3786 bp, Homo sapiens
  Payload ID: 7532
  Gene Symbol: HPS4
  Gene Name: Hermansky-Pudlak syndrome 4
  Uniprot ID: Q9NQG7
  ENST ID: ENST00000336873
  CDS Start-End: 510-2636
gtgacctaaggcctctctgccgcgcgcgcagagccaaggcactgatgtttgaactggaaacttcaaaacgtttaataagagtcttcaggatgggtttgaactagacaagctagaaatttctttagaacaccagctctagcatgcatctcccacttttggctttcctggagaggagcttgaagaggtggttctgcagacagccacagtgatacttaggaaaccagaggaatggatttgacttttctgctaggattctctgttatagtttctccctgagttgtaagaggcatggaaatatacatgaaactgaagaacctgcaaggaagggaagtggaactttccatgctgagtgaaaactaaccaagtggcagttgtgactgaaaacactgaaacctaccacgtccagattcactggattgggggatagaggaacggtcacagctagggagaaagaagtgataccggaaaagaaaacctaaatgaagagaatgaggatgactgcacagtagatggccacctctacctccacagaggcaaagtcagcctcgtggtggaattatttttttctttatgatggttccaaggtaaaggaagaaggcgatccaacaagagctggcatttgttacttttatccttcccagaccctgctagaccaacaggagttgctttgtggacagattgctggagttgtccgctgtgtttctgacatttctgactctcctcctactcttgttcgtctgagaaaactgaagtttgccataaaagttgatggagattacctttgggtgctgggctgtgctgtggagctccctgatgtcagctgcaagcggtttctggatcagctagttggattctttaatttttacaatggacctgtttccctagcttatgagaactgttctcaggaagaactgagcacggagtgggacaccttcatcgagcaaattctgaaaaacaccagtgatctgcataagattttcaattccctctggaacttggaccaaactaaagtggagcccctgttgttgctgaaggcagcccgcattctgcagacctgccagcgctcgcctcacattctcgctggctgcatcctctataaaggactgattgtcagcacccaactcccgccctccctcaccgccaaggtcctgcttcaccgaacagcacctcaggagcagagactccctacgggagaggatgccccgcaggaacatggagcggcattgcccccgaatgtccagattatccctgtttttgtgaccaaagaggaagccattagtctccacgagttcccggtggaacagatgacaaggtctctagcatctccagcaggactccaggatggttcagcccagcaccatccaaagggtgggagcacatctgccctgaaagaaaacgccactggccatgtggaatccatggcctggaccaccccagatcccacatcccctgacgaagcttgtccagatggcaggaaggagaacggatgcttgtctggccatgatctggagagcatcaggcccgcaggactgcacaactctgccaggggtgaggttcttggcctcagctcctccctggggaaggaactagtctttctccaagaagaactcgacttgtctgaaatccacattccagaggctcaggaagtggaaatggcctcaggtcattttgccttcctacatgtgcctgttccagatggcagggctccttactgcaaggcatctctcagcgcctccagcagcctggaacccacgcctcctgaggacacagccatcagcagcttgcgccctccctctgctcctgagatgctgacccagcatggagcccaagagcagctcgaagaccatcctggccatagcagccaagcccccattcccagagcagaccctctccccagaaggacccgcaggcccttgttattgcctcgcttagatccaggacagagaggaaacaagcttcccacgggggaacaaggcctggatgaggatgttgatggggtctgtgaaagccacgcagcccctggtctggaatgcagttcaggctcagcaaactgtcagggtgctggcccctctgcagatggaatcagctccaggctgacaccagcagagtcctgcatggggctcgtgaggatgaatctctacactcactgcgtcaaagggctggtgctgtccctgctggctgaggagccgctgctgggagacagcgcagccatagaggaagtgtaccacagcagcctggcttcactgaatgggctggaagtccacctgaaagagacgctgcccagggatgaggcagcctccacgagcagcacctacaacttcacacattacgaccgcattcagagcttgctgatggcaaacctgccgcaggtggccaccccgcaggatcgccgcttcctccaggccgtcagcctgatgcatagcgaatttgcccagctgcccgcgctttatgaaatgactgtcagaaatgcctccacggctgtgtacgcctgttgcaaccccatccaggagacatatttccagcagctggcacctgcagcacggagctccggcttcccaaaccctcaggatggcgccttcagcctctccggcaaagcaaagcagaagctgctgaagcacggggtgaacttgctctgaactgcacccaggaggtgactgggaaggagaaaaccagcaaaggaagctctgccttttataattgaaaaggcccctctattttatttttcttgaaaacattcccttttttaggaaccaaatgatatttgagtttttgttattccttttgcagattgggatgtgttttgggggcaggggttagttcttcaggtcggcagacccagagcacttgataaagaactgtatttaatcggtagtgttggggccgggacgggcttggctccctctctgccatactgagcctgaggtatttcatatctcctgctgttccatcccagcttgaattggtgccacaagcttccaagttggcattttttctagaacctgatcgtccactagcccagagtgtgtgtgttcaacccccacaccaggtggtggtaggcggtgtgactgcacagcgaggtgccggatctgtgagcaggccgactccactcccacgccgcaggtaggtttctccagtgcgctcttgctgggaggtccggatcgttcctgcagggaagcggcagcacacggagaccacttggttgaattctgttggaactctactcaaatctaggggcgtcttctttggacccacaatgggggcaagccttaataatatggaagggagtttgggctttagagatccctttataaaagctctgggggctgagccctgagaattcagtgacaacaggaccaacctgcgctgcctttgactacaagtgggccgtgcagctggttcctctcgagcgagtgtccctaaataggagtttacaagatgtctgggggtaaaagcactgtgcttttcagtggtggctgcgtgaaagggagcgacactcagctgtgtgttcctgggcttgtgtggtacttagaacctcagttctattacgttatagtcagacatttttttgacagtatgagacagactgcaggatgaaaatatttgtcaaaatcttaactgaatgtttactggaagtacttgagattccatttgagagttgtattgttaataatttcatgtcagtgaactgatatctgatgtttatgatatggtgtctttttcttgaaacaagcttccaagggctagaaataaaatagccaaaaaatgctggagttctgagtaattaaa

SEQ ID NO: 140331 - DNA, 4497 bp, Homo sapiens
  Payload ID: 7532
  Gene Symbol: HPS4
  Gene Name: Hermansky-Pudlak syndrome 4
  Uniprot ID: Q9NQG7
  ENST ID: ENST00000398145
  CDS Start-End: 618-2744
ggtaggcggggcggcgcgtgacctaaggcctctctgccgcgcgcgcaggtacggggcagaagtcgcaggtacccagctgctgcccacatttctggtccagagtcccgaaccccgagcactgggatgcctggctactccgagccaaggcactgatgtttgaactggaaacttcaaaacgtttaataagagtcttcaggatgggtttgaactagacaagctagaaatttctttagaacaccagctctagcatgcatctcccacttttggctttcctggagaggagcttgaagaggtggttctgcagacagccacagtgatacttaggaaaccagaggaatggatttgacttttctgctaggattctctgttatagtttctccctgagttgtaagaggcatggaaatatacatgaaactgaagaacctgcaaggaagggaagtggaactttccatgctgagtgaaaactaaccaagtggcagttgtgactgaaaacactgaaacctaccacgtccagattcactggattgggggatagaggaacggtcacagctagggagaaagaagtgataccggaaaagaaaacctaaatgaagagaatgaggatgactgcacagtagatggccacctctacctccacagaggcaaagtcagcctcgtggtggaattatttttttctttatgatggttccaaggtaaaggaagaaggcgatccaacaagagctggcatttgttacttttatccttcccagaccctgctagaccaacaggagttgctttgtggacagattgctggagttgtccgctgtgtttctgacatttctgactctcctcctactcttgttcgtctgagaaaactgaagtttgccataaaagttgatggagattacctttgggtgctgggctgtgctgtggagctccctgatgtcagctgcaagcggtttctggatcagctagttggattctttaatttttacaatggacctgtttccctagcttatgagaactgttctcaggaagaactgagcacggagtgggacaccttcatcgagcaaattctgaaaaacaccagtgatctgcataagattttcaattccctctggaacttggaccaaactaaagtggagcccctgttgttgctgaaggcagcccgcattctgcagacctgccagcgctcgcctcacattctcgctggctgcatcctctataaaggactgattgtcagcacccaactcccgccctccctcaccgccaaggtcctgcttcaccgaacagcacctcaggagcagagactccctacgggagaggatgccccgcaggaacatggagcggcattgcccccgaatgtccagattatccctgtttttgtgaccaaagaggaagccattagtctccacgagttcccggtggaacagatgacaaggtctctagcatctccagcaggactccaggatggttcagcccagcaccatccaaagggtgggagcacatctgccctgaaagaaaacgccactggccatgtggaatccatggcctggaccaccccagatcccacatcccctgacgaagcttgtccagatggcaggaaggagaacggatgcttgtctggccatgatctggagagcatcaggcccgcaggactgcacaactctgccaggggtgaggttcttggcctcagctcctccctggggaaggaactagtctttctccaagaagaactcgacttgtctgaaatccacattccagaggctcaggaagtggaaatggcctcaggtcattttgccttcctacatgtgcctgttccagatggcagggctccttactgcaaggcatctctcagcgcctccagcagcctggaacccacgcctcctgaggacacagccatcagcagcttgcgccctccctctgctcctgagatgctgacccagcatggagcccaagagcagctcgaagaccatcctggccatagcagccaagcccccattcccagagcagaccctctccccagaaggacccgcaggcccttgttattgcctcgcttagatccaggacagagaggaaacaagcttcccacgggggaacaaggcctggatgaggatgttgatggggtctgtgaaagccacgcagcccctggtctggaatgcagttcaggctcagcaaactgtcagggtgctggcccctctgcagatggaatcagctccaggctgacaccagcagagtcctgcatggggctcgtgaggatgaatctctacactcactgcgtcaaagggctggtgctgtccctgctggctgaggagccgctgctgggagacagcgcagccatagaggaagtgtaccacagcagcctggcttcactgaatgggctggaagtccacctgaaagagacgctgcccagggatgaggcagcctccacgagcagcacctacaacttcacacattacgaccgcattcagagcttgctgatggcaaacctgccgcaggtggccaccccgcaggatcgccgcttcctccaggccgtcagcctgatgcatagcgaatttgcccagctgcccgcgctttatgaaatgactgtcagaaatgcctccacggctgtgtacgcctgttgcaaccccatccaggagacatatttccagcagctggcacctgcagcacggagctccggcttcccaaaccctcaggatggcgccttcagcctctccggcaaagcaaagcagaagctgctgaagcacggggtgaacttgctctgaactgcacccaggaggtgactgggaaggagaaaaccagcaaaggaagctctgccttttataattgaaaaggcccctctattttatttttcttgaaaacattcccttttttaggaaccaaatgatatttgagtttttgttattccttttgcagattgggatgtgttttgggggcaggggttagttcttcaggtcggcagacccagagcacttgataaagaactgtatttaatcggtagtgttggggccgggacgggcttggctccctctctgccatactgagcctgaggtatttcatatctcctgctgttccatcccagcttgaattggtgccacaagcttccaagttggcattttttctagaacctgatcgtccactagcccagagtgtgtgtgttcaacccccacaccaggtggtggtaggcggtgtgactgcacagcgaggtgccggatctgtgagcaggccgactccactcccacgccgcaggtaggtttctccagtgcgctcttgctgggaggtccggatcgttcctgcagggaagcggcagcacacggagaccacttggttgaattctgttggaactctactcaaatctaggggcgtcttctttggacccacaatgggggcaagccttaataatatggaagggagtttgggctttagagatccctttataaaagctctgggggctgagccctgagaattcagtgacaacaggaccaacctgcgctgcctttgactacaagtgggccgtgcagctggttcctctcgagcgagtgtccctaaataggagtttacaagatgtctgggggtaaaagcactgtgcttttcagtggtggctgcgtgaaagggagcgacactcagctgtgtgttcctgggcttgtgtggtacttagaacctcagttctattacgttatagtcagacatttttttgacagtatgagacagactgcaggatgaaaatatttgtcaaaatcttaactgaatgtttactggaagtacttgagattccatttgagagttgtattgttaataatttcatgtcagtgaactgatatctgatgtttatgatatggtgtctttttcttgaaacaagcttccaagggctagaaataaaatagccaaaaaatgctggagttctgagtaattaaatggcagcatttttttgtgacaaaggtaagggttaagacagtgtgtgtgtgtgtgtgtgtgtgtgtgtgtgtgtgtgtgcgcgcgcgcgcgcgcgcgtaacgtgggcgcatccctcttttccttccctgggttcagtgtggctgggtaaggaccgtctgtttgtagggctgccaggctgcagcctgctgctccagggagcaccagctgcagctgatccaatacaccaagcctgtgtctccctcttctatcacctctctccaggatctctgctgtctcttggatcccatctgcctagatggaagaggatcctatccgaagctaggataaatgttgtcttactcctctgctatgttctcccagaaaaaattgattacaagttctctgctgtggttgctgcagctccaggaagtccccgcaatgtctcacgttgtctttgaccagtggtccccagtaccaggccagcgaagacaactttataatgtcatttgtgttgtgaaaattcttccactgacccaaaatggaaccgtacaaagcctatccgtgtatatggaaaagtctcatgcacctggattaactcagaaaaagtaaagtcctgaaacttca

SEQ ID NO: 140332 - DNA, 3562 bp, Homo sapiens
  Payload ID: 7532
  Gene Symbol: HPS4
  Gene Name: Hermansky-Pudlak syndrome 4
  Uniprot ID: Q9NQG7
  ENST ID: ENST00000402105
  CDS Start-End: 301-2412
agaccatgtggttgtatagttaaggttcagtgtttcaaataagagcagtcattgtgggcgcctcgtttttttttctagctactcgtgtcttctccggcagatggtctaacggctggatagaggcatatttttagtttgaatttcctgcgcttacagaatggttttatctaatttgtagctactggggttctttattctctggggccacctgaaggctttcaaacacagtaataagccctcctcgggctgggaaacaggaagctgtgttttaaatgccgtgatcactggattaaaggaaacatggctccactctgttctcttgccaggtggaattatttttttctttatgatggttccaaggtaaaggaagaaggcgatccaacaagagctggcatttgttacttttatccttcccagaccctgctagaccaacaggagttgctttgtggacagattgctggagttgtccgctgtgtttctgacatttctgactctcctcctactcttgttcgtctgagaaaactgaagtttgccataaaagttgatggagattacctttgggtgctgggctgtgctgtggagctccctgatgtcagctgcaagcggtttctggatcagctagttggattctttaatttttacaatggacctgtttccctagcttatgagaactgttctcaggaagaactgagcacggagtgggacaccttcatcgagcaaattctgaaaaacaccagtgatctgcataagattttcaattccctctggaacttggaccaaactaaagtggagcccctgttgttgctgaaggcagcccgcattctgcagacctgccagcgctcgcctcacattctcgctggctgcatcctctataaaggactgattgtcagcacccaactcccgccctccctcaccgccaaggtcctgcttcaccgaacagcacctcaggagcagagactccctacgggagaggatgccccgcaggaacatggagcggcattgcccccgaatgtccagattatccctgtttttgtgaccaaagaggaagccattagtctccacgagttcccggtggaacagatgacaaggtctctagcatctccagcaggactccaggatggttcagcccagcaccatccaaagggtgggagcacatctgccctgaaagaaaacgccactggccatgtggaatccatggcctggaccaccccagatcccacatcccctgacgaagcttgtccagatggcaggaaggagaacggatgcttgtctggccatgatctggagagcatcaggcccgcaggactgcacaactctgccaggggtgaggttcttggcctcagctcctccctggggaaggaactagtctttctccaagaagaactcgacttgtctgaaatccacattccagaggctcaggaagtggaaatggcctcaggtcattttgccttcctacatgtgcctgttccagatggcagggctccttactgcaaggcatctctcagcgcctccagcagcctggaacccacgcctcctgaggacacagccatcagcagcttgcgccctccctctgctcctgagatgctgacccagcatggagcccaagagcagctcgaagaccatcctggccatagcagccaagcccccattcccagagcagaccctctccccagaaggacccgcaggcccttgttattgcctcgcttagatccaggacagagaggaaacaagcttcccacgggggaacaaggcctggatgaggatgttgatggggtctgtgaaagccacgcagcccctggtctggaatgcagttcaggctcagcaaactgtcagggtgctggcccctctgcagatggaatcagctccaggctgacaccagcagagtcctgcatggggctcgtgaggatgaatctctacactcactgcgtcaaagggctggtgctgtccctgctggctgaggagccgctgctgggagacagcgcagccatagaggaagtgtaccacagcagcctggcttcactgaatgggctggaagtccacctgaaagagacgctgcccagggatgaggcagcctccacgagcagcacctacaacttcacacattacgaccgcattcagagcttgctgatggcaaacctgccgcaggtggccaccccgcaggatcgccgcttcctccaggccgtcagcctgatgcatagcgaatttgcccagctgcccgcgctttatgaaatgactgtcagaaatgcctccacggctgtgtacgcctgttgcaaccccatccaggagacatatttccagcagctggcacctgcagcacggagctccggcttcccaaaccctcaggatggcgccttcagcctctccggcaaagcaaagcagaagctgctgaagcacggggtgaacttgctctgaactgcacccaggaggtgactgggaaggagaaaaccagcaaaggaagctctgccttttataattgaaaaggcccctctattttatttttcttgaaaacattcccttttttaggaaccaaatgatatttgagtttttgttattccttttgcagattgggatgtgttttgggggcaggggttagttcttcaggtcggcagacccagagcacttgataaagaactgtatttaatcggtagtgttggggccgggacgggcttggctccctctctgccatactgagcctgaggtatttcatatctcctgctgttccatcccagcttgaattggtgccacaagcttccaagttggcattttttctagaacctgatcgtccactagcccagagtgtgtgtgttcaacccccacaccaggtggtggtaggcggtgtgactgcacagcgaggtgccggatctgtgagcaggccgactccactcccacgccgcaggtaggtttctccagtgcgctcttgctgggaggtccggatcgttcctgcagggaagcggcagcacacggagaccacttggttgaattctgttggaactctactcaaatctaggggcgtcttctttggacccacaatgggggcaagccttaataatatggaagggagtttgggctttagagatccctttataaaagctctgggggctgagccctgagaattcagtgacaacaggaccaacctgcgctgcctttgactacaagtgggccgtgcagctggttcctctcgagcgagtgtccctaaataggagtttacaagatgtctgggggtaaaagcactgtgcttttcagtggtggctgcgtgaaagggagcgacactcagctgtgtgttcctgggcttgtgtggtacttagaacctcagttctattacgttatagtcagacatttttttgacagtatgagacagactgcaggatgaaaatatttgtcaaaatcttaactgaatgtttactggaagtacttgagattccatttgagagttgtattgttaataatttcatgtcagtgaactgatatctgatgtttatgatatggtgtctttttcttgaaacaagcttccaagggctagaaataaaatagccaaaaaatgctggagttctgagtaattaaa

SEQ ID NO: 140333 - DNA, 3492 bp, Homo sapiens
  Payload ID: 7532
  Gene Symbol: HPS4
  Gene Name: Hermansky-Pudlak syndrome 4
  ENST ID: ENST00000429411
  CDS Start-End: 68-643
agccctcctcgggctgggaaacaggaagctgtgttttaaatgccgtgatcactggattaaaggaaacatggctccactctgttctcttgccaggtggaattatttttttctttatgatggttccaaggtaaaggaagaaggcgatccaacaagagctggcatttgttacttttatccttcccagaccctgctagaccaacaggagttgctttgtggacagattgctggagttgtccgctgtgtttctgacatttctgactctcctcctactcttgttcgtctgagaaaactgaagtttgccataaaagttgatggagattacctttgggtgctgggctgtgctgtggagctccctgatgtcagctgcaagcggtttctggatcagctagttggattctttaatttttacaatggacctgtttccctagcttatgagaactgttctcaggaagaactgagcacggagtgggacaccttcatcgagcaaattctgaaaaacaccagtgatctgcataagattttcaattccctctggaacttggaccaaactaaagctttgagctacaccctgtccagctgttctgtacaaccctttccccttttctcccttcctgattgtgagcatgctgatgggtgggcatgatgcctcttgccctgcacaggtggagcccctgttgttgctgaaggcagcccgcattctgcagacctgccagcgctcgcctcacattctcgctggctgcatcctctataaaggactgattgtcagcacccaactcccgccctccctcaccgccaaggtcctgcttcaccgaacagcacctcaggagcagagactccctacgggagaggatgccccgcaggaacatggaaaatggatgttatggagcttcaagaatcgagttacccaccagaaccctaatggagcggcattgcccccgaatgtccagattatccctgtttttgtgaccaaagaggaagccattagtctccacgagttcccggtggaacagatgacaaggtctctagcatctccagcaggactccaggatggttcagcccagcaccatccaaagggtgggagcacatctgccctgaaagaaaacgccactggccatgtggaatccatggcctggaccaccccagatcccacatcccctgacgaagcttgtccagatggcaggaaggagaacggatgcttgtctggccatgatctggagagcatcaggcccgcaggactgcacaactctgccaggggtgaggttcttggcctcagctcctccctggggaaggaactagtctttctccaagaagaactcgacttgtctgaaatccacattccagaggctcaggaagtggaaatggcctcaggtcattttgccttcctacatgtgcctgttccagatggcagggctccttactgcaaggcatctctcagcgcctccagcagcctggaacccacgcctcctgaggacacagccatcagcagcttgcgccctccctctgctcctgagatgctgacccagcatggagcccaagagcagctcgaagaccatcctggccatagcagccaagcccccattcccagagcagaccctctccccagaaggacccgcaggcccttgttattgcctcgcttagatccaggacagagaggaaacaagcttcccacgggggaacaaggcctggatgaggatgttgatggggtctgtgaaagccacgcagcccctggtctggaatgcagttcaggctcagcaaactgtcagggtgctggcccctctgcagatggaatcagctccaggctgacaccagcagagtcctgcatggggctcgtgaggatgaatctctacactcactgcgtcaaagggctggtgctgtccctgctggctgaggagccgctgctgggagacagcgcagccatagaggaagtgtaccacagcagcctggcttcactgaatgggctggaagtccacctgaaagagacgctgcccagggatgaggcagcctccacgagcagcacctacaacttcacacattacgaccgcattcagagcttgctgatggcaaacctgccgcaggtggccaccccgcaggatcgccgcttcctccaggccgtcagcctgatgcatagcgaatttgcccagctgcccgcgctttatgaaatgactgtcagaaatgcctccacggctgtgtacgcctgttgcaaccccatccaggagacatatttccagcagctggcacctgcagcacggagctccggcttcccaaaccctcaggatggcgccttcagcctctccggcaaagcaaagcagaagctgctgaagcacggggtgaacttgctctgaactgcacccaggaggtgactgggaaggagaaaaccagcaaaggaagctctgccttttataattgaaaaggcccctctattttatttttcttgaaaacattcccttttttaggaaccaaatgatatttgagtttttgttattccttttgcagattgggatgtgttttgggggcaggggttagttcttcaggtcggcagacccagagcacttgataaagaactgtatttaatcggtagtgttggggccgggacgggcttggctccctctctgccatactgagcctgaggtatttcatatctcctgctgttccatcccagcttgaattggtgccacaagcttccaagttggcattttttctagaacctgatcgtccactagcccagagtgtgtgtgttcaacccccacaccaggtggtggtaggcggtgtgactgcacagcgaggtgccggatctgtgagcaggccgactccactcccacgccgcaggtaggtttctccagtgcgctcttgctgggaggtccggatcgttcctgcagggaagcggcagcacacggagaccacttggttgaattctgttggaactctactcaaatctaggggcgtcttctttggacccacaatgggggcaagccttaataatatggaagggagtttgggctttagagatccctttataaaagctctgggggctgagccctgagaattcagtgacaacaggaccaacctgcgctgcctttgactacaagtgggccgtgcagctggttcctctcgagcgagtgtccctaaataggagtttacaagatgtctgggggtaaaagcactgtgcttttcagtggtggctgcgtgaaagggagcgacactcagctgtgtgttcctgggcttgtgtggtacttagaacctcagttctattacgttatagtcagacatttttttgacagtatgagacagactgcaggatgaaaatatttgtcaaaatcttaactgaatgtttactggaagtacttgagattccatttgagagttgtattgttaataatttcatgtcagtgaactgatatctgatgtttatgatatggtgtctttttcttgaaacaagcttccaagggctagaaataaaatagccaaaaaatgctggagttctgagtaattaaa

SEQ ID NO: 140334 - DNA, 3936 bp, Homo sapiens
  Payload ID: 7532
  Gene Symbol: HPS4
  Gene Name: Hermansky-Pudlak syndrome 4
  ENST ID: ENST00000439453
  CDS Start-End: 551-1141
ggcttgccaggagctggagggggaggtaggcggggcggcgcgtgacctaaggcctctctgccgcgcgcgcagagccaaggcactgatgtttgaactggaaacttcaaaacgtttaataagagtcttcaggatgggtttgaactagacaagctagaaatttctttagaacaccagctctagcatgcatctcccacttttggctttcctggagaggagcttgaagaggtggttctgcagacagccacagtgatacttaggaaaccagaggaatggatttgacttttctgctaggattctctgttatagtttctccctgagttgtaagaggcatggaaatatacatgaaactgaagaacctgcaaggaagggaagtggaactttccatgctgagtgaaaactaaccaagtggcagttgtgactgaaaacactgaaacctaccacgtccagattcactggattgggggatagaggaacggtcacagctagggagaaagaagtgataccggaaaagaaaacctaaatgaagagaatgaggatgactgcacagtagatggccacctctacctccacagaggcaaagtcagcctcgtggtggaattatttttttctttatgatggttccaaggtaaaggaagaaggcgatccaacaagagctggcatttgttacttttatccttcccagaccctgctagaccaacaggagttgctttgtggacagattgctggagttgtccgctgtgtttctgacatttctgactctcctcctactcttgttcgtctgagaaaactgaagtttgccataaaagttgatggagattacctttgggtgctgggctgtgctgtggagctccctgatgtcagctgcaagcggtttctggatcagctagttggattctttaatttttacaatggacctgtttccctagcttatgagaactgttctcaggaagaactgagcacggagtgggacaccttcatcgagcaaattctgaaaaacaccagtgatctgcataagattttcaattccctctggaacttggaccaaactaaagctttgagctacaccctgtccagctgttctgtacaaccctttccccttttctcccttcctgattgtgagcatgctgatgggtgggcatgatgcctcttgccctgcacaggtggagcccctgttgttgctgaaggcagcccgcattctgcagacctgccagcgctcgcctcacattctcgctggctgcatcctctataaaggactgattgtcagcacccaactcccgccctccctcaccgccaaggtcctgcttcaccgaacagcacctcaggagcagagactccctacgggagaggatgccccgcaggaacatggagcggcattgcccccgaatgtccagattatccctgtttttgtgaccaaagaggaagccattagtctccacgagttcccggtggaacagatgacaaggtctctagcatctccagcaggactccaggatggttcagcccagcaccatccaaagggtgggagcacatctgccctgaaagaaaacgccactggccatgtggaatccatggcctggaccaccccagatcccacatcccctgacgaagcttgtccagatggcaggaaggagaacggatgcttgtctggccatgatctggagagcatcaggcccgcaggactgcacaactctgccaggggtgaggttcttggcctcagctcctccctggggaaggaactagtctttctccaagaagaactcgacttgtctgaaatccacattccagaggctcaggaagtggaaatggcctcaggtcattttgccttcctacatgtgcctgttccagatggcagggctccttactgcaaggcatctctcagcgcctccagcagcctggaacccacgcctcctgaggacacagccatcagcagcttgcgccctccctctgctcctgagatgctgacccagcatggagcccaagagcagctcgaagaccatcctggccatagcagccaagcccccattcccagagcagaccctctccccagaaggacccgcaggcccttgttattgcctcgcttagatccaggacagagaggaaacaagcttcccacgggggaacaaggcctggatgaggatgttgatggggtctgtgaaagccacgcagcccctggtctggaatgcagttcaggctcagcaaactgtcagggtgctggcccctctgcagatggaatcagctccaggctgacaccagcagagtcctgcatggggctcgtgaggatgaatctctacactcactgcgtcaaagggctggtgctgtccctgctggctgaggagccgctgctgggagacagcgcagccatagaggaagtgtaccacagcagcctggcttcactgaatgggctggaagtccacctgaaagagacgctgcccagggatgaggcagcctccacgagcagcacctacaacttcacacattacgaccgcattcagagcttgctgatggcaaacctgccgcaggtggccaccccgcaggatcgccgcttcctccaggccgtcagcctgatgcatagcgaatttgcccagctgcccgcgctttatgaaatgactgtcagaaatgcctccacggctgtgtacgcctgttgcaaccccatccaggagacatatttccagcagctggcacctgcagcacggagctccggcttcccaaaccctcaggatggcgccttcagcctctccggcaaagcaaagcagaagctgctgaagcacggggtgaacttgctctgaactgcacccaggaggtgactgggaaggagaaaaccagcaaaggaagctctgccttttataattgaaaaggcccctctattttatttttcttgaaaacattcccttttttaggaaccaaatgatatttgagtttttgttattccttttgcagattgggatgtgttttgggggcaggggttagttcttcaggtcggcagacccagagcacttgataaagaactgtatttaatcggtagtgttggggccgggacgggcttggctccctctctgccatactgagcctgaggtatttcatatctcctgctgttccatcccagcttgaattggtgccacaagcttccaagttggcattttttctagaacctgatcgtccactagcccagagtgtgtgtgttcaacccccacaccaggtggtggtaggcggtgtgactgcacagcgaggtgccggatctgtgagcaggccgactccactcccacgccgcaggtaggtttctccagtgcgctcttgctgggaggtccggatcgttcctgcagggaagcggcagcacacggagaccacttggttgaattctgttggaactctactcaaatctaggggcgtcttctttggacccacaatgggggcaagccttaataatatggaagggagtttgggctttagagatccctttataaaagctctgggggctgagccctgagaattcagtgacaacaggaccaacctgcgctgcctttgactacaagtgggccgtgcagctggttcctctcgagcgagtgtccctaaataggagtttacaagatgtctgggggtaaaagcactgtgcttttcagtggtggctgcgtgaaagggagcgacactcagctgtgtgttcctgggcttgtgtggtacttagaacctcagttctattacgttatagtcagacatttttttgacagtatgagacagactgcaggatgaaaatatttgtcaaaatcttaactgaatgtttactggaagtacttgagattccatttgagagttgtattgttaataatttcatgtcagtgaactgatatctgatgtttatgatatggtgtctttttcttgaaacaagcttccaagggctagaaataaaatagccaaaaaatgctggagttctgagtaattaaa

SEQ ID NO: 140335 - DNA, 1942 bp, Homo sapiens
  Payload ID: 7532
  Gene Symbol: HPS4
  Gene Name: Hermansky-Pudlak syndrome 4
  ENST ID: ENST00000422379
  CDS Start-End: 498-1942
ctctctgccgcgcgcgcagagccaaggcactgatgtttgaactggaaacttcaaaacgtttaataagagtcttcaggatgggtttgaactagacaagctagaaatttctttagaacaccagctctagcatgcatctcccacttttggctttcctggagaggagcttgaagaggtggttctgcagacagccacagtgatacttaggaaaccagaggaatggatttgacttttctgctaggattctctgttatagtttctccctgagttgtaagaggcatggaaatatacatgaaactgaagaacctgcaaggaagggaagtggaactttccatgctgagtgaaaactaaccaagtggcagttgtgactgaaaacactgaaacctaccacgtccagattcactggattgggggatagaggaacggtcacagctagggagaaagaagtgataccggaaaagaaaacctaaatgaagagaatgaggatgactgcacagtagatggccacctctacctccacagaggcaaagtcagcctcgtggtggaattatttttttctttatgatggttccaaggtaaaggaagaaggcgatccaacaagagctggcatttgttacttttatccttcccagaccctgctagaccaacaggagttgctttgtggacagattgctggagttgtccgctgtgtttctgacatttctgactctcctcctactcttgttcgtctgagaaaactgaagtttgccataaaagttgatggagattacctttgggtgctgggctgtgctgtggagctccctgatgtcagctgcaagcggtttctggatcagctagttggattctttaatttttacaatggacctgtttccctagcttatgagaactgttctcaggaagaactgagcacggagtgggacaccttcatcgagcaaattctgaaaaacaccagtgatctgcataagattttcaattccctctggaacttggaccaaactaaagtggagcccctgttgttgctgaaggcagcccgcattctgcagacctgccagcgctcgcctcacattctcgctggctgcatcctctataaaggactgattgtcagcacccaactcccgccctccctcaccgccaaggtcctgcttcaccgaacagcacctcaggagcagagactccctacgggagaggatgccccgcaggaacatggaaaatggatgttatggagcttcaagaatcgagttacccaccagaaccctaatggagcggcattgcccccgaatgtccagattatccctgtttttgtgaccaaagaggaagccattagtctccacgagttcccggtggaacagatgacaaggtctctagcatctccagcaggactccaggatggttcagcccagcaccatccaaagggtgggagcacatctgccctgaaagaaaacgccactggccatgtggaatccatggcctggaccaccccagatcccacatcccctgacgaagcttgtccagatggcaggaaggagaacggatgcttgtctggccatgatctggagagcatcaggcccgcaggactgcacaactctgccaggggtgaggttcttggcctcagctcctccctggggaaggaactagtctttctccaagaagaactcgacttgtctgaaatccacattccagaggctcaggaagtggaaatggcctcaggtcattttgccttcctacatgtgcctgttccagatggcagggctccttactgcaaggcatctctcagcgcctccagcagcctggaacccacgcctcctgaggacacagccatcagcagcttgcgccctccctctgctcctgagatgctgacccagcatggagcccaagagcagctcgaagaccatcctggccatagcagccaagcccccattcccagagcagaccctctccccagaag

SEQ ID NO: 140336 - DNA, 4277 bp, Homo sapiens
  Payload ID: 7532
  Gene Symbol: HPS4
  Gene Name: Hermansky-Pudlak syndrome 4
  ENST ID: ENST00000464362
  CDS Start-End: 166-669
ttgaatttcctgcgcttacagaatggttttatctaatttgtagctactggggttctttattctctggggccacctgaaggctttcaaacacagtaataagccctcctcgggctgggaaacaggaagctgtgttttaaatgccgtgatcactggattaaaggaaacatggctccactctgttctcttgccaggtggaattatttttttctttatgatggttccaaggtaaaggaagaaggcgatccaacaagagctggcatttgttacttttatccttcccagaccctgctagaccaacaggagttgctttgtggacagattgctggagttgtccgctgtgtttctgacatttctgactctcctcctactcttgttcgtctgagaaaactgaagtttgccataaaagttgatggagattacctttgggtgctgggctgtgctgtggagctccctgatgtcagctgcaagcggtttctggatcagctagttggattctttaatttttacaatggacctgtttccctagcttatgagaactgttctcaggaagaactgagcacggagtgggacaccttcatcgagcaaattctgaaaaacaccagtgatctgcataagattttcaattccctctggaacttggaccaaactaaaggacttctaggcccctgactccatacaaggaatgtggaactgaggcatatttccccgagtgaaagagcatgatgttttcattttatgtgatggaatagagtcatggaacctggtcagacatcaagccacctgtatcaccatggggattgtgcttcagaaggaaagtggaggatagggtggagcccctgttgttgctgaaggcagcccgcattctgcagacctgccagcgctcgcctcacattctcgctggctgcatcctctataaaggactgattgtcagcacccaactcccgccctccctcaccgccaaggtcctgcttcaccgaacagcacctcaggagcagagactccctacgggagaggatgccccgcaggaacatggtaagtagtgaggcgcatggttgcctcttgagaacggcggtcttttatgctacctacccctgtacaagttatgcgaaggaaaccaagccatctgcatgtttatttcctctgctcataataggaaaatggatgttatggagcttcaagaatcgagttacccaccagaaccctaatggtaaagctatgattttaggcatgctgtcaaatccctgctttcagaccctccttaacttcatattgtgagactgctcggtcaagtgccaggagattgtgattgggagagggtaaggcaaacagcgactgccagaaagaccttttgcaggatgtggaggcgtcctcaggagagttatttcgatttattctgaagcctgagttggagcagatccctttcttagcttatatcttcttcttgtaaaagtgcttttcaacctttctctcccgaacatcttccttctccaaagctgggagtcatgttgcctgcagggactctttccttactgggcccaggagttcgaggtgcagtttggcaacctgtgtcctggctgaggaatgcactcacagcacccctttccgagcccacgtgtgggttggatgcatcacgccagtgcagctattgccccgctgccctctctggctcaggggaaagtcctgttcatattgctttgcaattccaggagcggcattgcccccgaatgtccagattatccctgtttttgtgaccaaagaggaagccattagtctccacgagttcccggtggaacagatgacaaggtctctagcatctccagcaggactccaggatggttcagcccagcaccatccaaagggtgggagcacatctgccctgaaagaaaacgccactggccatgtggaatccatggcctggaccaccccagatcccacatcccctgacgaagcttgtccagatggcaggaaggagaacggatgcttgtctggccatgatctggagagcatcaggcccgcaggactgcacaactctgccaggggtgaggttcttggcctcagctcctccctggggaaggaactagtctttctccaagaagaactcgacttgtctgaaatccacattccagaggctcaggaagtggaaatggcctcaggtcattttgccttcctacatgtgcctgttccagatggcagggctccttactgcaaggcatctctcagcgcctccagcagcctggaacccacgcctcctgaggacacagccatcagcagcttgcgccctccctctgctcctgagatgctgacccagcatggagcccaagagcagctcgaagaccatcctggccatagcagccaagcccccattcccagagcagaccctctccccagaaggacccgcaggcccttgttattgcctcgcttagatccaggacagagaggaaacaagcttcccacgggggaacaaggcctggatgaggatgttgatggggtctgtgaaagccacgcagcccctggtctggaatgcagttcaggctcagcaaactgtcagggtgctggcccctctgcagatggaatcagctccaggctgacaccagcagagtcctgcatggggctcgtgaggatgaatctctacactcactgcgtcaaagggctggtgctgtccctgctggctgaggagccgctgctgggagacagcgcagccatagaggaagtgtaccacagcagcctggcttcactgaatgggctggaagtccacctgaaagagacgctgcccagggatgaggcagcctccacgagcagcacctacaacttcacacattacgaccgcattcagagcttgctgatggcaaacctgccgcaggtggccaccccgcaggatcgccgcttcctccaggccgtcagcctgatgcatagcgaatttgcccagctgcccgcgctttatgaaatgactgtcagaaatgcctccacggctgtgtacgcctgttgcaaccccatccaggagacatatttccagcagctggcacctgcagcacggagctccggcttcccaaaccctcaggatggcgccttcagcctctccggcaaagcaaagcagaagctgctgaagcacggggtgaacttgctctgaactgcacccaggaggtgactgggaaggagaaaaccagcaaaggaagctctgccttttataattgaaaaggcccctctattttatttttcttgaaaacattcccttttttaggaaccaaatgatatttgagtttttgttattccttttgcagattgggatgtgttttgggggcaggggttagttcttcaggtcggcagacccagagcacttgataaagaactgtatttaatcggtagtgttggggccgggacgggcttggctccctctctgccatactgagcctgaggtatttcatatctcctgctgttccatcccagcttgaattggtgccacaagcttccaagttggcattttttctagaacctgatcgtccactagcccagagtgtgtgtgttcaacccccacaccaggtggtggtaggcggtgtgactgcacagcgaggtgccggatctgtgagcaggccgactccactcccacgccgcaggtaggtttctccagtgcgctcttgctgggaggtccggatcgttcctgcagggaagcggcagcacacggagaccacttggttgaattctgttggaactctactcaaatctaggggcgtcttctttggacccacaatgggggcaagccttaataatatggaagggagtttgggctttagagatccctttataaaagctctgggggctgagccctgagaattcagtgacaacaggaccaacctgcgctgcctttgactacaagtgggccgtgcagctggttcctctcgagcgagtgtccctaaataggagtttacaagatgtctgggggtaaaagcactgtgcttttcagtggtggctgcgtgaaagggagcgacactcagctgtgtgttcctgggcttgtgtggtacttagaacctcagttctattacgttatagtcagacatttttttgacagtatgagacagactgcaggatgaaaatatttgtcaaaatcttaactgaatgtttactggaagtacttgagattccatttgagagttgtattgttaataatttcatgtcagtgaactgatatctgatgtttatgatatggtgtctttttcttgaaacaagcttccaagggctagaaataaaatagccaaaaaatgctggagttctgagtaattaaa

SEQ ID NO: 140337 - DNA, 4491 bp, Homo sapiens
  Payload ID: 7533
  Gene Symbol: HPS5
  Gene Name: Hermansky-Pudlak syndrome 5
  Uniprot ID: Q9UPZ3
  ENST ID: ENST00000349215
  CDS Start-End: 279-3668
cgcgaggggagactgaagttcacgttccgctcttagtgcgcggtgagttccccggcgctaagccgggagacaagatccgatctactgagagctgcgaggtactgccctggatgtggtggagctgggctgggacctccgggctgctggtctgtgagcctggctttgaaaattggttactgggtctcctctcaagaaatctcaagatattaaagttactgctgttaaaaaggtgaggaatactgtatctatcattcaacaagtttcagctttctggctaaatggcttttgtgccagtgataccagagtcctacagccatgttcttgcagagtttgaatctctggatccattactctcagccctgcggctggactccagtcgtctaaagtgcacgagcatagctgtgtctcggaaatggttggctttgggcagttcaggaggaggactccatctcattcagaaagaaggctggaagcacaggctttttctttcacacagggaaggtgcaatttctcaagtcgcctgttgtttacatgatgatgattatgttgctgtagctaccagtcaaggtcttgtggttgtttgggaattaaatcaagagcgtcgtgggaaaccggaacaaatgtatgtgtcttcagaacacaaaggccgaagagtcacagctctctgctgggatacagctattcttagagtttttgtaggtgatcatgctgggaaggtttctgctatcaaactcaatacttctaaacaagcaaaggcagctgctgcttttgtgatgtttcctgttcagacaatcacaactgttgactcctgtgttgtacagttagattatttggatggaaggctacttatatcttcacttactcgatccttcttgtgtgacactgagagagaaaagttttggaaaattggaaacaaggaaagagatggagaatatggagcttgtttctttcctggaagatgttctgggggccagcaacctctgatatattgtgctcgcccaggctctaggatgtgggaagtgaactttgatggagaagttataagtacacatcagttcaagaaactcctctcgttgccacctctccctgtgattactctcagatcagaacctcagtatgatcatacagctggatcctcccagtctttgtctttccccaaactcttacatcttagtgagcattgtgtgctgacttggacagaaagaggaatttatattttcattcctcagaatgttcaagttcttctttggagtgaagtcaaagatattcaggatgtggctgtctgtaggaatgaattgttctgtttgcacctaaatgggaaagtctcacatctctccctgatatctgtggagcgctgtgtggaacgcctgctaagaagaggcctatggaacttggctgctcgtacatgctgtcttttccaaaattctgtcattgccagcagagcaagaaaaactttgactgcagataaattggagcatttgaaatctcagctggaccatggcacctacaatgatctaatttctcaactggaagaattgatcttaaaatttgaacctttggattcagcttgtagcagtagaagaagctccatttcatcacatgaaagtttcagcatcttggactctggtatttatcgtatcattagtagtagaagaggcagtcagtcagatgaagactcttgctcccttcacagccaaaccctctcagaagatgagagatttaaagaattcacctcacagcaggaagaggacctgccagatcagtgttgtggctcacacggaaatgaagacaatgtttctcatgctccagtgatgtttgagacagataagaatgaaacttttctcccgttcggcattccattaccatttcgttctccatctcctcttgtgtctcttcaggctgtcaaagaaagtgtttctagctttgtgcgtaaaactactgagaagattggcacccttcacacgagccctgatctgaaagtgagaccagagctcaggggtgatgagcaatcatgtgaagaggatgtgagttcagatacctgcccaaaggaggaagacactgaggaggaaaaagaggtaactagtccacctccagaagaagacaggttccaggagcttaaagtagcaacagcagaagcaatgaccaagctacaggaccctctggttttatttgaatccgagtctctgagaatggttttacaggagtggctttcacatttagaaaaaacatttgccatgaaggacttttcaggtgtttcagatactgacaactcatccatgaaattgaaccaggatgtgctattagttaatgaatcaaaaaagggaatattagatgaagataatgaaaaagaaaaaagggactctttaggcaatgaagaatctgttgataaaacagcatgtgaatgtgtaaggagtccaagggagtctttggatgacctgtttcaaatatgttctccatgcgccattgcaagtggtcttcggaacgacctggctgaattgacaacattatgtttggagttgaatgtattgaattctaagatcaaaagcaccagtggacatgtggaccacactttgcaacagtactctcctgaaattctggcttgccagttcctgaagaagtacttttttctcctgaacttgaaaagagcgaaggagagtatcaagcttagttacagtaatagcccttctgtttgggatacttttattgaaggattgaaagaaatggcaagttccaatcctgtgtatatggagatggaaaaaggagatctaccaacaaggttaaagttactagatgacgaggttccttttgatagtccgttgttggttgtttatgctacccggttgtatgaaaagtttggggagtctgctcttcgatccttaatcaagttctttccatccattttgccatcggatatcatacaactttgtcatcatcatcctgctgagtttttggcctatttagacagtctggtgaaatcaaggcctgaagatcagcggtcatcttttcttgagtcccttctgcaaccagagtctttaaggttggattggctgcttttggcagtgtcccttgatgctccaccaagcaccagcacaatggatgatgaaggttatcccaggcctcattcacacttgctttcctggggttacagtcagctgatccttcatctaattaaacttcctgcagattttataaccaaagagaaaatgacagacatctgcaggtcttgtggtttctggcctggatatctaattctctgtttggagctggagagaagaagagaggccttcaccaatattgtgtatctgaatgatatgagcctgatggaaggggacaatggttggatcccagagaccgtggaggaatggaagcttctccttcatctcatacagagcaagagcacgaggccagccccccaggagtcactaaatgggagcctcagtgatgggccttcccccatcaatgtggagaatgtggcacttctgttagctaaggccatgggcccagatcgggcttggtcactgctacaggaatgtggtctggcccttgagttgtcagagaagtttaccagaacctgcgatatcctgaggattgctgagaaaaggcagagggccttgatacaaagcatgcttgaaaaatgcgatcggtttctctggtcccagcaggcctagtgggagaagattcagcaggatgtcatgacattttgagaaaaactaaatcatgctcctgaaccttctgaacgcatttgttattgaaggaaagacaccacccccaaatcctgccatcttattggggctacttttgtcagtgtctgtacccttggcatcggcatctgtgactctttatccatgacctcagtgtttcttaaccaaagttgtactcagcatttcttaaccaaagttgaattttgaaaagagtcagtccttgtttgctggaattagaatgttaatgtcctagtattattccgaactacagtattaactgcttgttgctagtggattagacagattcttttcttactgtggcttccatgttgggagcagaagcttttcatcctggtcacatgaagacagatggtattattgactggagttgaattatttttatatcttgtctggcacaatatggaaattactgaaataagacggtgtataatggaattaacacccaaaataagtagaacactgaagatttgaatttgatatttaagtaaaatgggactgggtgcagtggctcaggcctgtaatcccaaccctttggaaggtaaagacgggaggatcacttgaggccaggagttcaagaccagcctgggcaacatagtgagaatgcatctctacaaaaaataaaaaaaattagctaggcatagtacctgaggccaggaggtccaggccgcaatgagatgtgtttgtgccattgcacaccagtctgggtgacagagaaagaccctgtctcaaaaacaaattaaataaaatatcttcatatataaattaagct

SEQ ID NO: 140338 - DNA, 4725 bp, Homo sapiens
  Payload ID: 7533
  Gene Symbol: HPS5
  Gene Name: Hermansky-Pudlak syndrome 5
  Uniprot ID: Q9UPZ3
  ENST ID: ENST00000396253
  CDS Start-End: 464-3511
cgcgaggggagactgaagttcacgttccgctcttagtgcgcggtgagttccccggcgctaagccgggagacaagatccgatctactgagagctgcgaggtactgccctggatgtggtggagctgggctgggacctccgggctgctggtctgtgagcctggctttgaaaattggttactgggtctcctctcaagaaatctcaagatattaaagttactgctgttaaaaagtgcacgagcatagctgtgtctcggaaatggttggctttgggcagttcaggaggaggactccatctcattcagaaagaaggctggaagcacaggctttttctttcacacagggaaggtgcaatttctcaagtcgcctgttgtttacatgatgatgattatgttgctgtagctaccagtcaaggtcttgtggttgtttgggaattaaatcaagagcgtcgtgggaaaccggaacaaatgtatgtgtcttcagaacacaaaggccgaagagtcacagctctctgctgggatacagctattcttagagtttttgtaggtgatcatgctgggaaggtttctgctatcaaactcaatacttctaaacaagcaaaggcagctgctgcttttgtgatgtttcctgttcagacaatcacaactgttgactcctgtgttgtacagttagattatttggatggaaggctacttatatcttcacttactcgatccttcttgtgtgacactgagagagaaaagttttggaaaattggaaacaaggaaagagatggagaatatggagcttgtttctttcctggaagatgttctgggggccagcaacctctgatatattgtgctcgcccaggctctaggatgtgggaagtgaactttgatggagaagttataagtacacatcagttcaagaaactcctctcgttgccacctctccctgtgattactctcagatcagaacctcagtatgatcatacagctggatcctcccagtctttgtctttccccaaactcttacatcttagtgagcattgtgtgctgacttggacagaaagaggaatttatattttcattcctcagaatgttcaagttcttctttggagtgaagtcaaagatattcaggatgtggctgtctgtaggaatgaattgttctgtttgcacctaaatgggaaagtctcacatctctccctgatatctgtggagcgctgtgtggaacgcctgctaagaagaggcctatggaacttggctgctcgtacatgctgtcttttccaaaattctgtcattgccagcagagcaagaaaaactttgactgcagataaattggagcatttgaaatctcagctggaccatggcacctacaatgatctaatttctcaactggaagaattgatcttaaaatttgaacctttggattcagcttgtagcagtagaagaagctccatttcatcacatgaaagtttcagcatcttggactctggtatttatcgtatcattagtagtagaagaggcagtcagtcagatgaagactcttgctcccttcacagccaaaccctctcagaagatgagagatttaaagaattcacctcacagcaggaagaggacctgccagatcagtgttgtggctcacacggaaatgaagacaatgtttctcatgctccagtgatgtttgagacagataagaatgaaacttttctcccgttcggcattccattaccatttcgttctccatctcctcttgtgtctcttcaggctgtcaaagaaagtgtttctagctttgtgcgtaaaactactgagaagattggcacccttcacacgagccctgatctgaaagtgagaccagagctcaggggtgatgagcaatcatgtgaagaggatgtgagttcagatacctgcccaaaggaggaagacactgaggaggaaaaagaggtaactagtccacctccagaagaagacaggttccaggagcttaaagtagcaacagcagaagcaatgaccaagctacaggaccctctggttttatttgaatccgagtctctgagaatggttttacaggagtggctttcacatttagaaaaaacatttgccatgaaggacttttcaggtgtttcagatactgacaactcatccatgaaattgaaccaggatgtgctattagttaatgaatcaaaaaagggaatattagatgaagataatgaaaaagaaaaaagggactctttaggcaatgaagaatctgttgataaaacagcatgtgaatgtgtaaggagtccaagggagtctttggatgacctgtttcaaatatgttctccatgcgccattgcaagtggtcttcggaacgacctggctgaattgacaacattatgtttggagttgaatgtattgaattctaagatcaaaagcaccagtggacatgtggaccacactttgcaacagtactctcctgaaattctggcttgccagttcctgaagaagtacttttttctcctgaacttgaaaagagcgaaggagagtatcaagcttagttacagtaatagcccttctgtttgggatacttttattgaaggattgaaagaaatggcaagttccaatcctgtgtatatggagatggaaaaaggagatctaccaacaaggttaaagttactagatgacgaggttccttttgatagtccgttgttggttgtttatgctacccggttgtatgaaaagtttggggagtctgctcttcgatccttaatcaagttctttccatccattttgccatcggatatcatacaactttgtcatcatcatcctgctgagtttttggcctatttagacagtctggtgaaatcaaggcctgaagatcagcggtcatcttttcttgagtcccttctgcaaccagagtctttaaggttggattggctgcttttggcagtgtcccttgatgctccaccaagcaccagcacaatggatgatgaaggttatcccaggcctcattcacacttgctttcctggggttacagtcagctgatccttcatctaattaaacttcctgcagattttataaccaaagagaaaatgacagacatctgcaggtcttgtggtttctggcctggatatctaattctctgtttggagctggagagaagaagagaggccttcaccaatattgtgtatctgaatgatatgagcctgatggaaggggacaatggttggatcccagagaccgtggaggaatggaagcttctccttcatctcatacagagcaagagcacgaggccagccccccaggagtcactaaatgggagcctcagtgatgggccttcccccatcaatgtggagaatgtggcacttctgttagctaaggccatgggcccagatcgggcttggtcactgctacaggaatgtggtctggcccttgagttgtcagagaagtttaccagaacctgcgatatcctgaggattgctgagaaaaggcagagggccttgatacaaagcatgcttgaaaaatgcgatcggtttctctggtcccagcaggcctagtgggagaagattcagcaggatgtcatgacattttgagaaaaactaaatcatgctcctgaaccttctgaacgcatttgttattgaaggaaagacaccacccccaaatcctgccatcttattggggctacttttgtcagtgtctgtacccttggcatcggcatctgtgactctttatccatgacctcagtgtttcttaaccaaagttgtactcagcatttcttaaccaaagttgaattttgaaaagagtcagtccttgtttgctggaattagaatgttaatgtcctagtattattccgaactacagtattaactgcttgttgctagtggattagacagattcttttcttactgtggcttccatgttgggagcagaagcttttcatcctggtcacatgaagacagatggtattattgactggagttgaattatttttatatcttgtctggcacaatatggaaattactgaaataagacggtgtataatggaattaacacccaaaataagtagaacactgaagatttgaatttgatatttaagtaaaatgggactgggtgcagtggctcaggcctgtaatcccaaccctttggaaggtaaagacgggaggatcacttgaggccaggagttcaagaccagcctgggcaacatagtgagaatgcatctctacaaaaaataaaaaaaattagctaggcatagtacctgaggccaggaggtccaggccgcaatgagatgtgtttgtgccattgcacaccagtctgggtgacagagaaagaccctgtctcaaaaacaaattaaataaaatatcttcatatataaattaagctaattaaaaatatttttccctgtatttatttaatattttctaatctgaacccatatacagctgactaattcattcttagaaatgtgttatctgtaatctttcctaaacagagtagcccacaagaatcatgcactttttaaaattatttctaagaagccataacaaagctgtgtactaataaagactgcagcaagcacttgtgttatttaaattatgtaagtagattgtcatttgtcaggctcctgtacatttacatagcatgttatattaataataaatgtaaaatatgactaaagttttcattggaacacaatgtagacaggaggtttattatgagcattttgcagaaaggtgtggagtaagtaaagtgttggatgcactgaacaattcaa

SEQ ID NO: 140339 - DNA, 4147 bp, Homo sapiens
  Payload ID: 7533
  Gene Symbol: HPS5
  Gene Name: Hermansky-Pudlak syndrome 5
  Uniprot ID: Q9UPZ3
  ENST ID: ENST00000438420
  CDS Start-End: 277-3324
cgcgaggggagactgaagttcacgttccgctcttagtgcgcgtgcacgagcatagctgtgtctcggaaatggttggctttgggcagttcaggaggaggactccatctcattcagaaagaaggctggaagcacaggctttttctttcacacagggaaggtgcaatttctcaagtcgcctgttgtttacatgatgatgattatgttgctgtagctaccagtcaaggtcttgtggttgtttgggaattaaatcaagagcgtcgtgggaaaccggaacaaatgtatgtgtcttcagaacacaaaggccgaagagtcacagctctctgctgggatacagctattcttagagtttttgtaggtgatcatgctgggaaggtttctgctatcaaactcaatacttctaaacaagcaaaggcagctgctgcttttgtgatgtttcctgttcagacaatcacaactgttgactcctgtgttgtacagttagattatttggatggaaggctacttatatcttcacttactcgatccttcttgtgtgacactgagagagaaaagttttggaaaattggaaacaaggaaagagatggagaatatggagcttgtttctttcctggaagatgttctgggggccagcaacctctgatatattgtgctcgcccaggctctaggatgtgggaagtgaactttgatggagaagttataagtacacatcagttcaagaaactcctctcgttgccacctctccctgtgattactctcagatcagaacctcagtatgatcatacagctggatcctcccagtctttgtctttccccaaactcttacatcttagtgagcattgtgtgctgacttggacagaaagaggaatttatattttcattcctcagaatgttcaagttcttctttggagtgaagtcaaagatattcaggatgtggctgtctgtaggaatgaattgttctgtttgcacctaaatgggaaagtctcacatctctccctgatatctgtggagcgctgtgtggaacgcctgctaagaagaggcctatggaacttggctgctcgtacatgctgtcttttccaaaattctgtcattgccagcagagcaagaaaaactttgactgcagataaattggagcatttgaaatctcagctggaccatggcacctacaatgatctaatttctcaactggaagaattgatcttaaaatttgaacctttggattcagcttgtagcagtagaagaagctccatttcatcacatgaaagtttcagcatcttggactctggtatttatcgtatcattagtagtagaagaggcagtcagtcagatgaagactcttgctcccttcacagccaaaccctctcagaagatgagagatttaaagaattcacctcacagcaggaagaggacctgccagatcagtgttgtggctcacacggaaatgaagacaatgtttctcatgctccagtgatgtttgagacagataagaatgaaacttttctcccgttcggcattccattaccatttcgttctccatctcctcttgtgtctcttcaggctgtcaaagaaagtgtttctagctttgtgcgtaaaactactgagaagattggcacccttcacacgagccctgatctgaaagtgagaccagagctcaggggtgatgagcaatcatgtgaagaggatgtgagttcagatacctgcccaaaggaggaagacactgaggaggaaaaagaggtaactagtccacctccagaagaagacaggttccaggagcttaaagtagcaacagcagaagcaatgaccaagctacaggaccctctggttttatttgaatccgagtctctgagaatggttttacaggagtggctttcacatttagaaaaaacatttgccatgaaggacttttcaggtgtttcagatactgacaactcatccatgaaattgaaccaggatgtgctattagttaatgaatcaaaaaagggaatattagatgaagataatgaaaaagaaaaaagggactctttaggcaatgaagaatctgttgataaaacagcatgtgaatgtgtaaggagtccaagggagtctttggatgacctgtttcaaatatgttctccatgcgccattgcaagtggtcttcggaacgacctggctgaattgacaacattatgtttggagttgaatgtattgaattctaagatcaaaagcaccagtggacatgtggaccacactttgcaacagtactctcctgaaattctggcttgccagttcctgaagaagtacttttttctcctgaacttgaaaagagcgaaggagagtatcaagcttagttacagtaatagcccttctgtttgggatacttttattgaaggattgaaagaaatggcaagttccaatcctgtgtatatggagatggaaaaaggagatctaccaacaaggttaaagttactagatgacgaggttccttttgatagtccgttgttggttgtttatgctacccggttgtatgaaaagtttggggagtctgctcttcgatccttaatcaagttctttccatccattttgccatcggatatcatacaactttgtcatcatcatcctgctgagtttttggcctatttagacagtctggtgaaatcaaggcctgaagatcagcggtcatcttttcttgagtcccttctgcaaccagagtctttaaggttggattggctgcttttggcagtgtcccttgatgctccaccaagcaccagcacaatggatgatgaaggttatcccaggcctcattcacacttgctttcctggggttacagtcagctgatccttcatctaattaaacttcctgcagattttataaccaaagagaaaatgacagacatctgcaggtcttgtggtttctggcctggatatctaattctctgtttggagctggagagaagaagagaggccttcaccaatattgtgtatctgaatgatatgagcctgatggaaggggacaatggttggatcccagagaccgtggaggaatggaagcttctccttcatctcatacagagcaagagcacgaggccagccccccaggagtcactaaatgggagcctcagtgatgggccttcccccatcaatgtggagaatgtggcacttctgttagctaaggccatgggcccagatcgggcttggtcactgctacaggaatgtggtctggcccttgagttgtcagagaagtttaccagaacctgcgatatcctgaggattgctgagaaaaggcagagggccttgatacaaagcatgcttgaaaaatgcgatcggtttctctggtcccagcaggcctagtgggagaagattcagcaggatgtcatgacattttgagaaaaactaaatcatgctcctgaaccttctgaacgcatttgttattgaaggaaagacaccacccccaaatcctgccatcttattggggctacttttgtcagtgtctgtacccttggcatcggcatctgtgactctttatccatgacctcagtgtttcttaaccaaagttgtactcagcatttcttaaccaaagttgaattttgaaaagagtcagtccttgtttgctggaattagaatgttaatgtcctagtattattccgaactacagtattaactgcttgttgctagtggattagacagattcttttcttactgtggcttccatgttgggagcagaagcttttcatcctggtcacatgaagacagatggtattattgactggagttgaattatttttatatcttgtctggcacaatatggaaattactgaaataagacggtgtataatggaattaacacccaaaataagtagaacactgaagatttgaatttgatatttaagtaaaatgggactgggtgcagtggctcaggcctgtaatcccaaccctttggaaggtaaagacgggaggatcacttgaggccaggagttcaagaccagcctgggcaacatagtgagaatgcatctctacaaaaaataaaaaaaattagctaggcatagtacctgaggccaggaggtccaggccgcaatgagatgtgtttgtgccattgcacaccagtctgggtgacagagaaagaccctgtctcaaaaacaaattaaataaaatatcttcatatataaattaagct

SEQ ID NO: 140340 - DNA, 2160 bp, Homo sapiens
  Payload ID: 7533
  Gene Symbol: HPS5
  Gene Name: Hermansky-Pudlak syndrome 5
  ENST ID: ENST00000531848
  CDS Start-End: 357-1559
gacgtcagcaaggaaggggaggaacgcgaggggagactgaagttcacgttccgctcttagtgcgcggtgagttccccggcgctaagccgggagacaagatccgatctactgagagctgcgagtgcacgagcatagctgtgtctcggaaatggttggctttgggcagttcaggaggaggactccatctcattcagaaagaaggctggaagcacaggctttttctttcacacagggaaggtgcaatttctcaagtcgcctgttgtttacatgatgatgattatgttgctgtagctaccagtcaaggtcttgtggttgtttgggaattaaatcaagagcgtcgtgggaaaccggaacaaatgtatgtgtcttcagaacacaaaggccgaagagtcacagctctctgctgggatacagctattcttagagtttttgtaggtgatcatgctgggaaggtttctgctatcaaactcaatacttctaaacaagcaaaggcagctgctgcttttgtgatgtttcctgttcagacaatcacaactgttgactcctgtgttgtacagttagattatttggatggaaggctacttatatcttcacttactcgatccttcttgtgtgacactgagagagaaaagttttggaaaattggaaacaaggaaagagatggagaatatggagcttgtttctttcctggaagatgttctgggggccagcaacctctgatatattgtgctcgcccaggctctaggatgtgggaagtgaactttgatggagaagttataagtacacatcagttcaagaaactcctctcgttgccacctctccctgtgattactctcagatcagaacctcagtatgatcatacagctggatcctcccagtctttgtctttccccaaactcttacatcttagtgagcattgtgtgctgacttggacagaaagaggaatttatattttcattcctcagaatgttcaagttcttctttggagtgaagtcaaagatattcaggatgtggctgtctgtaggaatgaattgttctgtttgcacctaaatgggaaagtctcacatctctccctgatatctgtggagcgctgtgtggaacgcctgctaagaagaggcctatggaacttggctgctcgtacatgctgtcttttccaaaattctgtcattgccagcagagcaagaaaaactttgactgcagataaattggagcatttgaaatctcagctggaccatggcacctacaatgatctaatttctcaactggaagaattgatcttaaaatttgaacctttggattcagcttgtagcagtagaagaagctccatttcatcacatgaaagtttcagcatcttggactctggtatttatcgtatcattagtagtagaagaggcagtcagtcagatgaagactcttgctcccttcacagccaaaccctctcagaagatgagagatttaaagaattcacctcacagcaggaagaggacctgccagatcagtgttgtggctcacacggaaatgaaggtgatgaatgtgtctgttgttggttcctgatgtgaagccattattttccacgagctcctgttaccaggattatcttgtgcacggaatttctctgaagtgttaataatttttaacatgttgatagaactttccatccagatctacagatctgccccctactagaagagttggtttatgtttagtattttttcccctcacgtttggactaacattagggcctgtttttgatcatgcatcaaaatgctggaaaggttatgaaagaaaggtcattaaccaaaagagtgggaagattttattctgactaaccaaattatttttcatcaggattgaaaaattactgcagtttttgggggtcattgccttcctttttcgatgtgcgagtattcctgtggctgaactagtgagaagagaataatagagatcctaaactccctttttgacttatggggactcagggttagtaggcaaatgaaggtacctgcctcggtgttttatgtggaccatcccatgcattttgtaaacctgtgttccactcatttgtttctgggtcagttgtgattttggtattgaatccttcatttctttcggtttattcatttcagaatttttttaaagattaaaacaactcccacgtga

SEQ ID NO: 140341 - DNA, 1275 bp, Homo sapiens
  Payload ID: 7533
  Gene Symbol: HPS5
  Gene Name: Hermansky-Pudlak syndrome 5
  ENST ID: ENST00000537258
  CDS Start-End: 167-958
ttttcttttttggccctttgacattttctttgttatcttggagcttggtcaccagcatttctagacattttgtagcagaagagttttcaagttatttcttcttctatattcatctcttaatcaggttttcttcacactccccacattttatgcttcctttcttagcatgaagattggtgacttttttccccaactttctcttaggtcatcttttcttgagtcccttctgcaaccagagtctttaaggttggattggctgcttttggcagtgtcccttgatgctccaccaagcaccagcacaatggatgatgaaggttatcccaggcctcattcacacttgctttcctggggttacagtcagctgatccttcatctaattaaacttcctgcagattttataaccaaagagaaaatgacagacatctgcaggtcttgtggtttctggcctggatatctaattctctgtttggagctggagagaagaagagaggccttcaccaatattgtgtatctgaatgatatgagcctgatggaaggggacaatggttggatcccagagaccgtggaggaatggaagcttctccttcatctcatacagagcaagagcacgaggccagccccccaggagtcactaaatgggagcctcagtgatgggccttcccccatcaatgtggagaatgtggcacttctgttagctaaggccatgggcccagatcgggcttggtcactgctacaggaatgtggtctggcccttgagttgtcagagaagtttaccagaacctgcgatatcctgaggattgctgagaaaaggcagagacacttgaattgcttccactttctggctattgtgaataacgctgctatgaatatgagtatacaaatatgtcttccagacactgctttcagttctttcgggtatatacctgaaagtggaattctggaatcatatgggccttgatacaaagcatgcttgaaaaatgcgatcggtttctctggtcccagcaggcctagtgggagaagattcagcaggatgtcatgacattttgagaaaaactaaatcatgctcctgaaccttctgaacgcatttgttattgaaggaaagacaccacccccaaatcctgccatcttattggggctacttttgtcagtgtctgtacccttggcatcggcatctgtgactctttatccatgacctcagtgtttcttaaccaaagttgtactcagcatttcttaaccaaagttgaattttgaaaagagtcagtccttgtttgctgg

SEQ ID NO: 140342 - DNA, 759 bp, Homo sapiens
  Payload ID: 7533
  Gene Symbol: HPS5
  Gene Name: Hermansky-Pudlak syndrome 5
  ENST ID: ENST00000544218
  CDS Start-End: 278-759
tttcgttctccatctcctcttgtgtctcttcaggctgtcaaagaaagtgtttctagctttgtgcgtaaaactactgagaagattggcacccttcacacgagccctgatctgaaagtgagaccagagctcaggggtgatgagcaatcatgtgaagaggatgtgagttcagatacctgcccaaaggaggaagacactgaggaggaaaaagaggtaactagtccacctccagaagaagacaggttccaggagcttaaagtagcaacagcagaagcaataaatggcaagttccaatcctgtgtatatggagatggaaaaaggagatctaccaacaaggttaaagttactagatgacgaggttccttttgatagtccgttgttggttgtttatgctacccggttgtatgaaaagtttggggagtctgctcttcgatccttaatcaagttctttccatccattttgccatcggatatcatacaactttgtcatcatcatcctgctgagtttttggcctatttagacagtctggtgaaatcaaggcctgaagatcagcggtcatcttttcttgagtcccttctgcaaccagagtctttaaggttggattggctgcttttggcagtgtcccttgatgctccaccaagcaccagcacaatggatgatgaaggttatcccaggcctcattcacacttgctttcctggggttacagtcagctgatccttcatctaattaaacttcctgcagattttataaccaaagagaa

SEQ ID NO: 140343 - DNA, 2649 bp, Homo sapiens
  Payload ID: 7534
  Gene Symbol: HPS6
  Gene Name: Hermansky-Pudlak syndrome 6
  Uniprot ID: Q86YV9
  ENST ID: ENST00000299238
  CDS Start-End: 86-2413
gctccgctcccccgagaatcgggcctcgccctgctgggcggctggacctgggcaaagcctgggcgcgctcccgcgcagcggcgccatgaagcgctcggggactctgcggctgctctcggacctgagcgccttcggcggcgcggcgcggctccgggagctggtggccggggactcagcggtccgagtccgtggcagtccggacggccgccacttgctgctcctgcgaccccctggggcggtagccccacagctgctagtcgcgtcgcgagggcccggcgcggagctagagcgggcctggccggccggccagccctccccgctggacgccttcttcctgccgtggccagcgcggccggcgctggtgctggtgtgggagagtggcctggccgaggtgtggggcgcgggcgtggggcctggctggcggccgctgcagagcaccgagctgtgtccgggcgggggagcccgcgttgtggcagtggcggcgctccgaggccgcctggtgtggtgcgaggagcggcaggcccgggccgagggcccgtcagggtcgccagcagccgctttcagccactgtgtgtgcgtccggactctggagcccagcggggaagctagcaccagcctgggccgcacacacgtcctgctgcaccactgccctgccttcgggctgctggcctcctgcagacaactcttcctggtgcccactgccaccacctggcctggcgtggcccacgttctactcatctggagcccaggcaagggcaaagtgatggtggctgccccacggcttggtctctcctacagtaagagtctgaatcctggacgaggggacacatgggacttccggaccctgctccgaggccttcctgggttgctgtcccccagggagccactggctgtacacacctgggccccaactccccagggcctgctgttgcttgacttcgggggcactgtgagcctattgcagtcccacggtggtacgcgggctgtgggcaccctgcaggaggcacctgtaggcccgtgggggtctgcagccctaggcacatttcagggcactctggcctgtgtgctgggctccacattggaactgctggacatgggcagtgggcagctgctggagaggaaggtcctaagtacagacagggtacatctgctagaaccgccagcccccggcatggaggatgaggaagagctggagacccgagggaatcttcgtctgctttcagccttgggtctgttttgtgtgggctgggaagccccacagggtgttgagttgccttcagccaaggatctggtgtttgaggaggcctgcgggtactaccagcggcggagcctgcggggtgcccagctcactccagaagaactgagacacagcagcacattccgggcacctcaggctctggcctccatcctccagggccacctgcccccatctgcactgctgaccatgttgaggaccgagcttcgggattaccgaggcttagaacagctgaaggcccagctggtggctggggatgatgaggaggctggttggactgagctggcggagcaggaagtggcacgcctgctgaggactgagttgataggagaccagctagcccagctcaacaccgttttccaagcccttcctacagcagcctggggtgccaccctcagggccctgcagctccagctagatgggaatggcaagctgaggtcccaagcaccccctgatgtgtggaagaaagtgttagggggaataaccgctggaaaggaaccccccaatggaatactgcccccctttgaactcctgtgccagtgtctgtgccagctggagcctcgatggctgccaccctttgtggagctggcacagcagcagggcgggccgggctggggggcagggggcccaggactgcccctgtatcgccgagctctggcagtgctaggtgaggaggggaccaggcctgaggctctggagctagagctgctcttgagcagtgggcggcctaaagctgtgctccaagctgtcgggcagctggtgcaaaaggaacaatgggatcgggctctggatgctggcctggccctcggcccctccagtcccctgcttcgaagtgaaatcttcaaactgctgctggccgagtttgcccagcaccgccggcttgatgctcacctccccctcctttgccgcctgtgcccaccagaactggctccagctgagctcctgcttctactgaggacatacctcccagatgaggtggggcccccaaccccattccctgagcctggagcagagccccctctcactgtgggcttgctcaaagccctgctggagcagactggggctcaaggatggctgtcgggcccagttctaagcccatatgaggacatcctatgggaccccagcactccacccccgactccacctcgggacctatgactacccttcaggcatcagaacactcagggcctggaggcttgcttgggactggaggcttgcttggacagttcctctgtgtcactgacacaggaaatcatttctaggacacagtgatcagggaagggtgcctgggacttggagggtcccatgtatggacctgtgtatgcaatactgttctgtcatctggagctatttttaagatgtgtgtgttaaatatatacatagtttaatatata

SEQ ID NO: 140344 - DNA, 2474 bp, Homo sapiens
  Payload ID: 7535
  Gene Symbol: HERPUD2
  Gene Name: HERPUD family member 2
  Uniprot ID: Q9BSE4
  ENST ID: ENST00000311350
  CDS Start-End: 633-1853
aacaacaaaaccggcgcgccagcggtggcgcaacggctctcgtccccgccctcctgctacctgtagtcgcctgggccgcccccggcccagccctgccttgccgccaccctgcgctgtccagactgaggggtcaggcggagagccgggccgcgccttcggtcagcttctctccctttcacccgcgcctcctcgcgagacccggggctgggccgtgccggtcgccgcgcagcaggaagggagcggctgccacggaaaacgcctggccggacggtgtggctggcggccctgcctgggcgcggagggcggcggtggcgggccccgcggccttctctcagcttcctttctcctcacgacggcctccacagtccggagcccggcggagcccggacctggcggggagagctgcctccacggccgggcacccagaccccaccgtcgcagtcgccaccacctcagtccatccttggtaccggcaatgggcttcgtatcctccagtgcacttgtaactgacttggacacggaatactaagaactcacttctgtcctcatcccagtcgcgccggcggtgaccatctcggctcttttgggcttaactgccgctcctctggactctgtctgactttgggggcaccatggaccaaagtgggatggagattcctgtgaccctcatcattaaagcaccgaatcagaaatacagtgaccagactattagctgcttcttgaactggaccgtggggaaactaaaaacgcatctatctaacgtttaccctagcaaaccattgacgaaggatcagagattggtgtattcgggcagactgcttcccgatcatctgcagctgaaagacattctcagaaaacaagatgagtatcatatggttcatctagtatgtacttctcggactcctcccagttctccaaaatccagcaccaatagagaaagtcatgaagcattggcatccagcagcaattctagttcagatcattcaggatcaacaactccatcatctggtcaagaaaccttgtctttagctgtgggttcttcctcagaaggattgaggcagcgtacccttccacaagcacaaactgaccaagcacagagtcaccagtttccatatgtaatgcaaggaaatgtagacaaccaatttcctgggcaagctgctccacctggattcccagtgtatcccgcgtttagcccactgcagatgctatggtggcaacagatgtatgctcatcagtattatatgcagtatcaagctgcagtttcagctcaggccacatcaaatgtcaacccaacccagcctactacttcacagcctctaaatttggcacatgttcctggagaagaacccccaccagctccaaacctagtggcccaagaaaatcgacccatgaatgagaatgttcaaatgaatgcacagggaggtccagtactaaatgaagaagacttcaatcgagactggctagactggatgtacacgttctcacgagctgcgattctccttagcattgtatacttctattcttcttttagtcggtttatcatggtaatgggagccatgctactggtttatttacaccaagctggatggtttccttttaggcaagaaggaggtcatcagcaggctcccaacaataatgccgaagttaacaatgatgggcaaaatgcaaacaacttggaacttgaagaaatggagcgtcttatggatgatgggcttgaagatgagagtggagaagatggaggtgaagatgccagtgcaattcaaaggcctggattaatggcttcagcttggtctttcatcaccaccttctttacttcactaataccagaggggcctccccaggttgccaattgacctgaaaaactgtgccagctacaaggagggtctgacttcaggaaagtggtttaaataacagtgcaatttcaaaaaaatttataactttcttttgatcatcatgtacagaggtgttttttttctttaggcttctcatgcatatgaatattttaagcacgaatggactactaaatatctgagttttttttttttttttttaaagatcctaacagaacatagcgtaacaatattggtcttccaggtgttactcatttcaattatgtgtagtataccaggacagacctattttcatgtcttatttctttaaagagctgcttcattggccgggcgccatggctcacgtctgtaatcccagcactttgggaggccgaggcgggtgggttacttgaggtcaggagttcgagaccagcctggcaaacatggcgaaaccccatcttaactaaaaatacaaaaaaattagccgggtgtggtgtcacgcgcctgtaatcccagctacttggggggctcaggcaggagaattgcctgaacccaggaggcggaggttgcagtgagctgagattgggccactgcactccaccctgggcgacagagtgagactcggtctcagaaaaaaaaaaaaaa

SEQ ID NO: 140345 - DNA, 3057 bp, Homo sapiens
  Payload ID: 7535
  Gene Symbol: HERPUD2
  Gene Name: HERPUD family member 2
  Uniprot ID: Q9BSE4
  ENST ID: ENST00000396081
  CDS Start-End: 806-2026
aacaacaaaaccggcgcgccagcggtggcgcaacggctctcgtccccgccctcctgctacctgtagtcgcctgggccgcccccggcccagccctgccttgccgccaccctgcgctgtccagactgaggggtcaggcggagagccgggccgcgccttcggtcagcttctctccctttcacccgcgcctcctcgcgagacccggggctgggccgtgccggtcgccgcgcagcaggaagggagcggctgccacggaaaacgcctggccggacggtgtggctggcggccctgcctgggcgcggagggcggcggtggcgggccccgcggccttctctcaggtaccccagtgcccgctgaccgccctgagcggcccagctgcttccccgatccgcaccgcggggccgtggcgtaggggccttgttgcgttccagcttgggggtcgcggtggggcggggcagtgaccccgggccggccgttgtgccctcatccctcccacccttccttcgtatagcttcctttctcctcacgacggcctccacagtccggagcccggcggagcccggacctggcggggagagctgcctccacggccgggcacccagaccccaccgtcgcagtcgccaccacctcagtccatccttggtaccggcaatgggcttcgtatcctccagtgcacttgtaactgacttggacacggaatactaagaactcacttctgtcctcatcccagtcgcgccggcggtgaccatctcggctcttttgggcttaactgccgctcctctggactctgtctgactttgggggcaccatggaccaaagtgggatggagattcctgtgaccctcatcattaaagcaccgaatcagaaatacagtgaccagactattagctgcttcttgaactggaccgtggggaaactaaaaacgcatctatctaacgtttaccctagcaaaccattgacgaaggatcagagattggtgtattcgggcagactgcttcccgatcatctgcagctgaaagacattctcagaaaacaagatgagtatcatatggttcatctagtatgtacttctcggactcctcccagttctccaaaatccagcaccaatagagaaagtcatgaagcattggcatccagcagcaattctagttcagatcattcaggatcaacaactccatcatctggtcaagaaaccttgtctttagctgtgggttcttcctcagaaggattgaggcagcgtacccttccacaagcacaaactgaccaagcacagagtcaccagtttccatatgtaatgcaaggaaatgtagacaaccaatttcctgggcaagctgctccacctggattcccagtgtatcccgcgtttagcccactgcagatgctatggtggcaacagatgtatgctcatcagtattatatgcagtatcaagctgcagtttcagctcaggccacatcaaatgtcaacccaacccagcctactacttcacagcctctaaatttggcacatgttcctggagaagaacccccaccagctccaaacctagtggcccaagaaaatcgacccatgaatgagaatgttcaaatgaatgcacagggaggtccagtactaaatgaagaagacttcaatcgagactggctagactggatgtacacgttctcacgagctgcgattctccttagcattgtatacttctattcttcttttagtcggtttatcatggtaatgggagccatgctactggtttatttacaccaagctggatggtttccttttaggcaagaaggaggtcatcagcaggctcccaacaataatgccgaagttaacaatgatgggcaaaatgcaaacaacttggaacttgaagaaatggagcgtcttatggatgatgggcttgaagatgagagtggagaagatggaggtgaagatgccagtgcaattcaaaggcctggattaatggcttcagcttggtctttcatcaccaccttctttacttcactaataccagaggggcctccccaggttgccaattgacctgaaaaactgtgccagctacaaggagggtctgacttcaggaaagtggtttaaataacagtgcaatttcaaaaaaatttataactttcttttgatcatcatgtacagaggtgttttttttctttaggcttctcatgcatatgaatattttaagcacgaatggactactaaatatctgagttttttttttttttttttaaagatcctaacagaacatagcgtaacaatattggtcttccaggtgttactcatttcaattatgtgtagtataccaggacagacctattttcatgtcttatttctttaaagagctgcttcattggccgggcgccatggctcacgtctgtaatcccagcactttgggaggccgaggcgggtgggttacttgaggtcaggagttcgagaccagcctggcaaacatggcgaaaccccatcttaactaaaaatacaaaaaaattagccgggtgtggtgtcacgcgcctgtaatcccagctacttggggggctcaggcaggagaattgcctgaacccaggaggcggaggttgcagtgagctgagattgggccactgcactccaccctgggcgacagagtgagactcggtctcagaaaaaaaaaaaaaagagctgcttcacatataaatgtctatagctagtagcctggccctttaatgtttaatttgaatagatatatctgttttccgtgaattatcttgaaagttttaaacagaatgacctcatagtttttaataaagaatattatttacctaaaatgtgctagtagcatcttgcccagccataaagcaataaacttctcaataatcttaattttgatatttgaataaataatggaaactttctgtattaagggcatgtatcccatcaattggaatcagtaccttaacagaaaaaggcagctcttcaatggaattaacgtgatataaaatgtttgatataggcagtacttttataaaaaaagataagctggaaattgctccgtgtaattttttaaataaaaagtcaattatggtaaa

SEQ ID NO: 140346 - DNA, 808 bp, Homo sapiens
  Payload ID: 7535
  Gene Symbol: HERPUD2
  Gene Name: HERPUD family member 2
  ENST ID: ENST00000413517
  CDS Start-End: 237-808
ggagagctgcctccacggccgggcacccagaccccaccgtcgcagtcgccaccacctcagtccatccttggtaccggcaatgggcttcgtatcctccagtgcacttgtaactgacttggacacggaatactaagaactcacttctgtcctcatcccagtcgcgccggcggtgaccatctcggctcttttgggcttaactgccgctcctctggactctgtctgactttgggggcaccatggaccaaagtgggatggagattcctgtgaccctcatcattaaagcaccgaatcagaaatacagtgaccagactattagctgcttcttgaactggaccgtggggaaactaaaaacgcatctatctaacgtttaccctagcaaaccacaagatgagtatcatatggttcatctagtatgtacttctcggactcctcccagttctccaaaatccagcaccaatagagaaagtcatgaagcattggcatccagcagcaattctagttcagatcattcaggatcaacaactccatcatctggtcaagaaaccttgtctttagctgtgggttcttcctcagaaggattgaggcagcgtacccttccacaagcacaaactgaccaagcacagagtcaccagtttccatatgtaatgcaaggaaatgtagacaaccaatttcctgggcaagctgctccacctggattcccagtgtatcccgcgtttagcccactgcagatgctatggtggcaacagatgtatgctcatcagtattatatgcagtatcaagctgcagtttcagctcaggccacatcaaa

SEQ ID NO: 140347 - DNA, 672 bp, Homo sapiens
  Payload ID: 7535
  Gene Symbol: HERPUD2
  Gene Name: HERPUD family member 2
  ENST ID: ENST00000427455
  CDS Start-End: 491-672
gctgtccagactgaggggtcaggcggagagccgggccgcgccttcggtcagcttctctccctttcacccgcgcctcctcgcgagacccggggctgggccgtgccggtcgccgcgcagcaggaagggagcggctgccacggaaaacgcctggccggacggtgtggctggcggccctgcctgggcgcggagggcggcggtggcgggccccgcggccttctctcagtccggagcccggcggagcccggacctggcggggagagctgcctccacggccgggcacccagaccccaccgtcgcagtcgccaccacctcagtccatccttggtaccggcaatgggcttcgtatcctccagtgcacttgtaactgacttggacacggaatactaagaactcacttctgtcctcatcccagtcgcgccggcggtgaccatctcggctcttttgggcttaactgccgctcctctggactctgtctgactttgggggcaccatggaccaaagtgggatggagattcctgtgaccctcatcattaaagcaccgaatcagaaatacagtgaccagactattagctgcttcttgaactggaccgtggggaaactaaaaacgcatctatctaacgtttaccctagcaaaccaagttcagatcattcaggatcaacaactccatcatc

SEQ ID NO: 140348 - DNA, 811 bp, Homo sapiens
  Payload ID: 7535
  Gene Symbol: HERPUD2
  Gene Name: HERPUD family member 2
  ENST ID: ENST00000438224
  CDS Start-End: 272-811
acagtccggagcccggcggagcccggacctggcggggagagctgcctccacggccgggcacccagaccccaccgtcgcagtcgccaccacctcagtccatccttggtaccggcaatgggcttcgtatcctccagtgcacttgtaactgacttggacacggaatactaagaactcacttctgtcctcatcccagtcgcgccggcggtgaccatctcggctcttttgggcttaactgccgctcctctggactctgtctgactttgggggcaccatggaccaaagtgggatggagattcctgtgaccctcatcattaaagcaccgaatcagaaatacagtgaccagactattagctgcttcttgaactggaccgtggggaaactaaaaacgcatctatctaacgtttaccctagcaaaccaagttcagatcattcaggatcaacaactccatcatctggtcaagaaaccttgtctttagctgtgggttcttcctcagaaggattgaggcagcgtacccttccacaagcacaaactgaccaagcacagagtcaccagtttccatatgtaatgcaaggaaatgtagacaaccaatttcctgggcaagctgctccacctggattcccagtgtatcccgcgtttagcccactgcagatgctatggtggcaacagatgtatgctcatcagtattatatgcagtatcaagctgcagtttcagctcaggccacatcaaatgtcaacccaacccagcctactacttcacagcctctaaatttggcacatgttcctggagaagaacccccaccagctccaaac

SEQ ID NO: 140349 - DNA, 505 bp, Homo sapiens
  Payload ID: 7535
  Gene Symbol: HERPUD2
  Gene Name: HERPUD family member 2
  ENST ID: ENST00000603731
  CDS Start-End: 450-505
aagctcctggcaccgtgctttgcagacagacgacgctcaacacattttgagcagaagcgtggttcagcaccaggaaggacaccaacttttgcagagacgactcttgggatggagaaagacttcccaaatcttcagggtgcggtcaagacaggcttcctttctcctcacgacggcctccacagtccggagcccggcggagcccggacctggcggggagagctgcctccacggccgggcacccagaccccaccgtcgcagtcgccaccacctcagtccatccttggtaccggcaatgggcttcgtatcctccagtgcacttgtaactgacttggacacggaatactaagaactcacttctgtcctcatcccagtcgcgccggcggtgaccatctcggctcttttgggcttaactgccgctcctctggactctgtctgactttgggggcaccatggaccaaagtgggatggagattcctgtgaccctcatcattaaagcaccgaatca

SEQ ID NO: 140350 - DNA, 4105 bp, Homo sapiens
  Payload ID: 7536
  Gene Symbol: HHLA1
  Gene Name: HERV-H LTR-associating 1
  Uniprot ID: C9JL84
  ENST ID: ENST00000414222
  CDS Start-End: 1-1596
atgctgggcttcctgtcacgtggtccttcaatgaagctgtgcatgggcctggcatgtgtcttgtccctttggaacacagtgtctggcatcaaaggagaagccaagaaagagaagggaatgacctttttacctacaacagtgtctggccttagagaagaagagaggaaggagaagggggtggcatttcttgctacgacggagctgcccgcaaggtcaatcgatctgtccgcgcttaacctgacagagcttgtgaatgggatgctcagtagagcgttaaaagatagcaagaagttcttctccttgctgagtgtcacttcctacagttccttcgccttccacaagttttctgtagctgtttacaacatttctaacctgaagacagtagaccccgccaaattccccacaaggtattgctactgtttaaacaatcggaccaatgacttatcagattttacagctctactggtagatatcatcggcaattctaccagctacctcacagagatttttaagtcaacctccatcctctcagtgaatcaaagcaatgaatcagattgcatcttcatctgtgtgatgacaggaaagtcaggaaggaatctttctgacttctgggagatagaagaaaaatatcccattatcaattacacatttaccagcggcttgtctggtgttctgggtgcagctaccaggggaactgccaggacttcaaagcccacaaccaaaagccagaaaacactaccaagtacaagccccggacactggacccagagcacaccctgggcatctgctctgagatcctctccctggacagagacagctgctccttcagaaacagaggagaccctgaacacaggcaggcctcctgagcttccagccagggccacagccacatggttcagtgcctcccacactctcccagccttggctaccaggagggtggccagaactcagtggttgacagctgacagacagacgtgggcttccatatcgtccgtgccctgggctcagaccatcagtgagaaaaaacctggagggtctctctgggaaactcgttcttccccaccgactactgcagggaccgaggaagccatgaacactacaagccttttggcgcctgctgctgagataatggccacacctggcagcccatcccaggccagccctaccttgggagcattcacccatggcacacagactccgagtccaaccaaggcaacagcccccagatatccacaaacaggtgatctctctgcagagtggccattcactgctggtgaagagccagtcctggtcccaagaccccatcaagtttcaaggtgtcctcagccactcttcaaggtgggagctatggcagctgctcctctcaccctggctattcagaggctcaacccatgcctgatggagctgtgccaattcttccagcaatgcctctgcatgagccagaggagtcccaggacagaggacatgagatactgtcttgaatactattcctggtttctgaagaatgcaacatatatctgtcagagggtgaaaagggtgtcccactcgcacaccttaaagcaaaagtgccttgagaatatctgcaagtctgtgtgaggccttgaaaataacactagggcataacaattacttcaggggatacgccatccaccctggctcttgtcccaagtgggctacatttgaagaattcacccaggctccagctagatcatcagttaatttaaagtggttattcttggaagtagcattttttttccctctcctgtgaatctgtgcaaaacattgaaggtagaagttttcttgttagaggcctcacaattaatacagtaatgccagactccttgcctgcttcaaaatcatggaaatctagtgttcatgctcaagaaactcctacaatgcttgaggcaatcctgacaatttaaaaactggggatgcgtgggcactctagcctgcacaaaccagttcagccatggagactctgacacaatacctgaggtgacttaaacttgagacttttgaaagacaacaaaagcataaattaatattgaattcatactctagagagattcacatatactgatagttaactaatacatgtacaaccaatcagacttgccatggtatgggatctatataatcttccaagcccccttaagtgggcgataatgaaaactttatcattaggaggaggtttagagagttgtttttattgacatcttgtcttgattcctcttctgtgtgacccactggattcagaggtccccatgagcaccctcaggttcaatgattcatgagtagaactcagaggtagggaaaactgttatatgcacatttagcatttattacaacaaaaggatgcagatgaaaagcagcaaatgtgaaaggcacctctagagagagtccaagagagcccaggcacaagcttccagtggggttgcacagtcagcatctaatcctcccagaaataatgtttaacaacacgtggagtattgtcagccaggaaagctcatccaagttttggtgtccaggggatgtttgggggtatggagtaggtatggagtgccttcatggcctgcatggctaaacttagttattcagtctccagtccctctagaggtcaagctgatactgcacgacctaaggccccaccataaatcacattgttaacataaactatctgtcatggcacgaagccccaggtacaagagacactcatcaggcaggatattccaaggatttacaggggattccccaggagctggtcaaggaccagatgttcctctgaaaggtgcaggatttgagctcatctgtggagtacgtctgtggagtcaactttcttctgcatccccacatactgatttgccaccttcattgtatcagattcctttttcactatattcaggtttgcggttgctccagtatccctatctatgctgagtctccacgtagagcatgtgtgccctctccagtggctctgcacggaccccttatttctcattaccagggacagtttttctcctgatgtgcctggtgctccttctccactctcttgccttaggactctgctgggccatgagtattttttttacccttttgtgacctagggctgcccttgggtgaggaaagtcactttctgttcatcatctaagtagaaaacagtttctgccattggaagacccctgagttccctggcactcctgtgaaccacaaggtgcctggggaggtagaacttggacattggagagaggagcagccagacatttctctttctaatcatatgcagaaagatttctttttattctccagaacacttgaaagactctccaagttatgcaaatgtcaagctcataaatgtatattatcatgacttttgcaaagatgaagaggatacagcaaattttctgggaggcaaagggacttctacctggataggaaccaagcaaactcattaagcatggattaatttgattcaacccttgcgtggatattaattaaggacctttgacaggagagggtcctcaaggttcctcaaagagtaacttatcatcaaggaaggtgaagaatggatggatggcttgggcccaagactggggctattcacttgtggggaaacccatgtgaacccagttaccccatactttgggaataatgactgagcatgactataatctttaagaagctcaaatgcggaatacctctgaggcttatgcaaggatctggcctagcatcaaggacaaaggctcagaggactccttggggccagttttctacagtcataccatcagccacaacagcagcaaaggcagaaggaaaacagggcccaggagtggctgacgactgcctggagtccaactggtctcctggagttcataagaggtttgaccccttctgagctgaatgtgtcctgatttaggggatagctagggcaataagaaagcctcagggggtgctactgatctggaactcctactaattagtgtgtatgtatgtggccaccagtggttagcagatgaggtgaaagagatgggacagtgactgtatctgttctgatgaaggagattgtgcagttacatgcgtaacgtcattaaacttcattcttccaggt

SEQ ID NO: 140351 - DNA, 2369 bp, Homo sapiens
  Payload ID: 7536
  Gene Symbol: HHLA1
  Gene Name: HERV-H LTR-associating 1
  ENST ID: ENST00000434736
  CDS Start-End: 87-1718
gttaatctttctagctgtttaagttctttgaagtcaatttatcctgctcagaagataggtaagtagtgggccagagtatcacaagcatgctgggcttcctgtcacgtggtccttcaatgaagctgtgcatgggcctggcatgtgtcttgtccctttggaacacagtgtctggcatcaaaggagaagccaagaaagagaagggaatgacctttttacctacaacaggtaagtgggtgataagggctccttttcagctcacttgtctggaaataaagatgttaagaaggaaaaagatgggacattcccgggcagccctaaatcctgacttactcttgtctggccttagagaagaagagaggaaggagaagggggtggcatttcttgctacgacggagctgcccgcaaggtcaatcgatctgtccgcgcttaacctgacagagcttgtgaatgggatgctcagtagagcgttaaaagatagcaagaagttcttctccttgctgagtgtcacttcctacagttccttcgccttccacaagttttctgtagctgtttacaacatttctaacctgaagacagtagaccccgccaaattccccacaaggtattgctactgtttaaacaatcggaccaatgacttatcagattttacagctctactggtagatatcatcggcaattctaccagctacctcacagagatttttaagtcaacctccatcctctcagtgaatcaaagcaatgaatcagattgcatcttcatctgtgtgatgacaggaaagtcaggaaggaatctttctgacttctgggagatagaagaaaaatatcccattatcaattacacatttaccagcggcttgtctggtgttctgggtgcagctaccaggggaactgccaggacttcaaagcccacaaccaaaagccagaaaacactaccaagtacaagccccggacactggacccagagcacaccctgggcatctgctctgagatcctctccctggacagagacagctgctccttcagaaacagaggagaccctgaacacaggcaggcctcctgagcttccagccagggccacagccacatggttcagtgcctcccacactctcccagccttggctaccaggagggtggccagaactcagtggttgacagctgacagacagacgtgggcttccatatcgtccgtgccctgggctcagaccatcagtgagaaaaaacctggagggtctctctgggaaactcgttcttccccaccgactactgcagggaccgaggaagccatgaacactacaagccttttggcgcctgctgctgagataatggccacacctggcagcccatcccaggccagccctaccttgggagcattcacccatggcacacagactccgagtccaaccaaggcaacagcccccagatatccacaaacaggtgatctctctgcagagtggccattcactgctggtgaagagccagtcctggtcccaagaccccatcaagtttcaaggtgtcctcagccactcttcaaggtgggagctatggcagctgctcctctcaccctggctattcagaggctcaacccatgcctgatggagctgtgccaattcttccagcaatgcctctgcatgagccagaggagtcccaggacagaggacatgagttctttcataaatccctaccaatcatccaccagcaaaataagttggaaaacttaaattaaaaagcagaacctgttttatattaagaaggtctagacatggacattttctgtcctacaatgctgacatactgttatttcttctgggatttattcttggctgtaaacccagaactaaattacatagatgaatactcctgctccagtggcctggataccaatctctcctgtctttaatgttattttcaaagactactctcaagatccattagcttttaaaatttctgcctctgagtctgaagcccaggtggacagccattttccatcacccctttccagctgtaatctttcatccccctcccccccccccccgtcagtacgaacatttcctccattcatagagggcaataagcaagacctgtagacccaaagcacaggtttattctaaagaaaacttttacgacaatactttctgtattgtctaggttaagcccactttaggagatcctttactcattaacttaaccaacaatgtgtattgagtctctgctgtatatctgtgatgctctgtcccaagccatggggatctagaggtgaatcagaaatagcctcagaaactgagggtttcatagttggaaggaagaaatggtcataaacacaaatcaaaatatagtattatagatcatagaaccaagtcacgtaaccaggc

SEQ ID NO: 140352 - DNA, 2666 bp, Homo sapiens
  Payload ID: 7537
  Gene Symbol: HHLA2
  Gene Name: HERV-H LTR-associating 2
  Uniprot ID: Q9UM44
  ENST ID: ENST00000357759
  CDS Start-End: 415-1659
agttctcttcaagtcatgtaatcgacttttttgaattagttttcagtttcattttgttttccctaattcaagttgggaacacttcattttccccaattcaagttgggaacacttccttggtatttccttgctacatggactttagcaaatgctactttactctccttccagctactcaggaggctgaggcaggagaatcgcttgaacccgggaggcggaggttacagtgagccttttcctagttttactgttggaagcctaactcacaggagagattatgcaatacagtcctgaagtcaagggaggagagcatgtaggagaatactaaccctgcacagattgtgatggtgatgtggaatatactaaagcctagaacgcacctcctctgcatgactaatatgttctgcacaagacatgaaggcacagacagcactgtctttcttcctcattctcataacatctctgagtggatctcaaggcatattccctttggctttcttcatttatgttcctatgaatgaacaaatcgtcattggaagacttgatgaagatataattctcccttcttcatttgagaggggatccgaagtcgtaatacactggaagtatcaagatagctataaggttcacagttactacaaaggcagtgaccatttggaaagccaagatcccagatatgcaaacaggacatcccttttctataatgagattcaaaatgggaatgcgtcgctatttttcagaagagtaagccttctggacgaaggaatttacacctgctatgtaggaacagcaattcaagtgattacaaacaaagtggtgctaaaggtgggagtttttctcacacccgtgatgaagtatgaaaagaggaacacaaacagcttcttaatatgcagcgtgttaagtgtttatcctcgtccaattatcacgtggaaaatggacaacacacctatctctgaaaacaacatggaagaaacagggtctttggattctttttctattaacagcccactgaatattacaggatcaaattcatcttatgaatgtacaattgaaaattcactgctgaagcaaacatggacagggcgctggacgatgaaagatggccttcataaaatgcaaagtgaacacgtttcactctcatgtcaacctgtaaatgattatttttcaccaaaccaagacttcaaagttacttggtccagaatgaaaagtgggactttctctgtcctggcttactatctgagctcctcacaaaatacaattatcaatgaatcccgattctcatggaacaaagagctgataaaccagagtgacttctctatgaatttgatggatcttaatctttcagacagtggggaatatttatgcaatatttcttcggatgaatatactttacttaccatccacacagtgcatgtagaaccgagccaagaaacagcttcccataacaaaggcttatggattttggtgccctctgcgattttggcagcttttctgctgatttggagcgtaaaatgttgcagagcccagctagaagccaggaggagcagacaccctgctgatggagcccaacaagaaagatgttgtgtccctcctggtgagcgctgtcccagtgcacccgataatggcgaagaaaatgtgcctctttcaggaaaagtataggaaatgagagaagactgtgacaactcatgacctgcatccttaatatccagtgacttcatctcccctttcttcaccacaattccaggcaatggcctgtcggagcagacaattctaccactgcaaagagttgtaaccattttctggtatcacatttatttttcaagacatacttttcaagacatcattcactgacccactacctgcattgagtataaatgcctggatgttaaggattccaatttaactttgaaaagaactgtctcattcatttacatttctgttacagtcagcccaggaggttacagtgagctctccactaagaatctggaagaaatgcatcactaggggttgattcccaatctgatcaactgataatgggtgagagagcaggtaagagccaaagtcaccttagtggaaaggttaaaaaccagagcctggaaaccaagatgattgatttgacaaggtattttagtctagttttatatgaacggttgtatcagggtaaccaactcgatttgggatgaatcttagggcaccaaagactaagacagtatctttaagattgctagggaaaagggccctatgtgtcaggcctctgagcccaagccaagcatcgcatcccctgtgatttgcacgtatacatccagatggcctaaagtaactgaagatccacaaaagaagtaaaaatagccttaactgatgacattccaccattgtgatttgttcctgccccaccctaactgatcaatgtactttgtaatctcccccacccttaagaaggtactttgtaatcttccccacccttaagaaggttctttgtaattctccccacccttgagaatgtactttgtgagatccaccctgcccacaaaacattgctcttaacttcaccgcctaacccaaaacctataagaactaatgataatccatcacccttcgctgactctcttttcggactcagcccacctgcacccaggtgaaataaacagctttattgctcacacaaa

SEQ ID NO: 140353 - DNA, 2406 bp, Homo sapiens
  Payload ID: 7537
  Gene Symbol: HHLA2
  Gene Name: HERV-H LTR-associating 2
  Uniprot ID: Q9UM44
  ENST ID: ENST00000489514
  CDS Start-End: 155-1399
agtttactctacatcatagcagagaaaatggacaaaacacagctgttttgcatgtaggagaatactaaccctgcacagattgtgatggtgatgtggaatatactaaagcctagaacgcacctcctctgcatgactaatatgttctgcacaagacatgaaggcacagacagcactgtctttcttcctcattctcataacatctctgagtggatctcaaggcatattccctttggctttcttcatttatgttcctatgaatgaacaaatcgtcattggaagacttgatgaagatataattctcccttcttcatttgagaggggatccgaagtcgtaatacactggaagtatcaagatagctataaggttcacagttactacaaaggcagtgaccatttggaaagccaagatcccagatatgcaaacaggacatcccttttctataatgagattcaaaatgggaatgcgtcgctatttttcagaagagtaagccttctggacgaaggaatttacacctgctatgtaggaacagcaattcaagtgattacaaacaaagtggtgctaaaggtgggagtttttctcacacccgtgatgaagtatgaaaagaggaacacaaacagcttcttaatatgcagcgtgttaagtgtttatcctcgtccaattatcacgtggaaaatggacaacacacctatctctgaaaacaacatggaagaaacagggtctttggattctttttctattaacagcccactgaatattacaggatcaaattcatcttatgaatgtacaattgaaaattcactgctgaagcaaacatggacagggcgctggacgatgaaagatggccttcataaaatgcaaagtgaacacgtttcactctcatgtcaacctgtaaatgattatttttcaccaaaccaagacttcaaagttacttggtccagaatgaaaagtgggactttctctgtcctggcttactatctgagctcctcacaaaatacaattatcaatgaatcccgattctcatggaacaaagagctgataaaccagagtgacttctctatgaatttgatggatcttaatctttcagacagtggggaatatttatgcaatatttcttcggatgaatatactttacttaccatccacacagtgcatgtagaaccgagccaagaaacagcttcccataacaaaggcttatggattttggtgccctctgcgattttggcagcttttctgctgatttggagcgtaaaatgttgcagagcccagctagaagccaggaggagcagacaccctgctgatggagcccaacaagaaagatgttgtgtccctcctggtgagcgctgtcccagtgcacccgataatggcgaagaaaatgtgcctctttcaggaaaagtataggaaatgagagaagactgtgacaactcatgacctgcatccttaatatccagtgacttcatctcccctttcttcaccacaattccaggcaatggcctgtcggagcagacaattctaccactgcaaagagttgtaaccattttctggtatcacatttatttttcaagacatacttttcaagacatcattcactgacccactacctgcattgagtataaatgcctggatgttaaggattccaatttaactttgaaaagaactgtctcattcatttacatttctgttacagtcagcccaggaggttacagtgagctctccactaagaatctggaagaaatgcatcactaggggttgattcccaatctgatcaactgataatgggtgagagagcaggtaagagccaaagtcaccttagtggaaaggttaaaaaccagagcctggaaaccaagatgattgatttgacaaggtattttagtctagttttatatgaacggttgtatcagggtaaccaactcgatttgggatgaatcttagggcaccaaagactaagacagtatctttaagattgctagggaaaagggccctatgtgtcaggcctctgagcccaagccaagcatcgcatcccctgtgatttgcacgtatacatccagatggcctaaagtaactgaagatccacaaaagaagtaaaaatagccttaactgatgacattccaccattgtgatttgttcctgccccaccctaactgatcaatgtactttgtaatctcccccacccttaagaaggtactttgtaatcttccccacccttaagaaggttctttgtaattctccccacccttgagaatgtactttgtgagatccaccctgcccacaaaacattgctcttaacttcaccgcctaacccaaaacctataagaactaatgataatccatcacccttcgctgactctcttttcggactcagcccacctgcacccaggtgaaataaacagctttattgctcacacaaa

SEQ ID NO: 140354 - DNA, 573 bp, Homo sapiens
  Payload ID: 7537
  Gene Symbol: HHLA2
  Gene Name: HERV-H LTR-associating 2
  ENST ID: ENST00000482430
  CDS Start-End: 166-573
attcttatggactacttagcatttgactagacggtatgaatttctaagtaagcacatatagaactggatgcccttgtggtacatctcaaggctgatttgaaagcttgagagaccatcaagaattggatttggggaagagcatgactaatatgttctgcacaagacatgaaggcacagacagcactgtctttcttcctcattctcataacatctctgagtggatctcaaggcatattccctttggctttcttcatttatgttcctatgaatgaacaaatcgtcattggaagacttgatgaagatataattctcccttcttcatttgagaggggatccgaagtcgtaatacactggaagtatcaagatagctataaggttcacagttactacaaaggcagtgaccatttggaaagccaagatcccagatatgcaaacaggacatcccttttctataatgagattcaaaatgggaatgcgtcgctatttttcagaagagtaagccttctggacgaaggaatttacacctgctatgtaggaacagcaattcaagtgattacaaacaaagtggtgcta

SEQ ID NO: 140355 - DNA, 1439 bp, Homo sapiens
  Payload ID: 7537
  Gene Symbol: HHLA2
  Gene Name: HERV-H LTR-associating 2
  ENST ID: ENST00000491820
  CDS Start-End: 246-1439
ttattcttatggactacttagcatttgactagacggtatgaatttctaagtaagcacatatagaactggatgcccttgtggtacatctcaaggctgatttgaaagcttgagagaccatcaagaattggatttggggaagagcatgtaggagaatactaaccctgcacagattgtgatggtgatgtggaatatactaaagcctagaacgcacctcctctgcatgactaatatgttctgcacaagacatgaaggcacagacagcactgtctttcttcctcattctcataacatctctgagtggatctcaaggcatattccctttggctttcttcatttatgttcctatgaatgaacaaatcgtcattggaagacttgatgaagatataattctcccttcttcatttgagaggggatccgaagtcgtaatacactggaagtatcaagatagctataaggttcacagttactacaaaggcagtgaccatttggaaagccaagatcccagatatgcaaacaggacatcccttttctataatgagattcaaaatgggaatgcgtcgctatttttcagaagagtaagccttctggacgaaggaatttacacctgctatgtaggaacagcaattcaagtgattacaaacaaagtggtgctaaaggtgggagtttttctcacacccgtgatgaagtatgaaaagaggaacacaaacagcttcttaatatgcagcgtgttaagtgtttatcctcgtccaattatcacgtggaaaatggacaacacacctatctctgaaaacaacatggaagaaacagggtctttggattctttttctattaacagcccactgaatattacaggatcaaattcatcttatgaatgtacaattgaaaattcactgctgaagcaaacatggacagggcgctggacgatgaaagatggccttcataaaatgcaaagtgaacacgtttcactctcatgtcaacctgtaaatgattatttttcaccaaaccaagacttcaaagttacttggtccagaatgaaaagtgggactttctctgtcctggcttactatctgagctcctcacaaaatacaattatcaatgaatcccgattctcatggaacaaagagctgataaaccagagtgacttctctatgaatttgatggatcttaatctttcagacagtggggaatatttatgcaatatttcttcggatgaatatactttacttaccatccacacagtgcatgtagaaccgagccaagaaacagcttcccataacaaaggcttatggattttggtgccctctgcgattttggcagcttttctgctgatttggagcgtaaaatgttgcagagaaagatgttgtgtccctcctggtgagcgctgtcccagtgcacccgataatggcgaagaaaatgtgcctctttcaggaaaagtatag

SEQ ID NO: 140356 - DNA, 1457 bp, Homo sapiens
  Payload ID: 7537
  Gene Symbol: HHLA2
  Gene Name: HERV-H LTR-associating 2
  Uniprot ID: Q9UM44
  ENST ID: ENST00000467562
  CDS Start-End: 175-1227
tattcttatggactacttagcatttgactagacggtatgaatttctaagtaagcacatatagaactggatgcccttgtggtacatctcaaggctgatttgaaagcttgagagaccatcaagaattggatttggggaagagcatgtaggagaatactaaccctgcacagattgtgatggtgatgtggaatatactaaagcctagaacgcacctcctctgcatgactaatatgttctgcacaagacatgaaggcacagacagcactgtctttcttcctcattctcataacatctctgagtggatctcaagaagagtaagccttctggacgaaggaatttacacctgctatgtaggaacagcaattcaagtgattacaaacaaagtggtgctaaaggtgggagtttttctcacacccgtgatgaagtatgaaaagaggaacacaaacagcttcttaatatgcagcgtgttaagtgtttatcctcgtccaattatcacgtggaaaatggacaacacacctatctctgaaaacaacatggaagaaacagggtctttggattctttttctattaacagcccactgaatattacaggatcaaattcatcttatgaatgtacaattgaaaattcactgctgaagcaaacatggacagggcgctggacgatgaaagatggccttcataaaatgcaaagtgaacacgtttcactctcatgtcaacctgtaaatgattatttttcaccaaaccaagacttcaaagttacttggtccagaatgaaaagtgggactttctctgtcctggcttactatctgagctcctcacaaaatacaattatcaatgaatcccgattctcatggaacaaagagctgataaaccagagtgacttctctatgaatttgatggatcttaatctttcagacagtggggaatatttatgcaatatttcttcggatgaatatactttacttaccatccacacagtgcatgtagaaccgagccaagaaacagcttcccataacaaaggcttatggattttggtgccctctgcgattttggcagcttttctgctgatttggagcgtaaaatgttgcagagcccagctagaagccaggaggagcagacaccctgctgatggagcccaacaagaaagatgttgtgtccctcctggtgagcgctgtcccagtgcacccgataatggcgaagaaaatgtgcctctttcaggaaaagtataggaaatgagagaagactgtgacaactcatgacctgcatccttaatatccagtgacttcatctcccctttcttcaccacaattccaggcaatggcctgtcggagcagacaattctaccactgcaaagagttgtaaccattttctggtatcacatttatttttcaagacatacttttcaagacatcattcactgacccactacctgcattgagtataaatgcctggatgttaa

SEQ ID NO: 140357 - DNA, 2659 bp, Homo sapiens
  Payload ID: 7537
  Gene Symbol: HHLA2
  Gene Name: HERV-H LTR-associating 2
  ENST ID: ENST00000482099
  CDS Start-End: 1-985
gattcaaaatgggaatgcgtcgctatttttcagaagagtaagccttctggacgaaggaatttacacctgctatgtaggaacagcaattcaagtgattacaaacaaagtggtgctaaaggtgggagtttttctcacacccgtgatgaagtatgaaaagaggaacacaaacagcttcttaatatgcagcgtgttaagtgtttatcctcgtccaattatcacgtggaaaatggacaacacacctatctctgaaaacaacatggaagaaacagggtctttggattctttttctattaacagcccactgaatattacaggatcaaattcatcttatgaatgtacaattgaaaattcactgctgaagcaaacatggacagggcgctggacgatgaaagatggccttcataaaatgcaaagtgaacacgtttcactctcatgtcaacctgtaaatgattatttttcaccaaaccaagacttcaaagttacttggtccagaatgaaaagtgggactttctctgtcctggcttactatctgagctcctcacaaaatacaattatcaatgaatcccgattctcatggaacaaagagctgataaaccagagtgacttctctatgaatttgatggatcttaatctttcagacagtggggaatatttatgcaatatttcttcggatgaatatactttacttaccatccacacagtgcatgtagaaccgagccaagaaacagcttcccataacaaaggcttatggattttggtgccctctgcgattttggcagcttttctgctgatttggagcgtaaaatgttgcagagcccagctagaagccaggaggagcagacaccctgctgatggagcccaacaagaaagatgttgtgtccctcctggtgagcgctgtcccagtgcacccgataatggcgaagaaaatgtggtaaggcattatttcctttatcaaaccatatacagtataaaaatgcttctttaaaagggtaattgaagttctgactgattcacatatcatcaagcaagacttttatacagaaaaaaacagcagcaggggttgcaggataatatagcacgaaaaatataattaggcttttcccaatgtctataattaaacaggctctacttgcttaaatacatggttgttcttcttgtctcctattgttatttgtagagaagatctccaatggcattgtgcatatgagggtgagccaatgtacttattcttatgatagaagcatgaaacatgggattgtatacaagtggaaagaaacacaactataattcacttgcaaattatagtttgattgtatacttcctttttactgcattccttttagtatttatgtgttccattaatcagagtataaataagggccaggagtgtggtaaacttgttttttccactgttaaaaaccatgaaacagctagtagggagattaaaattaactgataagactcagacttattttataatggtctcatggatctttaatttcagatgcaagcaatagactaaagctttttgccgcccaccccaaaacactactatcaataaatatttaagatataaatggttattctgacttgaacaacagacatttagagtctatttttcttgcttctagcctctttcaggaaaagtataggaaatgagagaagactgtgacaactcatgacctgcatccttaatatccagtgacttcatctcccctttcttcaccacaattccaggcaatggcctgtcggagcagacaattctaccactgcaaagagttgtaaccattttctggtatcacatttatttttcaagacatacttttcaagacatcattcactgacccactacctgcattgagtataaatgcctggatgttaaggattccaatttaactttgaaaagaactgtctcattcatttacatttctgttacagtcagcccaggaggttacagtgagctctccactaagaatctggaagaaatgcatcactaggggttgattcccaatctgatcaactgataatgggtgagagagcaggtaagagccaaagtcaccttagtggaaaggttaaaaaccagagcctggaaaccaagatgattgatttgacaaggtattttagtctagttttatatgaacggttgtatcagggtaaccaactcgatttgggatgaatcttagggcaccaaagactaagacagtatctttaagattgctagggaaaagggccctatgtgtcaggcctctgagcccaagccaagcatcgcatcccctgtgatttgcacgtatacatccagatggcctaaagtaactgaagatccacaaaagaagtaaaaatagccttaactgatgacattccaccattgtgatttgttcctgccccaccctaactgatcaatgtactttgtaatctcccccacccttaagaaggtactttgtaatcttccccacccttaagaaggttctttgtaattctccccacccttgagaatgtactttgtgagatccaccctgcccacaaaacattgctcttaacttcaccgcctaacccaaaacctataagaactaatgataatccatcacccttcgctgactctcttttcggactcagcccacctgcacccaggtgaaataaacagctttattgctcacacaaa

SEQ ID NO: 140358 - DNA, 2379 bp, Homo sapiens
  Payload ID: 7537
  Gene Symbol: HHLA2
  Gene Name: HERV-H LTR-associating 2
  Uniprot ID: Q9UM44
  ENST ID: ENST00000467761
  CDS Start-End: 128-1372
atttctcatctcagcacatatagaactggatgcccttgtggtacatctcaaggctgatttgaaagcttgagagaccatcaagaattggatttggggaagagcatgactaatatgttctgcacaagacatgaaggcacagacagcactgtctttcttcctcattctcataacatctctgagtggatctcaaggcatattccctttggctttcttcatttatgttcctatgaatgaacaaatcgtcattggaagacttgatgaagatataattctcccttcttcatttgagaggggatccgaagtcgtaatacactggaagtatcaagatagctataaggttcacagttactacaaaggcagtgaccatttggaaagccaagatcccagatatgcaaacaggacatcccttttctataatgagattcaaaatgggaatgcgtcgctatttttcagaagagtaagccttctggacgaaggaatttacacctgctatgtaggaacagcaattcaagtgattacaaacaaagtggtgctaaaggtgggagtttttctcacacccgtgatgaagtatgaaaagaggaacacaaacagcttcttaatatgcagcgtgttaagtgtttatcctcgtccaattatcacgtggaaaatggacaacacacctatctctgaaaacaacatggaagaaacagggtctttggattctttttctattaacagcccactgaatattacaggatcaaattcatcttatgaatgtacaattgaaaattcactgctgaagcaaacatggacagggcgctggacgatgaaagatggccttcataaaatgcaaagtgaacacgtttcactctcatgtcaacctgtaaatgattatttttcaccaaaccaagacttcaaagttacttggtccagaatgaaaagtgggactttctctgtcctggcttactatctgagctcctcacaaaatacaattatcaatgaatcccgattctcatggaacaaagagctgataaaccagagtgacttctctatgaatttgatggatcttaatctttcagacagtggggaatatttatgcaatatttcttcggatgaatatactttacttaccatccacacagtgcatgtagaaccgagccaagaaacagcttcccataacaaaggcttatggattttggtgccctctgcgattttggcagcttttctgctgatttggagcgtaaaatgttgcagagcccagctagaagccaggaggagcagacaccctgctgatggagcccaacaagaaagatgttgtgtccctcctggtgagcgctgtcccagtgcacccgataatggcgaagaaaatgtgcctctttcaggaaaagtataggaaatgagagaagactgtgacaactcatgacctgcatccttaatatccagtgacttcatctcccctttcttcaccacaattccaggcaatggcctgtcggagcagacaattctaccactgcaaagagttgtaaccattttctggtatcacatttatttttcaagacatacttttcaagacatcattcactgacccactacctgcattgagtataaatgcctggatgttaaggattccaatttaactttgaaaagaactgtctcattcatttacatttctgttacagtcagcccaggaggttacagtgagctctccactaagaatctggaagaaatgcatcactaggggttgattcccaatctgatcaactgataatgggtgagagagcaggtaagagccaaagtcaccttagtggaaaggttaaaaaccagagcctggaaaccaagatgattgatttgacaaggtattttagtctagttttatatgaacggttgtatcagggtaaccaactcgatttgggatgaatcttagggcaccaaagactaagacagtatctttaagattgctagggaaaagggccctatgtgtcaggcctctgagcccaagccaagcatcgcatcccctgtgatttgcacgtatacatccagatggcctaaagtaactgaagatccacaaaagaagtaaaaatagccttaactgatgacattccaccattgtgatttgttcctgccccaccctaactgatcaatgtactttgtaatctcccccacccttaagaaggtactttgtaatcttccccacccttaagaaggttctttgtaattctccccacccttgagaatgtactttgtgagatccaccctgcccacaaaacattgctcttaacttcaccgcctaacccaaaacctataagaactaatgataatccatcacccttcgctgactctcttttcggactcagcccacctgcacccaggtgaaataaacagctttattgctcacacaaa

SEQ ID NO: 140359 - DNA, 585 bp, Homo sapiens
  Payload ID: 7537
  Gene Symbol: HHLA2
  Gene Name: HERV-H LTR-associating 2
  ENST ID: ENST00000462629
  CDS Start-End: 295-585
ttcttatggactacttagcatttgactagacggtatgaatttctaagtaagctactcaggaggctgaggcaggagaatcgcttgaacccgggaggcggaggttacagtgagccttttcctagttttactgttggaagcctaactcacaggagagattatgcaatacagtcctgaagtcaagggaggagagcatgtaggagaatactaaccctgcacagattgtgatggtgatgtggaatatactaaagcctagaacgcacctcctctgcatgactaatatgttctgcacaagacatgaaggcacagacagcactgtctttcttcctcattctcataacatctctgagtggatctcaaggcatattccctttggctttcttcatttatgttcctatgaatgaacaaatcgtcattggaagacttgatgaagatataattctcccttcttcatttgagaggggatccgaagtcgtaatacactggaagtatcaagatagctataaggttcacagttactacaaaggcagtgaccatttggaaagccaagatcccagatatgcaaacaggacatcccttttctataat

SEQ ID NO: 140360 - DNA, 594 bp, Homo sapiens
  Payload ID: 7537
  Gene Symbol: HHLA2
  Gene Name: HERV-H LTR-associating 2
  ENST ID: ENST00000463019
  CDS Start-End: 161-594
gtttattcttatggactacttagcatttgactagacggtatgaatttctaagtaagcatgtaggagaatactaaccctgcacagattgtgatggtgatgtggaatatactaaagcctagaacgcacctcctctgcatgactaatatgttctgcacaagacatgaaggcacagacagcactgtctttcttcctcattctcataacatctctgagtggatctcaaggcatattccctttggctttcttcatttatgttcctatgaatgaacaaatcgtcattggaagacttgatgaagatataattctcccttcttcatttgagaggggatccgaagtcgtaatacactggaagtatcaagatagctataaggttcacagttactacaaaggcagtgaccatttggaaagccaagatcccagatatgcaaacaggacatcccttttctataatgagattcaaaatgggaatgcgtcgctatttttcagaagagtaagccttctggacgaaggaatttacacctgctatgtaggaacagcaattcaagtgattacaaacaaagtggtgctaaaggtgggagtttttctcacacccgt

SEQ ID NO: 140361 - DNA, 568 bp, Homo sapiens
  Payload ID: 7537
  Gene Symbol: HHLA2
  Gene Name: HERV-H LTR-associating 2
  ENST ID: ENST00000467282
  CDS Start-End: 185-568
atagctgaattcaatgtttattcttatggactacttagcatttgactagacggtatgaatttctaagtaagcatgtaggagaatactaaccctgcacagattgtgatggtgatgtggaatatactaaagcctagaacgcacctcctctggcatattccctttggctttcttcatttatgttcctatgaatgaacaaatcgtcattggaagacttgatgaagatataattctcccttcttcatttgagaggggatccgaagtcgtaatacactggaagtatcaagatagctataaggttcacagttactacaaaggcagtgaccatttggaaagccaagatcccagatatgcaaacaggacatcccttttctataatgagattcaaaatgggaatgcgtcgctatttttcagaagagtaagccttctggacgaaggaatttacacctgctatgtaggaacagcaattcaagtgattacaaacaaagtggtgctaaaggtgggagtttttctcacacccgtgatgaagtatgaaaagaggaacacaaacagcttcttaatatgcagcgtg

SEQ ID NO: 140362 - DNA, 2548 bp, Homo sapiens
  Payload ID: 7537
  Gene Symbol: HHLA2
  Gene Name: HERV-H LTR-associating 2
  Uniprot ID: Q9UM44
  ENST ID: ENST00000619531
  CDS Start-End: 302-1546
aaatcaaacgtaccttggactttactctctgagaaactcatagctgaattcaatgtttattcttatggactacttagcatttgactagacggtatgaatttctaagtaagcacatatagaactggatgcccttgtggtacatctcaaggctgatttgaaagcttgagagaccatcaagaattggatttggggaagagcatgtaggagaatactaaccctgcacagattgtgatggtgatgtggaatatactaaagcctagaacgcacctcctctgcatgactaatatgttctgcacaagacatgaaggcacagacagcactgtctttcttcctcattctcataacatctctgagtggatctcaaggcatattccctttggctttcttcatttatgttcctatgaatgaacaaatcgtcattggaagacttgatgaagatataattctcccttcttcatttgagaggggatccgaagtcgtaatacactggaagtatcaagatagctataaggttcacagttactacaaaggcagtgaccatttggaaagccaagatcccagatatgcaaacaggacatcccttttctataatgagattcaaaatgggaatgcgtcgctatttttcagaagagtaagccttctggacgaaggaatttacacctgctatgtaggaacagcaattcaagtgattacaaacaaagtggtgctaaaggtgggagtttttctcacacccgtgatgaagtatgaaaagaggaacacaaacagcttcttaatatgcagcgtgttaagtgtttatcctcgtccaattatcacgtggaaaatggacaacacacctatctctgaaaacaacatggaagaaacagggtctttggattctttttctattaacagcccactgaatattacaggatcaaattcatcttatgaatgtacaattgaaaattcactgctgaagcaaacatggacagggcgctggacgatgaaagatggccttcataaaatgcaaagtgaacacgtttcactctcatgtcaacctgtaaatgattatttttcaccaaaccaagacttcaaagttacttggtccagaatgaaaagtgggactttctctgtcctggcttactatctgagctcctcacaaaatacaattatcaatgaatcccgattctcatggaacaaagagctgataaaccagagtgacttctctatgaatttgatggatcttaatctttcagacagtggggaatatttatgcaatatttcttcggatgaatatactttacttaccatccacacagtgcatgtagaaccgagccaagaaacagcttcccataacaaaggcttatggattttggtgccctctgcgattttggcagcttttctgctgatttggagcgtaaaatgttgcagagcccagctagaagccaggaggagcagacaccctgctgatggagcccaacaagaaagatgttgtgtccctcctggtgagcgctgtcccagtgcacccgataatggcgaagaaaatgtgcctctttcaggaaaagtataggaaatgagagaagactgtgacaactcatgacctgcatccttaatatccagtgacttcatctcccctttcttcaccacaattccaggcaatggcctgtcggagcagacaattctaccactgcaaagagttgtaaccattttctggtatcacatttatttttcaagacatacttttcaagacatcattcactgacccactacctgcattgagtataaatgcctggatgttaaggattccaatttaactttgaaaagaactgtctcattcatttacatttctgttacagtcagcccaggaggttacagtgagctctccactaagaatctggaagaaatgcatcactaggggttgattcccaatctgatcaactgataatgggtgagagagcaggtaagagccaaagtcaccttagtggaaaggttaaaaaccagagcctggaaaccaagatgattgatttgacaaggtattttagtctagttttatatgaacggttgtatcagggtaaccaactcgatttgggatgaatcttagggcaccaaagactaagacagtatctttaagattgctagggaaaagggccctatgtgtcaggcctctgagcccaagccaagcatcgcatcccctgtgatttgcacgtatacatccagatggcctaaagtaactgaagatccacaaaagaagtaaaaatagccttaactgatgacattccaccattgtgatttgttcctgccccaccctaactgatcaatgtactttgtaatctcccccacccttaagaaggtactttgtaatcttccccacccttaagaaggttctttgtaattctccccacccttgagaatgtactttgtgagatccaccctgcccacaaaacattgctcttaacttcaccgcctaacccaaaacctataagaactaatgataatccatcacccttcgctgactctcttttcggactcagcccacctgcacccaggtgaaataaacagctttattgctcac

SEQ ID NO: 140363 - DNA, 898 bp, Homo sapiens
  Payload ID: 7538
  Gene Symbol: HHLA3
  Gene Name: HERV-H LTR-associating 3
  Uniprot ID: Q9XRX5
  ENST ID: ENST00000359875
  CDS Start-End: 141-485
gaatcactaggcgccggcgcctccgaggcagtgtgtttccgcccagagctggagtctcccagctgccagccgaccccgaacccgcactcccgccaaccgcgctttttgtgggcggtcggaaaccacagcctccgttggatatgttcggtgcatgttataaacaaccacttaaaccctccggatctgagcctcccgcagaggaatgcagaatgacgccacggcacgcaggatgtgatgtcaccgagatgcagaggatactcagtcaaccaacatttactgagcatctacttcgtgccgtatgtacgaagctagcaaatatgtacagcaccagtactgattgcagggagcactgtagaagaggaatgaaggccaaacaattaaaagcggaggcggggaggtcttgtcaacggaaaggggtccctatccagaccccaagagagcattcttggatctcttgcaagaaagaatttgaggcgaatccatagagtaagcttagtgatgtgtgtcagacctctgagcccaagcaaagccatcatatcccctgtgacctgcatgtatacatccagatggcctgaagcaagtgaagaatcacaaaagaagtgaaaagggccggttcctgccttaactgatgacattccaccattgtgatttgttcctgccccaccttaactgagcgattaacctgtgaacttccttctcctggctcagaagcttccccactgagcaccttgtgacccccgcccctgcctgccatagaacaaccccctttgattgtaattttcctttacctacccaaatcctataaaacggccccacccctatctcccttcgctgacactctctttggactcagcctgcctgcacctaggtgattaaaaagctttattgctcacgcaaa

SEQ ID NO: 140364 - DNA, 692 bp, Homo sapiens
  Payload ID: 7538
  Gene Symbol: HHLA3
  Gene Name: HERV-H LTR-associating 3
  Uniprot ID: Q9XRX5
  ENST ID: ENST00000361764
  CDS Start-End: 148-378
attcccagaatcactaggcgccggcgcctccgaggcagtgtgtttccgcccagagctggagtctcccagctgccagccgaccccgaacccgcactcccgccaaccgcgctttttgtgggcggtcggaaaccacagcctccgttggatatgttcggtgcatgttataaacaaccacttaaaccctccggatctgagcctcccgcagaggaatgcagaatgacgccacggcacgcaggatgtgatgtcaccgagatgcagaggatactcagtcaaccaacatttactgagcatctacttcgtgccgtcttgtcaacggaaaggggtccctatccagaccccaagagagcattcttggatctcttgcaagaaagaatttgaggcgaatccatagagtaagcttagtgatgtgtgtcagacctctgagcccaagcaaagccatcatatcccctgtgacctgcatgtatacatccagatggcctgaagcaagtgaagaatcacaaaagaagtgaaaagggccggttcctgccttaactgatgacattccaccattgtgatttgttcctgccccaccttaactgagcgattaacctgtgaacttccttctcctggctcagaagcttccccactgagcaccttgtgacccccgcccctgcctgccatagaacaaccccctttgattgtaattttccttt

SEQ ID NO: 140365 - DNA, 775 bp, Homo sapiens
  Payload ID: 7538
  Gene Symbol: HHLA3
  Gene Name: HERV-H LTR-associating 3
  Uniprot ID: Q9XRX5
  ENST ID: ENST00000370940
  CDS Start-End: 117-482
gaggcagtgtgtttccgcccagagctggagtctcccagctgccagccgaccccgaacccgcactcccgccaaccgcgctttttgtgggcggtcggaaaccacagcctccgttggatatgttcggtgcatgttataaacaaccacttaaaccctccggatctgagcctcccgcagaggaatgcagaatgacgccacggcacgcaggatgtgatgtcaccgagatgcagaggatactcagtcaaccaacatttactgagcatctacttcgtgccgtatgtcttgtcaacggaaaggggtccctatccagaccccaagagagcattcttggatctcttgcaagaaagaatttgaggcgaatccatagagtaagcttagtgatgtgtgtcagacctctgagcccaagcaaagccatcatatcccctgtgacctgcatgtatacatccagatggcctgaagcaagtgaagaatcacaaaagaagtgaaaagggccggttcctgccttaactgatgacattccaccattgtgatttgttcctgccccaccttaactgagcgattaacctgtgaacttccttctcctggctcagaagcttccccactgagcaccttgtgacccccgcccctgcctgccatagaacaaccccctttgattgtaattttcctttacctacccaaatcctataaaacggccccacccctatctcccttcgctgacactctctttggactcagcctgcctgcacctaggtgattaaaaagctttattgctcacgca

SEQ ID NO: 140366 - DNA, 541 bp, Homo sapiens
  Payload ID: 7538
  Gene Symbol: HHLA3
  Gene Name: HERV-H LTR-associating 3
  Uniprot ID: Q9XRX5
  ENST ID: ENST00000531950
  CDS Start-End: 109-453
gtgtttccgcccagagctggagtctcccagctgccagccgaccccgaacccgcactcccgccaaccgcgctttttgtgggcggtcggaaaccacagcctccgttggatatgttcggtgcatgttataaacaaccacttaaaccctccggatctgagcctcccgcagaggaatgcagaatgacgccacggcacgcaggatgtgatgtcaccgagatgcagaggatactcagtcaaccaacatttactgagcatctacttcgtgccgtatgtacgaagctagcaaatatgtacagcaccagtactgattgcagggagcactgtagaagaggaatgaaggccaaacaattaaaagcggaggcggggaggtcttgtcaacggaaaggggtccctatccagaccccaagagagcattcttggatctcttgcaagaaagaatttgaggcgaatccatagagtaagatggagttttgctcttgttgcccaggttggagtgcagtggtgtgatcttgactcactgaaacctccgcctcctgagttcaag

SEQ ID NO: 140367 - DNA, 832 bp, Homo sapiens
  Payload ID: 7538
  Gene Symbol: HHLA3
  Gene Name: HERV-H LTR-associating 3
  Uniprot ID: Q9XRX5
  ENST ID: ENST00000463058
  CDS Start-End: 124-354
cgcctccgaggcagtgtgtttccgcccagagctggagtctcccagctgccagccgaccccgaacccgcactcccgccaaccgcgctttttgtgggcggtcggaaaccacagcctccgttggatatgttcggtgcatgttataaacaaccacttaaaccctccggatctgagcctcccgcagaggaatgcagaatgacgccacggcacgcaggatgtgatgtcaccgagatgcagaggatactcagtcaaccaacatttactgagcatctacttcgtgccgtcttgtcaacggaaaggggtccctatccagaccccaagagagcattcttggatctcttgcaagaaagaatttgaggcgaatccatagagtaagcaaggcaagttacttctatatagaagggtgcacccttacagatcaaacaatgcttagtgatgtgtgtcagacctctgagcccaagcaaagccatcatatcccctgtgacctgcatgtatacatccagatggcctgaagcaagtgaagaatcacaaaagaagtgaaaagggccggttcctgccttaactgatgacattccaccattgtgatttgttcctgccccaccttaactgagcgattaacctgtgaacttccttctcctggctcagaagcttccccactgagcaccttgtgacccccgcccctgcctgccatagaacaaccccctttgattgtaattttcctttacctacccaaatcctataaaacggccccacccctatctcccttcgctgacactctctttggactcagcctgcctgcacctaggtgattaaaaagctttattgctcacgcaaa

SEQ ID NO: 140368 - DNA, 689 bp, Homo sapiens
  Payload ID: 7538
  Gene Symbol: HHLA3
  Gene Name: HERV-H LTR-associating 3
  ENST ID: ENST00000525653
  CDS Start-End: 98-322
cagagctggagtctcccagctgccagccgaccccgaacccgcactcccgccaaccgcgctttttgtgggcggtcggaaaccacagcctccgttggatatgttcggtgcatgttataaacaaccacttaaaccctccggatctgagcctcccgcagaggaatgcagaatgacgccacggcacgcaggatgtgatgtcaccgagatgcagaggatactcagtcaaccaacatttactgagcatctacttcgtgccattgactcttttcgccgacaccttgtatttcgtctggcaaccttactcacccctcaaccatttgtttgagttgtttagagttatggatatagttaaagtacgaagccaaatgtgtgggaataataacgccaaattcaagatagtggtttcaatggagcacgaaggagaaaaacaccatcaggggtcttgtcaacggaaaggggtccctatccagaccccaagagagcattcttggatctcttgcaagaaagaatttgaggcgaatccatagagtaagcaaggcaagttacttctatatagaagggtgcacccttacagatcaaacaatgcttagtgatgtgtgtcagacctctgagcccaagcaaagccatcatatcccctgtgacctgcatgtatacatccagatggcctgaagcaagtgaagaatcacaaaaga

SEQ ID NO: 140369 - DNA, 1578 bp, Homo sapiens
  Payload ID: 7539
  Gene Symbol: HES1
  Gene Name: hes family bHLH transcription factor 1
  Uniprot ID: Q14469
  ENST ID: ENST00000232424
  CDS Start-End: 237-1079
atcacacaggatccggagctggtgctgataacagcggaatcccccgtctacctctctccttggtcctggaacagcgctactgatcaccaagtagccacaaaatataataaaccctcagcacttgctcagtagttttgtgaaagtctcaagtaaaagagacacaaacaaaaaattctttttcgtgaagaactccaaaaataaaattctctagagataaaaaaaaaaaaaaaaggaaaatgccagctgatataatggagaaaaattcctcgtccccggtggctgctaccccagccagtgtcaacacgacaccggataaaccaaagacagcatctgagcacagaaagtcatcaaagcctattatggagaaaagacgaagagcaagaataaatgaaagtctgagccagctgaaaacactgattttggatgctctgaagaaagatagctcgcggcattccaagctggagaaggcggacattctggaaatgacagtgaagcacctccggaacctgcagcgggcgcagatgacggctgcgctgagcacagacccaagtgtgctggggaagtaccgagccggcttcagcgagtgcatgaacgaggtgacccgcttcctgtccacgtgcgagggcgttaataccgaggtgcgcactcggctgctcggccacctggccaactgcatgacccagatcaatgccatgacctaccccgggcagccgcaccccgccttgcaggcgccgccaccgcccccaccgggacccggcggcccccagcacgcgccgttcgcgccgccgccgccactcgtgcccatccccgggggcgcggcgccccctcccggcggcgccccctgcaagctgggcagccaggctggagaggcggctaaggtgtttggaggcttccaggtggtaccggctcccgatggccagtttgctttcctcattcccaacggggccttcgcgcacagcggccctgtcatccccgtctacaccagcaacagcggcacctccgtgggccccaacgcagtgtcaccttccagcggcccctcgcttacggcggactccatgtggaggccgtggcggaactgagggggctcaggccacccctcctcctaaactccccaacccacctctcttccctccggactctaaacaggaacttgaatactgggagagaagaggacttttttgattaagtggttactttgtgtttttttaatttctaagaagttactttttgtagagagagctgtattaagtgactgaccatgcactatatttgtatatattttatatgttcatattggattgcgcctttgtattataaaagctcagatgacatttcgttttttacacgagatttcttttttatgtgatgccaaagatgtttgaaaatgctcttaaaatatcttcctttggggaagtttatttgagaaaatataataaaagaaaaaagtaaaggcttttatgtcttcgaactgattcttccagaatatgtaaaaaggcttttggtggaatttgaattacatgtaattggtaattcaggaattgactcttttgttattaaaagaacatttgtaaaaatcca

SEQ ID NO: 140370 - DNA, 4262 bp, Homo sapiens
  Payload ID: 7540
  Gene Symbol: HES2
  Gene Name: hes family bHLH transcription factor 2
  Uniprot ID: Q9Y543
  ENST ID: ENST00000377834
  CDS Start-End: 100-621
actcgtctggcaccagcccgggccgcgcccgggacctcatttcggacctcggtttccctttgcgtggggctcgcagctgccaccgcttccccgcggagcatggggctgcctcgccgggcaggggacgcggcggagctgcgcaagagcctgaagccgctgctggagaagcgccggcgcgcgcgcatcaaccagagcctgagccagcttaaggggctcatcctgccgctgctgggccgggagaactccaactgctcgaagctagagaaggcagacgtcctggaaatgaccgtgcgcttcctgcaggagctgcctgcgtcctcatggcccacggcagcgcccctgccttgcgacagctaccgcgagggctacagcgcctgtgtggcgcgcctggcccgcgtgctgcccgcctgccgtgtcctggagcccgccgtgagcgcgcgcctgctggagcacctgtggcggagagcggccagcgccaccctggacggcgggcgcgctggggattccagtggcccgtctgcccccgccccagcgcccgcgtctgccccagagcccgcatccgctccggtgccctcgccgccctcgcctccctgcggccctggcctctggcggccgtggtagcccctcggccgatccacagaccctgccgactgcttgggaccttggggcactggacaggttgaagctcttggtggcggctgctgttcccatcattaggggccagcccagtacccacacccaggccggaagccggctgtttgtgactggcgtggcagactgaaagccctggggctggggctcggctcagggaataaaaggagcgtccctgcttcacccccaacttggctggagaagaaaggacaagaggcagcagggtgaagaagaagccccccatcccagctggtggagatagttctggaactggaccccgcagctgcgtgggcagccgacacacccaccccagcactggcaccagaccagagccagagccaggacctgggcaaagtgcagccgtgcaccctgcctggtcactgctctcccagccctgcctgggcctacctcctgcccagctctgcttgggaccctctgggcatgcagcagcagtagcctaagggctctggtcacttccagggctctacagggcagcagagcagagcaaaagggtgcatatgctgggagctgtcacctccactcctaggcttttctgcctagagcagaattataggggcagtatacatccaggggtctgtgcggtggggctgggggattccttaagtgactttgggaaggatttgttttcccgagcatcaatttcacacctgggcattgcaccccaggctatgcagtctttcagtgtgaggaaggggcagaacaagaatgaggcggccccgtggcctcaaggaagcttgtggctttggaggatctgactccagcagagtctgtgccaatgtggggtgagcagggcccctgccatggagcagcaggaatttgagggatggagcaggttaaagaatgggaaacatcttcacttgtttttttttcttgcaaactactccctgctactcattgagactggttactggaagcaacttgttaagatttttctttctgggcgggcgcggtggctcacgcctgtaatcccagcactttgggaggccaaggcgggtggatcacctgaggtcaggagttcgagaccagcttagccaatatggtgaaaccccgtctctactaaaaatacaaaaattagccgggtgtggtggcatgtgccagctactcgggaggctgaggcaagagaatcacttgaacctcggaggctgaagttgcagtgagccaagattgagccattgctctccagcctgggtgacacagcaagactctgtctcaaaaaaaattttttatttctttcttttccatggaggcctagagtccctgtgaaggctaggaaggggctgctgatcccaggagtgcccacgaggagtggggggcactgttggcccataatcaggcaaacacccatcatttcatgggggattcatgaaatcatagtcaggcaaacacccgtcatttcatggctaagcatttgcagaaggtggaggattctcccccgagtccccaaatcagcagcctgtgctagggaccagagcaccgggggcaagaagacagaaccaatgtgggagtggggatggtcactaaatctgactgtgccacacaagcccatgatgaccttggcactggtttgggtggcaggatatgaaggaagctgtaggcattattgaaaaaatcattgttcagccaacagggtgaggctcccagcaaggccgtgccatcttcccacctccctgtgcccagagggttagactgtaagctcccggagggcgaggctggggctgagcgtgcctccacgtccccaaggcacagggtgcacagtgggtgctcactgaatatagtggactagtgagcagaggatgagaggactaccctgtaatgagccttggacagtctggcatttgccttaactcccactcccatgccctgggatcactgttggatatttactccatgaggacaaatactggggaggtgtggagaggagggagggcaggttcctcttactttcacccattgctgagaatgagcgcctgttggcactgcctttgtgagcctccgggagcaggtaacctgcggcccaagcccgcctaggactccacatcaggcaggcacaggactggccccttgtcctcataaaaactctcagtacagcttaaactctgtaagatctaaccagccaggaggaccctcgcttcctctccgccatgcttgccacctcttgcttctgagagtccatctcagttcgcagttctgtgacttgcattgacctggctccaatcaagctacaactcaagcagtcacggggagaaggattgtagatgggccagtgactcacagggtcaggcactcgggggagcctgagtcaggaggtcagtgggccctggaagggagggggcaagcctgggtgggtaaggttctgggccccaggcaagaaggcagagtttctccgcaggggtgtgtgcaagagctagctgcgcagaaggtctccgctggctctccaagccgggcttgtgaaataggaacgccaacatcctcctccacaggcagtggcaggcacctcctcctcaggtgccccccaagccctatctgatgggcaaaggtgaacgcagggcggtgggcttttcctgtgcagagggagactgattcaaagggtcatttatgacctttcacaagtcccacatcctgcccaatggccaggtcttgggatgctgttgcaagatggttctgtgactccatgtgactgtctgatgattgccccagctggggaaaaggctcccatgtctctttctcataaaaccagtgggcaaggccgggcgcagtggctcacgtctgtaatgccagcacttcgggagaccaaggtgggcggatcacctgaggtcaggagttcaagaccagcctgaccaacatggtgaaaccccgtctctacaaaaatatggaaattagctgggcatgacggcgggtgcctgtaaccccagctacttgggaggctgaggagggataatcagttgaacccaggaggtggaggttgcagtgagccgagatcgcgccactgcactccagcctgggtgacagagcaagactccatctcaaaaacaaacaaacaaaaaactagcgggtgaaatgattcagtgacctaaggacagccagagcactaagctgctgggaacccatctgtgctgaaatgtagatttcccaggaaactcaggcttgggacaggcgcctacctgctcctcgggcaccaggtgattaggagaggtcgaatctcatttccacgtgagtgaggataaagactgggctgccaaggaggactcctcataaacattgacaaattgctctgccccgcctgtgatcccagacgactcctgcagtctgggatcctgagtgtcctgtgggttcatctcggatgggcgctgcataaacagcctgcagggaacgtctgggagaaccagcttcacaacagatataataaggaagaagtttgaaatattgcaagaattgcgaaagtgtgacacacagatacaaagtgggcacatgctcgtgggaaaatgttgccaatagacttgcttgactctggagttaccccgaaccttcaatttgtttaaaaaaaaaaaaaggcaatatcttgacgtgcaataaagtgaactgcaataaaa

SEQ ID NO: 140371 - DNA, 507 bp, Homo sapiens
  Payload ID: 7540
  Gene Symbol: HES2
  Gene Name: hes family bHLH transcription factor 2
  Uniprot ID: Q9Y543
  ENST ID: ENST00000377836
  CDS Start-End: 84-314
cccgggccgcgcccgggacctcatttcggacctcggtttccctttgcgtggggctcgcagctgccaccgcttccccgcggagcatggggctgcctcgccgggcaggggacgcggcggagctgcgcaagagcctgaagccgctgctggagaagcgccggcgcgcgcgcatcaaccagagcctgagccagcttaaggggctcatcctgccgctgctgggccgggaggatgcttctggctggcacacctggcttcccctccatgctcagaactgcttcctactctacatccaggctcctgagcagcccccagcttaagcttcagcagctccagggtaaatccatctccgcccagagctgactccggatctgccccagtgacaataacaagataaatgccttccattctcttcgtacttacaggatgtaatccacatatttacacagtgtttcatttgcggtaatgtttgttttgtttcttgttccttcgtacctatctgggaagcctgtg

SEQ ID NO: 140372 - DNA, 1222 bp, Homo sapiens
  Payload ID: 7540
  Gene Symbol: HES2
  Gene Name: hes family bHLH transcription factor 2
  Uniprot ID: Q9Y543
  ENST ID: ENST00000377837
  CDS Start-End: 217-447
cgcggggacactcgtgcgactggggcaaggtgcccaggggcttctctcctaatttgcctcacgtaacagttgagaccccagagggcagcaaaactgggttcgaattggagagccgtccaggcacagacaaattcattcatctgcccagtgcccgctaactgcggttccaggcgccggcgacgcaattccagagctgccaccgcttccccgcggagcatggggctgcctcgccgggcaggggacgcggcggagctgcgcaagagcctgaagccgctgctggagaagcgccggcgcgcgcgcatcaaccagagcctgagccagcttaaggggctcatcctgccgctgctgggccgggaggatgcttctggctggcacacctggcttcccctccatgctcagaactgcttcctactctacatccaggctcctgagcagcccccagcttaagcttcagcagctccagggtaaatccatctccgcccagagctgactccggatctgccccagtgacaataacaagataaatgccttccattctcttcgtacttacaggatgtaatccacatatttacacagtgtttcatttgcggtaatgtttgttttgtttcttgttccttcgtacctatctgggaagcctgtgcaattcagatgtccaggcccacttccagaagttctcattccctgtgcttgagtcaatggccgcagaccatacacctgagagcaagttaatctgctctaacaaagatatcacatctaagaatggtggttggcaggggctggggggtgggaagaatggggagttggtgcttcatgggtacagagattcagttttgcaagaggaaaagagctctggagatggatgctgctgatggctacaccgcaatgtgaatgtgcatgatgcttaaatatggttaagatgggccgggcgcggtggctcacgcctgtaatcccagcactttgggaggccgaggcgggcagatcacgaggtcaggagatcgagaccatcttggctaacacggtgaaaccccatctctactataaatacaaaaaattagccgggcgtgggggcgggcacctgtggtcccagctactcgggaggctgaggcaggagaatggcatgaacctgggaggtggagcttgcagtgagccgagatcacgccactgcactccaggctgggcgacagagcgagactccgtctcaaaaaaaaaaaaaaaaaaaaaa

SEQ ID NO: 140373 - DNA, 968 bp, Homo sapiens
  Payload ID: 7540
  Gene Symbol: HES2
  Gene Name: hes family bHLH transcription factor 2
  ENST ID: ENST00000487437
  CDS Start-End: 88-321
ccagcccgggccgcgcccgggacctcatttcggacctcggtttccctttgcgtggggctcgcagctgccaccgcttccccgcggagcatggggctgcctcgccgggcaggggacgcggcggagctgcgcaagagcctgaagccgctgctggagaagcgccggcgcgcgcgcatcaaccagagcctgagccagcttaaggggctcatcctgccgctgctgggccgggagtgccttgcgacagctaccgcgagggctacagcgcctgtgtggcgcgcctggcccgcgtgctgcccgcctgccgtgtcctggagcccgccgtgagcgcgcgcctgctggagcacctgtggcggagagcggccagcgccaccctggacggcgggcgcgctggggattccagtggcccgtctgcccccgccccagcgcccgcgtctgccccagagcccgcatccgctccggtgccctcgccgccctcgcctccctgcggccctggcctctggcggccgtggtagcccctcggccgatccacagaccctgccgactgcttgggaccttggggcactggacaggttgaagctcttggtggcggctgctgttcccatcattaggggccagcccagtacccacacccaggccggaagccggctgtttgtgactggcgtggcagactgaaagccctggggctggggctcggctcagggaataaaaggagcgtccctgcttcacccccaacttggctggagaagaaaggacaagaggcagcagggtgaagaagaagccccccatcccagctggtggagatagttctggaactggaccccgcagctgcgtgggcagccgacacacccaccccagcactggcaccagaccagagccagagccaggacctgggcaaagtgcagccgtgcaccctgcctggtcactgctctcccagccctgcctgggcctacctcctgcccagctctgcttgg

SEQ ID NO: 140374 - DNA, 730 bp, Homo sapiens
  Payload ID: 7540
  Gene Symbol: HES2
  Gene Name: hes family bHLH transcription factor 2
  ENST ID: ENST00000489730
  CDS Start-End: 98-346
tcgtctggcaccagcccgggccgcgcccgggacctcatttcggacctcggtttccctttgcgtggggctcgcagctgccaccgcttccccgcggagcatggggctgcctcgccgggcaggggacgcggcggagctgcgcaagagcctgaagccgctgctggagaagcgccggcgcgcgcgcatcaaccagagcctgagccagcttaaggggctcatcctgccgctgctgggccgggagaactccaactgctcgaagctagagaaggcagacgtcctggaaatgaccgtgcgcttcctgcaggagctgcctgcgtcctcatggcccacggcagcgccccgtgagtgagccctccctgccctgccgcgcgctctgcaccccgcacccggcaccctaccccgcgcctcacgcggctctccgcccgcagtgccttgcgacagctaccgcgagggctacagcgcctgtgtggcgcgcctggcccgcgtgctgcccgcctgccgtgtcctggagcccgccgtgagcgcgcgcctgctggagcacctgtggcggagagcggccagcgccaccctggacggcgggcgcgctggggattccagtggcccgtctgcccccgccccagcgcccgcgtctgccccagagcccgcatccgctccggtgccctcgccgccctcgcctccctgcggccctggcctctggcggccgtggtagcccctcggccgatccacagaccct

SEQ ID NO: 140375 - DNA, 697 bp, Homo sapiens
  Payload ID: 7541
  Gene Symbol: HES3
  Gene Name: hes family bHLH transcription factor 3
  Uniprot ID: Q5TGS1
  ENST ID: ENST00000377898
  CDS Start-End: 66-626
tgggcacggagcctgctgcccggggcagcctccccggcaacttccgaaagatttccaagccgctgatggagaaaaagcgccgggcacgcatcaatgtgtcactggagcagctcaagtcgctgctggagaaacactactcgcaccagatccggaagcgcaaattggagaaggccgacatcctggagttgagcgtgaagtacatgagaagccttcagaactccttgcaagggctctggcctgtgcccaggggagccgagcaaccgtcgggcttccgcagctgcctgcccggcgtgagccagctccttcggcgcggagatgaggtcggcagcggcctgcgctgccccctggtgcccgagagcgccgccggcagcaccatggacagcgccgggttgggccaggaggcgcccgcgctgttccgcccttgcacccctgccgtctgggctcctgctccggccgccggcggcccgcggtccccaccacccctgctcctcctccccgaaagtctccctggctcgtccgccagcgtccccccgccgcagccagcgtcgagtcgctgcgccgagagtcccgggctgggcctgcgcgtgtggcggccctggggaagccccggggatgacctgaactgaaggcgctccctatttggtctcgcgacacagggactattttcagcacgcccacagtgactgccaggaccccc

SEQ ID NO: 140376 - DNA, 899 bp, Homo sapiens
  Payload ID: 7542
  Gene Symbol: HES4
  Gene Name: hes family bHLH transcription factor 4
  Uniprot ID: Q9HCC6
  ENST ID: ENST00000304952
  CDS Start-End: 139-804
ggcctgaggcgcgcgcgggcctggagccgggatccgccctaggggctcggatcgccgcgcgctcgccgctcgcccgccagcccgcccgtggtccgtggcggcgcgctccacccggcacggggaggcgcggggcgcaccatggccgcagacacgccggggaaaccgagcgcctcgccgatggcaggagcgccggccagcgccagccggaccccagacaagccccggagcgcggccgagcaccgcaagtcctccaagccggtcatggagaagcggcgccgagcgcgtattaacgagagcctcgctcagctcaaaaccctcatcctggacgccctcagaaaagagagctcccgccactcgaagctggagaaggcggacatcctggagatgaccgtgagacacctgcggagcctgcgtcgcgtgcaggtgacggccgcgctcagcgccgaccccgccgttctgggcaagtaccgcgccggcttccacgagtgtctggcggaggtgaaccgcttcctggccggctgcgagggcgtcccggccgacgtgcgctcccgcctgctgggccacctggcagcctgcctgcgccagctgggaccctcccgccgcccggcctcgctgtccccggctgcccccgcagaggccccagcgcccgaggtctacgcgggccgcccgctgctgccatcgctcggcggccccttccctctgctcgcgccgccgctgctgccgggtctgacccgggcgctgcccgccgcccccagggcggggccgcagggcccgggtgggccctggaggccgtggctgcgctgaggctgtggccctgagactgcatcggaggcggcgccccgttctagggccgtggcctttgccgagactgtagcagagaaaacgtatttattattcca

SEQ ID NO: 140377 - DNA, 1040 bp, Homo sapiens
  Payload ID: 7542
  Gene Symbol: HES4
  Gene Name: hes family bHLH transcription factor 4
  ENST ID: ENST00000428771
  CDS Start-End: 200-943
gggaaagaatgcggagccgggttcacacaccccgcggcggcgaggccttaaatagggaaacggcctgaggcgcgcgcgggcctggagccgggatccgccctaggggctcggatcgccgcgcgctcgccgctcgcccgccagcccgcccgtggtccgtggcggcgcgctccacccggcacggggaggcgcggggcgcaccatggccgcagacacgccggggaaaccgagcgcctcgccgatggcaggagcgccggccagcgccagccggaccccagacaagccccggagcgcggccgagcaccgcaaggtggggtcccggccgggcgtgaggggggcgaccggggggcgggagggacgcgggactcagccggtgcccgacccgcagtcctccaagccggtcatggagaagcggcgccgagcgcgtattaacgagagcctcgctcagctcaaaaccctcatcctggacgccctcagaaaagagagctcccgccactcgaagctggagaaggcggacatcctggagatgaccgtgagacacctgcggagcctgcgtcgcgtgcaggtgacggccgcgctcagcgccgaccccgccgttctgggcaagtaccgcgccggcttccacgagtgtctggcggaggtgaaccgcttcctggccggctgcgagggcgtcccggccgacgtgcgctcccgcctgctgggccacctggcagcctgcctgcgccagctgggaccctcccgccgcccggcctcgctgtccccggctgcccccgcagaggccccagcgcccgaggtctacgcgggccgcccgctgctgccatcgctcggcggccccttccctctgctcgcgccgccgctgctgccgggtctgacccgggcgctgcccgccgcccccagggcggggccgcagggcccgggtgggccctggaggccgtggctgcgctgaggctgtggccctgagactgcatcggaggcggcgccccgttctagggccgtggcctttgccgagactgtagcagagaaaacgtatttattattccaga

SEQ ID NO: 140378 - DNA, 667 bp, Homo sapiens
  Payload ID: 7542
  Gene Symbol: HES4
  Gene Name: hes family bHLH transcription factor 4
  ENST ID: ENST00000484667
  CDS Start-End: 9-578
ggcgcaccatggccgcagacacgccggggaaaccgagcgcctcgccgatggcaggagcgccggccagcgccagccggaccccagacaagccccggagcgcggccgagcaccgcaagagctcccgccactcgaagctggagaaggcggacatcctggagatgaccgtgagacacctgcggagcctgcgtcgcgtgcaggtgacggccgcgctcagcgccgaccccgccgttctgggcaagtaccgcgccggcttccacgagtgtctggcggaggtgaaccgcttcctggccggctgcgagggcgtcccggccgacgtgcgctcccgcctgctgggccacctggcagcctgcctgcgccagctgggaccctcccgccgcccggcctcgctgtccccggctgcccccgcagaggccccagcgcccgaggtctacgcgggccgcccgctgctgccatcgctcggcggccccttccctctgctcgcgccgccgctgctgccgggtctgacccgggcgctgcccgccgcccccagggcggggccgcagggcccgggtgggccctggaggccgtggctgcgctgaggctgtggccctgagactgcatcggaggcggcgccccgttctagggccgtggcctttgccgagactgtagcagagaaaacgtatttatt

SEQ ID NO: 140379 - DNA, 1306 bp, Homo sapiens
  Payload ID: 7543
  Gene Symbol: HES5
  Gene Name: hes family bHLH transcription factor 5
  Uniprot ID: Q5TA89
  ENST ID: ENST00000378453
  CDS Start-End: 82-582
cgcgcttggccttgcccgcgcccgctcgcctcgtctcgcccggcctccccgcgtcgcctcgtcgcctgttccgcgccaggcatggcccccagcactgtggccgtggagctgctcagccccaaagagaaaaaccgactgcggaagccggtggtggagaagatgcgccgcgaccgcatcaacagcagcatcgagcagctgaagctgctgctggagcaggagttcgcgcggcaccagcccaactccaagctggagaaggccgacatcctggagatggctgtcagctacctgaagcacagcaaagccttcgtcgccgccgccggccccaagagcctgcaccaggactacagcgaaggctactcgtggtgcctgcaggaggccgtgcagttcctgacgctccacgccgccagcgacacgcagatgaagctgctgtaccacttccagcggcccccggccgcgcccgccgcgcccgccaaggagcccaaggcgccgggcgccgcgcccccgcccgcgctctccgccaaggccaccgccgccgccgccgccgcgcaccagcccgcctgcggcctctggcggccctggtgacccggcgggacctgcgggcgcgcggcccgacgaccagagggcgagcctgctcctctcgcctgtagggaagcgccttcccgccgtcgtccgccccgggcttggacgcgcccttctccggaaggctctggccccaagctggccggcccgcaggagccccattctcagagaatgtgtgtgcagagtccctgccgttttaggacaatcagggcccatcttctgccaagtgtctgaccccatggggttgttctgtgtttgcatttaagcaagtgacttctgggaagtccccggccgcccggggttctatgatatttgtagtgccggggctcgcacactgctgcccccagcctgtagaggactttcttcagggcccgtagctgctgggcgtacccctggcaggcgggctgtgccgcgggcacatttgccttttgtgaaggccgaactcgagctgtatcctcataggaaacagtgatcaccccggacgggcgtccaggaccctgagggccatggccaaaaggctcctgagtgtgcctggtggtctggctggggctcacggtgggctgtctggggagggtgggtgcctccactatgatccttaaaggattcctctgtgtgggtggatgcgtgtgggcacgactttgtactcagaaattgaactctcagtcacgtggaagccacgggactgctccgaagccgccataataaaatctgattgttcagcccccaa

SEQ ID NO: 140380 - DNA, 1306 bp, Homo sapiens; identical to SEQ ID NO: 140379
  Payload ID: 7543
  Gene Symbol: HES5
  Gene Name: hes family bHLH transcription factor 5
  Uniprot ID: Q5TA89
  ENST ID: ENST00000612705
  CDS Start-End: 82-582

SEQ ID NO: 140381 - DNA, 1454 bp, Homo sapiens
  Payload ID: 7544
  Gene Symbol: HES6
  Gene Name: hes family bHLH transcription factor 6
  Uniprot ID: Q96HZ4
  ENST ID: ENST00000272937
  CDS Start-End: 220-894
gtcggccgccccgggcccgcgcggccaatcggcgcattgagatgcaaataagcggctataaaaggggcgggaccgcggcgggccggaagccgcgaggagcgcggacggctgggctgctgctgggcggccgcggggcagcggagggcgccggcactccggtccccgccgctccccgtccccgctgctcctagcccctgccgcgtccccggcggagcgggcatggcgccacccgcggcgcctggccgggaccgtgtgggccgtgaggatgaggacggctgggagacgcgaggggaccgcaaggcccggaagcccctggtggagaagaagcggcgcgcgcggatcaacgagagcctgcaggagctgcggctgctgctggcgggcgccgaggtgcaggccaagctggagaacgccgaagtgctggagctgacggtgcggcgggtccagggtgtgctgcggggccgggcgcgcgagcgcgagcagctgcaggcggaagcgagcgagcgcttcgctgccggctacatccagtgcatgcacgaggtgcacacgttcgtgtccacgtgccaggccatcgacgctaccgtcgctgccgagctcctgaaccatctgctcgagtccatgccgctgcgtgagggcagcagcttccaggatctgctgggggacgccctggcggggccacctagagcccctggacggagtggctggcctgcggggggcgctccgggatccccaatacccagccccccgggtcctggggacgacctgtgctccgacctggaggaggcccctgaggctgaactgagtcaggctcctgctgaggggcccgacttggtgcccgcagccctgggcagcctgaccacagcccaaattgcccggagtgtctggaggccttggtgaccaatgccagccagagtcctgcgggggtgggcccggccctccctggatctcctccctcctcccaggggttcagatgtggtggggtagggccctggaagtctcccaggtcttccctccctcctctgatggatggcttgcagggcagcccctggtaaccagcccagtcaggccccagccccgtttcttaagaaacttttagggaccctgcagctctggagtgggtggagggagggagctacgggcaggaggaagaattttgtagagctgccagcgctctcccaggttcacccacccaggcttcaccagccctgtgcgggctctgggggcagaggtggcagaaatggtgctgggcactagtgttccaggcagccctgggctaaacaaaagcttgaacttgccacttcagcggggagatgagaggcaggtgcactgagctgcactgcccagagctgtgatgctctgtacatcttgtttgtagcacacttgagtttgtgtattccattgacatcaaatgtgacaattttactaaataaagaattttggagttagttacccttgaa

SEQ ID NO: 140382 - DNA, 738 bp, Homo sapiens
  Payload ID: 7544
  Gene Symbol: HES6
  Gene Name: hes family bHLH transcription factor 6
  Uniprot ID: Q96HZ4
  ENST ID: ENST00000409574
  CDS Start-End: 137-475
cggaagccgcgaggagcgcggacggctgggctgctgctgggcggccgcggggcagcggagggcgccggcactccggtccccgccgctccccgtccccgctgctcctagcccctgccgcgtccccggcggagcgggcatggcgccacccgcggcgcctggccgggaccgtgtgggccgtgaggatgaggacggctgggagacgcgaggggaccgcaaggcccggaagcccctggtggagaagaagcggcgcgcgcggatcaacgagagcctgcaggagctgcggctgctgctggcgggcgccgaggtgcaggccaagctggagaacgccgaagtgctggagctgacgagcgcgagcagctgcaggcggaagcgagcgagcgcttcgctgccggctacatccagtgcatgcacgaggtgcacacgttcgtgtccacgtgccaggccatcgacgctaccgtcgctgccgagctcctgaaccatctgctcgagtccatgccgctgcgtgagggcagcagcttccaggatctgctgggggacgccctggcggggccacctagagcccctggacggagtggctggcctgcggggggcgctccgggatccccaatacccagccccccgggtcctggggacgacctgtgctccgacctggaggaggcccctgaggctgaactgagtcaggctcctgctgaggggcccgacttggtgcccgcagccctgggcagcctgaccacagcc

SEQ ID NO: 140383 - DNA, 528 bp, Homo sapiens
  Payload ID: 7544
  Gene Symbol: HES6
  Gene Name: hes family bHLH transcription factor 6
  ENST ID: ENST00000409356
  CDS Start-End: 120-404
gcggacggctgggctgctgctgggcggccgcggggcagcggagggcgccggcactccggtccccgccgctccccgtccccgctgctcctagcccctgccgcgtccccggcggagcgggcatggcgccacccgcggcgcctggccgggaccgtgtgggccgtgaggatgaggacggctgggagacgcgaggggaccgcaaggtgcgggccggggccatgggcgagcaagcgggcgggaggccgtgcggggctgggattcagtgccccgctccccgcaggcccggaagcccctggtggagaagaagcggcgcgcgcggatcaacgagagcctgcaggagctgcggctgctgctggcgggcgccgaggtgcaggccaagctggagaacgccgaagtgctggagctgacggtgcggcgggtccagggtgtgctgcggggccgggcgcgcgagcgcgagcagctgcaggcggaagcgagcgagcgcttcgctgccggctacatccagtgcatgcacgaggtgcacacgttcgt

SEQ ID NO: 140384 - DNA, 1286 bp, Homo sapiens
  Payload ID: 7544
  Gene Symbol: HES6
  Gene Name: hes family bHLH transcription factor 6
  Uniprot ID: Q96HZ4
  ENST ID: ENST00000409002
  CDS Start-End: 67-735
ctccggtccccgccgctccccgtccccgctgctcctagcccctgccgcgtccccggcggagcgggcatggcgccacccgcggcgcctggccgggaccgtgtgggccgtgaggatgaggacggctgggagacgcgaggggaccgcaaggcccggaagcccctggtggagaagaagcggcgcgcgcggatcaacgagagcctgcaggagctgcggctgctgctggcgggcgccgaggccaagctggagaacgccgaagtgctggagctgacggtgcggcgggtccagggtgtgctgcggggccgggcgcgcgagcgcgagcagctgcaggcggaagcgagcgagcgcttcgctgccggctacatccagtgcatgcacgaggtgcacacgttcgtgtccacgtgccaggccatcgacgctaccgtcgctgccgagctcctgaaccatctgctcgagtccatgccgctgcgtgagggcagcagcttccaggatctgctgggggacgccctggcggggccacctagagcccctggacggagtggctggcctgcggggggcgctccgggatccccaatacccagccccccgggtcctggggacgacctgtgctccgacctggaggaggcccctgaggctgaactgagtcaggctcctgctgaggggcccgacttggtgcccgcagccctgggcagcctgaccacagcccaaattgcccggagtgtctggaggccttggtgaccaatgccagccagagtcctgcgggggtgggcccggccctccctggatctcctccctcctcccaggggttcagatgtggtggggtagggccctggaagtctcccaggtcttccctccctcctctgatggatggcttgcagggcagcccctggtaaccagcccagtcaggccccagccccgtttcttaagaaacttttagggaccctgcagctctggagtgggtggagggagggagctacgggcaggaggaagaattttgtagagctgccagcgctctcccaggttcacccacccaggcttcaccagccctgtgcgggctctgggggcagaggtggcagaaatggtgctgggcactagtgttccaggcagccctgggctaaacaaaagcttgaacttgccacttcagcggggagatgagaggcaggtgcactgagctgcactgcccagagctgtgatgctctgtacatcttgtttgtagcacacttgagtttgtgtattccattgacatcaaatgtgacaattttactaaataaagaattttggagttagtt

SEQ ID NO: 140385 - DNA, 1600 bp, Homo sapiens
  Payload ID: 7544
  Gene Symbol: HES6
  Gene Name: hes family bHLH transcription factor 6
  Uniprot ID: Q96HZ4
  ENST ID: ENST00000409160
  CDS Start-End: 134-778
aagccgcgaggagcgcggacggctgggctgctgctgggcggccgcggggcagcggagggcgccggcactccggtccccgccgctccccgtccccgctgctcctagcccctgccgcgtccccggcggagcgggcatggcgccacccgcggcgcctggccgggaccgtgtgggccgtgaggatgaggacggctgggagacgcgaggggaccgcaaggcccggaagcccctggtggagaagaagcggcgcgcgcggatcaacgagagcctgcaggagctgcggctgctgctggcgggcgccgaggtgcaggccaagctggagaacgccgaagtgctggagctgacggtgcggcgggtccagggtgtgctgcggggccgggcgcgcggtgagtggcggcggggcgggcgggggcgccggccgcgggcgcctgtaacccctgccagacggaggacttccctcccggcgcccctgtcctgtcggcggcgagggctcccaccggagcagggtgcgcccccgcgtctcctgggtgagccgcgtccccgcgggccgggtgggctgggccacgcagtcgccgctcaccgcgcgggacgcggctctctccctcccaccctcgggcccagagcgcgagcagctgcaggcggaagcgagcgagcgcttcgctgccggctacatccagtgcatgcacgaggtgcacacgttcgtgtccacgtgccaggccatcgacgctaccgtcgctgccgagctcctgaaccatctgctcgagtccatgccgctgcgtgagggcagcagcttccaggatctgctgggggacgccctggcggggccacctagagcccctggacggagtggctggcctgcggggggcgctccgggatccccaatacccagccccccgggtcctggggacgacctgtgctccgacctggaggaggcccctgaggctgaactgagtcaggctcctgctgaggggcccgacttggtgcccgcagccctgggcagcctgaccacagcccaaattgcccggagtgtctggaggccttggtgaccaatgccagccagagtcctgcgggggtgggcccggccctccctggatctcctccctcctcccaggggttcagatgtggtggggtagggccctggaagtctcccaggtcttccctccctcctctgatggatggcttgcagggcagcccctggtaaccagcccagtcaggccccagccccgtttcttaagaaacttttagggaccctgcagctctggagtgggtggagggagggagctacgggcaggaggaagaattttgtagagctgccagcgctctcccaggttcacccacccaggcttcaccagccctgtgcgggctctgggggcagaggtggcagaaatggtgctgggcactagtgttccaggcagccctgggctaaacaaaagcttgaacttgccacttcagcggggagatgagaggcaggtgcactgagctgcactgcccagagctgtgatgctctgtacatcttgtttgtagcacacttgagtttgtgtattccattgacatcaaatgtgacaattttactaaataaagaattttggagttagttaccctt

SEQ ID NO: 140386 - DNA, 863 bp, Homo sapiens
  Payload ID: 7544
  Gene Symbol: HES6
  Gene Name: hes family bHLH transcription factor 6
  ENST ID: ENST00000409182
  CDS Start-End: 54-641
cgctccccgtccccgctgctcctagcccctgccgcgtccccggcggagcgggcatggcgccacccgcggcgcctggccgggaccgtgtgggccgtgaggatgaggacggctgggagacgcgaggggaccgcaaggtgcaggccaagctggagaacgccgaagtgctggagctgacggtgcggcgggtccagggtgtgctgcggggccgggcgcgcgagcgcgagcagctgcaggcggaagcgagcgagcgcttcgctgccggctacatccagtgcatgcacgaggtgcacacgttcgtgtccacgtgccaggccatcgacgctaccgtcgctgccgagctcctgaaccatctgctcgagtccatgccgctgcgtgagggcagcagcttccaggatctgctgggggacgccctggcggggccacctagagcccctggacggagtggctggcctgcggggggcgctccgggatccccaatacccagccccccgggtcctggggacgacctgtgctccgacctggaggaggcccctgaggctgaactgagtcaggctcctgctgaggggcccgacttggtgcccgcagccctgggcagcctgaccacagcccaaattgcccggagtgtctggaggccttggtgaccaatgccagccagagtcctgcgggggtgggcccggccctccctggatctcctccctcctcccaggggttcagatgtggtggggtagggccctggaagtctcccaggtcttccctccctcctctgatggatggcttgcagggcagcccctggtaaccagcccagtcaggccccagccccgtttcttaagaaacttttagggaccctgcagctctggagtggg

SEQ ID NO: 140387 - DNA, 530 bp, Homo sapiens
  Payload ID: 7544
  Gene Symbol: HES6
  Gene Name: hes family bHLH transcription factor 6
  ENST ID: ENST00000450098
  CDS Start-End: 97-530
gcggccgcggggcagcggagggcgccggcactccggtccccgccgctccccgtccccgctgctcctagcccctgccgcgtccccggcggagcgggcatggcgccacccgcggcgcctggccgggaccgtgtgggccgtgaggatgaggacggctgggagacgcgaggggaccgcaaggtgcaggccaagctggagaacgccgaagtgctggagctgacggtgcggcgggtccagggtgtgctgcggggccgggcgcgcggtgagtggcggcggggcgggcgggggcgccggccgcgggcgcctgtaacccctgccagacggaggacttccctcccggcgcccctgtcctgtcggcggcgagggctcccaccggagcagggtgcgcccccgcgtctcctgggtgagccgcgtccccgcgggccgggtgggctgggccacgcagtcgccgctcaccgcgcgggacgcggctctctccctcccaccctcgggcccagagcgcgagcagctgcaggcggaagcgagcgagcgct

SEQ ID NO: 140388 - DNA, 512 bp, Homo sapiens
  Payload ID: 7544
  Gene Symbol: HES6
  Gene Name: hes family bHLH transcription factor 6
  ENST ID: ENST00000436051
  CDS Start-End: 1-512
gtgctggcggagggcggcgtcgggggtccggcccggcgtctggacgagtccggaagaaactcaggggccgccccgccaccgctgcccaatggaccctgcctccccggggcttggcagccaccccagccgggacctgaaacccctctaggtccagagaccgcggacttgactgtggctctgcacaccagggacgcatctcctggggccagtggccccagcgctcaactctggaggcgccatcggcgaaggagggaaatgaatgaattaatgggcccggaagcccctggtggagaagaagcggcgcgcgcggatcaacgagagcctgcaggagctgcggctgctgctggcgggcgccgaggtgcaggccaagctggagaacgccgaagtgctggagctgacggtgcggcgggtccagggtgtgctgcggggccgggcgcgcgagcgcgagcagctgcaggcggaagcgagcgagcgcttcgctgccggctacatccagtgcatgcacgaggtgc

SEQ ID NO: 140389 - DNA, 474 bp, Homo sapiens
  Payload ID: 7544
  Gene Symbol: HES6
  Gene Name: hes family bHLH transcription factor 6
  ENST ID: ENST00000417803
  CDS Start-End: 1-51
cgggcgccgaggtgcaggccaagctggagaacgccgaagtgctggagctgacggtgcggcgggtccagggtgtgctgcggggccgggcgcgcggccatcgacgctaccgtcgctgccgagctcctgaaccatctgctcgagtccatgccgctgcgtgagggcagcagcttccaggatctgctgggggacgccctggcggggccacctagagcccctggacggagtggctggcctgcggggggcgctccgggatccccaatacccagccccccgggtcctggggacgacctgtgctccgacctggaggaggcccctgaggctgaactgagtcaggctcctgctgaggggcccgacttggtgcccgcagccctgggcagcctgaccacagcccaaattgcccggagtgtctggaggccttggtgaccaatgccagccagagtcctgcgggggtgggcccggccctccctggatctc

SEQ ID NO: 140390 - DNA, 678 bp, Homo sapiens
  Payload ID: 7545
  Gene Symbol: HES7
  Gene Name: hes family bHLH transcription factor 7
  Uniprot ID: Q9BYE0
  ENST ID: ENST00000317814
  CDS Start-End: 1-678
atggtcacccgggatcgagctgagaatagggacggccccaagatgctcaagccgcttgtggagaagcggcgccgggaccgcatcaaccgcagcctggaagagctgaggctgctgctgctggagcggacccgggaccagaacctccggaacccgaagctggagaaagcggagatattggagttcgccgtgggctacttgagggagcgaagccgggtggagcccccgggggttccccggtccccagtccaggacgccgaggcgctcgccagctgctacttgtccggtttccgcgagtgcctgcttcgcttggcggccttcgcgcacgacgccagcccggccgcccgcgcccagctcttctccgcgctgcacggctatctgcgccccaaaccgccccggcccaagccggtagatccgaggcctccagcgccgcgcccatccctggaccccgccgcaccggcccttggccctgcgctgcaccagcgccccccagtgcaccagggccaccctagcccgcgctgcgcatggtccccatccctctgctccccgcgcgccggggattctggcgcgccggcgcccctcaccggactgctgccgccgccaccgccgcctcacagacaagacggggcgcccaaggccccgctgcccccgccgcccgctttctggagaccttggccctga

SEQ ID NO: 140391 - DNA, 1674 bp, Homo sapiens
  Payload ID: 7545
  Gene Symbol: HES7
  Gene Name: hes family bHLH transcription factor 7
  Uniprot ID: Q9BYE0
  ENST ID: ENST00000541682
  CDS Start-End: 1-693
atggtcacccgggatcgagctgagaatagggacggccccaagatgctcaagccgcttgtggagaagcggcgccgggaccgcatcaaccgcagcctggaagagctgaggctgctgctgctggagcggacccgggaccagaacctccggaacccgaagctggagaaagcggagatattggagttcgccgtgggctacttgagggagcgaagccgggtggagcccccggccgccgcggctccaggggttccccggtccccagtccaggacgccgaggcgctcgccagctgctacttgtccggtttccgcgagtgcctgcttcgcttggcggccttcgcgcacgacgccagcccggccgcccgcgcccagctcttctccgcgctgcacggctatctgcgccccaaaccgccccggcccaagccggtagatccgaggcctccagcgccgcgcccatccctggaccccgccgcaccggcccttggccctgcgctgcaccagcgccccccagtgcaccagggccaccctagcccgcgctgcgcatggtccccatccctctgctccccgcgcgccggggattctggcgcgccggcgcccctcaccggactgctgccgccgccaccgccgcctcacagacaagacggggcgcccaaggccccgctgcccccgccgcccgctttctggagaccttggccctgagccttggggggtggtgggggcggggtctaggggtggggtagagactccagcccgagggcagcagagggacccgggcgtccgggcgagcaggtgttggggagggcagtggggcgcgcgggctcagcgcgcgggtgagatgtggtctatattagagtatctatataaatatatatttccctggttcctgtcccttttccctgccccaacttctcccttgcgtctaggattgtactctctctgcccctcagcccagtcccagtcccttcccgagtccctagtgcatggaataaagtggttattaaatccccgtgtgtccccgagccaggggcctgcctttatctcgacgtccacgcccactttcccttcccttctgtctcccaccctcagtcctgctctccatggcccaagccccggggcagacaggtaagtaaagaagagagcagagcgggaactgagatcgaaattgaaaccaggtggaaagagagagatagggtagggggagaagggatgggggcctttaagaaaaaaacggataaaaaggaaaaattgaaataaaatcgactctggtgggattcgaacccacaacctttgaattgctctattcgtcactagaagtccaatgcgctatccattgcgccacagagccacccgacgaacggcggcgtcttgtagcttacgggtactagagtgggaatggggcagggttggggagcggggctaagggacttgggcgggacatgccaggagggcgcggtttggatctcagaggccaagccaggtagaggtagcgggcgcaaagcatgttagccaggtgagagagagggcgcacatgggtcgaaaaaacagggagggagagcaaccgaaaatggctgagcgagcgagtgcagagctccggctgcccgcttggggggtgtttccggctcaggcgctccccactcccagatatagtcccacccaaataaactagttttgttgtaaatt

SEQ ID NO: 140392 - DNA, 654 bp, Homo sapiens
  Payload ID: 7545
  Gene Symbol: HES7
  Gene Name: hes family bHLH transcription factor 7
  ENST ID: ENST00000577735
  CDS Start-End: 219-654
gaggagcaatggtcacccgggatcgagctgagaatagggacggccccaagggccgccaggtctgagcccggcaccgtgcggcgcacgtgcgtgcgcgcagagagtccccaaagttctccactgagacaaagagaaactgcaccagacggagacgtagagagaaaagaggaggagagacacagagaggggaggagggaggacgagactgagagaggagaatgcgaagatccggggagatgctcaagccgcttgtggagaagcggcgccgggaccgcatcaaccgcagcctggaagagctgaggctgctgctgctggagcggacccgggaccagaacctccggaacccgaagctggagaaagcggagatattggagttcgccgtgggctacttgagggagcgaagccgggtggagcccccggccgccgcggctccaggggttccccggtccccagtccaggacgccgaggcgctcgccagctgctacttgtccggtttccgcgagtgcctgcttcgcttggcggccttcgcgcacgacgccagcccggccgcccgcgcccagctcttctccgcgctgcacggctatctgcgccccaaaccgccccggcccaagccggtagatccgaggcctccagcgccgcgcccatccctggacc

SEQ ID NO: 140393 - DNA, 2296 bp, Homo sapiens
  Payload ID: 7546
  Gene Symbol: HEY1
  Gene Name: hes-related family bHLH transcription factor with YRPW motif 1
  Uniprot ID: Q9Y5J3
  ENST ID: ENST00000337919
  CDS Start-End: 195-1121
actcccccgccctccccagggccctgggaaggggctcagcgtgggaaaggatggttgagttttaaccagaggcaaagcgtgagcgggatcagtgtgtgcggaacgcaagcagccgagagcggagaggcgccgctgtagttaactcctccctgcccgccgcgccgaccctccccaggaacccccagggagccagcatgaagcgagctcaccccgagtacagctcctcggacagcgagctggacgagaccatcgaggtggagaaggagagtgcggacgagaatggaaacttgagttcggctctaggttccatgtccccaactacatcttcccagattttggccagaaaaagacggagaggaataattgagaagcgccgacgagaccggatcaataacagtttgtctgagctgagaaggctggtacccagtgcttttgagaagcaggtaatggagcaaggatctgctaagctagaaaaagccgagatcctgcagatgaccgtggatcacctgaaaatgctgcatacggcaggagggaaaggttactttgacgcgcacgcccttgctatggactatcggagtttgggatttcgggaatgcctggcagaagttgcgcgttatctgagcatcattgaaggactagatgcctctgacccgcttcgagttcgactggtttcgcatctcaacaactacgcttcccagcgggaagccgcgagcggcgcccacgcgggcctcggacacattccctgggggaccgtcttcggacatcacccgcacatcgcgcacccgctgttgctgccccagaacggccacgggaacgcgggcaccacggcctcacccacggaaccgcaccaccagggcaggctgggctcggcacatccggaggcgcctgctttgcgagcgccccctagcggcagcctcggaccggtgctccctgtggtcacctccgcctccaaactgtcgccgcctctgctctcctcagtggcctccctgtcggccttccccttctctttcggctccttccacttactgtctcccaatgcactgagcccttcagcacccacgcaggctgcaaaccttggcaagccctatagaccttgggggacggagatcggagctttttaaagaactgatgtagaatgagggaggggaaagtttaaaatcccagctgggctggactgttgccaacatcaccttaaagtcgtcagtaaaagtaaaaaggaaaaaggtacactttcagataattttttttttaaagactaaaggtttgttggtttacttttatcttttttaatgtttttttcatcatgtcatgtattagcagtttttaaaaactagttgttaaattttgttcaagacattaaattgaaatagtgagtataagccaacactttgtgataggtttgtactgtgcctaatttactttgtaaaccagaatgattccgtttttgcctcaaaatttggggaatcttaacatttagtatttttggtctgtttttctccttgtatagttatggtctgtttttagaattaattttccaaaccactatgcttaatgttaacatgattctgtttgttaatattttgacagattaaggtgttgtataaataatattcttttggggggaggggaactatattgaattttatatttctgagcaaagcgttgacaaatcagatgatcagctttatccaagaaagaagactagtaaattgtctgcctcctatagcagaaaggtgaatgtacaaactgttggtggccctgaatccatctgaccagctgctggtatctgccaggactggcagttctgatttagttaggagagagccgctgataggttaggtctcatttggagtgttggtggaaaggaaactgaaggtaattgaatagaatacgcctgcatttaccagccccagcaacacaaagaatttttaatcacacggatctcaaattcacaaatgttaacatggataagtgatcatggtgtgcgagtggtcaattgagtagtacagtggaaactgttaaatgcataacctaattttcctgggactgccatattttcttttaactggaaatttttatgtgagttttccttttggtgcatggaactgtggttgccaaggtatttaaaagggctttcctgcctccttctctttgatttatttaatttgatttgggctataaaatatcatttttcaggtttattcttttagcaggtgtagttaaacgacctccactgaactgggtttgacctctgttgtactgatgtgttgtgactaaataaaaaagaaagaacaaa

SEQ ID NO: 140394 - DNA, 2293 bp, Homo sapiens
  Payload ID: 7546
  Gene Symbol: HEY1
  Gene Name: hes-related family bHLH transcription factor with YRPW motif 1
  Uniprot ID: Q9Y5J3
  ENST ID: ENST00000354724
  CDS Start-End: 201-1115
ttccccactcccccgccctccccagggccctgggaaggggctcagcgtgggaaaggatggttgagttttaaccagaggcaaagcgtgagcgggatcagtgtgtgcggaacgcaagcagccgagagcggagaggcgccgctgtagttaactcctccctgcccgccgcgccgaccctccccaggaacccccagggagccagcatgaagcgagctcaccccgagtacagctcctcggacagcgagctggacgagaccatcgaggtggagaaggagagtgcggacgagaatggaaacttgagttcggctctaggttccatgtccccaactacatcttcccagattttggccagaaaaagacggagaggaataattgagaagcgccgacgagaccggatcaataacagtttgtctgagctgagaaggctggtacccagtgcttttgagaagcagggatctgctaagctagaaaaagccgagatcctgcagatgaccgtggatcacctgaaaatgctgcatacggcaggagggaaaggttactttgacgcgcacgcccttgctatggactatcggagtttgggatttcgggaatgcctggcagaagttgcgcgttatctgagcatcattgaaggactagatgcctctgacccgcttcgagttcgactggtttcgcatctcaacaactacgcttcccagcgggaagccgcgagcggcgcccacgcgggcctcggacacattccctgggggaccgtcttcggacatcacccgcacatcgcgcacccgctgttgctgccccagaacggccacgggaacgcgggcaccacggcctcacccacggaaccgcaccaccagggcaggctgggctcggcacatccggaggcgcctgctttgcgagcgccccctagcggcagcctcggaccggtgctccctgtggtcacctccgcctccaaactgtcgccgcctctgctctcctcagtggcctccctgtcggccttccccttctctttcggctccttccacttactgtctcccaatgcactgagcccttcagcacccacgcaggctgcaaaccttggcaagccctatagaccttgggggacggagatcggagctttttaaagaactgatgtagaatgagggaggggaaagtttaaaatcccagctgggctggactgttgccaacatcaccttaaagtcgtcagtaaaagtaaaaaggaaaaaggtacactttcagataattttttttttaaagactaaaggtttgttggtttacttttatcttttttaatgtttttttcatcatgtcatgtattagcagtttttaaaaactagttgttaaattttgttcaagacattaaattgaaatagtgagtataagccaacactttgtgataggtttgtactgtgcctaatttactttgtaaaccagaatgattccgtttttgcctcaaaatttggggaatcttaacatttagtatttttggtctgtttttctccttgtatagttatggtctgtttttagaattaattttccaaaccactatgcttaatgttaacatgattctgtttgttaatattttgacagattaaggtgttgtataaataatattcttttggggggaggggaactatattgaattttatatttctgagcaaagcgttgacaaatcagatgatcagctttatccaagaaagaagactagtaaattgtctgcctcctatagcagaaaggtgaatgtacaaactgttggtggccctgaatccatctgaccagctgctggtatctgccaggactggcagttctgatttagttaggagagagccgctgataggttaggtctcatttggagtgttggtggaaaggaaactgaaggtaattgaatagaatacgcctgcatttaccagccccagcaacacaaagaatttttaatcacacggatctcaaattcacaaatgttaacatggataagtgatcatggtgtgcgagtggtcaattgagtagtacagtggaaactgttaaatgcataacctaattttcctgggactgccatattttcttttaactggaaatttttatgtgagttttccttttggtgcatggaactgtggttgccaaggtatttaaaagggctttcctgcctccttctctttgatttatttaatttgatttgggctataaaatatcatttttcaggtttattcttttagcaggtgtagttaaacgacctccactgaactgggtttgacctctgttgtactgatgtgttgtgactaaataaaaaagaaagaacaaagta

SEQ ID NO: 140395 - DNA, 761 bp, Homo sapiens
  Payload ID: 7546
  Gene Symbol: HEY1
  Gene Name: hes-related family bHLH transcription factor with YRPW motif 1
  ENST ID: ENST00000518733
  CDS Start-End: 204-761
gctgacctccgcgcgtcgcaggctggcggcagcctgcggccagggaacccctaggtgccttccagcccaagtggcaaaaaaagtctgagtgcggggagggtgtgggggcgacctctcagatcacctctcctcgtttaacggcgatttcagtttttgtttgttctttttctcttttcagaaacttgagttcggctctaggttccatgtccccaactacatcttcccagattttggccagaaaaagacggagaggaataattgagaagcgccgacgagaccggatcaataacagtttgtctgagctgagaaggctggtacccagtgcttttgagaagcagggatctgctaagctagaaaaagccgagatcctgcagatgaccgtggatcacctgaaaatgctgcatacggcaggagggaaaggttactttgacgcgcacgcccttgctatggactatcggagtttgggatttcgggaatgcctggcagaagttgcgcgttatctgagcatcattgaaggactagatgcctctgacccgcttcgagttcgactggtttcgcatctcaacaactacgcttcccagcgggaagccgcgagcggcgcccacgcgggcctcggacacattccctgggggaccgtcttcggacatcacccgcacatcgcgcacccgctgttgctgccccagaacggccacgggaacgcgggcaccacggcctcacccacggaaccgcaccaccagggcaggctgggctcggcacatccg

SEQ ID NO: 140396 - DNA, 1325 bp, Homo sapiens
  Payload ID: 7546
  Gene Symbol: HEY1
  Gene Name: hes-related family bHLH transcription factor with YRPW motif 1
  ENST ID: ENST00000523976
  CDS Start-End: 213-857
agtgaattcaccaccccagctctctgcggattgagctagtgcatcttttggaaaaatacctattatttgtgaggtcttcaaaagttgtgacagccctgattcagatcaggtagctttcacatttgtccattgctattttgagaaaaagcatttaaaaacaatatgtggtcttatttttggtatacgggattttaaaaaaaaggtgctgccacatgcctcttgaggaaagaaatgtattctggttaagtaaaggaaacctaacgggagaccaaggttactttgacgcgcacgcccttgctatggactatcggagtttgggatttcgggaatgcctggcagaagttgcgcgttatctgagcatcattgaaggactagatgcctctgacccgcttcgagttcgactggtttcgcatctcaacaactacgcttcccagcgggaagccgcgagcggcgcccacgcgggcctcggacacattccctgggggaccgtcttcggacatcacccgcacatcgcgcacccgctgttgctgccccagaacggccacgggaacgcgggcaccacggcctcacccacggaaccgcaccaccagggcaggctgggctcggcacatccggaggcgcctgctttgcgagcgccccctagcggcagcctcggaccggtgctccctgtggtcacctccgcctccaaactgtcgccgcctctgctctcctcagtggcctccctgtcggccttccccttctctttcggctccttccacttactgtctcccaatgcactgagcccttcagcacccacgcaggctgcaaaccttggcaagccctatagaccttgggggacggagatcggagctttttaaagaactgatgtagaatgagggaggggaaagtttaaaatcccagctgggctggactgttgccaacatcaccttaaagtcgtcagtaaaagtaaaaaggaaaaaggtacactttcagataattttttttttaaagactaaaggtttgttggtttacttttatcttttttaatgtttttttcatcatgtcatgtattagcagtttttaaaaactagttgttaaattttgttcaagacattaaattgaaatagtgagtataagccaacactttgtgataggtttgtactgtgcctaatttactttgtaaaccagaatgattccgtttttgcctcaaaatttggggaatcttaacatttagtatttttggtctgtttttctccttgtatagttatggtctgtttttagaattaattttccaaaccactatgcttaatgttaacatgattctgtttgttaatattttgacagat

SEQ ID NO: 140397 - DNA, 2678 bp, Homo sapiens
  Payload ID: 7547
  Gene Symbol: HEY2
  Gene Name: hes-related family bHLH transcription factor with YRPW motif 2
  Uniprot ID: Q9UBP5
  ENST ID: ENST00000368364
  CDS Start-End: 198-1211
gggggggcgtggccggcgccggctcttgcggccgagcagagttgcggcgtgggaaagagccgctaggagcagaccgcgccgccgccggagccgcgcctgcccaggcccggggagggaggaggcgggcgtcagggtgctgcgccccgctcggcgtccgagcttccggccgggctgtgccccgcgcggtcttcgccgggatgaagcgcccctgcgaggagacgacctccgagagcgacatggacgagaccatcgacgtggggagcgagaacaattactcggggcaaagtactagctctgtgattagattgaattctccaacaacaacatctcagattatggcaagaaagaaaaggagagggattatagagaaaaggcgtcgggatcggataaataacagtttatctgagttgagaagacttgtgccaactgcttttgaaaaacaaggatctgcaaagttagaaaaagctgaaatattgcaaatgacagtggatcatttgaagatgcttcaggcaacagggggtaaaggctactttgacgcacacgctcttgccatggacttcatgagcataggattccgagagtgcctaacagaagttgcgcggtacctgagctccgtggaaggcctggactcctcggatccgctgcgggtgcggcttgtgtctcatctcagcacttgcgccacccagcgggaggcggcggccatgacatcctccatggcccaccaccatcatccgctccacccgcatcactgggccgccgccttccaccacctgcccgcagccctgctccagcccaacggcctccatgcctcagagtcaaccccttgtcgcctctccacaacttcagaagtgcctcctgcccacggctctgctctcctcacggccacgtttgcccatgcggattcagccctccgaatgccatccacgggcagcgtcgccccctgcgtgccacctctctccacctctctcttgtccctctctgccaccgtccacgccgcagccgcagcagccaccgcggctgcacacagcttccctctgtccttcgcgggggcattccccatgcttcccccaaacgcagcagcagcagtggccgcggccacagccatcagcccgcccttgtcagtatcagccacgtccagtcctcagcagaccagcagtggaacaaacaataaaccttaccgaccctgggggacagaagttggagctttttaaatttttcttgaacttcttgcaatagtaactgaatgtcctccatttcagagtcagcttaaaacctctgcaccctgaaggtagccatacagatgccgacagatccacaaaggaacaataaagctatttgagacacaaacctcacgagtggaaatgtggtattctcttttttttctctcccttttttgtttggttcaaggcagctcggtaactgacatcagcaacttttgaaaacttcacacttgttaccatttagaagtttcctggaaaatatatggaccgtaccatccagcagtgcatcagtatgtctgaattggggaagtaaaatgccctgactgaattctcttgagactagatgggacatacatatatagagagagagtgagagagtcgtgtttcgtaagtgcctgagcttaggaagttttcttctggatatataacattgcacaagggaagacgagtgtggaggataggttaagaaaggaaagggacagaagtcttgcaataggctgcagacattttaataccatgccagagaagagtattctgctgaaaccaacaggttttactggtcaaaatgactgctgaaaataattttcaagttgaaagatctagttttatcttagtttgccttctttgtacagacatgccaagaggtgacatttagcagtgcattggtataagcaattatttcatcagttctcagattaacaagcatttctgctctgcctgcaggcccccaggcacttttttttttggatggctcaaaatatggtgctgctttatataaaccttacatttatatagtgcacctatgagcagttgcctaccatgtgtccaccagaggctatttaattcatgccaacttgaaaactctccagtttgtaggagtttggtttaatttattcagtttcattaggactatttttatatatttatcctcttcattttctcctaatgatgcaacatctattcttgtcaccctttgggagaagttacatttctggaggtgatgaagcaaggagggagcactaggaagagaaaagctacaatttttaaagctctttgtcaagttagtgattgcatttgatcccaaaacaagatgaatgtatgcaatgggatgtacataagttatttttgcccatgcctaaactagtgctatgtaatggggttgtggttttgtttttttcgatttcgtttaatgacaaaataatctcttaatatgctgaaatcaagcacgtgagagtttttgtttaaaagataagagacacagcatgtattatgcacttcatttctctactgtgtggagaaagcaataaacattatgagaatgttaaacgttatgcaaaattatacttttaaatatttgttttgaaattactgtacctagtcttttttgcattactttgtaacctttttctatgcaagagtctttacataccactaattaaatgaagtcctttttgacta

SEQ ID NO: 140398 - DNA, 2461 bp, Homo sapiens
  Payload ID: 7547
  Gene Symbol: HEY2
  Gene Name: hes-related family bHLH transcription factor with YRPW motif 2
  ENST ID: ENST00000368365
  CDS Start-End: 119-994
ggaaagttgtgacggtcgagcttgagcctggcgggccgcggagcgttcacctgcggccgggaggcaaagtactagctctgtgattagattgaattctccaacaacaacatctcagattatggcaagaaagaaaaggagagggattatagagaaaaggcgtcgggatcggataaataacagtttatctgagttgagaagacttgtgccaactgcttttgaaaaacaaggatctgcaaagttagaaaaagctgaaatattgcaaatgacagtggatcatttgaagatgcttcaggcaacagggggtaaaggctactttgacgcacacgctcttgccatggacttcatgagcataggattccgagagtgcctaacagaagttgcgcggtacctgagctccgtggaaggcctggactcctcggatccgctgcgggtgcggcttgtgtctcatctcagcacttgcgccacccagcgggaggcggcggccatgacatcctccatggcccaccaccatcatccgctccacccgcatcactgggccgccgccttccaccacctgcccgcagccctgctccagcccaacggcctccatgcctcagagtcaaccccttgtcgcctctccacaacttcagaagtgcctcctgcccacggctctgctctcctcacggccacgtttgcccatgcggattcagccctccgaatgccatccacgggcagcgtcgccccctgcgtgccacctctctccacctctctcttgtccctctctgccaccgtccacgccgcagccgcagcagccaccgcggctgcacacagcttccctctgtccttcgcgggggcattccccatgcttcccccaaacgcagcagcagcagtggccgcggccacagccatcagcccgcccttgtcagtatcagccacgtccagtcctcagcagaccagcagtggaacaaacaataaaccttaccgaccctgggggacagaagttggagctttttaaatttttcttgaacttcttgcaatagtaactgaatgtcctccatttcagagtcagcttaaaacctctgcaccctgaaggtagccatacagatgccgacagatccacaaaggaacaataaagctatttgagacacaaacctcacgagtggaaatgtggtattctcttttttttctctcccttttttgtttggttcaaggcagctcggtaactgacatcagcaacttttgaaaacttcacacttgttaccatttagaagtttcctggaaaatatatggaccgtaccatccagcagtgcatcagtatgtctgaattggggaagtaaaatgccctgactgaattctcttgagactagatgggacatacatatatagagagagagtgagagagtcgtgtttcgtaagtgcctgagcttaggaagttttcttctggatatataacattgcacaagggaagacgagtgtggaggataggttaagaaaggaaagggacagaagtcttgcaataggctgcagacattttaataccatgccagagaagagtattctgctgaaaccaacaggttttactggtcaaaatgactgctgaaaataattttcaagttgaaagatctagttttatcttagtttgccttctttgtacagacatgccaagaggtgacatttagcagtgcattggtataagcaattatttcatcagttctcagattaacaagcatttctgctctgcctgcaggcccccaggcacttttttttttggatggctcaaaatatggtgctgctttatataaaccttacatttatatagtgcacctatgagcagttgcctaccatgtgtccaccagaggctatttaattcatgccaacttgaaaactctccagtttgtaggagtttggtttaatttattcagtttcattaggactatttttatatatttatcctcttcattttctcctaatgatgcaacatctattcttgtcaccctttgggagaagttacatttctggaggtgatgaagcaaggagggagcactaggaagagaaaagctacaatttttaaagctctttgtcaagttagtgattgcatttgatcccaaaacaagatgaatgtatgcaatgggatgtacataagttatttttgcccatgcctaaactagtgctatgtaatggggttgtggttttgtttttttcgatttcgtttaatgacaaaataatctcttaatatgctgaaatcaagcacgtgagagtttttgtttaaaagataagagacacagcatgtattatgcacttcatttctctactgtgtggagaaagcaataaacattatgagaatgttaaacgttatgcaaaattatacttttaaatatttgttttgaaattactgtacctagtcttttttgcattactttgtaacctttttctatgcaagagtctttacataccactaattaaatgaagtcctttttgacta

SEQ ID NO: 140399 - DNA, 3661 bp, Homo sapiens
  Payload ID: 7548
  Gene Symbol: HEYL
  Gene Name: hes-related family bHLH transcription factor with YRPW motif-like
  Uniprot ID: Q9NQ87
  ENST ID: ENST00000372852
  CDS Start-End: 321-1307
ctcctggcttccccgcggggcctcccagggcacctgcccaaggccacccagcgcgcggcagccgagacagcggagcagagccggacctcccagccgtcgatgaaggcggcgaccgcctagggccttcccacggctcggcggcgcgtcaccgcgggggcgagggggcgcctgggcgcccggagctgcggcgcaggaaagggccctgggaaagggcggtggcggcgcccccgaggcggggccggggcggggccggggcggggcctgacttcccgactgggagccttagccgcggggctgagaccaggcagcctgcgttcgccatgaagcgacccaaggagccgagcggctccgacggggagtccgacggacccatcgacgtgggccaagagggccagctgagccagatggccaggccgctgtccacccccagctcttcgcagatgcaagccaggaagaaacacagagggatcatagagaaacggcgtcgagaccgcatcaacagtagcctttctgaattgcgacgcttggtccccactgcctttgagaaacagggctcttccaagctggagaaagccgaggtcttgcagatgacggtggatcacttgaaaatgctccatgccactggtgggacaggattctttgatgcccgagccctggcagttgacttccggagcattggttttcgggagtgcctcactgaggtcatcaggtacctgggggtccttgaagggcccagcagccgtgcagaccccgtccggattcgccttctctcccacctcaacagctacgcagccgagatggagccttcgcccacgcccactggccctttggccttccctgcctggccctggtctttcttccatagctgtccagggctgccagccctgagcaaccagctcgccatcctgggaagagtgcccagccctgtcctccccggtgtctcctctcctgcttaccccatcccagccctccgaaccgctccccttcgcagagccacaggcatcatcctgccagcccggaggaatgtgctgcccagtcgaggggcatcttccacccggagggcccgccccctagagaggccagcgacccctgtgcctgtcgcccccagcagcagggctgccaggagcagccacatcgctcccctcctgcagtcttcctccccaacaccccctggtcctacagggtcggctgcttacgtggctgttcccacccccaactcatcctccccagggccagctgggaggccagcgggagccatgctctaccactcctgggtctctgaaatcactgaaatcggggctttctgagctgccccttcaccaccccgccccaaggaataaggaaggttcttttaccaggagcccaaaaaagggcactgccttttctgctttgcttcatggactggctcatatgtgaaggcacgttctccagccatcagaggccccctcctcctccaacccatctctccttctcactgttatcccagcttatccacccagctctcctggagctgttctggtctcagaggcttggttccatttctcacctgaacagatgagtcctgggagagaccctcagagatccgcccagacccctctcctgccctctgcacaccagcagcaggcatgaaccttgggtctgggaaaaagctttaacctgcagggcaccaggacccaaggcaggctgttccttggggcggtcagaccccagtcaggagcaatgactgactggctgcagccttcccacgccaagaggctggaacatagtgtctgcctcgcttcctggagatagtaactgagcaggggctacaaagaggtctcctgggaaccctgtctgccccttcccacctgtccttgggccacaccatcacactgaaccacaggacagaccctttctccaccacagccaaggcctggagactgggggcccagcagagcctgctcccaccctcctcccagcagcagacacccaccctctcactgactaacaggtccctgcacacagctggcctggtaaacccagctgggaggtttctaggcagcagcaaaactctgtgacagggtgtcctcacaccaggccttggacagctctcccagacaggagccagggttgagcaatggagagcccagcccccacgtcttacagtcgccatcctccaggcgtgtggtccctccccattgggtgcacagtgcagaggggccgtggccccatgtgatggtgcgcagagaggaacctcttgggattcagcaccagacgtctgtgctgcctggtttgcatccggctcacagagcccagactgctggaacagccaaggactgtcaggctggacaaaaataactgcaaggaggggcaagagaaaggatgattcgaggcaccttggcccttcaaggtcatgcagtgggtcgagcgcctgagatcctgttcaccaggactccacagagctggctctgctcagaagccatttcattccccggctccaccctaggccactttttctaacagaggaaacaaatggtccagcagtcgttcccagcagaacagcggagcctggactgacacccagtgggaccagtgttgccacaccagttgataaaatgcagaaacccttctgtactcgttggtaaatatctactcccccaagtgactccaggtgccccccaccgcctggcacttcccccaggactcctacgatctggttactgcctggccgatccaaggctgtggagtcccagagccagcagttcactggtgctcattccacactggttagatacttcagttgtcacccctgggaagattctcccacctcctccctttgatggaaccaccctccccagaggctgcattgaggagactccacagactgaaaagtgagtttgcagaaaccttggggaaaagggccctttcaaagaagtggataagagggaggagatcattgagtgacccagaaagctcttttgaaaagacagactcctcaaggagagataaagaggaaagcacctctttcattttttagtgtgagctaattccatcagactgctgtcctcctggacccatctgagatgtgcagtagcaaggagaggggggatcattttagagagtgggtcattggcagggagtgctccggagggaggcagaggggagactgtggtagaaggaagacagaactcacacatgctcccaggattggggacagggacagaggaggtaacagaaggcaaaggccagtttccccgttatcatgaaggggcccactcaggacaggaacaaggacaactcctcctcctcctcctcctctcctgctgctcctgggataccaggtcagtgatgtagtcttgcagtttggcaacttcctagcctgagaatccctagtggggctgtgggaaacacatttccacgttgcaagcatgcaactccaaagaatctgtgatgccactgaaatgagatgggaatgatccagctctttcagcatcttggttgaacttgctttcattgtccctgggatattgtggaaggaaaggtgactgtgtgatctgattctgtggtcaaggacttgcatcttgtgtttctatccccaagccttcctggtgtctccaactcctaccccattgcatgggttgttgcggacatccaataaagatttttttagtgcttctggaaa

SEQ ID NO: 140400 - DNA, 981 bp, Homo sapiens
  Payload ID: 7549
  Gene Symbol: HESX1
  Gene Name: HESX homeobox 1
  Uniprot ID: Q9UBX0
  ENST ID: ENST00000295934
  CDS Start-End: 70-627
cccagccctatacacgtggggcagagccagcagaggccagagctgttgctctgtgcagaccacgagaggatgtctcccagccttcaggaaggcgctcagctcggggaaaacaaaccctcaacttgctccttttcaattgagagaatcttaggactggaccagaagaaagactgtgttccattaatgaaaccccacaggccctgggcagacacctgcagctcatcagggaaagatggtaacttatgtctacatgtcccaaatcctcccagtgggatttcattccctagcgtggtggatcacccaatgccagaagaaagagcttcgaaatatgaaaattacttttcagcctcagaaagactgtctttgaaaagagagttgagttggtatagaggccgaagaccaagaactgcttttactcaaaaccagattgaagtgttagaaaatgtctttagagtaaactgctatcctggtatcgatattagagaagacttagctcaaaaattgaatctagaggaagacagaatccagatttggtttcaaaatcggcgtgcaaaactgaaaaggtcccatagagaatcacagtttctaatggcgaaaaaaaatttcaacacaaatctgctggaatagatagaaaactaaacaagtgaaattatcttctaattgcagagcatgaagaatcagtggaaatattaagtgttaaaatgtgatgttttctttcctgcatttaatctgaatattgtcattttttctgaaaatatattgtaaatactattatagcatggtacatatttgggcacttttagttatagtaaagaccttttatatatattttaataaacattttcagaaaagattgctattttttaagtaagccaaattaatctaataaattagtttgttaaaatcaatagactcatgactaagtgattccacaagctggattctaattataaagtatttcaagtaaaataatctgaagaa

SEQ ID NO: 140401 - DNA, 757 bp, Homo sapiens
  Payload ID: 7549
  Gene Symbol: HESX1
  Gene Name: HESX homeobox 1
  ENST ID: ENST00000473921
  CDS Start-End: 21-476
tctgtgcagaccacgagaggatgtctcccagccttcaggaaggcgctcagctcggggaaaacaaaccctcaacttgctccttttcaattgagagaatcttaggactggaccagaagaaagactgtgttccattaatgaaaccccacaggccctgggcagacacctgcagctcatcagggaaagatggtaacttatgtctacatgtcccaaatcctcccagtgggatttcattccctagcgtggtggatcacccaatgccagaagaaagagcttcgaaatatgaaaattacttttcagcctcagaaagactgtctttgaaaagagagttgagttggtatagaggccgaagaccaagaactgcttttactcaaaaccagatttggtttcaaaatcggcgtgcaaaactgaaaaggtcccatagagaatcacagtttctaatggcgaaaaaaaatttcaacacaaatctgctggaatagatagaaaactaaacaagtgaaattatcttctaattgcagagcatgaagaatcagtggaaatattaagtgttaaaatgtgatgttttctttcctgcatttaatctgaatattgtcattttttctgaaaatatattgtaaatactattatagcatggtacatatttgggcacttttagttatagtaaagaccttttatatatattttaataaacattttcagaaaagattgctattttttaagtaagccaaattaatctaataaattagtttgttaaaatcaa

SEQ ID NO: 140402 - DNA, 657 bp, Homo sapiens
  Payload ID: 7549
  Gene Symbol: HESX1
  Gene Name: HESX homeobox 1
  ENST ID: ENST00000495160
  CDS Start-End: 337-657
tttttagtgttacaatctttaaaagttttccccttagattgtttatcagccagtctctctctcccgaagagttctttagtttttgaggaagttgatttggaggcagttcttacaatgagttaagggttcccagttgtgttacagtttctttttccttgatatctcatttctactctgccaacaagaacaccatgcaccccagctctaaagaaggaagactttcaagcccccttgtcagcggagctataaggtgaactgcaggaagatcccagccctatacacgtggggcagagccagcagaggccagagctgttgctctgtgcagaccacgagaggatgtctcccagccttcaggaaggcgctcagctcggggaaaacaaaccctcaacttgctccttttcaattgagagaatcttaggactggaccagaagaaagactgtgttccattaatgaaaccccacaggccctgggcagacacctgcagctcatcagggaaagatggtaacttatgtctacatgtcccaaatcctcccagtgggatttcattccctagcgtggtggatcacccaatgccagaagaaagagcttcgaaatatgaaaattacttttcagcctcagaaagactgtctttgaaaagagagttgagttggtataga

SEQ ID NO: 140403 - DNA, 3938 bp, Homo sapiens
  Payload ID: 7550
  Gene Symbol: HP1BP3
  Gene Name: heterochromatin protein 1, binding protein 3
  Uniprot ID: Q5SSJ5
  ENST ID: ENST00000312239
  CDS Start-End: 141-1802
gttctccgcccccgccgccgccattacggagctcccagtggttgattcttcaccacactgaaaccattaggaaaaatccttgtggttaacagcagaggcttcagagtgtaacctgtactcgggcctagaaattatttaaaatggcgactgatacgtctcaaggtgaactcgtccatcctaaggcactcccacttatagtaggagctcagctgatccacgcggacaagttaggtgagaaggtagaagatagcaccatgccgattcgtcgaactgtgaattctacccgggaaactcctcccaaaagcaagcttgctgaaggggaggaagaaaagccagaaccagacataagttcagaggaatctgtctccactgtagaagaacaagagaatgaaactccacctgctacttcgagtgaggcagagcagccaaagggggaacctgagaatgaagagaaggaagaaaataagtcttctgaggaaaccaaaaaggatgagaaagatcagtctaaagaaaaggagaagaaagtgaaaaaaacaattccttcctgggctaccctttctgccagccagctagccagggcccagaaacaaacaccgatggcttcttccccacgtcccaagatggatgcaatcttaactgaggccattaaggcatgcttccagaagagtggtgcatcagtggttgctattcgaaaatacatcatccataagtatccttctctggagctggagagaaggggttatctccttaaacaagcactgaaaagagaattaaatagaggagtcatcaaacaggttaaaggaaaaggtgcttctggaagttttgttgtggttcagaaatcaagaaaaacacctcagaaatccagaaacagaaagaataggagctctgcagtggatccagaaccacaagtaaaattggaggatgtcctcccactggcctttactcgcctttgtgaacctaaagaagcttcctacagtctcatcaggaaatatgtgtctcagtattatcctaagcttagagtggacatcaggcctcagctgttgaagaacgctctgcagagagcagtagagaggggccagttagaacagataactggcaaaggtgcttcggggacattccagctgaagaaatcaggggagaaacccctgcttggtggaagcctgatggaatatgcaatcttgtctgccattgctgccatgaatgagccgaagacctgctctaccactgctctgaagaagtatgtcctagagaatcacccaggaaccaattctaactatcaaatgcatttgctgaaaaaaaccctgcagaaatgcgaaaagaatgggtggatggaacagatctctgggaaagggttcagtggcaccttccagctctgttttccctattatcccagcccaggagttctgtttccgaagaaagagccagatgattctagagatgaggatgaagatgaagatgagtcatcagaagaagactctgaggatgaagagccgccacctaagagaaggttgcagaagaaaaccccagccaagtccccagggaaggccgcatctgtgaagcagagagggtccaaacctgcacctaaagtctcagctgcccagcgggggaaagctaggcccttgcctaagaaagcacctcctaaggccaaaacgcctgccaagaagaccagaccctcatccacagtcatcaagaaacctagtggtggctcctcaaagaagcctgcaaccagtgcaagaaaggaagtaaaattgccgggcaagggcaaatccaccatgaagaagtctttcagagtgaaaaagtaaattttataggaaaaaagggtatcatgatgaaattcaaaatcttattttctaaggtcagtgtgcatttgtttagttttgatgcttttcaaattacattattttcctcccctatgaacattgtggggagggactctaaataaaccagtttaggcatttgctagctttaggtgcttttattggtgcctgcccttttccttgttcattttaatttctgcaataatcctggactttcctaaactatgtaatgtatacttgtcctttttctctgcctcccccaaccccctgttgtttttatggtcagctttgccttttttttttcttccaattttatctaaacagttgcagagatttttatatttgtagaaagcatcaagaacggtatgccagtcaggtcctggaagtaaaatggaggcacaatatagcactgactgagttgtaaagcctcctgcctggagacttcagttatagctgtaataattaatcttatttataaaagccactccactaaccttttctctccaactgtaaacacagagacagctttgggaataagccaaaaacagggtgatctcattagattttgaagatatatgactcctttgggctacatttcatattgatcaatttctaggtatttttcactggcccaaagtattgcattcccttaacagcaagcacaagttctctatatcacttgttttttgttgttgttgttgttgtcgtcgttgttttgagacggagtcttgctcaggtgccccggagtgcagtggtgcaatctcagctcactgcaacctccacctcctgggttcaagcaattctcctgcttcagcctcccgagtagctgggattacaggtgtgtaccaccacgcctggcaatttttttgtatttttagtagagatggggtttcgccgtgttggtcaggctggtctcgaactcctgacctcaggtgatccgcctgcctcggcctcccaaagtgctgggattacaggagtgagccactgtgcctggcctatcccacttggtttttgactgaaggggaagtgtagaaatatattgatttgtgatttctggtgtcacctgtgttaccaaaaatcaaaacaaatcttttttattttttattattattattatttttgagacagagtctcgctctgtcgcccagtgtggagtgcagtggtgtgatcttggctcactgcaaactccgcctcccaggttcaagcgattctcccacctcagcctcctgagttgggtcctacaggcgcacacgaccacgcccagctaattttttgtatttttagtagagttggggtttcaccatgttagccaggatggtctcgatctcctgacctcgtgatccactcacctcagcctcccaaaatcctggggttacagatgtgagctaccactcacggcccaaatcttcttgatcatatgtttaaatatattttttaatatttggagcatgagttgtcacttcttgtttgccttttttataaggaaatgttggagagttacatcattgctaatgtagaaatgttaagtggaaaaatatacagtttggtaaaataaactagattctacatttatttgtgggtttttttcccctcctttctttccacagcacttttgatatcaagcaagtggcttcctttttgagatattaaaaaaaaaaagaaaaggaaaaaagtaaatgaagcccaactacctaaccctttcttatttgtatttgttttagtattgtgaagttgtgttaaatagtactagctagaaatacaaatttctggttatcatttctcttccctgtggcacttgacattttaattgtcttaaagtttttgaagtacatcttctggccccttgagtactgccagaggcaaaagatgtttgtttcttattcattccacttttgtctcctgggatcccttctgtagcctaaagtatggctgggaaatggacttgagaagattggcttgaattagatcataatcatgtgtgatcccatcatgaattcattggaatttgtgttgcatgtaaggcaatctttcctgttgtaaatcttccttttttaatgtacatatattttgaaaaatatgaataaacatgaaattttaaaagctgctgaaccgtagcttata

SEQ ID NO: 140404 - DNA, 928 bp, Homo sapiens
  Payload ID: 7550
  Gene Symbol: HP1BP3
  Gene Name: heterochromatin protein 1, binding protein 3
  Uniprot ID: Q5SSJ5
  ENST ID: ENST00000375000
  CDS Start-End: 228-629
gcggagcgccgaggctcgcgttccgccgctgcttccgtcgccggggcgggcgccgcggtgtccctgccgagcgtgagccccgaactgtcaccgcgccgagccccagcctcatccgtcggtgtccgcggttgattcttcaccacactgaaaccattaggaaaaatccttgtggttaacagcagaggcttcagagtgtaacctgtactcgggcctagaaattatttaaaatggcgactgatacgtctcaaggtgaactcgtccatcctaaggcactcccacttatagtaggagctcagctgatccacgcggacaagttaggtgagaaggtagaagatagcaccatgccgattcgtcgaactgtgaattctacccgggaaactcctcccaaaagcaagcttgctgaaggggaggaagaaaagccagaaccagacataagttcagaggaatctgtctccactgtagaagaacaagagaatgaaactccacctgctacttcgagtgaggcagagcagccaaagggggaacctgagaatgaagagaaggaagaaaataagtcttctgaggaaaccaaaaaggagagagctgatagtattcattccactcttttcataattggtcagaacagttagaaattgcttttaactatagtcatgcattgcttaacaatgggtatacattctgagagatacatctttaggcgatttcatcatcgtgccaacatcataaagtgtacttacacaaacctacgtggtacagcctactacatacctaggctttatgggatagtctgttgcttctaggctacaaacctgtacagcatgttactgtactaaatactgtaggcagttataacacaacggtaagtatttgtgtatttaaacatagaaaaggtacagtaaaaatataatataaaagataaaaaatggta

SEQ ID NO: 140405 - DNA, 4822 bp, Homo sapiens
  Payload ID: 7550
  Gene Symbol: HP1BP3
  Gene Name: heterochromatin protein 1, binding protein 3
  Uniprot ID: Q5SSJ5
  ENST ID: ENST00000375003
  CDS Start-End: 1502-2707
tttttttttttttttgagatggagtcttactctgtcacccaggttggagtgtggagtgcagtggcgcgatctgggctcactgcaacctccacctcccaggttcaagcgattctcctgcctcaacctgccaagtagctgggactacaggcgtgcacctccacacctagctaatttttgtattttcaggagagacgggggtttcaccatgttggccaggatggtctcaatcttttgaccttgtgatccgcccaccttggcctcccaaagtgctgggattacaggcatgagtcaccgcgcccagccaatatgctatatttttgtatgactggcagcactgtaggtttgtttacaccaatgtcaccacaaacaagtgagtaacgtgctgcgctgtgatattaccacagctatcatgttaaccaggtaataggaggttttcagttccattataatcttaagggaccaccattgtatatgtggtctgttgaccaaatattgttacacagcacatgaccataaaagaataacttagtaataactataccttctagctataatcttcagggtattctttatctgagtttcataagtatagctaaggtctgtggaatttatagcaactatcgtgtgtgggtgtgggtgtgtttgtgtgtgtgtgtgtgtgtttaatggagatggcgtctcactatgttggctaggttgggcttgaactcctggcctcaagctgtcctccctcctcagcctcctaaattgctgggattacaggcatgagccactgcacccagcctatcgtctgttgttaaatgttctaatgcacctattaggtgcacagagtactgttatatactcagaataaaatttacataatgctttaaatctcacaaaattgttttgataaacatactcttataattcttgcaacaccttgggaaatagttggttctatattactgttttatagctgaggagaaagactcacatcatttactaagatcatatagctagctagtaaatgtttgagtgaaaatacaaacaaaggttttctgactttaagagcttgagttttttccactataccatattgcatctgttgtaattgttaactaatgtgcattttaaaattctcatttgtcttatgtactgagcccttataccagtgctaatttatgtgactcctttctcctgcagctaagagaaaaatacctttttaattcatttatagtacccagtttttaaagaagatttattttgtaaaattttgcttatggtacatgtcatcttagcctgtaaataaattaaagcattaatttttatccctccctggtcttttcctccttctgactttatacgtctttctagagagcttatcttctataataacaattctttgttttaaagtgagaaagatcagtctaaagaaaaggagaagaaagtgaaaaaaacaattccttcctgggctaccctttctgccagccagctagccagggcccagaaacaaacaccgatggcttcttccccacgtcccaagatggatgcaatcttaactgaggccattaaggcatgcttccagaagagtggtgcatcagtggttgctattcgaaaatacatcatccataagtatccttctctggagctggagagaaggggttatctccttaaacaagcactgaaaagagaattaaatagaggagtcatcaaacaggttaaaggaaaaggtgcttctggaagttttgttgtggttcagaaatcaagaaaaacacctcagaaatccagaaacagaaagaataggagctctgcagtggatccagaaccacaagtaaaattggaggatgtcctcccactggcctttactcgcctttgtgaacctaaagaagcttcctacagtctcatcaggaaatatgtgtctcagtattatcctaagcttagagtggacatcaggcctcagctgttgaagaacgctctgcagagagcagtagagaggggccagttagaacagataactggcaaaggtgcttcggggacattccagctgaagaaatcaggggagaaacccctgcttggtggaagcctgatggaatatgcaatcttgtctgccattgctgccatgaatgagccgaagacctgctctaccactgctctgaagaagtatgtcctagagaatcacccaggaaccaattctaactatcaaatgcatttgctgaaaaaaaccctgcagaaatgcgaaaagaatgggtggatggaacagatctctgggaaagggttcagtggcaccttccagctctgttttccctattatcccagcccaggagttctgtttccgaagaaagagccagatgattctagagatgaggatgaagatgaagatgagtcatcagaagaagactctgaggatgaagagccgccacctaagagaaggttgcagaagaaaaccccagccaagtccccagggaaggccgcatctgtgaagcagagagggtccaaacctgcacctaaagtctcagctgcccagcgggggaaagctaggcccttgcctaagaaagcacctcctaaggccaaaacgcctgccaagaagaccagaccctcatccacagtcatcaagaaacctagtggtggctcctcaaagaagcctgcaaccagtgcaagaaaggaagtaaaattgccgggcaagggcaaatccaccatgaagaagtctttcagagtgaaaaagtaaattttataggaaaaaagggtatcatgatgaaattcaaaatcttattttctaaggtcagtgtgcatttgtttagttttgatgcttttcaaattacattattttcctcccctatgaacattgtggggagggactctaaataaaccagtttaggcatttgctagctttaggtgcttttattggtgcctgcccttttccttgttcattttaatttctgcaataatcctggactttcctaaactatgtaatgtatacttgtcctttttctctgcctcccccaaccccctgttgtttttatggtcagctttgccttttttttttcttccaattttatctaaacagttgcagagatttttatatttgtagaaagcatcaagaacggtatgccagtcaggtcctggaagtaaaatggaggcacaatatagcactgactgagttgtaaagcctcctgcctggagacttcagttatagctgtaataattaatcttatttataaaagccactccactaaccttttctctccaactgtaaacacagagacagctttgggaataagccaaaaacagggtgatctcattagattttgaagatatatgactcctttgggctacatttcatattgatcaatttctaggtatttttcactggcccaaagtattgcattcccttaacagcaagcacaagttctctatatcacttgttttttgttgttgttgttgttgtcgtcgttgttttgagacggagtcttgctcaggtgccccggagtgcagtggtgcaatctcagctcactgcaacctccacctcctgggttcaagcaattctcctgcttcagcctcccgagtagctgggattacaggtgtgtaccaccacgcctggcaatttttttgtatttttagtagagatggggtttcgccgtgttggtcaggctggtctcgaactcctgacctcaggtgatccgcctgcctcggcctcccaaagtgctgggattacaggagtgagccactgtgcctggcctatcccacttggtttttgactgaaggggaagtgtagaaatatattgatttgtgatttctggtgtcacctgtgttaccaaaaatcaaaacaaatcttttttattttttattattattattatttttgagacagagtctcgctctgtcgcccagtgtggagtgcagtggtgtgatcttggctcactgcaaactccgcctcccaggttcaagcgattctcccacctcagcctcctgagttgggtcctacaggcgcacacgaccacgcccagctaattttttgtatttttagtagagttggggtttcaccatgttagccaggatggtctcgatctcctgacctcgtgatccactcacctcagcctcccaaaatcctggggttacagatgtgagctaccactcacggcccaaatcttcttgatcatatgtttaaatatattttttaatatttggagcatgagttgtcacttcttgtttgccttttttataaggaaatgttggagagttacatcattgctaatgtagaaatgttaagtggaaaaatatacagtttggtaaaataaactagattctacatttatttgtgggtttttttcccctcctttctttccacagcacttttgatatcaagcaagtggcttcctttttgagatattaaaaaaaaaaagaaaaggaaaaaagtaaatgaagcccaactacctaaccctttcttatttgtatttgttttagtattgtgaagttgtgttaaatagtactagctagaaatacaaatttctggttatcatttctcttccctgtggcacttgacattttaattgtcttaaagtttttgaagtacatcttctggccccttgagtactgccagaggcaaaagatgtttgtttcttattcattccacttttgtctcctgggatcccttctgtagcctaaagtatggctgggaaatggacttgagaagattggcttgaattagatcataatcatgtgtgatcccatcatgaattcattggaatttgtgttgcatgtaaggcaatctttcctgttgtaaatcttccttttttaatgtacatatattttgaaaaatatgaataaacatgaaattttaaaa

SEQ ID NO: 140406 - DNA, 572 bp, Homo sapiens
  Payload ID: 7550
  Gene Symbol: HP1BP3
  Gene Name: heterochromatin protein 1, binding protein 3
  ENST ID: ENST00000417710
  CDS Start-End: 199-572
gcggtggggtttgaatgagagcggtgcctcggtaggtcgtcagaaagttacagtcgcccatctgagcgtttgtaagagatggaggcaggagtggtgaggttgattcttcaccacactgaaaccattaggaaaaatccttgtggttaacagcagaggcttcagagtgtaacctgtactcgggcctagaaattatttaaaatggcgactgatacgtctcaaggtgaactcgtccatcctaaggcactcccacttatagtaggagctcagctgatccacgcggacaagttaggtgagaaggtagaagatagcaccatgccgattcgtcgaactgtgaattctacccgggaaactcctcccaaaagcaagcttgctgaaggggaggaagaaaagccagaaccagacataagttcagaggaatctgtctccactgtagaagaacaagagaatgaaactccacctgctacttcgagtgaggcagagcagccaaagggggaacctgagaatgaagagaaggaagaaaataagtcttctgaggaaaccaaaaaggatgagaaagatcagtctaaagaaaa

SEQ ID NO: 140407 - DNA, 759 bp, Homo sapiens
  Payload ID: 7550
  Gene Symbol: HP1BP3
  Gene Name: heterochromatin protein 1, binding protein 3
  ENST ID: ENST00000419948
  CDS Start-End: 1-759
aaaaaggatgagaaagatcagtctaaagaaaaggagaagaaagtgaaaaaaacaattccttcctgggctaccctttctgccagccagctagccagggcccagaaacaaacaccgatggcttcttccccacgtcccaagatggatgcaatcttaactgaggccattaaggcatgcttccagaagagtggtgcatcagtggttgctattcgaaaatacatcatccataagtatccttctctggagctggagagaaggggttatctccttaaacaagcactgaaaagagaattaaatagaggagtcatcaaacagaataggagctctgcagtggatccagaaccacaagtaaaattggaggatgtcctcccactggcctttactcgcctttgtgaacctaaagaagcttcctacagtctcatcaggaaatatgtgtctcagtattatcctaagcttagagtggacatcaggcctcagctgttgaagaacgctctgcagagagcagtagagaggggccagttagaacagataactggcaaaggtgcttcggggacattccagctgaagaaatcaggggagaaacccctgcttggtggaagcctgatggaatatgcaatcttgtctgccattgctgccatgaatgagccgaagacctgctctaccactgctctgaagaagtatgtcctagagaatcacccaggaaccaattctaactatcaaatgcatttgctgaaaaaaaccctgcagaaatgcgaaaagaat

SEQ ID NO: 140408 - DNA, 538 bp, Homo sapiens
  Payload ID: 7550
  Gene Symbol: HP1BP3
  Gene Name: heterochromatin protein 1, binding protein 3
  ENST ID: ENST00000419490
  CDS Start-End: 419-538
agtggtgagtgtgcggagcgccgaggctcgcgttccgccgctgcttccgtcgccggggcgggcgccgcggtgtccctgccgagcgtgagccccgaactgtcaccgcgccgagccccagcctcatccgtcggtgtccgcggtccgagctttccccgcctcgctggcggcccgcgctctcccccgccgtgcgcgttcgccgctgtggcctgtagctacctcgcctcgctgctttgtctccgctgctcttgccgtccttcccgcggccttctgcgggcggggctgtcggctgtcgctttgctgctccgcgacggcggccttgagtctcgctcccccggtgggaaacgtagaactggttactcgccaccttaggcggtggggtttgaatgagagcggtgcctcgaaggtagaagatagcaccatgccgattcgtcgaactgtgaattctacccgggaaactcctcccaaaagcaagcttgctgaaggggaggaagaaaagccagaaccagacataagttcagaggaatctgtctccactgta

SEQ ID NO: 140409 - DNA, 557 bp, Homo sapiens
  Payload ID: 7550
  Gene Symbol: HP1BP3
  Gene Name: heterochromatin protein 1, binding protein 3
  ENST ID: ENST00000443615
  CDS Start-End: 500-557
attacggagctcccagtggtgagtgtgcggagcgccgaggctcgcgttccgccgctgcttccgtcgccggggcgggcgccgcggtgtccctgccgagcgtgagccccgaactgtcaccgcgccgagccccagcctcatccgtcggtgtccgcggtccgagctttccccgcctcgctggcggcccgcgctctcccccgccgtgcgcgttcgccgctgtggcctgtagctacctcgcctcgctgctttgtctccgctgctcttgccgtccttcccgcggccttctgcgggcggggctgtcggctgtcgctttgctgctccgcgacggcggccttgagtctcgctcccccggtgggaaacgtagaactggttactcgccaccttaggcggtggggtttgaatgagagcggtgcctcggtaggtcgtcagaaagttacagtcgcccatctgagcgtttgtaagagatggaggcaggagtggtgagaaggtagaagatagcaccatgccgattcgtcgaactgtgaattctacccgggaaactcctcccaaaagcaagcttg

SEQ ID NO: 140410 - DNA, 473 bp, Homo sapiens
  Payload ID: 7550
  Gene Symbol: HP1BP3
  Gene Name: heterochromatin protein 1, binding protein 3
  ENST ID: ENST00000437575
  CDS Start-End: 339-473
aggggggcggggcggcagagctcggcggctgggactggaggacagcggtggcggaggcgactagcggcggcgggagcggcgccgagaggccgtgcgggacgcgggcgccaggaccggccgaacgcagaggttgattcttcaccacactgaaaccattaggaaaaatccttgtggttaacagcagaggcttcagagtgtaacctgtactcgggcctagaaattatttaaaatggcgactgatacgtctcaaggtgaactcgtccatcctaaggcactcccacttatagtaggagctcagctgatccacgcggacaagttagaaggtagaagatagcaccatgccgattcgtcgaactgtgaattctacccgggaaactcctcccaaaagcaagcttgctgaaggggaggaagaaaagccagaaccagacataagttcagaggaatctgtctccactgtagaagaacaagagaat

SEQ ID NO: 140411 - DNA, 970 bp, Homo sapiens
  Payload ID: 7550
  Gene Symbol: HP1BP3
  Gene Name: heterochromatin protein 1, binding protein 3
  ENST ID: ENST00000424732
  CDS Start-End: 137-970
gcggcagagctcggcggctgggactggaggacagcggtggcggaggcgactagcggcggcgggagcggcgccgagaggccgtgcgggacgcgggcgccaggaccggccgaacgcagagaaggtagaagatagcaccatgccgattcgtcgaactgtgaattctacccgggaaactcctcccaaaagcaagcttgctgaaggggaggaagaaaagccagaaccagacataagttcagaggaatctgtctccactgtagaagaacaagagaatgaaactccacctgctacttcgagtgaggcagagcagccaaagggggaacctgagaatgaagagaaggaagaaaataagtcttctgaggaaaccaaaaaggatgagaaagatcagtctaaagaaaaggagaagaaagtgaaaaaaacaattccttcctgggctaccctttctgccagccagctagccagggcccagaaacaaacaccgatggcttcttccccacgtcccaagatggatgcaatcttaactgaggccattaaggcatgcttccagaagagtggtgcatcagtggttgctattcgaaaatacatcatccataagtatccttctctggagctggagagaaggggttatctccttaaacaagcactgaaaagagaattaaatagaggagtcatcaaacaggttaaaggaaaaggtgcttctggaagttttgttgtggttcagaaatcaagaaaaacacctcagaaatccagaaacagaaagaataggagctctgcagtggatccagaaccacaagtaaaattggaggatgtcctcccactggcctttactcgcctttgtgaacctaaagaagcttcctacagtctcatcaggaaatatgtgtctcagtattatcctaagcttagagtggacatcaggcctcagctgttgaagaacgctctgcagagagcagtagagaggggccagttagaacag

SEQ ID NO: 140412 - DNA, 1159 bp, Homo sapiens
  Payload ID: 7550
  Gene Symbol: HP1BP3
  Gene Name: heterochromatin protein 1, binding protein 3
  ENST ID: ENST00000438032
  CDS Start-End: 179-1159
cggaggcgactagcggcggcgggagcggcgccgagaggccgtgcgggacgcgggcgccaggaccggccgaacgcagaggttgattcttcaccacactgaaaccattaggaaaaatccttgtggttaacagcagaggcttcagagtgtaacctgtactcgggcctagaaattatttaaaatggcgactgatacgtctcaaggtgaactcgtccatcctaaggcactcccacttatagtaggagctcagctgatccacgcggacaagttaggtgagaaggtagaagatagcaccatgccgattcgtcgaactgtgaattctacccgggaaactcctcccaaaagcaagcttgctgaaggggaggaagaaaagccagaaccagacataagttcagaggaatctgtctccactgtagaagaacaagagaatgaaactccacctgctacttcgagtgaggcagagcagccaaagggggaacctgagaatgaagagaaggaagaaaataagtcttctgaggaaaccaaaaaggatgagaaagatcagtctaaagaaaaggagaagaaagtgaaaaaaacaattccttcctgggctaccctttctgccagccagctagccagggcccagaaacaaacaccgatggcttcttccccacgtcccaagatggatgcaatcttaactgaggccattaaggcatgcttccagaagagtggtgcatcagtggttgctattcgaaaatacatcatccataagtatccttctctggagctggagagaaggggttatctccttaaacaagcactgaaaagagaattaaatagaggagtcatcaaacaggttaaaggaaaaggtgcttctggaagttttgttgtggttcagaaatcaagaaaaacacctcagaaatccagaaacagaaagaataggagctctgcagtggatccagaaccacaagtaaaattggaggatgtcctcccactggcctttactcgcctttgtgaacctaaagaagcttcctacagtctcatcaggaaatatgtgtctcagtattatcctaagcttagagtggacatcaggcctcagctgttgaagaacgctctgcagagagcagtagagaggggccagttagaacagataactggcaaaggtgcttcggggacattccag

SEQ ID NO: 140413 - DNA, 727 bp, Homo sapiens
  Payload ID: 7550
  Gene Symbol: HP1BP3
  Gene Name: heterochromatin protein 1, binding protein 3
  ENST ID: ENST00000414993
  CDS Start-End: 501-727
agtggtgagtgtgcggagcgccgaggctcgcgttccgccgctgcttccgtcgccggggcgggcgccgcggtgtccctgccgagcgtgagccccgaactgtcaccgcgccgagccccagcctcatccgtcggtgtccgcggtccgagctttccccgcctcgctggcggcccgcgctctcccccgccgtgcgcgttcgccgctgtggcctgtagctacctcgcctcgctgctttgtctccgctgctcttgccgtccttcccgcggccttctgcgggcggggctgtcggctgtcgctttgctgctccgcgacggcggccttgagtctcgctcccccggtgggaaacgtagaactggttactcgccaccttaggcggtggggtttgaatgagagcggtgcctcggttgattcttcaccacactgaaaccattaggaaaaatccttgtggttaacagcagaggcttcagagtgtaacctgtactcgggcctagaaattatttaaaatggcgactgatacgtctcaaggtgaactcgtccatcctaaggcactcccacttatagtaggagctcagctgatccacgcggacaagttaggtgagaaggtagaagatagcaccatgccgattcgtcgaactgtgaattctacccgggaaactcctcccaaaagcaagcttgctgaaggggaggaagaaaagccagaaccagacataagttcagaggaatctgtctc

SEQ ID NO: 140414 - DNA, 1602 bp, Homo sapiens
  Payload ID: 7551
  Gene Symbol: HNRNPAB
  Gene Name: heterogeneous nuclear ribonucleoprotein A/B
  Uniprot ID: Q99729
  ENST ID: ENST00000355836
  CDS Start-End: 226-1083
cggcaccgcgcgggacggagcttggctgttggtcggtgggttcccgtgcggcggcggccaaggaggaggagacacagttggagcagctccgtgggctgactggggcgaggcctcagcagcgcgagcttgagtgcggccgagcctgcggcgccttcccctgcgggtggggacgagcgggccccgcggcgtcatcggcggcgaggagccgccgcgcctcggcctagcatgtcggaagcgggcgaggagcagcccatggagacgacgggcgccaccgagaacggacatgaggccgtccccgaaggcgagtcgccggccggggctggcacgggcgccgcggcgggggctggaggcgcgaccgcggcgcccccgagcgggaatcagaacggcgccgagggcgaccagatcaacgccagcaagaacgaggaggacgcgggaaaaatgttcgttggtggcctgagctgggatactagcaaaaaagatttaaaagactattttactaaatttggagaggtcgttgactgtacaataaaaatggatcccaacactggacggtcaagagggtttgggtttatcctgttcaaagatgcagccagtgtggagaaggtcctagaccagaaggagcacaggctggatggccgtgtcattgaccctaaaaaggccatggctatgaagaaggacccggtgaagaaaatcttcgttgggggtctgaatcctgaagccactgaggaaaagatcagggagtactttggcgagtttggggagattgaggccattgaattgccaatggatccaaagttgaacaaaagacgaggttttgtgtttatcacctttaaagaagaagaacccgtgaagaaggttctggagaaaaagttccatactgtcagtggaagcaagtgtgagatcaaggtggcccagcccaaagaagtctatcagcagcagcagtatggctctgggggccgtggaaaccgcaaccgagggaaccgaggcagcggaggtggtggtggaggtggaggtcagggtagtacaaactacggcaagagccagcgacgtggtggccatcagaataactacaagccatactgaggcggcagcaggagcgaccaactgatcgcacacatgctttgtttggatatggagtgaacacaattatgtaccaaatttaacttggcaaactttctattgcctgtcccatgtgcatcttatttaaaatttcccccatggaaatcactctcctgttgactatttccagagctctaggtgtttaggcagcgtgtggtgtctgagaggccatagcgccatcatgggctgatttttattaccaggtcccccagaagcaggtgggaggctctgcttcctgctgccgctctgcagcctggacctgtggaccctggttgtaaagagtaaattgtatcttaggaaaccagtgtcacctttttttcaccttttaattttatattatttgcgtcatacatttcctgtaacggaagtgttaattttactgtactttttggtaccttttgggaatctaatgtattgtaaggtattttacacgtgtcctgattttgccacaacctggatattgaagctatccaagcttttgaa

SEQ ID NO: 140415 - DNA, 1796 bp, Homo sapiens
  Payload ID: 7551
  Gene Symbol: HNRNPAB
  Gene Name: heterogeneous nuclear ribonucleoprotein A/B
  Uniprot ID: Q99729
  ENST ID: ENST00000358344
  CDS Start-End: 258-1256
aaagggcgccacgagtcggcattgtcaggcggcggcaccgcgcgggacggagcttggctgttggtcggtgggttcccgtgcggcggcggccaaggaggaggagacacagttggagcagctccgtgggctgactggggcgaggcctcagcagcgcgagcttgagtgcggccgagcctgcggcgccttcccctgcgggtggggacgagcgggccccgcggcgtcatcggcggcgaggagccgccgcgcctcggcctagcatgtcggaagcgggcgaggagcagcccatggagacgacgggcgccaccgagaacggacatgaggccgtccccgaaggcgagtcgccggccggggctggcacgggcgccgcggcgggggctggaggcgcgaccgcggcgcccccgagcgggaatcagaacggcgccgagggcgaccagatcaacgccagcaagaacgaggaggacgcgggaaaaatgttcgttggtggcctgagctgggatactagcaaaaaagatttaaaagactattttactaaatttggagaggtcgttgactgtacaataaaaatggatcccaacactggacggtcaagagggtttgggtttatcctgttcaaagatgcagccagtgtggagaaggtcctagaccagaaggagcacaggctggatggccgtgtcattgaccctaaaaaggccatggctatgaagaaggacccggtgaagaaaatcttcgttgggggtctgaatcctgaagccactgaggaaaagatcagggagtactttggcgagtttggggagattgaggccattgaattgccaatggatccaaagttgaacaaaagacgaggttttgtgtttatcacctttaaagaagaagaacccgtgaagaaggttctggagaaaaagttccatactgtcagtggaagcaagtgtgagatcaaggtggcccagcccaaagaagtctatcagcagcagcagtatggctctgggggccgtggaaaccgcaaccgagggaaccgaggcagcggaggtggtggtggaggtggaggtcagagtcagagttggaatcagggctacggcaactactggaaccagggctacggctaccagcagggctacgggcctggctatggcggctacgactactcgccctatggctattacggctacggccccggctacgactacagtcagggtagtacaaactacggcaagagccagcgacgtggtggccatcagaataactacaagccatactgaggcggcagcaggagcgaccaactgatcgcacacatgctttgtttggatatggagtgaacacaattatgtaccaaatttaacttggcaaactttctattgcctgtcccatgtgcatcttatttaaaatttcccccatggaaatcactctcctgttgactatttccagagctctaggtgtttaggcagcgtgtggtgtctgagaggccatagcgccatcatgggctgatttttattaccaggtcccccagaagcaggtgggaggctctgcttcctgctgccgctctgcagcctggacctgtggaccctggttgtaaagagtaaattgtatcttaggaaaccagtgtcacctttttttcaccttttaattttatattatttgcgtcatacatttcctgtaacggaagtgttaattttactgtactttttggtaccttttgggaatctaatgtattgtaaggtattttacacgtgtcctgattttgccacaacctggatattgaagctatccaagcttttgaaataaaatttaaaaacccccaa

SEQ ID NO: 140416 - DNA, 1747 bp, Homo sapiens
  Payload ID: 7551
  Gene Symbol: HNRNPAB
  Gene Name: heterogeneous nuclear ribonucleoprotein A/B
  ENST ID: ENST00000506339
  CDS Start-End: 232-1215
aggcggcggcaccgcgcgggacggagcttggctgttggtcggtgggttcccgtgcggcggcggccaaggaggaggagacacagttggagcagctccgtgggctgactggggcgaggcctcagcagcgcgagcttgagtgcggccgagcctgcggcgccttcccctgcgggtggggacgagcgggccccgcggcgtcatcggcggcgaggagccgccgcgcctcggcctagcatgtcggaagcgggcgaggagcagcccatggagacgacgggcgccaccgagaacggacatgaggccgtccccgaaggcgagtcgccggccggggctggcacgggcgccgcggcgggggctggaggcgcgaccgcggcgcccccgagcgggaatcagaacggcgccgagggcgaccagatcaacgccagcaagaacgaggaggacgcgggaaaaatgttcgttggtggcctgagctgggatactagcaaaaaagatttaaaagactattttactaaatttggagaggtcgttgactgtacaataaaaatggatcccaacactggacggtcaagagggtttgggtttatcctgttcaaagatgcagccagtgtggagaaggtcctagaccagaaggagcacaggctggatggccgtgtcattgaccctaaaaaggccatggctatgaagaaggacccggtgaagaaaatcttcgttgggggtctgaatcctgaagccactgaggaaaagatcagggagtactttggcgagtttggggagattgaggccattgaattgccaatggatccaaagttgaacaaaagacgaggttttgtgtttatcacctttaaagaagaagaacccgtgaagaaggttctggagaaaaagttccatactgtcagtggaagcaagtgtgagatcaaggtggcccagcccaaagaagtctatcagcagcagcagtatggctctgggggccgtggaaaccgcaaccgagggaaccgaggcagcggaggtggtcagagtcagagttggaatcagggctacggcaactactggaaccagggctacggctaccagcagggctacgggcctggctatggcggctacgactactcgccctatggctattacggctacggccccggctacgactacagtcagggtagtacaaactacggcaagagccagcgacgtggtggccatcagaataactacaagccatactgaggcggcagcaggagcgaccaactgatcgcacacatgctttgtttggatatggagtgaacacaattatgtaccaaatttaacttggcaaactttctattgcctgtcccatgtgcatcttatttaaaatttcccccatggaaatcactctcctgttgactatttccagagctctaggtgtttaggcagcgtgtggtgtctgagaggccatagcgccatcatgggctgatttttattaccaggtcccccagaagcaggtgggaggctctgcttcctgctgccgctctgcagcctggacctgtggaccctggttgtaaagagtaaattgtatcttaggaaaccagtgtcacctttttttcaccttttaattttatattatttgcgtcatacatttcctgtaacggaagtgttaattttactgtactttttggtaccttttgggaatctaatgtattgtaaggtattttacacgtgtcctgattttgccacaacctggatattgaagctatccaagcttttgaaataaaatttaaaa

SEQ ID NO: 140417 - DNA, 1595 bp, Homo sapiens
  Payload ID: 7551
  Gene Symbol: HNRNPAB
  Gene Name: heterogeneous nuclear ribonucleoprotein A/B
  ENST ID: ENST00000515193
  CDS Start-End: 221-1063
ccgcgcgggacggagcttggctgttggtcggtgggttcccgtgcggcggcggccaaggaggaggagacacagttggagcagctccgtgggctgactggggcgaggcctcagcagcgcgagcttgagtgcggccgagcctgcggcgccttcccctgcgggtggggacgagcgggccccgcggcgtcatcggcggcgaggagccgccgcgcctcggcctagcatgtcggaagcgggcgaggagcagcccatggagacgacgggcgccaccgagaacggacatgaggccgtccccgaaggcgagtcgccggccggggctggcacgggcgccgcggcgggggctggaggcgcgaccgcggcgcccccgagcgggaatcagaacggcgccgagggcgaccagatcaacgccagcaagaacgaggaggacgcgggaaaaatgttcgttggtggcctgagctgggatactagcaaaaaagatttaaaagactattttactaaatttggagaggtcgttgactgtacaataaaaatggatcccaacactggacggtcaagagggtttgggtttatcctgttcaaagatgcagccagtgtggagaaggtcctagaccagaaggagcacaggctggatggccgtgtcattgaccctaaaaaggccatggctatgaagaaggacccggtgaagaaaatcttcgttgggggtctgaatcctgaagccactgaggaaaagatcagggagtactttggcgagtttggggagattgaggccattgaattgccaatggatccaaagttgaacaaaagacgaggttttgtgtttatcacctttaaagaagaagaacccgtgaagaaggttctggagaaaaagttccatactgtcagtggaagcaagtgtgagatcaaggtggcccagcccaaagaagtctatcagcagcagcagtatggctctgggggccgtggaaaccgcaaccgagggaaccgaggcagcggaggtggtcagggtagtacaaactacggcaagagccagcgacgtggtggccatcagaataactacaagccatactgaggcggcagcaggagcgaccaactgatcgcacacatgctttgtttggatatggagtgaacacaattatgtaccaaatttaacttggcaaactttctattgcctgtcccatgtgcatcttatttaaaatttcccccatggaaatcactctcctgttgactatttccagagctctaggtgtttaggcagcgtgtggtgtctgagaggccatagcgccatcatgggctgatttttattaccaggtcccccagaagcaggtgggaggctctgcttcctgctgccgctctgcagcctggacctgtggaccctggttgtaaagagtaaattgtatcttaggaaaccagtgtcacctttttttcaccttttaattttatattatttgcgtcatacatttcctgtaacggaagtgttaattttactgtactttttggtaccttttgggaatctaatgtattgtaaggtattttacacgtgtcctgattttgccacaacctggatattgaagctatccaagcttttgaaataaaatttaaaa

SEQ ID NO: 140418 - DNA, 1785 bp, Homo sapiens
  Payload ID: 7551
  Gene Symbol: HNRNPAB
  Gene Name: heterogeneous nuclear ribonucleoprotein A/B
  Uniprot ID: Q99729
  ENST ID: ENST00000504898
  CDS Start-End: 268-1266
tcggtgggttcccgtgcggcggcggccaaggaggaggagacacagttggagcagctccgtgggctgactggggcgaggcctcagcagcgcgagcttgagtgcggccgagcctgcggcgccttcccctgcgggtggggacgagcgggccccgcggcgtcatcggcggcgaggtgagcggcggccggcgggcgggagctctggcgggagccgcgccggcctgacgcgctgtcgccgctggttgcaggagccgccgcgcctcggcctagcatgtcggaagcgggcgaggagcagcccatggagacgacgggcgccaccgagaacggacatgaggccgtccccgaaggcgagtcgccggccggggctggcacgggcgccgcggcgggggctggaggcgcgaccgcggcgcccccgagcgggaatcagaacggcgccgagggcgaccagatcaacgccagcaagaacgaggaggacgcgggaaaaatgttcgttggtggcctgagctgggatactagcaaaaaagatttaaaagactattttactaaatttggagaggtcgttgactgtacaataaaaatggatcccaacactggacggtcaagagggtttgggtttatcctgttcaaagatgcagccagtgtggagaaggtcctagaccagaaggagcacaggctggatggccgtgtcattgaccctaaaaaggccatggctatgaagaaggacccggtgaagaaaatcttcgttgggggtctgaatcctgaagccactgaggaaaagatcagggagtactttggcgagtttggggagattgaggccattgaattgccaatggatccaaagttgaacaaaagacgaggttttgtgtttatcacctttaaagaagaagaacccgtgaagaaggttctggagaaaaagttccatactgtcagtggaagcaagtgtgagatcaaggtggcccagcccaaagaagtctatcagcagcagcagtatggctctgggggccgtggaaaccgcaaccgagggaaccgaggcagcggaggtggtggtggaggtggaggtcagagtcagagttggaatcagggctacggcaactactggaaccagggctacggctaccagcagggctacgggcctggctatggcggctacgactactcgccctatggctattacggctacggccccggctacgactacagtcagggtagtacaaactacggcaagagccagcgacgtggtggccatcagaataactacaagccatactgaggcggcagcaggagcgaccaactgatcgcacacatgctttgtttggatatggagtgaacacaattatgtaccaaatttaacttggcaaactttctattgcctgtcccatgtgcatcttatttaaaatttcccccatggaaatcactctcctgttgactatttccagagctctaggtgtttaggcagcgtgtggtgtctgagaggccatagcgccatcatgggctgatttttattaccaggtcccccagaagcaggtgggaggctctgcttcctgctgccgctctgcagcctggacctgtggaccctggttgtaaagagtaaattgtatcttaggaaaccagtgtcacctttttttcaccttttaattttatattatttgcgtcatacatttcctgtaacggaagtgttaattttactgtactttttggtaccttttgggaatctaatgtattgtaaggtattttacacgtgtcctgattttgccacaacctggatattgaagctatccaagcttttgaa

SEQ ID NO: 140419 - DNA, 1571 bp, Homo sapiens
  Payload ID: 7551
  Gene Symbol: HNRNPAB
  Gene Name: heterogeneous nuclear ribonucleoprotein A/B
  ENST ID: ENST00000514633
  CDS Start-End: 224-1075
gcaccgcgcgggacggagcttggctgttggtcggtgggttcccgtgcggcggcggccaaggaggaggagacacagttggagcagctccgtgggctgactggggcgaggcctcagcagcgcgagcttgagtgcggccgagcctgcggcgccttcccctgcgggtggggacgagcgggccccgcggcgtcatcggcggcgaggagccgccgcgcctcggcctagcatgtcggaagcgggcgaggagcagcccatggagacgacgggcgccaccgagaacggacatgaggccgtccccgaaggcgagtcgccggccggggctggcacgggcgccgcggcgggggctggaggcgcgaccgcggcgcccccgagcgggaatcagaacggcgccgagggcgaccagatcaacgccagcaagaacgaggaggacgcgggaaaaatgttcgttggtggcctgagctgggatactagcaaaaaagatttaaaagactattttactaaatttggagaggtcgttgactgtacaataaaaatggatcccaacactggacggtcaagagggtttgggtttatcctgttcaaagatgcagccagtgtggagaaggtcctagaccagaaggagcacaggctggatggccgtgtcattgaccctaaaaaggccatggctatgaagaaggacccggtgaagaaaatcttcgttgggggtctgaatcctgaagccactgaggaaaagatcagggagtactttggcgagtttggggagattgaggccattgaattgccaatggatccaaagttgaacaaaagacgaggttttgtgtttatcacctttaaagaagaagaacccgtgaagaaggttctggagaaaaagttccatactgtcagtggaagcaagtgtgagatcaaggtggcccagcccaaagaagtctatcagcagcagcagtatggctctgggggccgtggaaaccgcaaccgagggaaccgaggcagcggaggtggtggtggaggtcagggtagtacaaactacggcaagagccagcgacgtggtggccatcagaataactacaagccatactgaggcggcagcaggagcgaccaactgatcgcacacatgctttgtttggatatggagtgaacacaattatgtaccaaatttaacttggcaaactttctattgcctgtcccatgtgcatcttatttaaaatttcccccatggaaatcactctcctgttgactatttccagagctctaggtgtttaggcagcgtgtggtgtctgagaggccatagcgccatcatgggctgatttttattaccaggtcccccagaagcaggtgggaggctctgcttcctgctgccgctctgcagcctggacctgtggaccctggttgtaaagagtaaattgtatcttaggaaaccagtgtcacctttttttcaccttttaattttatattatttgcgtcatacatttcctgtaacggaagtgttaattttactgtactttttggtaccttttgggaatctaatgtattgtaaggtattttacacgtgtcctgattttgccacaacctggata

SEQ ID NO: 140420 - DNA, 1674 bp, Homo sapiens
  Payload ID: 7551
  Gene Symbol: HNRNPAB
  Gene Name: heterogeneous nuclear ribonucleoprotein A/B
  Uniprot ID: Q99729
  ENST ID: ENST00000506259
  CDS Start-End: 291-1148
gcgggacggagcttggctgttggtcggtgggttcccgtgcggcggcggccaaggaggaggagacacagttggagcagctccgtgggctgactggggcgaggcctcagcagcgcgagcttgagtgcggccgagcctgcggcgccttcccctgcgggtggggacgagcgggccccgcggcgtcatcggcggcgaggtgagcggcggccggcgggcgggagctctggcgggagccgcgccggcctgacgcgctgtcgccgctggttgcaggagccgccgcgcctcggcctagcatgtcggaagcgggcgaggagcagcccatggagacgacgggcgccaccgagaacggacatgaggccgtccccgaaggcgagtcgccggccggggctggcacgggcgccgcggcgggggctggaggcgcgaccgcggcgcccccgagcgggaatcagaacggcgccgagggcgaccagatcaacgccagcaagaacgaggaggacgcgggaaaaatgttcgttggtggcctgagctgggatactagcaaaaaagatttaaaagactattttactaaatttggagaggtcgttgactgtacaataaaaatggatcccaacactggacggtcaagagggtttgggtttatcctgttcaaagatgcagccagtgtggagaaggtcctagaccagaaggagcacaggctggatggccgtgtcattgaccctaaaaaggccatggctatgaagaaggacccggtgaagaaaatcttcgttgggggtctgaatcctgaagccactgaggaaaagatcagggagtactttggcgagtttggggagattgaggccattgaattgccaatggatccaaagttgaacaaaagacgaggttttgtgtttatcacctttaaagaagaagaacccgtgaagaaggttctggagaaaaagttccatactgtcagtggaagcaagtgtgagatcaaggtggcccagcccaaagaagtctatcagcagcagcagtatggctctgggggccgtggaaaccgcaaccgagggaaccgaggcagcggaggtggtggtggaggtggaggtcagggtagtacaaactacggcaagagccagcgacgtggtggccatcagaataactacaagccatactgaggcggcagcaggagcgaccaactgatcgcacacatgctttgtttggatatggagtgaacacaattatgtaccaaatttaacttggcaaactttctattgcctgtcccatgtgcatcttatttaaaatttcccccatggaaatcactctcctgttgactatttccagagctctaggtgtttaggcagcgtgtggtgtctgagaggccatagcgccatcatgggctgatttttattaccaggtcccccagaagcaggtgggaggctctgcttcctgctgccgctctgcagcctggacctgtggaccctggttgtaaagagtaaattgtatcttaggaaaccagtgtcacctttttttcaccttttaattttatattatttgcgtcatacatttcctgtaacggaagtgttaattttactgtactttttggtaccttttgggaatctaatgtattgtaaggtattttacacgtgtcctgattttgccacaacctggatattgaagctatccaagcttttgaaataaaat

SEQ ID NO: 140421 - DNA, 1565 bp, Homo sapiens
  Payload ID: 7551
  Gene Symbol: HNRNPAB
  Gene Name: heterogeneous nuclear ribonucleoprotein A/B
  ENST ID: ENST00000615932
  CDS Start-End: 16-1008
gcgcctcggcctagcatgtcggaagcgggcgaggagcagcccatggagacgacgggcgccaccgagaacggacatgaggccgtccccgaagcgagtcgcggccggggctggacgggcgccgcggcggggctggaggcgcgaccgcggcgcccccgagcgggaatcagaacggcgccgagggaccagatcaacgccagcaagaacgaggaggacgcgggaaaaatgttcgttggtggcctgagctgggatactagcaaaaaagatttaaaagactattttactaaatttggagaggtcgttgactgtacaataaaaatggatcccaacactggacggtcaagagggtttgggtttatcctgttcaaagatgcagccagtgtggagaaggtcctagaccagaaggagcacaggctggatggccgtgtcattgaccctaaaaaggccatggctatgaagaaggacccggtgaagaaaatcttcgttgggggtctgaatcctgaagccactgaggaaaagatcagggagtactttggcgagtttggggagattgaggccattgaattgccaatggatccaaagttgaacaaaagacgaggttttgtgtttatcacctttaaagaagaagaacccgtgaagaaggttctggagaaaaagttccatactgtcagtggaagcaagtgtgagatcaaggtggcccagcccaaagaagtctatcagcagcagcagtatggctctgggggccgtggaaaccgcaaccgagggaaccgaggcagcggaggtggtggtggaggtggaggtcagagtcagagttggaatcagggctacggcaactactggaaccagggctacggctaccagcagggctacgggcctggctatggcggctacgactactcgccctatggctattacggctacggccccggctacgactacagtcagggtagtacaaactacggcaagagccagcgacgtggtggccatcagaataactacaagccatactgaggcggcagcaggagcgaccaactgatcgcacacatgctttgtttggatatggagtgaacacaattatgtaccaaatttaacttggcaaactttctattgcctgtcccatgtgcatcttatttaaaatttcccccatggaaatcactctcctgttgactatttccagagctctaggtgtttaggcagcgtgtggtgtctgagaggccatagcgccatcatgggctgatttttattaccaggtcccccagaagcaggtgggaggctctgcttcctgctgccgctctgcagcctggacctgtggaccctggttgtaaagagtaaattgtatcttaggaaaccagtgtcacctttttttcaccttttaattttatattatttgcgtcatacatttcctgtaacggaagtgttaattttactgtactttttggtaccttttgggaatctaatgtattgtaaggtattttacacgtgtcctgattttgccacaacctggatattgaagctatccaagcttttgaaataaaatttaaaaacccccaagcctgggtgagtgtggg

SEQ ID NO: 140422 - DNA, 8726 bp, Homo sapiens
  Payload ID: 7552
  Gene Symbol: HNRNPA0
  Gene Name: heterogeneous nuclear ribonucleoprotein A0
  Uniprot ID: Q13151
  ENST ID: ENST00000314940
  CDS Start-End: 311-1228
cgcgttcagcggcctctttgtgtggtgcccagataggggagcggaggtggcggcggcggcggtagcggtggccttggttgtcttccagtctcctcggctcgccctttagccggcaccgctccccttccctcccccttcctctcttccttccttccctccccttccctttttcccttccccgtcggtgagcggcgggggtggctccagcaacggctgggcccaagctgtgtagaggccttaaccaacgataacggcggcgacggcgaaacctcggagctcgcagggcgggggcaaggcccgggccttggagatggagaattctcagttgtgtaagctgttcatcggcggcctcaatgtgcagacgagtgagtcgggcctgcgcggccactttgaggcctttgggactctgacggactgcgtggtggtggtgaatccccagaccaagcgctcccgttgctttggcttcgtgacctactccaatgtggaggaggcggacgccgccatggccgcctcgccccatgccgtggacggcaacactgtggagctgaagcgggcggtgtcccgggaggattcggcgcggcccggtgcccacgccaaggttaagaagctctttgtcggaggccttaaaggagacgtggctgagggcgacctgatcgagcacttctcgcagtttggcaccgtggaaaaggccgagattattgccgacaagcagtccggcaagaagcgtggattcggcttcgtgtatttccagaatcacgacgcggcagacaaggccgcggtggtcaagttccatccgattcagggccatcgcgtggaggtgaagaaagcagtccccaaggaggatatctactccggtgggggtggaggcggctcccgatcctcccggggcggccgaggcggccgggggcgcggcggtggtcgagaccagaacggcctttccaagggcggcggcggcggttacaacagctacggtggttacggcggcggcggaggcggcggctacaatgcctacggaggcggcggcggcggttcgtcctacggtgggagcgactacggtaacggcttcggcggcttcggcagctacagccagcatcagtcctcctatgggcccatgaagagcggcggcggcggcggcggtggaggcagtagctggggcggtcgcagtaatagtggaccttacagaggcggctatggcggtgggggtggctatggaggcagctccttctaaaagaaaatttaaaatgcctgggagtggctataggggtagctctttccaacagcccaagtggggtcaactcctaagccccaccccctcacacacaccgccttccctgttttgcccttgggggagccacttctaaggctgcttacccttgggggtgttcctctatttgcctgccacctctcttgtctctccctctgaagatggactcggccccacatacacatttttgtgttacagtcattgatggactctatttttttattattacttggaccttggtcgtttttatactagcaaaatgtcttgttttaatttgtgttttttggggggagggagggagtgaacttgctgattctgtagcaaaacctgggtgggggttggggtggggggtagtttactttgttgtaaggacttgataacctggctacagcgttttctatgaaatctacttggatcccatgcctgaaatttggaagcatatgtacaaaaatcatttttacgttttatttttaataaatcattgtgtttgaccgtacatgtctaacattttttttctaggatccattccgtaccgttttttaagggatatttgtttaagactttacgtgttaattctttattcttgatgtgtacttagagaaacttaagaggtcctgtggtttttttcccctctcctgttgccctgctagttgcgtgttgaattatatcccttacaggcaaaacttttgaagtggtggatgtggctttttaaactcttaagtttctgtgcatccatctcttgtactaagcgaattgtttatcatcttgacatggttggtcatttctatgacaatttacttcaaactgtgtactgtgtagttctatatagtttgtgttaagcatgtcattcatataaactgtttaaaatttttcagatggcctagtttcatccctcttactggtttgtctgtaatgaatggttaaaaataagggttatattttaccctcaaatgcgtttttgtactttcagagcaggtttaaacgttttttttttttttttcctatatccgaactgttggcctcatggaaatccctttcccgatctttgtagcaccatctactggcagaatggcagagtagctgcgaaacaatttgtttaaaaacttgcttaagacaattgcatcagatttggaagttttgccatcaaaattctttgcagaattggaagttaacacatttgcttgtaactgagatgggcttcacaggaatgtagttgccagttcatatcacaatagccctttctatatgaggtttgaaaatgtaaactgctatgcatagcttgggcaatagccctaaattgctatgacaactaatgaaccagctacgtatactggtattttaggtgcaagttgtaaagcaaaatatctgtgtattctgcttggttaacaaatgtatatttgtagccctttcctgcaatagcattcaagttgttgtttataagagaagaacaaaagtgataataggtgaaaattgcctttctggatagaaatagagaatagcaacgtttatggatatcacaaataaagaattcaattctttacatgattgagtgagagtatgtataacctggtgggtgggttcagagtaccttttaatctagtatgcttaacttgatgttaatatttaacttaaatatttgacttacatgttgacgttgaaggctcaaagctatactaagaagctttctgaaagattgggctttaaaataaaataatattttaatattgaaccattttttaacttcttgtcactgttcaattcctaaggtctagttcttgccagttttttttttttttttcctgattggcagggcttttaaagaagtaagaagaaaggttaagattattaggctaggttatagctgctcagtagtcattttgacaaagggtagcggatggttggtacaaatagtgttatatcctctatgacaaacggggtggatgtttttacacattgaggtaatacatagtcaaatcctttgctctcaaatagttgtacactttccatacatttctgtcttattttttaattctagtgatacacaaattacatgtgggctacttcatttggtaatttggtccagctttttggtggctgtagagtggcctctaggatacagaaaatgattctctgaaatttttcgttgtaattgttaaatactactctgcttgacttactcagttttggtgggaagatctgggtcaattggaatagtacacctttctcagggttttcagtttaataaggttgtcatattattcccaacatgggaatatagtggcttctaaagtttgcaaatgaattatgtaaaaggattttctgtgtattaggaaggcaacctgttctgttcatggtatattaacacttcattgtcatgtgtctacccttaaaattgctatttgtagtgaagaaaaaagcatagtggtatttagtcacttctgggttcctcttgtcagtttatatgcaaacattttggcatgtgggacttggggaggagggacaattggttgtatgttttgaccacttccacctatgaaaattatctgaacattattcagatttaagagttcatgggagcaggtggtacagaacctagtgttgaatataatttttgtgccatgcttgaatgtattttgacggattagcaaaataaaagtgaacctcctatttttcatcttaatgtgaagatctttggcatttacattcttttaaaagtataaattcagtagtcattagttgaaagtggtttgaaaggctgttagagatgatacaggttgagtattccttatctgaaattcttgggcccagaagtgttttgagttttagatttttttcaatttttgaatatttccattatgtttaccagctgagcagctctcatacaaaaatgtaaaatccaaactgcttcaatgagcatttcctttgaatgtcatgtctgcactcaaaaaatttcggattttggagcattttagattttttgattggaatatctgtagtgtttttcaggtcatttaaaaagctctcattggtactgatttactgtatccaaaaaaaagcctgcaagtggttaaggttcacagtgataactatcaaatcagaatgactatactgattgtacccattcatccatttttaacttagtgatttggaacgtttcatattcaaatctaattttcataatttttaagtaaacctaaaagattgaggatacttgagaaatttgcatttatgatttccttcaaaaccagaagtgatggtatcagttattggatttgtaaacttagtttaccttttaagtgtgcttaagttttgagagtttgcattttaggttaaattttgtctgcccgcgtctgctgattgcagataggcatttggatgttggatttggagcagaactgcatctagactacacggattttacccaaaaagacagcacttgcacttaggctaagtgtctttctccatcgtaaccaatttattgaatcactttaagagtgatcattggggaaattttcctcctcagccttattttggccttttgaaacagcaacaaagactgcctagtcaaataactccttagctgtcctgcttttgagtgaacttcatatttgccttgaatgagaatttaaatgttacaaggtaaaacatttattataaaaagatatttgaaagctgctatttaaaaaggaattccaaagtaggaagactagaagggcaattctctattttccacctattttttttactttgatttgaagccagatgatttgaaccttcagagagggaaaggattcaggaagacacctttggtagttattcttaactgtttccttctctattcaggcaggctttctttgtctctttaattcttttaccactttgtatggtttacttaaaaaatctatctgaaatagctatcatttcctgctataaagttctcaagtgtaaacttttgccatttaaacagtgtgcttatttcccagtgtttaccgtcaatttcattgggtgttaggcacctttgtgtaagacagttctataatgtggaggtacacagcagtgagacaaacatggttgctgtcttcatataccttgcgttctggttggaattcaatttattttgaaatgggaattcaatttattttgagatgatgcatcttttcctttacagcattgtgtcacaatctcatattgttcacaccatcaaaattggagttagctccattgtcattgaatgtacattctctgatgaaaattaagactcttttctccttaattgattactttttagaaatcaaaggtgtattttgtctttgatgcttacgttgcaaatgtaatttgcttcatagtgggtatctgatttaatatttcatagcccttaaggacgtaaatttgggcatccaatagaccaaattctgttcctgacacagtcactttctagcactgcgaccttggacaaactggcccgagcctcacttgccttatttgtaaaaaaataggctatggtaatacctgctacataggattgttgggcagattcagtgaaagaatgcatataaagaagggcttactgtagtctctggtacacagtaattttactatatggcccctaatgaagaggtgggacagactagcaaaaggcatacttttatatcttagtacccgagatatgcatggtctttaggctttgctctttacttgctgggtgagcttccatgtggtagttctctaaatcactgctgcttcaactctagtaggagagagatgaattctgctagccatctgtaatgttttaagtatttgttaatattaggaaggtataaataatgtgagtgttgaggagaggtgacttcaggtaggaagaaggatcaagagaggcattgtggagcatataacatttaaccttaaaagataggtcttatagagaaggtgggaggagaaagagggcattttaggtggaggacagataggcagaaacatggagcgtatttggagaagtatgcatattggatgccaaacactaggtacatttacaaatgttctcattgcatcattcagtaaccttcacagataaggttgctaaatctcatgccagaaaagtaactcccaaggacccccagctggtgacatggtagaactgagagttgaatccaagtttgaccaattctagttgtttcgctccttctactaagcttcattgacttccagctaacaaatgtctaatttgtactaagataaaagagagttgtgagaaataaattgagaaaatgaagttggaaccaggttactgaggtctttgagtagtaggctaaggagtttggacttagggtaggcagtaaaagtcattaaaggtttttgagcaacaataatggtagtgaaactaattcacaaagattagtccagtagcactgagtaacataaatggcagtgggggatgtttcaaagtggcaagtttgctaagacaactgatgttaaccaggtaagagaatgagagcatgaacaaagagcaatggaaatagactgacaaagaagttgaggtaagttgtgaaagcataattgacaaatatttggatatatgaagaatgaggaagagagagtagattaatcaaaattactgtgtgagaggatggtgatgccactggtaataggaagagaagatttagagggaagatttggacatagttgaagatgctggtagcacattgaagcattgtgtcttgcgcatatagctttacaaaatggccattgtgctggatattctttttgcccttcctgatctattttccatctttatctctcttgttctgtgttcctgggaggctgacaaataaagaactgcatactctcttttctggctttattcatggtgggtttggacagtgatagaaaagtgaggctgaaatatttgctccttctctttctcatatacttagcaagagattgtgagtggccacagctctgctccagtggccctcttatagctctaggtcttttctggcttctcgtaactgtctcctattgctagattctctagtcccaagaaggttcaaaccttgttgatttgccttaactgtgcccatacccttgtaaatagttccttttattaaaactcttcaataactgaatatactgtggtcatctcttcagtgaaattaaaaaaaaaaacttctttcacattttcttatgacttgatcttcccacaccaccaaacgtgaagatctagctatttgcactaggttactatccctaaattcagtgcctccctgtttcttagtatgtcaagttaaaatttgttactcttctgctgggtgattgtgctggaaatacagaagaaaaagacaaaaatccctgccctcaaagagcttatattttactggggagagacaggcaataagacataatcaattatatggtatgttagaagatgagaagtatagaaaaaattagggtgaggaatggcgattgttgcaagggatgtttgtgaggatagcatactttaaaataggtggtatgggtaggtctctcagaaagtgacatttgagcaaagacttgaaggaaatgtgggagtgagcaatataggtatgggaagagcattctaggtagaggattaggaagagcaaaagccctgaagcaggactgtgtctggcctctgaagaaatgcaaattgttcagggttgttggacctgaaggaagaggaggaaaggaataatgaggccagaggggccagatcatgtagggatttgtaggttgttgtaaggattttggttttcactaaatgaatggtgaaccatttcagttttgagcagaggagttccatgatctgatttgaattttaaaagatgtgtttcccaaaattcctattcctttcatacagctgctttcaatgaaggtttataaggaaagcaatcagaactacttggataaggtataagtgatccacaatcttttcaactctaccataggtatctacatatatatgttgagagatgctgctttttggccaaaatgaatcttgaattgggggtgtgcagaaaaagttatatctggcctgaggctggtatcttttagagtggcctacttgcatggttggcccttatctgaacacgtggatttaggggtattctcactgttcactaataaaggtggttcactgtacctagactgttcaaacaagatgatttatgctaaacacctgctttccttctgggagtatggaattttggtacatgccaggtaaaggatgtctatatgaccaaactcccaatgaaaaccttgcatactgagtccctaggcagaaacatccctcgtataaaaatgtgctctgtgtgaatcttcatgggagggagagatcctaaagaagcctgcacatggattcctccagattctgcttatgtctttttcctgtatgatccaactgtgtacacttactgtgtcactgtaataaactttagccatgagtacgata

SEQ ID NO: 140423 - DNA, 1294 bp, Homo sapiens
  Payload ID: 7553
  Gene Symbol: HNRNPA1
  Gene Name: heterogeneous nuclear ribonucleoprotein A1
  ENST ID: ENST00000330752
  CDS Start-End: 34-957
agcatcgttaaagtctctcttcaccctgccgtcatgtctaagtcagagtctcctaaagagcccgaacagctgaggaagctcttcattggagggttgagctttgaaacaactgatgagagcctgaggagccattttgagcaatggggaacgctcacggactgtgtggtaatgagagatccaaacaccaagcgctccaggggctttgggtttgtcacatatgccactgtggaggaggtggatgcagctatgaatgcaaggccacacaaggtggatggaagagttgtggaaccaaagagagctgtctccagagaagattctcaaagaccaggtgcccacttaactgtgaaaaagatatttgttggtggcattaaagaagacactgaagaacatcacctaagagattattttgaacagtatggaaaaattgaagtgattgaaatcatgactgaccgaggcagtggcaagaaaaggggctttgcctttgtaacctttgacgaccatgactccgtggataagattgtcattcagaaataccatactgtgaatggccacaactgtgaagttagaaaagccctgtcaaagcaagagatggctagtgcttcatccagccaaagaggtcgaagtggttctggaaactttggtggtggtcgtggaggtggtttcggtgggaatgacaacttcggtcgtggaggaaacttcagtggtcgtggtattggggatggctataatggatttggtaatgatggaagcaattttggaggtggtggaagctacaatgattttgggaattacaacaatcagtcttcaaattttggacccatgaagggaggaaattttggaggcagaagctctggcccctatggcggtggaggccaatactttgcaaaaccacgaaaccaaggtggctatggcggttccagcagcagcagtagctatggcagtggcagaagattttaattaggaaacaaagcttagcaggagaggagagccagagaagtgacagggaagctacaggttacaacagatttgtgaactcagccaagcacagtggtggcagggcctagctgctacaaagaagacatgttttagacaaatactcatgtgtatgggcaaaaaactcgaggactgtatttgtgactaattgtataacaggttattttagtttctgttctgtggaaagtgtaaagcattccaacaaagggttttaatgtagatttttttttttgcaccccatgctgttgattgctaaatgtaacagtctgatcgtgacgctgaataaatgtcttttttttaa

SEQ ID NO: 140424 - DNA, 1842 bp, Homo sapiens
  Payload ID: 7553
  Gene Symbol: HNRNPA1
  Gene Name: heterogeneous nuclear ribonucleoprotein A1
  Uniprot ID: P09651
  ENST ID: ENST00000340913
  CDS Start-End: 54-1172
cccgtggacgccgccgaagaagcatcgttaaagtctctcttcaccctgccgtcatgtctaagtcagagtctcctaaagagcccgaacagctgaggaagctcttcattggagggttgagctttgaaacaactgatgagagcctgaggagccattttgagcaatggggaacgctcacggactgtgtggtaatgagagatccaaacaccaagcgctccaggggctttgggtttgtcacatatgccactgtggaggaggtggatgcagctatgaatgcaaggccacacaaggtggatggaagagttgtggaaccaaagagagctgtctccagagaagattctcaaagaccaggtgcccacttaactgtgaaaaagatatttgttggtggcattaaagaagacactgaagaacatcacctaagagattattttgaacagtatggaaaaattgaagtgattgaaatcatgactgaccgaggcagtggcaagaaaaggggctttgcctttgtaacctttgacgaccatgactccgtggataagattgtcattcagaaataccatactgtgaatggccacaactgtgaagttagaaaagccctgtcaaagcaagagatggctagtgcttcatccagccaaagaggtcgaagtggttctggaaactttggtggtggtcgtggaggtggtttcggtgggaatgacaacttcggtcgtggaggaaacttcagtggtcgtggtggctttggtggcagccgtggtggtggtggatatggtggcagtggggatggctataatggatttggtaatgatggtggttatggaggaggcggccctggttactctggaggaagcagaggctatggaagtggtggacagggttatggaaaccagggcagtggctatggcgggagtggcagctatgacagctataacaacggaggcggaggcggctttggcggtggtagtggaagcaattttggaggtggtggaagctacaatgattttgggaattacaacaatcagtcttcaaattttggacccatgaagggaggaaattttggaggcagaagctctggcccctatggcggtggaggccaatactttgcaaaaccacgaaaccaaggtggctatggcggttccagcagcagcagtagctatggcagtggcagaagattttaattaggaaacaaagcttagcaggagaggagagccagagaagtgacagggaagctacaggttacaacagatttgtgaactcagccaagcacagtggtggcagggcctagctgctacaaagaagacatgttttagacaaatactcatgtgtatgggcaaaaaactcgaggactgtatttgtgactaattgtataacaggttattttagtttctgttctgtggaaagtgtaaagcattccaacaaagggttttaatgtagatttttttttttgcaccccatgctgttgattgctaaatgtaacagtctgatcgtgacgctgaataaatgtcttttttttaatgtgctgtgtaaagttagtctactcttaagccatcttggtaaatttccccaacagtgtgaagttagaattccttcagggtgatgccaggttctatttggaatttatatacaacctgcttgggtggagaagccattgtcttcggaaaccttggtgtagttgaactgatagttactgttgtgacctgaagttcaccattaaaagggattacccaagcaaaatcatggaatggttataaaagtgattgttggcacatcctatgcaatatatctaaattgaataatggtaccagataaaattatagatgggaatgaagcttgtgtatccattatcat

SEQ ID NO: 140425 - DNA, 832 bp, Homo sapiens
  Payload ID: 7553
  Gene Symbol: HNRNPA1
  Gene Name: heterogeneous nuclear ribonucleoprotein A1
  ENST ID: ENST00000550482
  CDS Start-End: 1-576
aaaattgaagtgattgaaatcatgactgaccgaggcagtggcaagaaaaggggctttgcctttgtaacctttgacgaccatgactccgtggataagattgtcattcagaaataccatactgtgaatggccacaactgtgaagttagaaaagccctgtcaaagcaagagatggctagtgcttcatccagccaaagaggtcgaagtggttctggaaactttggtggtggtcgtggaggtggtttcggtgggaatgacaacttcggtcgtggaggaaacttcagtggtcgtggtggctttggtggcagccgtggtggtggtggatatggtggcagtggggatggctataatggatttggtaatgatggaagcaattttggaggtggtggaagctacaatgattttgggaattacaacaatcagtcttcaaattttggacccatgaagggaggaaattttggaggcagaagctctggcccctatggcggtggaggccaatactttgcaaaaccacgaaaccaaggtggctatggcggttccagcagcagcagtagctatggcagtggcagaagattttaattaggtaagtaagcacctttttgtgtgttgacataattttttaaattgctgatgaacccaataaccctaatgtagctgagcagtgcaacatagttaacattataattgcagtaattgtggatataaagttaatattcagatcagcaaaatttgtgggaaacaaacttgatattggattgtagccttgagtcttaatatgtttagattaacaactttattccatattgttcaacaggaaacaaagcttagcaggaga

SEQ ID NO: 140426 - DNA, 1539 bp, Homo sapiens
  Payload ID: 7553
  Gene Symbol: HNRNPA1
  Gene Name: heterogeneous nuclear ribonucleoprotein A1
  Uniprot ID: P09651
  ENST ID: ENST00000547276
  CDS Start-End: 29-832
cgttaaagtctctcttcaccctgccgtcatgtctaagtcagagtctcctaaagagcccgaacagctgaggaagctcttcattggagggttgagctttgaaacaactgatgagagcctgaggagccattttgagcaatggggaacgctcacggactgtgtggtaatgagagatccaaacaccaagcgctccaggggctttgggtttgtcacatatgccactgtggaggaggtggatgcagctatgaatgcaaggccacacaaggtggatggaagagttgtggaaccaaagagagctgtctccagagaagattctcaaagaccaggtgcccacttaactgtgaaaaagatatttgttggtggcattaaagaagacactgaagaacatcacctaagagattattttgaacagtatggaaaaattgaagtgattgaaatcatgactgaccgaggcagtggcaagaaaaggggctttgcctttgtaacctttgacgaccatgactccgtggataagattgtcattcagaaataccatactgtgaatggccacaactgtgaagttagaaaagccctgtcaaagcaagagatggctagtgcttcatccagccaaagaggtcgaagtggttctggaaactttggtggtggaagctacaatgattttgggaattacaacaatcagtcttcaaattttggacccatgaagggaggaaattttggaggcagaagctctggcccctatggcggtggaggccaatactttgcaaaaccacgaaaccaaggtggctatggcggttccagcagcagcagtagctatggcagtggcagaagattttaattaggaaacaaagcttagcaggagaggagagccagagaagtgacagggaagctacaggttacaacagatttgtgaactcagccaagcacagtggtggcagggcctagctgctacaaagaagacatgttttagacaaatactcatgtgtatgggcaaaaaactcgaggactgtatttgtgactaattgtataacaggttattttagtttctgttctgtggaaagtgtaaagcattccaacaaagggttttaatgtagatttttttttttgcaccccatgctgttgattgctaaatgtaacagtctgatcgtgacgctgaataaatgtcttttttttaatgtgctgtgtaaagttagtctactcttaagccatcttggtaaatttccccaacagtgtgaagttagaattccttcagggtgatgccaggttctatttggaatttatatacaacctgcttgggtggagaagccattgtcttcggaaaccttggtgtagttgaactgatagttactgttgtgacctgaagttcaccattaaaagggattacccaagcaaaatcatggaatggttataaaagtgattgttggcacatcctatgcaatatatctaaattgaataatggtaccagataaaattatagatgggaatgaagcttgtgtatccattatcatgtgtaatcaataaacgatttaattctcttgaatgaaa

SEQ ID NO: 140427 - DNA, 711 bp, Homo sapiens
  Payload ID: 7553
  Gene Symbol: HNRNPA1
  Gene Name: heterogeneous nuclear ribonucleoprotein A1
  ENST ID: ENST00000548688
  CDS Start-End: 18-711
gccaaccatgagttatcatgcgggactcgttactcgtagcaaaattcttaggcacacaggatctttgtctttttttaaaccttgccttgtctcctaaagagcccgaacagctgaggaagctcttcattggagggttgagctttgaaacaactgatgagagcctgaggagccattttgagcaatggggaacgctcacggactgtgtggtaatgagagatccaaacaccaagcgctccaggggctttgggtttgtcacatatgccactgtggaggaggtggatgcagctatgaatgcaaggccacacaaggtggatggaagagttgtggaaccaaagagagctgtctccagagaagattctcaaagaccaggtgcccacttaactgtgaaaaagatatttgttggtggcattaaagaagacactgaagaacatcacctaagagattattttgaacagtatggaaaaattgaagtgattgaaatcatgactgaccgaggcagtggcaagaaaaggggctttgcctttgtaacctttgacgaccatgactccgtggataagattgtcattcagaaataccatactgtgaatggccacaactgtgaagttagaaaagccctgtcaaagcaagagatggctagtgcttcatccagccaaagaggtcgaagtggttctggaaactttggtggtggtcgtggaggtggtttcggtggga

SEQ ID NO: 140428 - DNA, 481 bp, Homo sapiens
  Payload ID: 7553
  Gene Symbol: HNRNPA1
  Gene Name: heterogeneous nuclear ribonucleoprotein A1
  ENST ID: ENST00000551702
  CDS Start-End: 46-481
cgccgccgaagaagcatcgttaaagtctctcttcaccctgccgtcatgtctaagtcagagtctcctaaagagcccgaacagctgaggaagctcttcattggagggttgagctttgaaacaactgatgagagcctgaggagccattttgagcaatggggaacgctcacggactgtgtggattctcaaagaccaggtgcccacttaactgtgaaaaagatatttgttggtggcattaaagaagacactgaagaacatcacctaagagattattttgaacagtatggaaaaattgaagtgattgaaatcatgactgaccgaggcagtggcaagaaaaggggctttgcctttgtaacctttgacgaccatgactccgtggataagattgtcattcagaaataccatactgtgaatggccacaactgtgaagttagaaaagccctgtcaaagcaagagatggctagtgcttcatccagccaaagag

SEQ ID NO: 140429 - DNA, 530 bp, Homo sapiens
  Payload ID: 7553
  Gene Symbol: HNRNPA1
  Gene Name: heterogeneous nuclear ribonucleoprotein A1
  ENST ID: ENST00000547708
  CDS Start-End: 61-530
ctttctgcccgtggacgccgccgaagaagcatcgttaaagtctctcttcaccctgccgtcatgtctaagtcagagtctcctaaagagcccgaacagctgaggaagctcttcattggagggttgagctttgaaacaactgatgagagcctgaggagccattttgagcaatggggaacgctcacggactgtgtggtaatgagagatccaaacaccaagcgctccaggggctttgggtttgtcacatatgccactgtggaggaggtggatgcagctatgaatgcaaggccacacaaggtggatggaagagttgtggaaccaaagagagctgtctccagagaagattctcaaagaccaggtgcccacttaactgtgaaaaagatatttgttggtggctttggtggcagccgtggtggtggtggatatggtggcagtggggatggctataatggatttggtaatgatggaagcaattttggaggtggtggaagctacaatgattttgggaattacaacaatcagtcttcaaattt

SEQ ID NO: 140430 - DNA, 4121 bp, Homo sapiens
  Payload ID: 7553
  Gene Symbol: HNRNPA1
  Gene Name: heterogeneous nuclear ribonucleoprotein A1
  Uniprot ID: P09651
  ENST ID: ENST00000546500
  CDS Start-End: 616-1578
aaagctaggacaaactcccgccaacacgcaggcgccgtaggttcactgcctactcctgcccgccatttcacgtgttctcagaggcaggtggaacttcttaatgcgcctgcgcaaaactcgccattttactacacgtgcggtcaacaagagttcattgcaaaaaaattgttacctcctggctgcttgtctaatacatagtgttaatcatgctttgccaagcgacttgactgtaatatttgcgcgtggaagattaaaaagatgttaaacacccaaggtagattcaaatgtgaatgattggtcggttggccaatcagactggttaacaataacattactcgggaaccaatggactccaaggggtggagacggcgtagaacgaccgaaggaatgacgttacacagcaatgtggcaccacaggccaatagcagggggaagcgatttcaagtatccaatcagagctgttccagggcggagtctaccaatgccgaaagcgaggaggcggggtaaaaaagagagggcgaaggtaggctggcagatacgttcgtcagcttgctcctttctgcccgtggacgccgccgaagaagcatcgttaaagtctctcttcaccctgccgtcatgtctaagtcagagtctcctaaagagcccgaacagctgaggaagctcttcattggagggttgagctttgaaacaactgatgagagcctgaggagccattttgagcaatggggaacgctcacggactgtgtggtaatgagagatccaaacaccaagcgctccaggggctttgggtttgtcacatatgccactgtggaggaggtggatgcagctatgaatgcaaggccacacaaggtggatggaagagttgtggaaccaaagagagctgtctccagagaagattctcaaagaccaggtgcccacttaactgtgaaaaagatatttgttggtggcattaaagaagacactgaagaacatcacctaagagattattttgaacagtatggaaaaattgaagtgattgaaatcatgactgaccgaggcagtggcaagaaaaggggctttgcctttgtaacctttgacgaccatgactccgtggataagattgtcattcagaaataccatactgtgaatggccacaactgtgaagttagaaaagccctgtcaaagcaagagatggctagtgcttcatccagccaaagaggtcgaagtggttctggaaactttggtggtggtcgtggaggtggtttcggtgggaatgacaacttcggtcgtggaggaaacttcagtggtcgtggtggctttggtggcagccgtggtggtggtggatatggtggcagtggggatggctataatggatttggtaatgatggaagcaattttggaggtggtggaagctacaatgattttgggaattacaacaatcagtcttcaaattttggacccatgaagggaggaaattttggaggcagaagctctggcccctatggcggtggaggccaatactttgcaaaaccacgaaaccaaggtggctatggcggttccagcagcagcagtagctatggcagtggcagaagattttaattaggaaacaaagcttagcaggagaggagagccagagaagtgacagggaagctacaggttacaacagatttgtgaactcagccaagcacagtggtggcagggcctagctgctacaaagaagacatgttttagacaaatactcatgtgtatgggcaaaaaactcgaggactgtatttgtgactaattgtataacaggttattttagtttctgttctgtggaaagtgtaaagcattccaacaaagggttttaatgtagatttttttttttgcaccccatgctgttgattgctaaatgtaacagtctgatcgtgacgctgaataaatgtcttttttttaatgtgctgtgtaaagttagtctactcttaagccatcttggtaaatttccccaacagtgtgaagttagaattccttcagggtgatgccaggttctatttggaatttatatacaacctgcttgggtggagaagccattgtcttcggaaaccttggtgtagttgaactgatagttactgttgtgacctgaagttcaccattaaaagggattacccaagcaaaatcatggaatggttataaaagtgattgttggcacatcctatgcaatatatctaaattgaataatggtaccagataaaattatagatgggaatgaagcttgtgtatccattatcatgtgtaatcaataaacgatttaattctcttgaatgaaatgacaactgtatggatttgggactggcagagatttggactttccctacccactccccctgataataatgttgaatgcttctatcacaattcaagttcaaagctctgccagggaatagaaactagctgctggctaatgccgctccataaatccgcagatttgaagtgtctgggaggccttttaaaaataactaatatcagaaagcattttaatgaacgtaaagataggcttacattaaaggaaaactgcagtttgactgggttctggttgggtgggccttcagaggttctatcagttaactatactaattaatttggagattcaaaccataccaatagaaactaaatttttctacataatttcatgttaactgcagtttccctttatggcacaaggggtcacacaacctacctaaaatgttaattgtatagaaaatgatttctaaacctttaacagttaatatccaataatgtgttatttgtacatagattcttttgagccttacctttggtgctctctcaatttcagtgctattgtacctagtagcatagagatttgtctatcaataggactgtatattccatcccatgggtgtgttggaagtttggggaggaggagggtggtgggaggtgggtgggaggtggtggtgggtgggaaagcatgggtgatagttccatgatactggctgagtttgcaatagcaggtggaaccctaactattgagggagtttgcagatacctcaggattcgtgacaatgcctttaaagatccaggagagatgttcagctactaggaactgctagcaagtatagcgcgaatggctccgagctcagacactctacagctgagagtagacacttgtggtatgtggagtacagataagccaggggcaggccacggcacgctccatgaaagctaggagggagtgaaatatcagtgatcatcgcaaggaaggaggcagacaagagtaaggcacacctgactcttaggactagcagtcagaaccaggaggaaaggttttattgctatgcgggtaggtaagaacagattttacttacatccatatagttacttaaagtccagttttctgttaaacatttttcttaatatattgagccaaaactagtccagttaagctgaacttggtttttctggagatgaattgttttaaattgacaccctattgatggctcccagttgaaggaagtgagcacattatttgtactgtgaatataaatttttgcccttttatttatcttcctttgacccatttccttaaaataatggctcaaagtaatagacttccccaaatggtggggggatgggtgggttattaatgggaggtatggggggtttagcttgagatgggacttggtcttagagctagttctaaaggttgtttacttttctagggaggagtctgctactagtcttatcagctcttaaaaacagaaactcatctgtccaagttcgtggcagaaaggtaagtttttacaaattagtgctcagcaaaagaatgccctgcgttcccaaagtaaaagaatgacaagctgtaccttaaaccaaaacacttcgtaatctcatccaattgcaaaaagagttattagccaaccaggtattcccagtagtgacagtggatataactgtgtagtcattcacctctgcttatatgaatactttacaacctcttttgccttttgcaggaacgtccttgtgaagacctttatctgagccactgtacttcgttatcactgccatgcagtttacatgagctgttctgcagctcaaattccattttgtgaatgggtttttttttttaataaactgtatttaactta

SEQ ID NO: 140431 - DNA, 569 bp, Homo sapiens
  Payload ID: 7553
  Gene Symbol: HNRNPA1
  Gene Name: heterogeneous nuclear ribonucleoprotein A1
  ENST ID: ENST00000550994
  CDS Start-End: 231-569
agggacgcatgcgcttgcgatttcctagcactcccaactccagcatacggcctcccttgataggcagaagcacgtgtcttgttgcgacctgaacgaacaataagtgctagtctcctaaagagcccgaacagctgaggaagctcttcattggagggttgagctttgaaacaactgatgagagcctgaggagccattttgagcaatggggaacgctcacggactgtgtggtaatgagagatccaaacaccaagcgctccaggggctttgggtttgtcacatatgccactgtggaggaggtggatgcagctatgaatgcaaggccacacaaggtggatggaagagttgtggaaccaaagagagctgtctccagagaagattctcaaagaccaggtgcccacttaactgtgaaaaagatatttgttggtggcattaaagaagacactgaagaacatcacctaagagattattttgaacagtatggaaaaattgaagtgattgaaatcatgactgaccgaggcagtggcaagaaaaggggctttgcctttgtaacctttgacgaccatgactcc

SEQ ID NO: 140432 - DNA, 1234 bp, Homo sapiens
  Payload ID: 7553
  Gene Symbol: HNRNPA1
  Gene Name: heterogeneous nuclear ribonucleoprotein A1
  Uniprot ID: P09651
  ENST ID: ENST00000547566
  CDS Start-End: 61-1023
ctttctgcccgtggacgccgccgaagaagcatcgttaaagtctctcttcaccctgccgtcatgtctaagtcagagtctcctaaagagcccgaacagctgaggaagctcttcattggagggttgagctttgaaacaactgatgagagcctgaggagccattttgagcaatggggaacgctcacggactgtgtggtaatgagagatccaaacaccaagcgctccaggggctttgggtttgtcacatatgccactgtggaggaggtggatgcagctatgaatgcaaggccacacaaggtggatggaagagttgtggaaccaaagagagctgtctccagagaagattctcaaagaccaggtgcccacttaactgtgaaaaagatatttgttggtggcattaaagaagacactgaagaacatcacctaagagattattttgaacagtatggaaaaattgaagtgattgaaatcatgactgaccgaggcagtggcaagaaaaggggctttgcctttgtaacctttgacgaccatgactccgtggataagattgtcattcagaaataccatactgtgaatggccacaactgtgaagttagaaaagccctgtcaaagcaagagatggctagtgcttcatccagccaaagaggtcgaagtggttctggaaactttggtggtggtcgtggaggtggtttcggtgggaatgacaacttcggtcgtggaggaaacttcagtggtcgtggtggctttggtggcagccgtggtggtggtggatatggtggcagtggggatggctataatggatttggtaatgatggaagcaattttggaggtggtggaagctacaatgattttgggaattacaacaatcagtcttcaaattttggacccatgaagggaggaaattttggaggcagaagctctggcccctatggcggtggaggccaatactttgcaaaaccacgaaaccaaggtggctatggcggttccagcagcagcagtagctatggcagtggcagaagattttaattagggaggagtctgctactagtcttatcagctcttaaaaacagaaactcatctgtccaagttcgtggcagaaaggaacgtccttgtgaagacctttatctgagccactgtacttcgttatcactgccatgcagtttacatgagctgttctgcagctcaaattccattttgtgaatgggtttttttttttaataaactgtatttaacttag

SEQ ID NO: 140433 - DNA, 3011 bp, Homo sapiens
  Payload ID: 7554
  Gene Symbol: HNRNPA1L2
  Gene Name: heterogeneous nuclear ribonucleoprotein A1-like 2
  Uniprot ID: Q32P51
  ENST ID: ENST00000357495
  CDS Start-End: 1708-2670
catagtaccttagttggggagctctgccttatgtcctggtatttcttaagattcctttcttggctctcttcccactgcacatgcttctttgacaatctcatttacttccatggctcagtcacatctgatatccacgtccaatcaatcatgcagcccaggtaatttacctcctcaaaagcttttaatttgtcatttgtcttcatgtttctaccttagtttaagttaccatcatttcttacaaggaatatgcaaacttctgaacagggtttacaaggaccagcatgatctgtcccgatattacatcttgactctctgtagccctaacataatctagtcatcaactcctgaataagacatggctgtcagtacttggcctctccacaccaaatcattgactcaagattgtttattaaagaaggacctgtgatgctgttgtcattgtccttaacctgtaaacttgctgccttcctcactttccatttattctttaaccctctgtagtattgcatttgacttattaccctgaatttgttgttacaaaggtcactaagagtaaccaatttccatattgctgaatcccatccttccttctcttcctggacctcttgatcaattgataacctttcataactcacttttcctctaaactctctattgccttcagttttgcccaatctgaagtgcccaactgtcctatcctgcttctgtaatattttcccccttttaccatgtaaaaaataatttcctgatgttccctttgggttgctccagagactttttcaaagattggagttctcccaagttttgtctaaaggtcactgttcttattctctgttttcaacttgtccgcttccaatctgttctccccagtgcaataggagtgtcagtctaattatgtcaagccttcagtggttttttaaatcttttcagatggagttgaggccctatgtggtctcacctcttctttatctcaccagccttatgatcaaattctgcactcccagacataatagcaattagaataagaatgttttcaattgcaagaagcaaacagaaaaacccaactcaaaattattaaataatacaaaacaaaaagtcaggagtttggaggcttctgggttggttaactcaggagctcactggtatcactgatgaactaggtttctccatccttatgctttcactttccttgggatattggtttggtcttccaggatggctattgctaaaggtagctgcagtaatttattctgtgtttctgtttatcaataaggagacctttcccagaatccctgagcagacacctcatgcatggcccaattggctagattagttatataccccttcttaaaccatattgtttgccaatatggccaacaatgtggggttggtgatcccaacaatgtgggatgtgggattaccacaaatgacttagtcatgtgctggagaaacaaaattagggcttcacagcaaggaagaagggaggaatgaagtatcctactgttatgtatacttgtctttcttcctgtacatacactaaaaaatgttcaggcccatatgaaaaatgtatttatttcccaaagagaatcagccagaatctcatccaaatactctatccagcttcatatctaagatctctggtggactttttctgcccgtggacgccgctgaagaagcatcgttaaagtctctcttcaccttgccgtcatgtctaagtcagcgtctccaaaagagcccgaacagctgaggaagctcttcattggagggttgagctttgaaacaactgatgagagcctgaggagccattttgagcaatggggaacgctcacagactgtgtggtaatgagagatccaaacaccaagcgctccaggggctttgggtttgtcacatatgccactgtggaggaggtggatgcagctatgaatacaacgccacacaaggtggatggaagagttgtggaaccaaagagagctgtctccagagaagattctcaaagaccaggtgcccacttaactgtgaaaaagatatttgttggtggcattaaagaagacactgaagaacatcacctaagagattattttgaacagtatggaaaaattgaagtaattgaaatcatgactgaccgaggcagtggcaagaaaaggggctttgcctttgtaacctttgacgaccatgactccgtggataagattgtcattcagaaataccatactgtgaagggccacaactgtgaagttagaaaagccctgccaaagcaagagatggctagtgcttcatccagccaaagaggtcgaaggggttctggaaactttggtggtggtcgtggagatggtttcggtgggaatgacaactttggtcgtggaggaaacttcagtggtcgtggtggctttggtggcagctgtggtggtggtggatatggtggcagtggggatggctataatggatttggtaatgatggaagcaattttggaggtggtggaagctacaatgattttggcaattacaacaatcagtcttcaaattttggacccatgaagggaggaaattttggaggcagaagctctggcccctatggcggtggaggccaatactttgcaaaaccacaaaaccaaggtggctatggcgtttccagcagcagcagtagctatggcagtggcagaagattttaattaggaaacaaagcttagcaggagaggagagccagagaagtgacagggaagctacaggttacaacagatttgtgaactcagccaagcacagtggtggcagggcctagctgctacaaagaagacatgttttagacaaatactcatgtgtatgggcaaaaaactcgaggactgtatttgtgactaattgtataacaggttattttagtttctgttctgtggaaagtgtaaagcattccaacaaagtgttttaatgtagatttttttttttgcacccatgctgttgattgctaaatgtaatagtctgattgtgacgctgaataaatgtctctaaaaaaaaaaaa

SEQ ID NO: 140434 - DNA, 3664 bp, Homo sapiens
  Payload ID: 7555
  Gene Symbol: HNRNPA2B1
  Gene Name: heterogeneous nuclear ribonucleoprotein A2/B1
  Uniprot ID: P22626
  ENST ID: ENST00000354667
  CDS Start-End: 170-1231
agtagcagcagcgccgggtcccgtgcggaggtgctcctcgcagagttgtttctcgagcagcggcagttctcactacagcgccaggacgagtccggttcgtgttcgtccgcggagatctctctcatctcgctcggctgcgggaaatcgggctgaagcgactgagtccgcgatggagaaaactttagaaactgttcctttggagaggaaaaagagagaaaaggaacagttccgtaagctctttattggtggcttaagctttgaaaccacagaagaaagtttgaggaactactacgaacaatggggaaagcttacagactgtgtggtaatgagggatcctgcaagcaaaagatcaagaggatttggttttgtaactttttcatccatggctgaggttgatgctgccatggctgcaagacctcattcaattgatgggagagtagttgagccaaaacgtgctgtagcaagagaggaatctggaaaaccaggggctcatgtaactgtgaagaagctgtttgttggcggaattaaagaagatactgaggaacatcaccttagagattactttgaggaatatggaaaaattgataccattgagataattactgataggcagtctggaaagaaaagaggctttggctttgttacttttgatgaccatgatcctgtggataaaatcgtattgcagaaataccataccatcaatggtcataatgcagaagtaagaaaggctttgtctagacaagaaatgcaggaagttcagagttctaggagtggaagaggaggcaactttggctttggggattcacgtggtggcggtggaaatttcggaccaggaccaggaagtaactttagaggaggatctgatggatatggcagtggacgtggatttggggatggctataatgggtatggaggaggacctggaggtggcaattttggaggtagccccggttatggaggaggaagaggaggatatggtggtggaggacctggatatggcaaccagggtgggggctacggaggtggttatgacaactatggaggaggaaattatggaagtggaaattacaatgattttggaaattataaccagcaaccttctaactacggtccaatgaagagtggaaactttggtggtagcaggaacatggggggaccatatggtggaggaaactatggtccaggaggcagtggaggaagtgggggttatggtgggaggagccgatactgagcttcttcctatttgccatgggcttcactgtataaataggagaggatgagagcccagaggtaacagaacagcttcaggttatcgaaataacaatgttaaggaaactcttatctcagtcatgcataaatatgcagtgatatggcagaagacaccagagcagatgcagagagccattttgtgaatggattggattatttaataacattaccttactgtggaggaaggattgtaaaaaaaaatgcctttgagacagtttcttagctttttaattgttgtttctttctagtggtctttgtaagagtgtagaagcattccttctttgataatgttaaatttgtaagtttcaggtgacatgtgaaaccttttttaagatttttctcaaagttttgaaaagctattagccaggatcatggtgtaataagacataacgtttttcctttaaaaaaatttaagtgcgtgtgtagagttaagaagctgttgtacatttatgatttaataaaataattctaaaggaaattgtgtaattatagactttttattttaaataagttaaggagtgggtagtataattaaggtccgttgcaaagctgttgttatatttgtataagataaatgctggtcagatgtaagtgtgttgtctgcaattcatcaggattaaattatgtagataacttaagggatatctctgcaaggagaaacacctttttagatcttttagatgctgcttcttcaatgcaaggaaaggaaataaccccagcgaggtactcttcagggacacaggtctagtacaagagaactcttgacggctactaagttcagccagtcttaaaaaactgtgctgtttctacaaaactttaactacagtagtttataaggatgccaacgaaagctgagggtgtagagcaaaatagttctaagcttcagttaaacttctttaggtaagatcttatttacttttcctttcttaattttcctccctaaaagataaactaatactcttaaatggtctttcagtatagtggttcttacgtagtttaacatagctataaattgagtttaacaatttataaactcaagagaataatttttataaaccctgttttccaatctgtcatttacttaaattattttggttgtttttccctttttttccttcttttcccaccccctccccctccatgtgaagatttgggtgcttaacatatcatttttttccctgccggaattttagcattgatatgaaccatggacaagtatattctgctgccacaaagactgtaaagtgcttcatttcaacagctgaggcaagccaagtgatcattaataaagcttttcttggttccttcagtggtgttggtagtaaaatggtaggtaaaagttaggctgcaagttcaataaatcatgagatttcccatcgttacacccttgtgtattcacatttcttggatcaaacattttgagtgaactaggggtttttattaaagacatttgttgtatttatggttgtaactgtacatgcttatcaggatgagactgaaagaaggtagggcaaaaatggttgaatctattttcagatagtagttcatacttgagtgaagtgtcttgtctgcattatgaagcctggtatgtatccagtactaaataggtgggttaaatgtggtaattctagttcagtgtcttaccctgaagagaaagttgtaggttggctgttgaaattcattccttagatatgatcagtttgattgcccggctttattgcctttacaggaatgtgatactcagggcttactctatacaccaatgagtcttctttgatcctaagaccaccactgaagttgtttaggttcttttggacaaacatgataaacttcttcagatactttttttttcctttggcaggaaggtgtcttgctgcaggtaactaatgaagaagtggtcaaccacagagtcttcaagaaataagaaattctgtaccatctgaaagtagttcttgttggtgccttcatttaaaaagcactctttaaaataaaagggaaatgttttctgataaaacaaacatttagttgaggttcttgatataaaacaattacaaaatgagtgttgtttgtaaaacagtaacatcaaattggctagagagataaatgtatcatgttttaaattaggttttgtgagtagacagattacaattctattttaaatataaagtttataaaataaatactttttgtatccaaatacttggtgtaatgtttacacataaaatgtgtgaatcttgttctataaatatttggttgtctaaaagatcaccatcccctaaatttttaaaagcagtttcacaaagctatgcatattttaatattaacaggtaaatgagaagagcattgtggacattattggctgtccccaataaaatgctgttcattatgcactgta

SEQ ID NO: 140435 - DNA, 1711 bp, Homo sapiens
  Payload ID: 7555
  Gene Symbol: HNRNPA2B1
  Gene Name: heterogeneous nuclear ribonucleoprotein A2/B1
  Uniprot ID: P22626
  ENST ID: ENST00000356674
  CDS Start-End: 170-1195
agtagcagcagcgccgggtcccgtgcggaggtgctcctcgcagagttgtttctcgagcagcggcagttctcactacagcgccaggacgagtccggttcgtgttcgtccgcggagatctctctcatctcgctcggctgcgggaaatcgggctgaagcgactgagtccgcgatggagagagaaaaggaacagttccgtaagctctttattggtggcttaagctttgaaaccacagaagaaagtttgaggaactactacgaacaatggggaaagcttacagactgtgtggtaatgagggatcctgcaagcaaaagatcaagaggatttggttttgtaactttttcatccatggctgaggttgatgctgccatggctgcaagacctcattcaattgatgggagagtagttgagccaaaacgtgctgtagcaagagaggaatctggaaaaccaggggctcatgtaactgtgaagaagctgtttgttggcggaattaaagaagatactgaggaacatcaccttagagattactttgaggaatatggaaaaattgataccattgagataattactgataggcagtctggaaagaaaagaggctttggctttgttacttttgatgaccatgatcctgtggataaaatcgtattgcagaaataccataccatcaatggtcataatgcagaagtaagaaaggctttgtctagacaagaaatgcaggaagttcagagttctaggagtggaagaggaggcaactttggctttggggattcacgtggtggcggtggaaatttcggaccaggaccaggaagtaactttagaggaggatctgatggatatggcagtggacgtggatttggggatggctataatgggtatggaggaggacctggaggtggcaattttggaggtagccccggttatggaggaggaagaggaggatatggtggtggaggacctggatatggcaaccagggtgggggctacggaggtggttatgacaactatggaggaggaaattatggaagtggaaattacaatgattttggaaattataaccagcaaccttctaactacggtccaatgaagagtggaaactttggtggtagcaggaacatggggggaccatatggtggaggaaactatggtccaggaggcagtggaggaagtgggggttatggtgggaggagccgatactgagcttcttcctatttgccatgggcttcactgtataaataggagaggatgagagcccagaggtaacagaacagcttcaggttatcgaaataacaatgttaaggaaactcttatctcagtcatgcataaatatgcagtgatatggcagaagacaccagagcagatgcagagagccattttgtgaatggattggattatttaataacattaccttactgtggaggaaggattgtaaaaaaaaatgcctttgagacagtttcttagctttttaattgttgtttctttctagtggtctttgtaagagtgtagaagcattccttctttgataatgttaaatttgtaagtttcaggtgacatgtgaaaccttttttaagatttttctcaaagttttgaaaagctattagccaggatcatggtgtaataagacataacgtttttcctttaaaaaaatttaagtgcgtgtgtagagttaagaagctgttgtacatttatgatttaataaaataattctaaaggaaa

SEQ ID NO: 140436 - DNA, 1724 bp, Homo sapiens
  Payload ID: 7555
  Gene Symbol: HNRNPA2B1
  Gene Name: heterogeneous nuclear ribonucleoprotein A2/B1
  Uniprot ID: P22626
  ENST ID: ENST00000360787
  CDS Start-End: 170-1231
agtagcagcagcgccgggtcccgtgcggaggtgctcctcgcagagttgtttctcgagcagcggcagttctcactacagcgccaggacgagtccggttcgtgttcgtccgcggagatctctctcatctcgctcggctgcgggaaatcgggctgaagcgactgagtccgcgatggagaaaactttagaaactgttcctttggagaggaaaaagagagaaaaggaacagttccgtaagctctttattggtggcttaagctttgaaaccacagaagaaagtttgaggaactactacgaacaatggggaaagcttacagactgtgtggtaatgagggatcctgcaagcaaaagatcaagaggatttggttttgtaactttttcatccatggctgaggttgatgctgccatggctgcaagacctcattcaattgatgggagagtagttgagccaaaacgtgctgtagcaagagaggaatctggaaaaccaggggctcatgtaactgtgaagaagctgtttgttggcggaattaaagaagatactgaggaacatcaccttagagattactttgaggaatatggaaaaattgataccattgagataattactgataggcagtctggaaagaaaagaggctttggctttgttacttttgatgaccatgatcctgtggataaaatcgtattgcagaaataccataccatcaatggtcataatgcagaagtaagaaaggctttgtctagacaagaaatgcaggaagttcagagttctaggagtggaagaggaggcaactttggctttggggattcacgtggtggcggtggaaatttcggaccaggaccaggaagtaactttagaggaggatctgatggatatggcagtggacgtggatttggggatggctataatgggtatggaggaggacctggaggtggcaattttggaggtagccccggttatggaggaggaagaggaggatatggtggtggaggacctggatatggcaaccagggtgggggctacggaggtggttatgacaactatggaggaggaaattatggaagtggaaattacaatgattttggaaattataaccagcaaccttctaactacggtccaatgaagagtggaaactttggtggtagcaggaacatggggggaccatatggtggaggaaactatggtccaggaggcagtggaggaagtgggggttatggtgggaggagccgatactgagcttcttcctatttgccatggcattgatatgaaccatggacaagtatattctgctgccacaaagactgtaaagtgcttcatttcaacagctgaggcaagccaagtgatcattaataaagcttttcttggttccttcagtggtgttggtagtaaaatggaaggtgtcttgctgcaggtaactaatgaagaagtggtcaaccacagagtcttcaagaaataagaaattctgtaccatctgaaagtagttcttgttggtgccttcatttaaaaagcactctttaaaataaaagggaaatgttttctgataaaacaaacatttagttgaggttcttgatataaaacaattacaaaatgagtgttgtttgtaaaacagtaacatcaaattggctagagagataaatgtatcatgttttaaattaggttttgtgagtagacagattacaattctattttaaatataaagtttataaaataaatactttttgtatccaaa

SEQ ID NO: 140437 - DNA, 3539 bp, Homo sapiens
  Payload ID: 7555
  Gene Symbol: HNRNPA2B1
  Gene Name: heterogeneous nuclear ribonucleoprotein A2/B1
  ENST ID: ENST00000618183
  CDS Start-End: 217-1002
agtgggggggaaggttctagaaaagcggcggcagcggctctagcggcagtagcagcagcgccgggtcccgtgcggaggtgctcctcgcagagttgtttctcgagcagcggcagttctcactacagcgccaggacgagtccggttcgtgttcgtccgcggagatctctctcatctcgctcggctgcgggaaatcgggctgaagcgactgagtccgcgatggagaaaactttagaaactgttcctttggagaggaaaaagagagaaaaggaacagttccgtaagctctttattggtggcttaagctttgaaaccacagaagaaagtttgaggaactactacgaacaatggggaaagcttacagactgtgtggtaatgagggatcctgcaagcaaaagatcaagaggatttggttttgtaactttttcatccatggctgaggttgatgctgccatggctgcaagacctcattcaattgatgggagagtagttgagccaaaacgtgctgtagcaagagaggaatctggaaaaccaggggctcatgtaactgtgaagaagctgtttgttggcggaattaaagaagatactgaggaacatcaccttagagattactttgaggaatatggaaaaattgataccattgagataattactgataggcagtctggaaagaaaagaggctttggctttgttacttttgatgaccatgatcctgtggataaaatcgtattgcagaaataccataccatcaatggtcataatgcagaagtaagaaaggctttgtctagacaagaaatgcaggaagacctggaggtggcaattttggaggtagccccggttatggaggaggaagaggaggatatggtggtggaggacctggatatggcaaccagggtgggggctacggaggtggttatgacaactatggaggaggaaattatggaagtggaaattacaatgattttggaaattataaccagcaaccttctaactacggtccaatgaagagtggaaactttggtggtagcaggaacatggggggaccatatggtggaggaaactatggtccaggaggcagtggaggaagtgggggttatggtgggaggagccgatactgagcttcttcctatttgccatgggcttcactgtataaataggagaggatgagagcccagaggtaacagaacagcttcaggttatcgaaataacaatgttaaggaaactcttatctcagtcatgcataaatatgcagtgatatggcagaagacaccagagcagatgcagagagccattttgtgaatggattggattatttaataacattaccttactgtggaggaaggattgtaaaaaaaaatgcctttgagacagtttcttagctttttaattgttgtttctttctagtggtctttgtaagagtgtagaagcattccttctttgataatgttaaatttgtaagtttcaggtgacatgtgaaaccttttttaagatttttctcaaagttttgaaaagctattagccaggatcatggtgtaataagacataacgtttttcctttaaaaaaatttaagtgcgtgtgtagagttaagaagctgttgtacatttatgatttaataaaataattctaaaggaaattgtgtaattatagactttttattttaaataagttaaggagtgggtagtataattaaggtccgttgcaaagctgttgttatatttgtataagataaatgctggtcagatgtaagtgtgttgtctgcaattcatcaggattaaattatgtagataacttaagggatatctctgcaaggagaaacacctttttagatcttttagatgctgcttcttcaatgcaaggaaaggaaataaccccagcgaggtactcttcagggacacaggtctagtacaagagaactcttgacggctactaagttcagccagtcttaaaaaactgtgctgtttctacaaaactttaactacagtagtttataaggatgccaacgaaagctgagggtgtagagcaaaatagttctaagcttcagttaaacttctttaggtaagatcttatttacttttcctttcttaattttcctccctaaaagataaactaatactcttaaatggtctttcagtatagtggttcttacgtagtttaacatagctataaattgagtttaacaatttataaactcaagagaataatttttataaaccctgttttccaatctgtcatttacttaaattattttggttgtttttccctttttttccttcttttcccaccccctccccctccatgtgaagatttgggtgcttaacatatcatttttttccctgccggaattttagcattgatatgaaccatggacaagtatattctgctgccacaaagactgtaaagtgcttcatttcaacagctgaggcaagccaagtgatcattaataaagcttttcttggttccttcagtggtgttggtagtaaaatggtaggtaaaagttaggctgcaagttcaataaatcatgagatttcccatcgttacacccttgtgtattcacatttcttggatcaaacattttgagtgaactaggggtttttattaaagacatttgttgtatttatggttgtaactgtacatgcttatcaggatgagactgaaagaaggtagggcaaaaatggttgaatctattttcagatagtagttcatacttgagtgaagtgtcttgtctgcattatgaagcctggtatgtatccagtactaaataggtgggttaaatgtggtaattctagttcagtgtcttaccctgaagagaaagttgtaggttggctgttgaaattcattccttagatatgatcagtttgattgcccggctttattgcctttacaggaatgtgatactcagggcttactctatacaccaatgagtcttctttgatcctaagaccaccactgaagttgtttaggttcttttggacaaacatgataaacttcttcagatactttttttttcctttggcaggaaggtgtcttgctgcaggtaactaatgaagaagtggtcaaccacagagtcttcaagaaataagaaattctgtaccatctgaaagtagttcttgttggtgccttcatttaaaaagcactctttaaaataaaagggaaatgttttctgataaaacaaacatttagttgaggttcttgatataaaacaattacaaaatgagtgttgtttgtaaaacagtaacatcaaattggctagagagataaatgtatcatgttttaaattaggttttgtgagtagacagattacaattctattttaaatataaagtttataaaataaatactttttgtatccaaatacttggtgtaatgtttacacataaaatgtgtgaatcttgttctataaatatttggttgtctaaaagatcaccatcccctaaatttttaaaagcagtttcacaaagctatgcatattttaatattaacaggtaaatgagaagagcattgtggacattattggctgtccccaataaaatgctgttcatta

SEQ ID NO: 140438 - DNA, 2067 bp, Homo sapiens
  Payload ID: 7556
  Gene Symbol: HNRNPA3
  Gene Name: heterogeneous nuclear ribonucleoprotein A3
  Uniprot ID: P51991
  ENST ID: ENST00000392524
  CDS Start-End: 238-1374
cccctgaaagctggcgaggcgcgcgcgctcccgcggcacgccgcgcctccgccctccgcccgccaacccgctggtccagtccctcttcgcgcccgcttggctccgcccccttcccaattcgctcctcccccaacagactggcggcgcgcggaaaacgcgtcacgtgacgactggccccgcctcttcctctcggtcccatattgaactcgagttggaagaggcgagtccggtctcaaaatggaggtaaaaccgccgcccggtcgcccccagcccgactccggccgtcgccgtcgccgccggggggaggagggccatgatccaaaggaaccagagcagttgagaaaactgtttattggtggtctgagctttgaaactacagatgatagtttacgagaacattttgagaaatggggcacactcacagattgtgtggtaatgagagacccccaaacaaaacgttccaggggctttggttttgtgacttattcttgtgttgaagaggtggatgcagcaatgtgtgctcgaccacacaaggttgatgggcgtgtagtggaaccaaagagagctgtttctagagaggattctgtaaagcctggtgcccatctaacagtgaagaaaatttttgttggtggtattaaagaagatacagaagaatataatttgagagactactttgaaaagtatggcaagattgaaaccatagaagttatggaagacaggcagagtggaaaaaagagaggatttgcttttgtaacttttgatgatcatgatacagttgataaaattgttgttcagaaataccacactattaatgggcataattgtgaagtgaaaaaggccctttctaaacaagagatgcagtctgctggatcacagagaggtcgtggaggtggatctggcaattttatgggtcgcggagggaactttggaggtggtggaggtaattttggccgtggtggaaactttggtggaagaggaggctatggtggtggaggtggtggcagcagaggtagttatggaggaggtgatggtggatataatggatttggaggtgatggtggcaactatggcggtggtcctggttatagtagtagagggggctatggtggtggtggaccaggatatggaaaccaaggtggtggatatggtggaggtggaggatatgatggttacaatgaaggaggaaattttggcggtggtaactatggtggtggtgggaactataatgattttggaaattatagtggacaacagcaatcaaattatggacccatgaaagggggcagttttggtggaagaagctcgggcagtccctatggtggtggttatggatctggtggtggaagtggtggatatggtagcagaaggttctaaaaacagcagaaaagggctacagttcttagcaggagagagagcgaggagttgtcaggaaagctgcaggttactttgagacagtcgtcccaaatgcattagaggaactgtaaaaatctgccacagaaggaacgatgatccatagtcagaaaagttactgcagcttaaacaggaaacccttcttgttcaggactgtcatagccacagtttgcaaaaagtgcagctattgattaatgcaatgtagtgtcaattagatgtacattcctgaggtcttttatctgttgtagctttgtctttttctttttcttttcattacatcaggtatattgccctgtaaattgtggtagtggtaccaggaataaaaaattaaggaatttttaacttttcaatatttgtgtagttcagtttttctacattttagtacagaaactttaacaaaatgcagtttcgaaggtgtttccttgtgagttaacaagtaaagaagatcattgttaattactattttgtatgaattttgctaaagttaactgtaaagaaacacctgctgacttgcagtttaaggggaatctattctccccatttccaaaccatgatatgaatgggcgctgacatgtggagagaatagataatttgtgtgtttgcaatgtgtgttttagataaataggattgggtatttaaattagcatttgtgaattt

SEQ ID NO: 140439 - DNA, 643 bp, Homo sapiens
  Payload ID: 7556
  Gene Symbol: HNRNPA3
  Gene Name: heterogeneous nuclear ribonucleoprotein A3
  ENST ID: ENST00000432457
  CDS Start-End: 1-348
gggcataattgtgaagtgaaaaaggccctttctaaacaagagatgcagtctgctggatcacagagaggtcgtggaggtggatctggcaattttatgggtcgcggagggaactttggaggtggtggaggtaattttggccgtgatggtggatataatggatttggaggtgatggtaactatggtggtggtgggaactataatgattttggaaattatagtggacaacagcaatcaaattatggacccatgaaagggggcagttttggtggaagaagctcgggcagtccctatggtggtggttatggatctggtggtggaagtggtggatatggtagcagaaggttctaaaaacagcagaaaagggctacagttcttagcaggagagagagcgaggagttgtcaggaaagctgcaggttactttgagacagtcgtcccaaatgcattagaggaactgtaaaaatctgccacagaaggaacgatgatccatagtcagaaaagttactgcagcttaaacaggaaacccttcttgttcaggactgtcatagccacagtttgcaaaaagtgcagctattgattaatgcaatgtagtgtcaattagatgtacattcctgaggtcttttatctgttgtagctttgtctttt

SEQ ID NO: 140440 - DNA, 5688 bp, Homo sapiens
  Payload ID: 7556
  Gene Symbol: HNRNPA3
  Gene Name: heterogeneous nuclear ribonucleoprotein A3
  Uniprot ID: P51991
  ENST ID: ENST00000411529
  CDS Start-End: 52-1122
ctctcggtcccatattgaactcgagttggaagaggcgagtccggtctcaaaatggagggccatgatccaaaggaaccagagcagttgagaaaactgtttattggtggtctgagctttgaaactacagatgatagtttacgagaacattttgagaaatggggcacactcacagattgtgtggtaatgagagacccccaaacaaaacgttccaggggctttggttttgtgacttattcttgtgttgaagaggtggatgcagcaatgtgtgctcgaccacacaaggttgatgggcgtgtagtggaaccaaagagagctgtttctagagaggattctgtaaagcctggtgcccatctaacagtgaagaaaatttttgttggtggtattaaagaagatacagaagaatataatttgagagactactttgaaaagtatggcaagattgaaaccatagaagttatggaagacaggcagagtggaaaaaagagaggatttgcttttgtaacttttgatgatcatgatacagttgataaaattgttgttcagaaataccacactattaatgggcataattgtgaagtgaaaaaggccctttctaaacaagagatgcagtctgctggatcacagagaggtcgtggaggtggatctggcaattttatgggtcgcggagggaactttggaggtggtggaggtaattttggccgtggtggaaactttggtggaagaggaggctatggtggtggaggtggtggcagcagaggtagttatggaggaggtgatggtggatataatggatttggaggtgatggtggcaactatggcggtggtcctggttatagtagtagagggggctatggtggtggtggaccaggatatggaaaccaaggtggtggatatggtggaggtggaggatatgatggttacaatgaaggaggaaattttggcggtggtaactatggtggtggtgggaactataatgattttggaaattatagtggacaacagcaatcaaattatggacccatgaaagggggcagttttggtggaagaagctcgggcagtccctatggtggtggttatggatctggtggtggaagtggtggatatggtagcagaaggttctaaaaacagcagaaaagggctacagttcttagcaggagagagagcgaggagttgtcaggaaagctgcaggttactttgagacagtcgtcccaaatgcattagaggaactgtaaaaatctgccacagaaggaacgatgatccatagtcagaaaagttactgcagcttaaacaggaaacccttcttgttcaggactgtcatagccacagtttgcaaaaagtgcagctattgattaatgcaatgtagtgtcaattagatgtacattcctgaggtcttttatctgttgtagctttgtctttttctttttcttttcattacatcaggtatattgccctgtaaattgtggtagtggtaccaggaataaaaaattaaggaatttttaacttttcaatatttgtgtagttcagtttttctacattttagtacagaaactttaacaaaatgcagtttcgaaggtgtttccttgtgagttaacaagtaaagaagatcattgttaattactattttgtatgaattttgctaaagttaactgtaaagaaacacctgctgacttgcagtttaaggggaatctattctccccatttccaaaccatgatatgaatgggcgctgacatgtggagagaatagataatttgtgtgtttgcaatgtgtgttttagataaataggattgggtatttaaattagcatttgtgaatttaatagcattaagattaccttcaaatgaaaaaaaatctcaaaatttctatttggtttttgtgcattttcttttaaaatgtaatcatatgattttagtgtgttagacttgctgagtcctagctgtgtttagaacatctctattctacatttaccttggtcaaatttgaactgctgccataggttttgggtgtaaagaatgtttactgccctccatttaaattctgaaaagggatggtggatgttttccctctcctacgttagaaaccattcttaaaaacttttgaaaatatagaaccattaagcctgctatatctgagcaaattagtgggtaccttttttttcttatttaaagcacaagaggcccataaatcttgagttactttaaattcttttttttgatacaagttttcagagcaagagaataaaaatcatgtgttattaaacccctaactggctggcatgctttcctgtttgtattctatacattttgctggatgaaaccaaggatagttcaggtataattgtccaaaataacctaactgcagcagaaatgtagcacagttgcttagtacaggcttctcacttcctacagacctgaattcaaatttggatagtctgagttcttaaattcccaaagaacacactgttatttcttgtgtatatttcaacataaatcatgttgttaccaatttgtttggaaggccctggttgagaagagttttagttaataaggtcatatatacatatattaatataaaccaatgtctactgttttgctccagctagtgcttacagtttcattcgagccctgagtatgtgccctgctgttactctctttggtagttgaacgttgaattcaagtcttttgttttaagaagtactaagcaaacaagcaataaaaaggggaatggggtgtgctagtgtttgaatatgctctcttgttgctctaattctgtgcctctgtgcattaatatttggatgcatgcaatgccagcatggaaattggtcttcacacatactgcagttttccagaaacattcacaaaccaataaatgtaacagacattccatttgttaatgggcatatatgtgaaaagcagtgtagaaaataggctaatattagaaaatggttaagtcctaaataacttcaagtgtggttatataatggacactgtcaatgttcataacttaaacctgggtacctggtcaaaataatgcttgggaaacattaaaattgagctaaattgtctcaagttcttttattcatataaataaagtttaaaggaatgggggagattaacatttcctgttttatgtttgtgaaattgtttgacacaaccttgacagtatcctttaatggcatgaggttaattgtactgttaaccaactttctatgttctggaactagtattatagtgaaaacatttacagtaagttgatgtttacaacctataagcaggtgaaatctgtgtatgtgacctgtttataagttgtattagcttagctcttgtgaacagtgtggaaaagtaagccatgaggagagcgatttaaccacctttaaaggacctaagatgtgctttttaagcacagtgtggatcacagaaactcactaagacaggacttcagcagccttttgtgtttggacaagtcagcataaataaagaatgacaaggcagcagcaagagcttcaactacagagaagtgaaggcataagatactatgatgatagtgagcaactttccaaaagctagttaaatctgcttattacaactgaaatatcgaagaaagtctagcaggaaggagctcttcgccttttggaacatcaatgagagatagttgccacagtcactaggtctagcatttagacctgcaaggaagggcaataagcattaggtaaggcttgaatttgaattttttcactaattaaagagtaattttttgtaaagcaaggtaagagtaatctttttgatttgcaggttgaatgagaaccctacttgcctaaatgaggaatgtctttcctaccatctaaaatacgaaggtttctggctgggtaaggtttgtagttgacagtaaaacctgatgacaccatttgtttccctgcaagtctacattacatatttcacaactttgtccctctctagtaggcacattggaaaaattcttcaactgaaaactaccttggtaccatgtcctacacgttttaaaccttagttttaaaaattcccctgcgaaatagccataagtattcatatcaagtcagttgtgactccttgtgtatacaattcattttttgtgtcttcagggtaaactcaatttttggtaaagtggtttcagcttttgtgaaaaccgttttggtgtgtaagcatgacacacaacagactcagtaagctgcccatcctcatactaggaaaacaccttcaaaggaacattaaaagttaccagggccaggcacagtggctcacgcctgtaatcccagcactttgggaggctgaggcagatggatcccaagtccaggaatttgagacgagcctgggcaacatagtgagagcctgtcaacaaaaaatagaaaaattagttgggcttggtgatacacatctgtagtcccagctatttgggaggctgccttgatatcaggcagtcgaggctgcagtgagctgactgccccactgtattccagcctgggtgaccccatctcaaagaagaaaagttaccagatgtcatgggtaaaggttggtcttcaagtggcctcataagttgtcttgcatttaaattcagggaattcattggaccaataggttacattttcgttccttttttgttttggttcatctgttaagcagtgggggcctaattactgctcctttgtaaaaacacattttcccaaagaacactgaattaccgttcaaactggttgttgatgggtaataagggctgtttttgctgccccaaaagggcttaacaatttagtcggatagtttacttaaaaaaaaaaatcctttggagacatactgaaaatgcaaactagtttctaaattatcaattccctacatgaagaagcagtttgccagagtttagtctcagaaaatgactggttggctctatttaaatcagaacccaatttctacgcgtgttgaataaggtaacagcctttgatgaatttccttcacaacatggttttagtgaagcaaacattttttttttaagggcattgttctttctagtttatttctttttatgaaataaaattattttatttaaacagttccattgtcgtttctgaaaactacagtattctcagaagttgtagcagcagtaaaaaaaaaaaagttgttatataagtgattggggcagatttaactgattttgttaaaccaatttgtaagttactgcttctaatattacacttctaaaaagctgaatttatactcatgtcctaaaggagaatatgtggtaataaagtatatttgttaagtaactaattgaaataggcttggttttaagagttccagtatataataatcacaaattgaaacctgacagtatcttgggagttccagtaatgtcacaaattagtgaataagcatgccagtgtgcaagggtaatgtaaggattgttagcctatctaaatattcaaaattactttaaaacttaagtatgttttctgatttttaagaattcagaagtgttctgtaatggattcagatgtttcatttgtagtataatgaaatgtttacagaaagataactttttcattaaaatatttttagaaatgtgtgtgttgttttgtcacttcacaatgttcatgtgacttaaacactataggtgaatattttgacttattttaccagtaagtaataaaacaacaggaaacttgg

SEQ ID NO: 140441 - DNA, 1731 bp, Homo sapiens
  Payload ID: 7556
  Gene Symbol: HNRNPA3
  Gene Name: heterogeneous nuclear ribonucleoprotein A3
  Uniprot ID: P51991
  ENST ID: ENST00000435711
  CDS Start-End: 29-1165
agttggaagaggcgagtccggtctcaaaatggaggtaaaaccgccgcccggtcgcccccagcccgactccggccgtcgccgtcgccgccggggggaggagggccatgatccaaaggaaccagagcagttgagaaaactgtttattggtggtctgagctttgaaactacagatgatagtttacgagaacattttgagaaatggggcacactcacagattgtgtggtaatgagagacccccaaacaaaacgttccaggggctttggttttgtgacttattcttgtgttgaagaggtggatgcagcaatgtgtgctcgaccacacaaggttgatgggcgtgtagtggaaccaaagagagctgtttctagagaggattctgtaaagcctggtgcccatctaacagtgaagaaaatttttgttggtggtattaaagaagatacagaagaatataatttgagagactactttgaaaagtatggcaagattgaaaccatagaagttatggaagacaggcagagtggaaaaaagagaggatttgcttttgtaacttttgatgatcatgatacagttgataaaattgttgttcagaaataccacactattaatgggcataattgtgaagtgaaaaaggccctttctaaacaagagatgcagtctgctggatcacagagaggtcgtggaggtggatctggcaattttatgggtcgcggagggaactttggaggtggtggaggtaattttggccgtggtggaaactttggtggaagaggaggctatggtggtggaggtggtggcagcagaggtagttatggaggaggtgatggtggatataatggatttggaggtgatggtggcaactatggcggtggtcctggttatagtagtagagggggctatggtggtggtggaccaggatatggaaaccaaggtggtggatatggtggaggtggaggatatgatggttacaatgaaggaggaaattttggcggtggtaactatggtggtggtgggaactataatgattttggaaattatagtggacaacagcaatcaaattatggacccatgaaagggggcagttttggtggaagaagctcgggcagtccctatggtggtggttatggatctggtggtggaagtggtggatatggtagcagaaggttctaaaaacagcagaaaagggtaggtatctttaaatttttattatgatgataaaagaatatgtggaactgttcactgagtgtaataatttttttatcctgtattattcaacaggctacagttcttagcaggagagagagcgaggagttgtcaggaaagctgcaggttactttgagacagtcgtcccaaatgcattagaggaactgtaaaaatctgccacagaaggaacgatgatccatagtcagaaaagttactgcagcttaaacaggaaacccttcttgttcaggactgtcatagccacagtttgcaaaaagtgcagctattgattaatgcaatgtagtgtcaattagatgtacattcctgaggtcttttatctgttgtagctttgtctttttctttttcttttcattacatcaggtatattgccctgtaaattgtggtagtggtaccaggaataaaaaattaaggaatttttaacttttcaatatttgtgtagttcagtttttctacattttagtacagaaactttaacaaaatgcagtttcgaaggtgtttccttgtgagttaacaag

SEQ ID NO: 140442 - DNA, 3301 bp, Homo sapiens
  Payload ID: 7557
  Gene Symbol: HNRNPC
  Gene Name: heterogeneous nuclear ribonucleoprotein C (C1/C2)
  ENST ID: ENST00000336053
  CDS Start-End: 234-1100
aataggaagattctcaggaatggggcggggactaggccttcgcctcggcggcagaggagactcgggggccattttgtgaagagacgaagactgagcggttgtggccgcgttgccgacctccagcagcagtcggcttctctacgcagaacccgggagtaggagactcagaatcgaatctcttctccctccccttcttgttttcggctttgtgagaaaccttaccatcaaacacgatggccagcaacgttaccaacaagacagatcctcgctccatgaactcccgtgtattcattgggaatctcaacactcttgtggtcaagaaatctgatgtggaggcaatcttttcgaagtatggcaaaattgtgggctgctctgttcataagggctttgccttcgttcagtatgttaatgagagaaatgcccgggctgctgtagcaggagaggatggcagaatgattgctggccaggttttagatattaacctggctgcagagccaaaagtgaaccgaggaaaagcaggtgtgaaacgatctgcagcggagatgtacggctcctcttttgacttggactatgactttcaacgggactattatgataggatgtacagttacccagcacgtgtacctcctcctcctcctattgctcgggctgtagtgccctcgaaacgtcagcgtgtatcaggaaacacttcacgaaggggcaaaagtggcttcaattctaagagtggacagcggggatcttccaagtctggaaagttgaaaggagatgaccttcaggccattaagaaggagctgacccagataaaacaaaaagtggattctctcctggaaaacctggaaaaaattgaaaaggaacagagcaaacaagcagtagagatgaagaatgataagtcagaagaggagcagagcagcagctccgtgaagaaagatgagactaatgtgaagatggagtctgaggggggtgcagatgactctgctgaggagggggacctactggatgatgatgataatgaagatcggggggatgaccaggtgaaaaccacgggaaaggaaagaaaaaggtggtggaggggggctcagggacacatggagtgcctctaactccatcctgtttgtgtctgtttctcacagctggagttgatcaaggatgatgaaaaagaggctgaggaaggagaggatgacagagacagcgccaatggcgaggatgactcttaagcacatagtggggtttagaaatcttatcccattatttctttacctaggcgcttgtctaagatcaaatttttcaccagatcctctcccctagtatcttcagcacatgctcactgttctccccatccttgtccttcccatgttcattaattcatattgccccgcgcctagtcccattttcacttcctttgacgctcctagtagttttgttaagtcttaccctgtaatttttgcttttaattttgatacctctttatgacttaacaataaaaaggatgtatggtttttatcaactgtctccaaaataatctcttgttatgcagggagtacagttcttttcattcatacataagttcagtagttgcttccctaactgcaaaggcaatctcatttagttgagtagctcttgaaagcagctttgagttagaagtatgtgtgttacaccctcacattagtgtgctgtgtggggcagttcaacacaaatgtaacaatgtatttttgtgaatgagagttggcatgtcaaatgcatcctctagaaaaataattagtgttatagtcttaagatttgttttctaaagttgatactgtgggttatttttgtgaacagcctgatgtttgggaccttttttcctcaaaataaacaagtccttattaaaccaggaatttggagaaaaaaaaaaccctggttttttatttttgtattttattattgtttacttcaaactttgttttacagcgtcctccacaaaacctctagaatgcactagatatatttttcttggagtcataatcatgatgcataccaacacaacactactcaaattatatttcattgagatgcatgttgcattgaggagtcaacttgacatagagtggagactttttcaaaatggcttttacatcctaatgaaagtttgggaagtatatcctctctgccttttcatcagtgctttgtggtccagctggcaccctttctgaggtttgtgttttgtgctaaatggttttgtccttaaataggagaggctcaaaaacatcaagatttcaggaaaatggcgacagctgcataatggaacccccctgcttctattttgttcttttaattactatttatagccccagttaccttctgaattctgaagtgtatatacctccatgttcctgaaaacaagaaaactcttacttcctgatattccatagactgccttcccaggtgattgagaacatagagaatgttacacatttattttactctaaatgatcttttacccctgttagctaatctttgtgttttcctcaactttattaattacagtgattgcatttttagcatccagttgtaagatgaatatattaaacagctaccagtgttggtgatacctcatccttgaaaggcttagttcatttgtgttttatacttcagtttttccagcatagcagaaaatgccgcttataatttttgtgcacacaaaccttggattcccctgtaaagttgctattgtttcatagcatgcggcactggccttttttcatcctactcattacaggcaaaactcatgtcttatttatgaggattttatagatcattttctgtaacaggtgacaaaagcagaaaagaatgaagaggctgaagtatgaactacccttggagcccatatacatgatataggcaatttcttttgtatgttaattcagtcaaaaatactacccacttgatgttttctaatctgatgtgagctcatgttacacagacttttagtaagtaacccgtgactagaaaataaactggatgcttaggagagagtgtcagatgtataagatgctaataaaacctgtttaatattattgttagctgtaagtttttgggaaatactgaacaaattagtccacaatcaagtgtctacttttcccttcactgtagggcctctccctgcacagagcagtctgtttagctgtgaacaccacaatctgcagatgttcaagtcccttacataaaatggcatagtatttatatgtaacctatgcatattctcctgtatattttaaatcatctctacattaaaatacctgataaaatgtaaatggtatgtaaa

SEQ ID NO: 140443 - DNA, 1599 bp, Homo sapiens
  Payload ID: 7557
  Gene Symbol: HNRNPC
  Gene Name: heterogeneous nuclear ribonucleoprotein C (C1/C2)
  ENST ID: ENST00000449098
  CDS Start-End: 53-925
tttttttgctttacagttttcggctttgtgagaaaccttaccatcaaacacgatggccagcaacgttaccaacaagacagatcctcgctccatgaactcccgtgtattcattgggaatctcaacactcttgtggtcaagaaatctgatgtggaggcaatcttttcgaagtatggcaaaattgtgggctgctctgttcataagggctttgccttcgttcagtatgttaatgagagaaatgcccgggctgctgtagcaggagaggatggcagaatgattgctggccaggttttagatattaacctggctgcagagccaaaagtgaaccgaggaaaagcaggtgtgaaacgatctgcagcggagatgtacggctcctcttttgacttggactatgactttcaacgggactattatgataggatgtacagttacccagcacgtgtacctcctcctcctcctattgctcgggctgtagtgccctcgaaacgtcagcgtgtatcaggaaacacttcacgaaggggcaaaagtggcttcaattctaagagtggacagcggggatcttccaagtctggaaagttgaaaggagatgaccttcaggccattaagaaggagctgacccagataaaacaaaaagtggattctctcctggaaaacctggaaaaaattgaaaaggaacagagcaaacaagcagtagagatgaagaatgataagtcagaagaggagcagagcagcagctccgtgaagaaagatgagactaatgtgaagatggagtctgaggggggtgcagatgactctgctgaggagggggacctactggatgatgatgataatgaagatcggggggatgaccagctggagttgatcaaggatgatgaaaaagaggctgaggaaggagaggatgacagagacagcgccaatggcggatgactcttaagcacatagtggggtttagaaatcttatcccattatttctttacctaggcgcttgtctaagatcaaatttttcaccagatcctctcccctagtatcttcagcacatgctcactgttctccccatccttgtccttcccatgttcattaattcatattgccccgcgcctagtcccattttcacttcctttgacgctcctagtagttttgttaagtcttaccctgtaatttttgcttttaattttgatacctctttatgacttaacaataaaaaggatgtatggtttttatcaactgtctccaaaataatctcttgttatgcagggagtacagttcttttcattcatacataagttcagtagttgcttccctaactgcaaaggcaatctcatttagttgagtagctcttgaaagcagctttgagttagaagtatgtgtgttacaccctcacattagtgtgctgtgtggggcagttcaacacaaatgtaacaatgtatttttgtgaatgagagttggcatgtcaaatgcatcctctagaaaaataattagtgttatagtcttaagatttgttttctaaagttgatactgtgggttatttttgtgaacagcctgatgtttgggaccttttttcctcaaaataaacaagtccttattaaaccaggaatttggag

SEQ ID NO: 140444 - DNA, 1559 bp, Homo sapiens
  Payload ID: 7557
  Gene Symbol: HNRNPC
  Gene Name: heterogeneous nuclear ribonucleoprotein C (C1/C2)
  Uniprot ID: P07910
  ENST ID: ENST00000420743
  CDS Start-End: 522-1442
cattttgtgaagagacgaagactgagcggttgtggccgcgttgccgacctccagcagcagtcggcttctctacgcagaacccgggagtaggagactcagaatcgaatctcttctccctccccttcttgggcagcaaggcgaaccccatccctactcactggagctcagctttgatttttaacctcccttccccacccttccagaacacacacattccattccaaaactgattttataaagacattttaaacataatgatgcaacttggtgtgcactacagcaaatgtacagtgagatttttttgatcttcagctacaccatcttcctcctgtttcccttgaaatcccatcctgcttttcctgtacactacccctcacaaaccacaagctgcagcaacatggatgcccagcctggagcagcagcagccaggatgacctggagccaggggggccttcggaacagatgcacacccttcctgggtgatgttttcggctttgtgagaaaccttaccatcaaacacgatggccagcaacgttaccaacaagacagatcctcgctccatgaactcccgtgtattcattgggaatctcaacactcttgtggtcaagaaatctgatgtggaggcaatcttttcgaagtatggcaaaattgtgggctgctctgttcataagggctttgccttcgttcagtatgttaatgagagaaatgcccgggctgctgtagcaggagaggatggcagaatgattgctggccaggttttagatattaacctggctgcagagccaaaagtgaaccgaggaaaagcaggtgtgaaacgatctgcagcggagatgtacgggtcagtaacagaacacccttctccgtcccctctactcagctcctcttttgacttggactatgactttcaacgggactattatgataggatgtacagttacccagcacgtgtacctcctcctcctcctattgctcgggctgtagtgccctcgaaacgtcagcgtgtatcaggaaacacttcacgaaggggcaaaagtggcttcaattctaagagtggacagcggggatcttccaagtctggaaagttgaaaggagatgaccttcaggccattaagaaggagctgacccagataaaacaaaaagtggattctctcctggaaaacctggaaaaaattgaaaaggaacagagcaaacaagcagtagagatgaagaatgataagtcagaagaggagcagagcagcagctccgtgaagaaagatgagactaatgtgaagatggagtctgaggggggtgcagatgactctgctgaggagggggacctactggatgatgatgataatgaagatcggggggatgaccagctggagttgatcaaggatgatgaaaaagaggctgaggaaggagaggatgacagagacagcgccaatggcgaggatgactcttaagcacatagtggggtttagaaatcttatcccattatttctttacctaggcgcttgtctaagatcaaatttttcaccagatcctctcccctagtatcttcagcacatgctcactgttct

SEQ ID NO: 140445 - DNA, 4501 bp, Homo sapiens
  Payload ID: 7557
  Gene Symbol: HNRNPC
  Gene Name: heterogeneous nuclear ribonucleoprotein C (C1/C2)
  Uniprot ID: P07910
  ENST ID: ENST00000430246
  CDS Start-End: 2953-3834
ttcttgattgaaaatggtgctaaagttggtctttttatgagtggtagctcttcagtttaacataaataacatcttgggagatactgagctttttgatattgaaagatagaattggtttcttttcacatttttctttatttttaagcttatgtcttgtggcacctgtacaaaggacttggttgtggttgagctataaagttatgtatcttgaaaattgattaccaggtttgggctgtggctccaaataagaaaatgaaatgtttcaccataactgtatttcataaacaggaaaagaacattcagatgtatatttcttacaattcttcacaaactttttccgcaatttgtacattcatacagttttcacacatcaaatgtaaaaattaactgtcattcctacactgttctttttaaaaatgtatggtacttgttgctgctgtagtcattcatgtatagttggctcaaggaacacttctaaaagctcaattaaaaattttttttttgagacagggtctctctctggcctggctgaagtgcagtggcgtgatcagagctcactgcagcctcgaactcctgggctcaagtgatcctcgctcctcagactgctaagtagctgggatttcaggctaccacaccctgctaatgttttttgtttttaataaagtctcgtcatgtttcccaggctggtctcaaactactgagctcaagccgtgctctaccctggcctcccaaagtgttgggattacaggtgtgagccaccacacttggccttaaaatattttaatttcctcaaatttacaaaggagaataagacctcatggctaaattgaacagtgagtgcagctagttcattgtttgcacaaggaactacagtctaattgcagttcctattttagctgatgaaacaaccagtttgtcatggaaattattttagtgtggtattatgtaccagatttttagaatccataacttgaaattagctttacacgctacatagtaaatagtggactacagaaacaaaagtattaacataaggaccttaatttttttcacctattttatgaccttaaatattcagtatttttttaattccatctgtattttcgttttgtcagtgagtggaataatgtgctccttatttaaaacatcttttcccctaacagtagaacctattaggtcttgtggtttgatcactcactggttttgagaatagatgagtcatctctagtatagatcttcatggtaggccattcaccttcagtctattactcatagcaaaaactccacggacttttttaagtttaaaacccatgaatctgcttaggttttataatctcagtatttgacatttgctcactatttcatctctatttgttggcccggtttttctgtattttctttgcccaaactgctcattatcaagatgaacatttgggatatactctttttgagaccctcaagggcatattgacatgaatttagttaattttagtcatctattgatgttgaagaattgtgaagacagtcactggtagaggtgattctatggaggctatcccatcccagtggaatgttaatgctttaccaaaatgtgttagctgcagtagacagatgtttctgtcttgggggtttagggcacaacatttctgaggaactctgactcaatctgtcccttctcctttcacagggcagcaaggcgaaccccatccctactcactggagctcagctttgatttttaacctcccttccccacccttccagaacacacacattccattccaaaactgattttataaagacattttaaacataatgatgcaacttggtgtgcactacagcaaatgtacaggtgttttttttttaattgtttccaaaaccgggacctggatttaagatgtaatttttaaaatttctatttctattttttctgcagcagttgggttagaggaggaggagccttttagcctctcataaactgacctctctacttcctcgtgtatttttaagattgattgatgatgtggaaagggctttgcttgtctgctactgaaaactttatccttgcggtttttgtggaaactgcttttggaaagagaaaagaaatgaactttactgacttgacatttttgcacctcccgtttttctaatctgggctatttttatttttgtttttttacagtgagatttttttgatcttcagctacagtaagttattccaatttttttttaacatttttcctgactttccgctgatttcctttttattgttgttactagttactattacttattattattatattaatacttatgatggtgatgatgatgatgataatgacactgatgatttttaaccggattaaaatcgagtttttctgaatgtttctaagaatttctccggcctcctgattgactttggagttttgcatcttgggagagaaagcgaaggcattagtatttttaagtggtttgatcacgtaaaccttttctctcccaaccccacccttgccctcatccccttccccacactgaaaagaattttactggctgttaagtctatgaccttatttttcctgatctttaacttaactgttttagagcatctctggacgtctgtatttttaattttttttatttttgtttttttatttttaatctttcatttgttaaatttttaaactgtgctgcaataaaatgtgtgtggtactacttaacacttatgatcgtgatggcattttccctgaaagccatcttcctcctgtttcccttgaaatcccatcctgcttttcctgtacactacccctcacaaaccacaagctgcagcaacatggatgcccagcctggagcagcagcagccaggatgacctggagccaggggggccttcggaacagatgcacacccttcctgggtgatgttttcggctttgtgagaaaccttaccatcaaacacgatggccagcaacgttaccaacaagacagatcctcgctccatgaactcccgtgtattcattgggaatctcaacactcttgtggtcaagaaatctgatgtggaggcaatcttttcgaagtatggcaaaattgtgggctgctctgttcataagggctttgccttcgttcagtatgttaatgagagaaatgcccgggctgctgtagcaggagaggatggcagaatgattgctggccaggttttagatattaacctggctgcagagccaaaagtgaaccgaggaaaagcaggtgtgaaacgatctgcagcggagatgtacggctcctcttttgacttggactatgactttcaacgggactattatgataggatgtacagttacccagcacgtgtacctcctcctcctcctattgctcgggctgtagtgccctcgaaacgtcagcgtgtatcaggaaacacttcacgaaggggcaaaagtggcttcaattctaagagtggacagcggggatcttccaagtctggaaagttgaaaggagatgaccttcaggccattaagaaggagctgacccagataaaacaaaaagtggattctctcctggaaaacctggaaaaaattgaaaaggaacagagcaaacaagcagtagagatgaagaatgataagtcagaagaggagcagagcagcagctccgtgaagaaagatgagactaatgtgaagatggagtctgaggggggtgcagatgactctgctgaggagggggacctactggatgatgatgataatgaagatcggggggatgaccagctggagttgatcaaggatgatgaaaaagaggctgaggaaggagaggatgacagagacagcgccaatggcgaggatgactcttaagcacatagtggggtttagaaatcttatcccattatttctttacctaggcgcttgtctaagatcaaatttttcaccagatcctctcccctagtatcttcagcacatgctcactgttctccccatccttgtccttcccatgttcattaattcatattgccccgcgcctagtcccattttcacttcctttgacgctcctagtagttttgttaagtcttaccctgtaatttttgcttttaattttgatacctctttatgacttaacaataaaaaggatgtatggtttttatcaactgtctccaaaataatctcttgttatgcagggagtacagttcttttcattcatacataagttcagtagttgcttccctaactgcaaaggcaatctcatttagttgagtagctcttgaaagcagctttgagttagaagtatgtgtgttacaccctcacattagtgtgctgtgtggggcagttcaacacaaatgtaacaatgtatttttgtgaatgagagttggcatgtcaaatgcatcctctagaaaaataattagtgttatagtcttaagatttgttttctaaagttgatactgtgggttatttttgtgaacagcctgatgtttgggaccttttttcctcaaaataaacaagtccttattaaaccaggaatttggag

SEQ ID NO: 140446 - DNA, 644 bp, Homo sapiens
  Payload ID: 7557
  Gene Symbol: HNRNPC
  Gene Name: heterogeneous nuclear ribonucleoprotein C (C1/C2)
  ENST ID: ENST00000554891
  CDS Start-End: 267-644
ggccgcgttgccgacctccagcagcagtcggcttctctacgcagaacccgggagtaggagactcagaatcgaatctcttctccctccccttcttggttacaaaacacttgaaatatataagttagtggaactttgcttgagtgagatttttttgatcttcagctacagtgtttccagtgtaaatgaattgattctatttattgccttttgaagaaaattatacttaatggttttcggctttgtgagaaaccttaccatcaaacacgatggccagcaacgttaccaacaagacagatcctcgctccatgaactcccgtgtattcattgggaatctcaacactcttgtggtcaagaaatctgatgtggaggcaatcttttcgaagtatggcaaaattgtgggctgctctgttcataagggctttgccttcgttcagtatgttaatgagagaaatgcccgggctgctgtagcaggagaggatggcagaatgattgctggccaggttttagatattaacctggctgcagagccaaaagtgaaccgaggaaaagcaggtgtgaaacgatctgcagcggagatgtacggctcctcttttgacttggactatgactttcaacgggactattatgataggatgtacagttac

SEQ ID NO: 140447 - DNA, 1375 bp, Homo sapiens
  Payload ID: 7557
  Gene Symbol: HNRNPC
  Gene Name: heterogeneous nuclear ribonucleoprotein C (C1/C2)
  Uniprot ID: P07910
  ENST ID: ENST00000553300
  CDS Start-End: 208-1089
agaggagactcgggggccattttgtgaagagacgaagactgagcggttgtggccgcgttgccgacctccagcagcagtcggcttctctacgcagaacccgggagtaggagactcagaatcgaatctcttctccctccccttcttgtgagatttttttgatcttcagctacattttcggctttgtgagaaaccttaccatcaaacacgatggccagcaacgttaccaacaagacagatcctcgctccatgaactcccgtgtattcattgggaatctcaacactcttgtggtcaagaaatctgatgtggaggcaatcttttcgaagtatggcaaaattgtgggctgctctgttcataagggctttgccttcgttcagtatgttaatgagagaaatgcccgggctgctgtagcaggagaggatggcagaatgattgctggccaggttttagatattaacctggctgcagagccaaaagtgaaccgaggaaaagcaggtgtgaaacgatctgcagcggagatgtacggctcctcttttgacttggactatgactttcaacgggactattatgataggatgtacagttacccagcacgtgtacctcctcctcctcctattgctcgggctgtagtgccctcgaaacgtcagcgtgtatcaggaaacacttcacgaaggggcaaaagtggcttcaattctaagagtggacagcggggatcttccaagtctggaaagttgaaaggagatgaccttcaggccattaagaaggagctgacccagataaaacaaaaagtggattctctcctggaaaacctggaaaaaattgaaaaggaacagagcaaacaagcagtagagatgaagaatgataagtcagaagaggagcagagcagcagctccgtgaagaaagatgagactaatgtgaagatggagtctgaggggggtgcagatgactctgctgaggagggggacctactggatgatgatgataatgaagatcggggggatgaccagctggagttgatcaaggatgatgaaaaagaggctgaggaaggagaggatgacagagacagcgccaatggcgaggatgactcttaagcacatagtggggtttagaaatcttatcccattatttctttacctaggcgcttgtctaagatcaaatttttcaccagatcctctcccctagtatcttcagcacatgctcactgttctccccatccttgtccttcccatgttcattaattcatattgccccgcgcctagtcccattttcacttcctttgacgctcctagtagttttgttaagtcttaccctgtaatttttgcttttaattttgatacctctttatgacttaacaataaaaaggatgtatggttttta

SEQ ID NO: 140448 - DNA, 1790 bp, Homo sapiens
  Payload ID: 7557
  Gene Symbol: HNRNPC
  Gene Name: heterogeneous nuclear ribonucleoprotein C (C1/C2)
  ENST ID: ENST00000553753
  CDS Start-End: 169-1035
tgagcggttgtggccgcgttgccgacctccagcagcagtcggcttctctacgcagaacccgggagtaggagactcagaatcgaatctcttctccctccccttcttgtgagatttttttgatcttcagctacattttcggctttgtgagaaaccttaccatcaaacacgatggccagcaacgttaccaacaagacagatcctcgctccatgaactcccgtgtattcattgggaatctcaacactcttgtggtcaagaaatctgatgtggaggcaatcttttcgaagtatggcaaaattgtgggctgctctgttcataagggctttgccttcgttcagtatgttaatgagagaaatgcccgggctgctgtagcaggagaggatggcagaatgattgctggccaggttttagatattaacctggctgcagagccaaaagtgaaccgaggaaaagcaggtgtgaaacgatctgcagcggagatgtacggctcctcttttgacttggactatgactttcaacgggactattatgataggatgtacagttacccagcacgtgtacctcctcctcctcctattgctcgggctgtagtgccctcgaaacgtcagcgtgtatcaggaaacacttcacgaaggggcaaaagtggcttcaattctaagagtggacagcggggatcttccaagtctggaaagttgaaaggagatgaccttcaggccattaagaaggagctgacccagataaaacaaaaagtggattctctcctggaaaacctggaaaaaattgaaaaggaacagagcaaacaagcagtagagatgaagaatgataagtcagaagaggagcagagcagcagctccgtgaagaaagatgagactaatgtgaagatggagtctgaggggggtgcagatgactctgctgaggagggggacctactggatgatgatgataatgaagatcggggggatgaccaggtgaaaaccacgggaaaggaaagaaaaaggtggtggaggggggctcagggacacatggagtgcctctaactccatcctgtttgtgtctgtttctcacagctggagttgatcaaggatgatgaaaaagaggctgaggaaggagaggatgacagagacagcgccaatggcgaggatgactcttaagcacatagtggggtttagaaatcttatcccattatttctttacctaggcgcttgtctaagatcaaatttttcaccagatcctctcccctagtatcttcagcacatgctcactgttctccccatccttgtccttcccatgttcattaattcatattgccccgcgcctagtcccattttcacttcctttgacgctcctagtagttttgttaagtcttaccctgtaatttttgcttttaattttgatacctctttatgacttaacaataaaaaggatgtatggtttttatcaactgtctccaaaataatctcttgttatgcagggagtacagttcttttcattcatacataagttcagtagttgcttccctaactgcaaaggcaatctcatttagttgagtagctcttgaaagcagctttgagttagaagtatgtgtgttacaccctcacattagtgtgctgtgtggggcagttcaacacaaatgtaacaatgtatttttgtgaatgagagttggcatgtcaaatgcatcctctagaaaaataattagtgttatagtcttaagatttgttttctaaagttgatactgtgggttatttttgtgaacagcctgatgtttgggaccttttttcctcaaaataaacaa

SEQ ID NO: 140449 - DNA, 698 bp, Homo sapiens
  Payload ID: 7557
  Gene Symbol: HNRNPC
  Gene Name: heterogeneous nuclear ribonucleoprotein C (C1/C2)
  ENST ID: ENST00000557157
  CDS Start-End: 55-698
attgcatcactgcactccagcttgtatgacagtgagacagtgtcttaaggaaagatgaatattaacctggctgcagagccaaaagtgaaccgaggaaaagcaggtgtgaaacgatctgcagcggagatgtacggctcctcttttgacttggactatgactttcaacgggactattatgataggatgtacagttacccagcacgtgtacctcctcctcctcctattgctcgggctgtagtgccctcgaaacgtcagcgtgtatcaggaaacacttcacgaaggggcaaaagtggcttcaattctaagagtggacagcggggatcttccaagtctggaaagttgaaaggagatgaccttcaggccattaagaaggagctgacccagataaaacaaaaagtggattctctcctggaaaacctggaaaaaattgaaaaggaacagagcaaacaagcagtagagatgaagaatgataagtcagaagaggagcagagcagcagctccgtgaagaaagatgagactaatgtgaagatggagtctgaggggggtgcagatgactctgctgaggagggggacctactggatgatgatgataatgaagatcggggggatgaccagctggagttgatcaaggatgatgaaaaagaggctgaggaaggagaggatgacagagacagcgccaatggcgaggatgactctta

SEQ ID NO: 140450 - DNA, 1182 bp, Homo sapiens
  Payload ID: 7557
  Gene Symbol: HNRNPC
  Gene Name: heterogeneous nuclear ribonucleoprotein C (C1/C2)
  Uniprot ID: P07910
  ENST ID: ENST00000555883
  CDS Start-End: 140-892
gcggttgtggccgcgttgccgacctccagcagcagtcggcttctctacgcagaacccgggagtaggagactcagaatcgaatctcttctccctccccttcttgttttcggctttgtgagaaaccttaccatcaaacacgatggccagcaacgttaccaacaagacagatcctcgctccatgaactcccgtgtattcattgggaatctcaacactcttgtggtcaagaaatctgatgtggaggcaatcttttcgaagtatggcaaaattgtgggctgctctgttcataagggctttgccttcgttcagtatgttaatgagagaaatgcccgggctgctgtagcaggagaggatggcagaatgattgctggccaggttttagatattaacctggctgcagagccaaaagtgaaccgaggaaaagcaggtgtgaaacgatctgcagcggagatgtacggctcctcttttgacttggactatgactttcaacgggactattatgataggatgtacagttacccagcacgtgtacctcctcctcctcctattgctcgggccattaagaaggagctgacccagataaaacaaaaagtggattctctcctggaaaacctggaaaaaattgaaaaggaacagagcaaacaagcagtagagatgaagaatgataagtcagaagaggagcagagcagcagctccgtgaagaaagatgagactaatgtgaagatggagtctgaggggggtgcagatgactctgctgaggagggggacctactggatgatgatgataatgaagatcggggggatgaccagctggagttgatcaaggatgatgaaaaagaggctgaggaaggagaggatgacagagacagcgccaatggcgaggatgactcttaagcacatagtggggtttagaaatcttatcccattatttctttacctaggcgcttgtctaagatcaaatttttcaccagatcctctcccctagtatcttcagcacatgctcactgttctccccatccttgtccttcccatgttcattaattcatattgccccgcgcctagtcccattttcacttcctttgacgctcctagtagttttgttaagtcttaccctgtaatttttgcttttaattttgatacctctttatgacttaacaataaaaaggatgtatggtttttatcaa

SEQ ID NO: 140451 - DNA, 599 bp, Homo sapiens
  Payload ID: 7557
  Gene Symbol: HNRNPC
  Gene Name: heterogeneous nuclear ribonucleoprotein C (C1/C2)
  ENST ID: ENST00000557768
  CDS Start-End: 437-599
cattttgtgaagagacgaagactgagcggttgtggccgcgttgccgacctccagcagcagtcggcttctctacgcagaacccgggagtaggagactcagaatcgaatctcttctccctccccttcttgcagttgggttagaggaggaggagccttttagcctctcataaactgacctctctacttcctcgtgtatttttaagattgattgatgatgtggaaagggctttgcttgtctgctactgaaaactttatccttgcggtttttgtggaaactgcttttggaaagagaaaagaaatgaactttactgacttgacatttttgcacctcccgtttttctaatctgggctatttttatttttgtttttttacagtgagatttttttgatcttcagctacattttcggctttgtgagaaaccttaccatcaaacacgatggccagcaacgttaccaacaagacagatcctcgctccatgaactcccgtgtattcattgggaatctcaacactcttgtggtcaagaaatctgatgtggaggcaatcttttcgaagtatggcaaaattgtgggctgctctgttcataagggctttgccttcg

SEQ ID NO: 140452 - DNA, 1924 bp, Homo sapiens
  Payload ID: 7557
  Gene Symbol: HNRNPC
  Gene Name: heterogeneous nuclear ribonucleoprotein C (C1/C2)
  Uniprot ID: P07910
  ENST ID: ENST00000554969
  CDS Start-End: 354-1235
cattttgtgaagagacgaagactgagcggttgtggccgcgttgccgacctccagcagcagtcggcttctctacgcagaacccgggagtaggagactcagaatcgaatctcttctccctccccttcttgggcagcaaggcgaaccccatccctactcactggagctcagctttgatttttaacctcccttccccacccttccagaacacacacattccattccaaaactgattttataaagacattttaaacataatgatgcaacttggtgtgcactacagcaaatgtacagtgagatttttttgatcttcagctacattttcggctttgtgagaaaccttaccatcaaacacgatggccagcaacgttaccaacaagacagatcctcgctccatgaactcccgtgtattcattgggaatctcaacactcttgtggtcaagaaatctgatgtggaggcaatcttttcgaagtatggcaaaattgtgggctgctctgttcataagggctttgccttcgttcagtatgttaatgagagaaatgcccgggctgctgtagcaggagaggatggcagaatgattgctggccaggttttagatattaacctggctgcagagccaaaagtgaaccgaggaaaagcaggtgtgaaacgatctgcagcggagatgtacggctcctcttttgacttggactatgactttcaacgggactattatgataggatgtacagttacccagcacgtgtacctcctcctcctcctattgctcgggctgtagtgccctcgaaacgtcagcgtgtatcaggaaacacttcacgaaggggcaaaagtggcttcaattctaagagtggacagcggggatcttccaagtctggaaagttgaaaggagatgaccttcaggccattaagaaggagctgacccagataaaacaaaaagtggattctctcctggaaaacctggaaaaaattgaaaaggaacagagcaaacaagcagtagagatgaagaatgataagtcagaagaggagcagagcagcagctccgtgaagaaagatgagactaatgtgaagatggagtctgaggggggtgcagatgactctgctgaggagggggacctactggatgatgatgataatgaagatcggggggatgaccagctggagttgatcaaggatgatgaaaaagaggctgaggaaggagaggatgacagagacagcgccaatggcgaggatgactcttaagcacatagtggggtttagaaatcttatcccattatttctttacctaggcgcttgtctaagatcaaatttttcaccagatcctctcccctagtatcttcagcacatgctcactgttctccccatccttgtccttcccatgttcattaattcatattgccccgcgcctagtcccattttcacttcctttgacgctcctagtagttttgttaagtcttaccctgtaatttttgcttttaattttgatacctctttatgacttaacaataaaaaggatgtatggtttttatcaactgtctccaaaataatctcttgttatgcagggagtacagttcttttcattcatacataagttcagtagttgcttccctaactgcaaaggcaatctcatttagttgagtagctcttgaaagcagctttgagttagaagtatgtgtgttacaccctcacattagtgtgctgtgtggggcagttcaacacaaatgtaacaatgtatttttgtgaatgagagttggcatgtcaaatgcatcctctagaaaaataattagtgttatagtcttaagatttgttttctaaagttgatactgtgggttatttttgtgaacagcctgatgtttgggaccttttttcctcaaaataaacaagtccttattaaaccaggaatttggagaaaaaaaaaaccctggtttttt

SEQ ID NO: 140453 - DNA, 1714 bp, Homo sapiens
  Payload ID: 7557
  Gene Symbol: HNRNPC
  Gene Name: heterogeneous nuclear ribonucleoprotein C (C1/C2)
  ENST ID: ENST00000555309
  CDS Start-End: 187-1104
ttgtgaagagacgaagactgagcggttgtggccgcgttgccgacctccagcagcagtcggcttctctacgcagaacccgggagtaggagactcagaatcgaatctcttctccctccccttcttgtgagatttttttgatcttcagctacattttcggctttgtgagaaaccttaccatcaaacacgatggccagcaacgttaccaacaagacagatcctcgctccatgaactcccgtgtattcattgggaatctcaacactcttgtggtcaagaaatctgatgtggaggcaatcttttcgaagtatggcaaaattgtgggctgctctgttcataagggctttgccttcgttcagtatgttaatgagagaaatgcccgggctgctgtagcaggagaggatggcagaatgattgctggccaggttttagatattaacctggctgcagagccaaaagtgaaccgaggaaaagcaggtgtgaaacgatctgcagcggagatgtacgggtcagtaacagaacacccttctccgtcccctctactcagctcctcttttgacttggactatgactttcaacgggactattatgataggatgtacagttacccagcacgtgtacctcctcctcctcctattgctcgggctgtagtgccctcgaaacgtcagcgtgtatcaggaaacacttcacgaaggggcaaaagtggcttcaattctaagagtggacagcggggatcttccaagtctggaaagttgaaaggagatgaccttcaggccattaagaaggagctgacccagataaaacaaaaagtggattctctcctggaaaacctggaaaaaattgaaaaggaacagagcaaacaagcagagatgaagaatgataagtcagaagaggagcagagcagcagctccgtgaagaaagatgagactaatgtgaagatggagtctgaggggggtgcagatgactctgctgaggagggggacctactggatgatgatgataatgaagatcggggggatgaccagctggagttgatcaaggatgatgaaaaagaggctgaggaaggagaggatgacagagacagcgccaatggcgaggatgactcttaagcacatagtggggtttagaaatcttatcccattatttctttacctaggcgcttgtctaagatcaaatttttcaccagatcctctcccctagtatcttcagcacatgctcactgttctccccatccttgtccttcccatgttcattaattcatattgccccgcgcctagtcccattttcacttcctttgacgctcctagtagttttgttaagtcttaccctgtaatttttgcttttaattttgatacctctttatgacttaacaataaaaaggatgtatggtttttatcaactgtctccaaaataatctcttgttatgcagggagtacagttcttttcattcatacataagttcagtagttgcttccctaactgcaaaggcaatctcatttagttgagtagctcttgaaagcagctttgagttagaagtatgtgtgttacaccctcacattagtgtgctgtgtggggcagttcaacacaaatgtaacaatgtatttttgtgaatgagagttggcatgtcaaatgcatcctctagaaaaataattagtgttatagtcttaagatttgttttctaaagttgatactgtgggttatttttgtgaacagcctgat

SEQ ID NO: 140454 - DNA, 1252 bp, Homo sapiens
  Payload ID: 7557
  Gene Symbol: HNRNPC
  Gene Name: heterogeneous nuclear ribonucleoprotein C (C1/C2)
  Uniprot ID: P07910
  ENST ID: ENST00000556897
  CDS Start-End: 114-995
gcctggagcagcagcagccaggatgacctggagccaggggggccttcggaacagatgcacacccttcctgggtgatgttttcggctttgtgagaaaccttaccatcaaacacgatggccagcaacgttaccaacaagacagatcctcgctccatgaactcccgtgtattcattgggaatctcaacactcttgtggtcaagaaatctgatgtggaggcaatcttttcgaagtatggcaaaattgtgggctgctctgttcataagggctttgccttcgttcagtatgttaatgagagaaatgcccgggctgctgtagcaggagaggatggcagaatgattgctggccaggttttagatattaacctggctgcagagccaaaagtgaaccgaggaaaagcaggtgtgaaacgatctgcagcggagatgtacggctcctcttttgacttggactatgactttcaacgggactattatgataggatgtacagttacccagcacgtgtacctcctcctcctcctattgctcgggctgtagtgccctcgaaacgtcagcgtgtatcaggaaacacttcacgaaggggcaaaagtggcttcaattctaagagtggacagcggggatcttccaagtctggaaagttgaaaggagatgaccttcaggccattaagaaggagctgacccagataaaacaaaaagtggattctctcctggaaaacctggaaaaaattgaaaaggaacagagcaaacaagcagtagagatgaagaatgataagtcagaagaggagcagagcagcagctccgtgaagaaagatgagactaatgtgaagatggagtctgaggggggtgcagatgactctgctgaggagggggacctactggatgatgatgataatgaagatcggggggatgaccagctggagttgatcaaggatgatgaaaaagaggctgaggaaggagaggatgacagagacagcgccaatggcgaggatgactcttaagcacatagtggggtttagaaatcttatcccattatttctttacctaggcgcttgtctaagatcaaatttttcaccagatcctctcccctagtatcttcagcacatgctcactgttctccccatccttgtccttcccatgttcattaattcatattgccccgcgcctagtcccattttcacttcctttgacgctcctagtagttttgttaagtcttaccctgtaatttttgcttttaattttgatacctctttatgac

SEQ ID NO: 140455 - DNA, 1599 bp, Homo sapiens
  Payload ID: 7557
  Gene Symbol: HNRNPC
  Gene Name: heterogeneous nuclear ribonucleoprotein C (C1/C2)
  ENST ID: ENST00000556142
  CDS Start-End: 163-858
ttttgtgaagagacgaagactgagcggttgtggccgcgttgccgacctccagcagcagtcggcttctctacgcagaacccgggagtaggagactcagaatcgaatctcttctccctccccttcttgttttcggctttgtgagaaaccttaccatcaaacacgatggccagcaacgttaccaacaagacagatcctcgctccatgaactcccgtgtattcattgggaatctcaacactcttgtggtcaagaaatctgatgtggaggcaatcttttcgaagtatggcaaaattgtgggctgctctgttcataagggctttgccttcgttcagtatgttaatgagagaaatgcccgggctgctgtagcaggagaggatggcagaatgattgctggccaggttttagatattaacctggctgcagagccaaaagtgaaccgaggaaaagcaggtgtgaaacgatctgcagcggagatgtacgggtcagtaacagaacacccttctccgtcccctctactcagctcctcttttgacttggactatgactttcaacgggactattatgataggatgtacagttacccagcacgtgtacctcctcctcctcctattgctcgggctgtagtgccctcgaaacgtcagcgtgtatcaggaaacacttcacgaaggggcaaaagtggcttcaattctaagagtggacagcggggatcttccaagtctggaaagttgaaaggagatgaccttcaggccattaagaaggagctgacccagataaaacaaaaagtggattctctcctggaaaacctggaaaaaattgaaaaggaacagagcaaacaagcagctggagttgatcaaggatgatgaaaaagaggctgaggaaggagaggatgacagagacagcgccaatggcgaggatgactcttaagcacatagtggggtttagaaatcttatcccattatttctttacctaggcgcttgtctaagatcaaatttttcaccagatcctctcccctagtatcttcagcacatgctcactgttctccccatccttgtccttcccatgttcattaattcatattgccccgcgcctagtcccattttcacttcctttgacgctcctagtagttttgttaagtcttaccctgtaatttttgcttttaattttgatacctctttatgacttaacaataaaaaggatgtatggtttttatcaactgtctccaaaataatctcttgttatgcagggagtacagttcttttcattcatacataagttcagtagttgcttccctaactgcaaaggcaatctcatttagttgagtagctcttgaaagcagctttgagttagaagtatgtgtgttacaccctcacattagtgtgctgtgtggggcagttcaacacaaatgtaacaatgtatttttgtgaatgagagttggcatgtcaaatgcatcctctagaaaaataattagtgttatagtcttaagatttgttttctaaagttgatactgtgggttatttttgtgaacagcctgatgtttgggaccttttttcctcaaaataaacaagtccttattaaaccaggaatttggagaaaaaaaaaa

SEQ ID NO: 140456 - DNA, 1784 bp, Homo sapiens
  Payload ID: 7557
  Gene Symbol: HNRNPC
  Gene Name: heterogeneous nuclear ribonucleoprotein C (C1/C2)
  Uniprot ID: P07910
  ENST ID: ENST00000554455
  CDS Start-End: 191-1111
cattttgtgaagagacgaagactgagcggttgtggccgcgttgccgacctccagcagcagtcggcttctctacgcagaacccgggagtaggagactcagaatcgaatctcttctccctccccttcttgtgagatttttttgatcttcagctacattttcggctttgtgagaaaccttaccatcaaacacgatggccagcaacgttaccaacaagacagatcctcgctccatgaactcccgtgtattcattgggaatctcaacactcttgtggtcaagaaatctgatgtggaggcaatcttttcgaagtatggcaaaattgtgggctgctctgttcataagggctttgccttcgttcagtatgttaatgagagaaatgcccgggctgctgtagcaggagaggatggcagaatgattgctggccaggttttagatattaacctggctgcagagccaaaagtgaaccgaggaaaagcaggtgtgaaacgatctgcagcggagatgtacgggtcagtaacagaacacccttctccgtcccctctactcagctcctcttttgacttggactatgactttcaacgggactattatgataggatgtacagttacccagcacgtgtacctcctcctcctcctattgctcgggctgtagtgccctcgaaacgtcagcgtgtatcaggaaacacttcacgaaggggcaaaagtggcttcaattctaagagtggacagcggggatcttccaagtctggaaagttgaaaggagatgaccttcaggccattaagaaggagctgacccagataaaacaaaaagtggattctctcctggaaaacctggaaaaaattgaaaaggaacagagcaaacaagcagtagagatgaagaatgataagtcagaagaggagcagagcagcagctccgtgaagaaagatgagactaatgtgaagatggagtctgaggggggtgcagatgactctgctgaggagggggacctactggatgatgatgataatgaagatcggggggatgaccagctggagttgatcaaggatgatgaaaaagaggctgaggaaggagaggatgacagagacagcgccaatggcgaggatgactcttaagcacatagtggggtttagaaatcttatcccattatttctttacctaggcgcttgtctaagatcaaatttttcaccagatcctctcccctagtatcttcagcacatgctcactgttctccccatccttgtccttcccatgttcattaattcatattgccccgcgcctagtcccattttcacttcctttgacgctcctagtagttttgttaagtcttaccctgtaatttttgcttttaattttgatacctctttatgacttaacaataaaaaggatgtatggtttttatcaactgtctccaaaataatctcttgttatgcagggagtacagttcttttcattcatacataagttcagtagttgcttccctaactgcaaaggcaatctcatttagttgagtagctcttgaaagcagctttgagttagaagtatgtgtgttacaccctcacattagtgtgctgtgtggggcagttcaacacaaatgtaacaatgtatttttgtgaatgagagttggcatgtcaaatgcatcctctagaaaaataattagtgttatagtcttaagatttgttttctaaagttgatactgtgggttatttttgtgaacagcctgatgtttgggaccttttttcctcaaaataaacaagtccttattaaaccaggaatttggagaaaaaa

SEQ ID NO: 140457 - DNA, 629 bp, Homo sapiens
  Payload ID: 7557
  Gene Symbol: HNRNPC
  Gene Name: heterogeneous nuclear ribonucleoprotein C (C1/C2)
  ENST ID: ENST00000556226
  CDS Start-End: 265-629
acgaagactgagcggttgtggccgcgttgccgacctccagcagcagtcggcttctctacgcagaacccgggagtaggagactcagaatcgaatctcttctccctccccttcttgtgagatttttttgatcttcagctacagaggacacgttactaagagtggaattaatccgtattgtgagtacgtctgtctttactgttgcctccatcttgaatttaagtcctcatattttcggctttgtgagaaaccttaccatcaaacacgatggccagcaacgttaccaacaagacagatcctcgctccatgaactcccgtgtattcattgggaatctcaacactcttgtggtcaagaaatctgatgtggaggcaatcttttcgaagtatggcaaaattgtgggctgctctgttcataagggctttgccttcgttcagtatgttaatgagagaaatgcccgggctgctgtagcaggagaggatggcagaatgattgctggccaggttttagatattaacctggctgcagagccaaaagtgaaccgaggaaaagcaggtgtgaaacgatctgcagcggagatgtacggctcctcttttgacttggactatgactttcaacgggactattatgatag

SEQ ID NO: 140458 - DNA, 1156 bp, Homo sapiens
  Payload ID: 7557
  Gene Symbol: HNRNPC
  Gene Name: heterogeneous nuclear ribonucleoprotein C (C1/C2)
  Uniprot ID: P07910
  ENST ID: ENST00000556628
  CDS Start-End: 176-856
cgaagactgagcggttgtggccgcgttgccgacctccagcagcagtcggcttctctacgcagaacccgggagtaggagactcagaatcgaatctcttctccctccccttcttgtgagatttttttgatcttcagctacattttcggctttgtgagaaaccttaccatcaaacacgatggccagcaacgttaccaacaagacagatcctcgctccatgaactcccgtgtattcattgggaatctcaacactcttgtggtcaagaaatctgatgtggaggcaatcttttcgaactcctcttttgacttggactatgactttcaacgggactattatgataggatgtacagttacccagcacgtgtacctcctcctcctcctattgctcgggctgtagtgccctcgaaacgtcagcgtgtatcaggaaacacttcacgaaggggcaaaagtggcttcaattctaagagtggacagcggggatcttccaagtctggaaagttgaaaggagatgaccttcaggccattaagaaggagctgacccagataaaacaaaaagtggattctctcctggaaaacctggaaaaaattgaaaaggaacagagcaaacaagcagtagagatgaagaatgataagtcagaagaggagcagagcagcagctccgtgaagaaagatgagactaatgtgaagatggagtctgaggggggtgcagatgactctgctgaggagggggacctactggatgatgatgataatgaagatcggggggatgaccagctggagttgatcaaggatgatgaaaaagaggctgaggaaggagaggatgacagagacagcgccaatggcgaggatgactcttaagcacatagtggggtttagaaatcttatcccattatttctttacctaggcgcttgtctaagatcaaatttttcaccagatcctctcccctagtatcttcagcacatgctcactgttctccccatccttgtccttcccatgttcattaattcatattgccccgcgcctagtcccattttcacttcctttgacgctcctagtagttttgttaagtcttaccctgtaatttttgcttttaattttgatacctctttatgacttaacaataaaaaggatgtatggtttttatcaactgtctccaa

SEQ ID NO: 140459 - DNA, 1658 bp, Homo sapiens
  Payload ID: 7557
  Gene Symbol: HNRNPC
  Gene Name: heterogeneous nuclear ribonucleoprotein C (C1/C2)
  ENST ID: ENST00000555914
  CDS Start-End: 170-1048
ctgagcggttgtggccgcgttgccgacctccagcagcagtcggcttctctacgcagaacccgggagtaggagactcagaatcgaatctcttctccctccccttcttgtgagatttttttgatcttcagctacattttcggctttgtgagaaaccttaccatcaaacacgatggccagcaacgttaccaacaagacagatcctcgctccatgaactcccgtgtattcattgggaatctcaacactcttgtggtcaagaaatctgatgtggaggcaatcttttcgaagtatggcaaaattgtgggctgctctgttcataagggctttgccttcgttcagtatgttaatgagagaaatgcccgggctgctgtagcaggagaggatggcagaatgattgctggccaggttttagatattaacctggctgcagagccaaaagtgaaccgaggaaaagcaggtgtgaaacgatctgcagcggagatgtacggctcctcttttgacttggactatgactttcaacgggactattatgataggatgtacagttacccagcacgtgtacctcctcctcctcctattgctcgggctgtagtgccctcgaaacgtcagcgtgtatcaggaaacacttcacgaaggggcaaaagtggcttcaattctaagagtggacagcggggatcttccaagtctggaaagttgaaaggagatgaccttcaggccattaagaaggagctgacccagataaaacaaaaagtggattctctcctggaaaacctggaaaaaattgaaaaggaacagagcaaacaagcagagatgaagaatgataagtcagaagaggagcagagcagcagctccgtgaagaaagatgagactaatgtgaagatggagtctgaggggggtgcagatgactctgctgaggagggggacctactggatgatgatgataatgaagatcggggggatgaccagctggagttgatcaaggatgatgaaaaagaggctgaggaaggagaggatgacagagacagcgccaatggcgaggatgactcttaagcacatagtggggtttagaaatcttatcccattatttctttacctaggcgcttgtctaagatcaaatttttcaccagatcctctcccctagtatcttcagcacatgctcactgttctccccatccttgtccttcccatgttcattaattcatattgccccgcgcctagtcccattttcacttcctttgacgctcctagtagttttgttaagtcttaccctgtaatttttgcttttaattttgatacctctttatgacttaacaataaaaaggatgtatggtttttatcaactgtctccaaaataatctcttgttatgcagggagtacagttcttttcattcatacataagttcagtagttgcttccctaactgcaaaggcaatctcatttagttgagtagctcttgaaagcagctttgagttagaagtatgtgtgttacaccctcacattagtgtgctgtgtggggcagttcaacacaaatgtaacaatgtatttttgtgaatgagagttggcatgtcaaatgcatcctctagaaaaataattagtgttatagtcttaagatttgttttctaaagttgatactgtgggttatttttgtgaacagcctgat

SEQ ID NO: 140460 - DNA, 580 bp, Homo sapiens
  Payload ID: 7557
  Gene Symbol: HNRNPC
  Gene Name: heterogeneous nuclear ribonucleoprotein C (C1/C2)
  ENST ID: ENST00000557336
  CDS Start-End: 382-580
gactgagcggttgtggccgcgttgccgacctccagcagcagtcggcttctctacgcagaacccgggagtaggagactcagaatcgaatctcttctccctccccttcttgggcagcaaggcgaaccccatccctactcactggagctcagctttgatttttaacctcccttccccacccttccagaacacacacattccattccaaaactgattttataaagacattttaaacataatgatgcaacttggtgtgcactacagcaaatgtacagtgagatttttttgatcttcagctacagaatactagtcaagtgactgaagattgatgtggatttgggagaggagttttcggctttgtgagaaaccttaccatcaaacacgatggccagcaacgttaccaacaagacagatcctcgctccatgaactcccgtgtattcattgggaatctcaacactcttgtggtcaagaaatctgatgtggaggcaatcttttcgaagtatggcaaaattgtgggctgctctgttcataagggctttgccttcgttcagtatgttaatgagagaaatgcccgggctgctg

SEQ ID NO: 140461 - DNA, 1039 bp, Homo sapiens
  Payload ID: 7557
  Gene Symbol: HNRNPC
  Gene Name: heterogeneous nuclear ribonucleoprotein C (C1/C2)
  ENST ID: ENST00000554383
  CDS Start-End: 254-1039
agaggagactcgggggccattttgtgaagagacgaagactgagcggttgtggccgcgttgccgacctccagcagcagtcggcttctctacgcagaacccgggagtaggagactcagaatcgaatctcttctccctccccttcttggttacaaaacacttgaaatatataagttagtggaactttgcttgagtgagatttttttgatcttcagctacattttcggctttgtgagaaaccttaccatcaaacacgatggccagcaacgttaccaacaagacagatcctcgctccatgaactcccgtgtattcattgggaatctcaacactcttgtggtcaagaaatctgatgtggaggcaatcttttcgaagtatggcaaaattgtgggctgctctgttcataagggctttgccttcgttcagtatgttaatgagagaaatgcccgggctgctgtagcaggagaggatggcagaatgattgctggccaggttttagatattaacctggctgcagagccaaaagtgaaccgaggaaaagcaggtgtgaaacgatctgcagcggagatgtacggctcctcttttgacttggactatgactttcaacgggactattatgataggatgtacagttacccagcacgtgtacctcctcctcctcctattgctcgggctgtagtgccctcgaaacgtcagcgtgtatcaggaaacacttcacgaaggggcaaaagtggcttcaattctaagagtggacagcggggatcttccaagtctggaaagttgaaaggagatgaccttcaggccattaagaaggagctgacccagataaaacaaaaagtggattctctcctggaaaacctggaaaaaattgaaaaggaacagagcaaacaagcagtagagatgaagaatgataagtcagaagaggagcagagcagcagctccgtgaagaaagatgagactaatgtgaagatggagtctgaggggggtgcagatgactctgctgaggagggggacctactggatgatgatgataatgaagatcgg

SEQ ID NO: 140462 - DNA, 789 bp, Homo sapiens
  Payload ID: 7557
  Gene Symbol: HNRNPC
  Gene Name: heterogeneous nuclear ribonucleoprotein C (C1/C2)
  ENST ID: ENST00000555137
  CDS Start-End: 265-789
acgaagactgagcggttgtggccgcgttgccgacctccagcagcagtcggcttctctacgcagaacccgggagtaggagactcagaatcgaatctcttctccctccccttcttgtgagatttttttgatcttcagctacagaggacacgttactaagagtggaattaatccgtattgtgagtacgtctgtctttactgttgcctccatcttgaatttaagtcctcatattttcggctttgtgagaaaccttaccatcaaacacgatggccagcaacgttaccaacaagacagatcctcgctccatgaactcccgtgtattcattgggaatctcaacactcttgtggtcaagaaatctgatgtggaggcaatcttttcgaagtatggcaaaattgtgggctgctctgttcataagggctttgccttcgttcagtatgttaatgagagaaatgcccgggctgctgtagcaggagaggatggcagaatgattgctggccaggttttagatattaacctggctgcagagccaaaagtgaaccgaggaaaagcaggtgtgaaacgatctgcagcggagatgtacgggtcagtaacagaacacccttctccgtcccctctactcagctcctcttttgacttggactatgactttcaacgggactattatgataggatgtacagttacccagcacgtgtacctcctcctcctcctattgctcgggctgtagtgccctcgaaacgtcagcgtgtatcaggaaacacttcacgaaggggcaaaagtggcttcaattct

SEQ ID NO: 140463 - DNA, 781 bp, Homo sapiens
  Payload ID: 7557
  Gene Symbol: HNRNPC
  Gene Name: heterogeneous nuclear ribonucleoprotein C (C1/C2)
  ENST ID: ENST00000555215
  CDS Start-End: 221-781
gaagactgagcggttgtggccgcgttgccgacctccagcagcagtcggcttctctacgcagaacccgggagtaggagactcagaatcgaatctcttctccctccccttcttggttacaaaacacttgaaatatataagttagtggaactttgcttgagtgagatttttttgatcttcagctacattttcggctttgtgagaaaccttaccatcaaacacgatggccagcaacgttaccaacaagacagatcctcgctccatgaactcccgtgtattcattgggaatctcaacactcttgtggtcaagaaatctgatgtggaggcaatcttttcgaagtatggcaaaattgtgggctgctctgttcataagggctttgccttcgttcagtatgttaatgagagaaatgcccgggctgctgtagcaggagaggatggcagaatgattgctggccaggttttagatattaacctggctgcagagccaaaagtgaaccgaggaaaagcaggtgtgaaacgatctgcagcggagatgtacgggtcagtaacagaacacccttctccgtcccctctactcagctcctcttttgacttggactatgactttcaacgggactattatgataggatgtacagttacccagcacgtgtacctcctcctcctcctattgctcgggctgtagtgccctcgaaacgtcagcgtgtatcaggaaacacttcacgaaggggcaaaagtggcttcaattctaagagtggacagcggggatcttccaagtctggaaag

SEQ ID NO: 140464 - DNA, 1403 bp, Homo sapiens
  Payload ID: 7557
  Gene Symbol: HNRNPC
  Gene Name: heterogeneous nuclear ribonucleoprotein C (C1/C2)
  ENST ID: ENST00000556513
  CDS Start-End: 354-1049
cattttgtgaagagacgaagactgagcggttgtggccgcgttgccgacctccagcagcagtcggcttctctacgcagaacccgggagtaggagactcagaatcgaatctcttctccctccccttcttgggcagcaaggcgaaccccatccctactcactggagctcagctttgatttttaacctcccttccccacccttccagaacacacacattccattccaaaactgattttataaagacattttaaacataatgatgcaacttggtgtgcactacagcaaatgtacagtgagatttttttgatcttcagctacattttcggctttgtgagaaaccttaccatcaaacacgatggccagcaacgttaccaacaagacagatcctcgctccatgaactcccgtgtattcattgggaatctcaacactcttgtggtcaagaaatctgatgtggaggcaatcttttcgaagtatggcaaaattgtgggctgctctgttcataagggctttgccttcgttcagtatgttaatgagagaaatgcccgggctgctgtagcaggagaggatggcagaatgattgctggccaggttttagatattaacctggctgcagagccaaaagtgaaccgaggaaaagcaggtgtgaaacgatctgcagcggagatgtacgggtcagtaacagaacacccttctccgtcccctctactcagctcctcttttgacttggactatgactttcaacgggactattatgataggatgtacagttacccagcacgtgtacctcctcctcctcctattgctcgggctgtagtgccctcgaaacgtcagcgtgtatcaggaaacacttcacgaaggggcaaaagtggcttcaattctaagagtggacagcggggatcttccaagtctggaaagttgaaaggagatgaccttcaggccattaagaaggagctgacccagataaaacaaaaagtggattctctcctggaaaacctggaaaaaattgaaaaggaacagagcaaacaagcagctggagttgatcaaggatgatgaaaaagaggctgaggaaggagaggatgacagagacagcgccaatggcgaggatgactcttaagcacatagtggggtttagaaatcttatcccattatttctttacctaggcgcttgtctaagatcaaatttttcaccagatcctctcccctagtatcttcagcacatgctcactgttctccccatccttgtccttcccatgttcattaattcatattgccccgcgcctagtcccattttcacttcctttgacgctcctagtagttttgttaagtcttaccctgtaatttttgcttttaattttgatacctctttatgacttaacaataaaaaggatgtatggtttttatcaa

SEQ ID NO: 140465 - DNA, 1371 bp, Homo sapiens
  Payload ID: 7557
  Gene Symbol: HNRNPC
  Gene Name: heterogeneous nuclear ribonucleoprotein C (C1/C2)
  Uniprot ID: P07910
  ENST ID: ENST00000557201
  CDS Start-End: 165-1085
cattttgtgaagagacgaagactgagcggttgtggccgcgttgccgacctccagcagcagtcggcttctctacgcagaacccgggagtaggagactcagaatcgaatctcttctccctccccttcttgttttcggctttgtgagaaaccttaccatcaaacacgatggccagcaacgttaccaacaagacagatcctcgctccatgaactcccgtgtattcattgggaatctcaacactcttgtggtcaagaaatctgatgtggaggcaatcttttcgaagtatggcaaaattgtgggctgctctgttcataagggctttgccttcgttcagtatgttaatgagagaaatgcccgggctgctgtagcaggagaggatggcagaatgattgctggccaggttttagatattaacctggctgcagagccaaaagtgaaccgaggaaaagcaggtgtgaaacgatctgcagcggagatgtacgggtcagtaacagaacacccttctccgtcccctctactcagctcctcttttgacttggactatgactttcaacgggactattatgataggatgtacagttacccagcacgtgtacctcctcctcctcctattgctcgggctgtagtgccctcgaaacgtcagcgtgtatcaggaaacacttcacgaaggggcaaaagtggcttcaattctaagagtggacagcggggatcttccaagtctggaaagttgaaaggagatgaccttcaggccattaagaaggagctgacccagataaaacaaaaagtggattctctcctggaaaacctggaaaaaattgaaaaggaacagagcaaacaagcagtagagatgaagaatgataagtcagaagaggagcagagcagcagctccgtgaagaaagatgagactaatgtgaagatggagtctgaggggggtgcagatgactctgctgaggagggggacctactggatgatgatgataatgaagatcggggggatgaccagctggagttgatcaaggatgatgaaaaagaggctgaggaaggagaggatgacagagacagcgccaatggcgaggatgactcttaagcacatagtggggtttagaaatcttatcccattatttctttacctaggcgcttgtctaagatcaaatttttcaccagatcctctcccctagtatcttcagcacatgctcactgttctccccatccttgtccttcccatgttcattaattcatattgccccgcgcctagtcccattttcacttcctttgacgctcctagtagttttgttaagtcttaccctgtaatttttgcttttaattttgatacctctttatgacttaacaataaaaaggatgtatggttttta

SEQ ID NO: 140466 - DNA, 748 bp, Homo sapiens
  Payload ID: 7557
  Gene Symbol: HNRNPC
  Gene Name: heterogeneous nuclear ribonucleoprotein C (C1/C2)
  ENST ID: ENST00000554539
  CDS Start-End: 209-748
ggcagaggagactcgggggccattttgtgaagagacgaagactgagcggttgtggccgcgttgccgacctccagcagcagtcggcttctctacgcagaacccgggagtaggagactcagaatcgaatctcttctccctccccttcttgtgagatttttttgatcttcagctacattttcggctttgtgtgaaacgatctgcagcggagatgtacggctcctcttttgacttggactatgactttcaacgggactattatgataggatgtacagttacccagcacgtgtacctcctcctcctcctattgctcgggctgtagtgccctcgaaacgtcagcgtgtatcaggaaacacttcacgaaggggcaaaagtggcttcaattctaagagtggacagcggggatcttccaagtctggaaagttgaaaggagatgaccttcaggccattaagaaggagctgacccagataaaacaaaaagtggattctctcctggaaaacctggaaaaaattgaaaaggaacagagcaaacaagcagtagagatgaagaatgataagtcagaagaggagcagagcagcagctccgtgaagaaagatgagactaatgtgaagatggagtctgaggggggtgcagatgactctgctgaggagggggacctactggatgatgatgataatgaagatcggggggatgaccagctggagttgatcaaggatgatgaaaaagaggctgaggaaggagaggatgac

SEQ ID NO: 140467 - DNA, 531 bp, Homo sapiens
  Payload ID: 7557
  Gene Symbol: HNRNPC
  Gene Name: heterogeneous nuclear ribonucleoprotein C (C1/C2)
  ENST ID: ENST00000555176
  CDS Start-End: 180-531
atatataagttagtggaactttgcttgagtgagatttttttgatcttcagctacagaggacacgttactaagagtggaattaatccgtattgtgagtacgtctgtctttactgttgcctccatcttgaatttaagtcctcatattttcggctttgtgagaaaccttaccatcaaacacgatggccagcaacgttaccaacaagacagatcctcgctccatgaactcccgtgtattcattgggaatctcaacactcttgtggtcaagaaatctgatgtggaggcaatcttttcgaagtatggcaaaattgtgggctgctctgttcataagggctttgccttcgttcagtatgttaatgagagaaatgcccgggctgctgtagcaggagaggatggcagaatgattgctggccaggttttagatattaacctggctgcagagccaaaagtgaaccgaggaaaagcaggtgtgaaacgatctgcagcggagatgtacggctcctcttttgacttggactatgactttcaacggg

SEQ ID NO: 140468 - DNA, 1308 bp, Homo sapiens
  Payload ID: 7557
  Gene Symbol: HNRNPC
  Gene Name: heterogeneous nuclear ribonucleoprotein C (C1/C2)
  ENST ID: ENST00000557442
  CDS Start-End: 190-633
attttgtgaagagacgaagactgagcggttgtggccgcgttgccgacctccagcagcagtcggcttctctacgcagaacccgggagtaggagactcagaatcgaatctcttctccctccccttcttgtgagatttttttgatcttcagctacattttcggctttgtgagaaaccttaccatcaaacacgatggccagcaacgttaccaacaagacagatcctcgctccatgaactcccgtgtattcattgggaatctcaacactcttgtggtcaagaaatctgatgtggaggcaatcttttcgaagtatggcaaaattgtgggctgctctgttcataagggctttgccttcgttcagtatgttaatgagagaaatgcccgggctgctgtagcaggagaggatggcagaatgattgctggccaggttttagatattaacctggctgcagagccaaaagtgaaccgaggaaaagcaggtgtgaaacgatctgcagcggagatgtacgggtcagtaacagaacacccttctccgtcccctctactcagcgtgtatcaggaaacacttcacgaaggggcaaaagtggcttcaattctaagagtggacagcggggatcttccaagtctggaaagttgaaaggagatgaccttcaggccattaagaaggagctgacccagataaaacaaaaagtggattctctcctggaaaacctggaaaaaattgaaaaggaacagagcaaacaagcagtagagatgaagaatgataagtcagaagaggagcagagcagcagctccgtgaagaaagatgagactaatgtgaagatggagtctgaggggggtgcagatgactctgctgaggagggggacctactggatgatgatgataatgaagatcggggggatgaccagctggagttgatcaaggatgatgaaaaagaggctgaggaaggagaggatgacagagacagcgccaatggcgaggatgactcttaagcacatagtggggtttagaaatcttatcccattatttctttacctaggcgcttgtctaagatcaaatttttcaccagatcctctcccctagtatcttcagcacatgctcactgttctccccatccttgtccttcccatgttcattaattcatattgccccgcgcctagtcccattttcacttcctttgacgctcctagtagttttgttaagtcttaccctgtaatttttgcttttaattttgatacctctttatgacttaacaataaaaaggatgtatggtttttatcaactgtctccaaaataatctcttgttatgca

SEQ ID NO: 140469 - DNA, 1108 bp, Homo sapiens
  Payload ID: 7558
  Gene Symbol: HNRNPCL1
  Gene Name: heterogeneous nuclear ribonucleoprotein C-like 1
  Uniprot ID: O60812
  ENST ID: ENST00000317869
  CDS Start-End: 227-1108
ctgagctacaactacaaccagaggtctaaactacaaccagatctgaattcttgttgggagccattttgtgaagagacgaagactgagctgttttggctgcatttctggcctcgagccgcagtcagtttctccccgtagaacccggcagtaggagacttagaatcgaatctcttctccctcccgcctcctgtttttggctttttgagaaaccttatcatccaacacaatggccagcaacgttaccaacaagatggatcctcactccatgaactcccgtgtgttcattgggaatctcaacactcttgttgtcaagaaatcggatgtggaggcgatcttttccaagtatggcaaaattgcgggctgctctgttcataagggctttgccttcgttcaatatgataaggagaaaaatgcccgggctgctgtagcaggagaggatggcagaatgattgctagccaggttgtagatattaacctggctgcggagccaaaagtgaaccgaggaaacgcaggtgtgaaacgatcagcagcggagatgtacggctcctcttttgacttggactatggctttcaacgggattattatgatggaatgtacagtttcccagcacgtgtacctcctcctcctcccattgctctggctgtagtgccctcgaaacgtcaacgtctatcaggaaacacctcacgaaggggcaaaagtggcttcaattctaagagtggaaagcggggatcttccaagtctggaaagttgaaaggtgatgaccttcaggccattaagcaggagttgacccagataaaacagaaagtggattctctcctggaaaacctggaaaaaattgaaaaggaacagagcaaacaagaggtagaggtgaaaaatgctaagtcagaagaggagcagagcagtagctccatgaagaaagatgagactcatgtgaagatggagtctgaggggggtgcagaagactctgctgaggagggggacccactggatgatgatgttaatgaagatcagggggatgaccagctggagttgatcaaggatgatgaaaaagaggctgaggaaggagaggatgacagagacagcaccaatggccaggatgactcttaa

SEQ ID NO: 140470 - DNA, 1156 bp, Homo sapiens
  Payload ID: 7558
  Gene Symbol: HNRNPCL1
  Gene Name: heterogeneous nuclear ribonucleoprotein C-like 1
  Uniprot ID: O60812
  ENST ID: ENST00000617044
  CDS Start-End: 244-1125
cctggagttcctgcttggttcttcctgaggactgagcaccttctagactacatccagatctgaattcttgttgggagccattttgtgaagagacgaagactgagctgttttggctgcatttctggcctcgagccgcagtcagtttctccccgtagaacccggcagtaggagacttagaatcgaatctcttctccctcccgcctcctgtttttggctttttgagaaaccttatcatccaacacaatggccagcaacgttaccaacaagatggatcctcactccatgaactcccgtgtgttcattgggaatctcaacactcttgttgtcaagaaatcggatgtggaggcgatcttttccaagtatggcaaaattgcgggctgctctgttcataagggctttgccttcgttcaatatgataaggagaaaaatgcccgggctgctgtagcaggagaggatggcagaatgattgctagccaggttgtagatattaacctggctgcggagccaaaagtgaaccgaggaaacgcaggtgtgaaacgatcagcagcggagatgtacggctcctcttttgacttggactatggctttcaacgggattattatgatggaatgtacagtttcccagcacgtgtacctcctcctcctcccattgctctggctgtagtgccctcgaaacgtcaacgtctatcaggaaacacctcacgaaggggcaaaagtggcttcaattctaagagtggaaagcggggatcttccaagtctggaaagttgaaaggtgatgaccttcaggccattaagcaggagttgacccagataaaacagaaagtggattctctcctggaaaacctggaaaaaattgaaaaggaacagagcaaacaagaggtagaggtgaaaaatgctaagtcagaagaggagcagagcagtagctccatgaagaaagatgagactcatgtgaagatggagtctgaggggggtgcagaagactctgctgaggagggggacccactggatgatgatgttaatgaagatcagggggatgaccagctggagttgatcaaggatgatgaaaaagaggctgaggaaggagaggatgacagagacagcaccaatggccaggatgactcttaagcacatagtggggttgagaaatcttatccca

SEQ ID NO: 140471 - DNA, 1108 bp, Homo sapiens; identical to SEQ ID NO: 140469
  Payload ID: 7558
  Gene Symbol: HNRNPCL1
  Gene Name: heterogeneous nuclear ribonucleoprotein C-like 1
  Uniprot ID: O60812
  ENST ID: ENST00000634171
  CDS Start-End: 227-1108

SEQ ID NO: 140472 - DNA, 1156 bp, Homo sapiens; identical to SEQ ID NO: 140470
  Payload ID: 7558
  Gene Symbol: HNRNPCL1
  Gene Name: heterogeneous nuclear ribonucleoprotein C-like 1
  Uniprot ID: O60812
  ENST ID: ENST00000633387
  CDS Start-End: 244-1125

SEQ ID NO: 140473 - DNA, 1148 bp, Homo sapiens
  Payload ID: 7559
  Gene Symbol: HNRNPCL2
  Gene Name: heterogeneous nuclear ribonucleoprotein C-like 2
  Uniprot ID: B2RXH8
  ENST ID: ENST00000621994
  CDS Start-End: 244-1125
cctggagttcctgcttggctcttcctgaggtctgagcaccttctaaactacaaccagatctgaattcttgttggcagccattttgtgaagagacgaagactgagctgttttggctgcatttctggcctcgagccgcagtcagtttctccccgtagaacccggcagtaggagacttagaatcgaatctcttctccctcccgcctcctgtttttggctttttgagaaaccttatcatccaacacaatggccagcaacgttaccaacaagatggatcctcactccgtgaactcccgtgtgttcattgggaatctcaacactcttgttgtcaagaaatctgatgtggaggcgatcttttccaagtatggcaaaattgcgggctgctctgttcataagggctttgccttcgttcaatatgataaggagaaaaatgcccgggctgctgtagcaggagaggatggcagaatgattgctagccaggttgcagttattaacctggctgcagagccaaaagtgaaccgaggaaacgcaggtgtgaaacgatccgcagcggagatgtacggctcctcttttgacttggactatggctttcaacgggattattatgatgggatgtacagtttcccagcacgtgtacctcctcctcctcccattgctctggctgtagtgccctcgaaacgccagcgcatatcaggaaacacctcacgaaggggcaaaagtggcttcaattctaagagtggaaagcggggatcttccaagtctggaaagctgaaaggagatgaccttcaggccattaagcaggagttgacccagataaaacagaaagtggattctctcctggaaaacctggaaaaaattgaaaaggaacagagcaaacaagaggtagaggtgaaaaatgctaagtcagaagaggagcagagcagtagctccatgaagaaagatgagactcatgtaaagatggagtctgaggggggtgcagaagactctgctgaggagggggacccactggatgatgatgataatgaagatcagggggacaaccagcttcatttgatcaagaataatgaaaaagatgctgaggaaggagaggataacagagacagcaccaatggccaggatgactcttaagcacatagtggggttgagaaatc

SEQ ID NO: 140474 - DNA, 1148 bp, Homo sapiens
  Payload ID: 7559
  Gene Symbol: HNRNPCL2
  Gene Name: heterogeneous nuclear ribonucleoprotein C-like 2
  ENST ID: ENST00000619361
  CDS Start-End: 244-1125
cctggagttcctgcttggctcttcctgaggtctgagcaccttctaaactacaaccagatctgaattcttgttggcagccattttgtgaagagacgaagactgagctgttttggctgcatttctggcctcgagccgcagtcagcttctccccgtagaacccggcagtaggagacttagaatcgaatctcttctccctcccgcctcctgtttttggctttttgagaaaccttatcatccaacacaatggccagcaacgttaccaacaagatggatcctcactccgtgaactcccgtgtgttcattgggaatctcaacactcttgttgtcaagaaatctgatgtggaggcgatcttttccaagtatggcaaaattgcgggctgctctgttcataagggctttgccttcgttcaatatgataaggagaaaaatgcccgggctgctgtagcaggagaggatggcagaatgattgctagccaggttgcagttattaacctggctgcagagccaaaagtgaaccgaggaaacgcaggtgtgaaacgatccgcagcggagatgtacggctcctcttttgacttggactatggctttcaacgggattattatgatgggatgtacagtttcccagcacgtgtacctcctcctcctcccattgctctggctgtagtgccctcgaaacaccagcgcatatcaggaaacacctcacgaaggggcaaaagtggcttcaattctaagagtggaaagcggggatcttccaagtctggaaagctgaaaggagatgaccttcaggccattaagcaggagttgacccagataaaacagaaagtggattctctcctggaaaacctggaaaaaattgaaaaggaacagagcaaacaagaggtagaggtgaaaaatgctaagtcagaagaggagcagagcagtagctccatgaagaaagatgagactcatgtaaagatggagtctgaggggggtgcagaagactctgctgaggagggggacccactggatgatgatgataatgaagatcagggggacaaccagcttcatttgatcaagaataatgaaaaagatgctgaggaaggagaggataacagagacagcaccaatggccaggatgactcttaagcacatagtggggttgagaaatc

SEQ ID NO: 140475 - DNA, 1148 bp, Homo sapiens; identical to SEQ ID NO: 140473
  Payload ID: 7559
  Gene Symbol: HNRNPCL2
  Gene Name: Heterogeneous nuclear ribonucleoprotein C-like 2
  ENST ID: ENST00000633810
  CDS Start-End: 244-1125

SEQ ID NO: 140476 - DNA, 1148 bp, Homo sapiens
  Payload ID: 7560
  Gene Symbol: HNRNPCL3
  Gene Name: heterogeneous nuclear ribonucleoprotein C-like 3
  Uniprot ID: B7ZW38
  ENST ID: ENST00000617807
  CDS Start-End: 244-1125
cctggagttcctgcttggttcttcctgaggtctgaacaccctgcaaactgagcccagatctgaattcttgttgggagccattttgtgaagagacgaagactgagctggtttggctgcatttctggcctcgagccgcagtcagcttctccacgtagaacccggcagtaggagacttagaatcgaatctcttctccctcccgcctcctgtttttggctttttgagaaaccttatcatccaacacaatggccagcaacgttaccaacaagatggatcctcactccatgaactcccgtgtgttcattgggaatctcaacactcttgttgtcaagaaatcggatgtggaggcgatcttttccaagtatggcaaaattgcgggctgctctgttcataagggctttgccttcgttcaatatgataaggagaaaaatgcccgggctgctgtagcaggagaggatggcagaatgattgctagccaggttgtagatattaacctggctgcagagccaaaagtgaaccgaggaaacgcaggtgtgaaacgatcagcagcagagatgtacggctcctcttttgacttggactataacttgcaacgggattattatggtgggatgtacagtttcccagcacgtgtacctcctcctcctcccattgctctggctgtagtgccctcgaaacgccagcgcatatcaggaaacacctcacgaaggggcaaaagtggcttcaattctaagagtggaaagcggggatcttccaagtctggaaagctgaaaggagatgaccttcaggccattaagcaggagttgacccagataaaacagaaagtggattctctcctggaaaacctggaaaaaattgaaaaggaacattgcaagcaaggagtagaggtaaagaatgctaagtctgaagaggagcagaccagcagctcctcgaagaaggataagactcacgtgaagatggagtctgaggggggtgcagatgactctgttgaggagggggacctactgtgtgatgatgataatgaagatcagggggacaaccagctggagttgatcaaggatgatgaaaaaggggctgaggaaggagaggatgacagagacagggcgaatggccaggatgactcttaagcacatagtggggttgagaaatc

SEQ ID NO: 140477 - DNA, 1148 bp, Homo sapiens; identical to SEQ ID NO: 140476
  Payload ID: 7560
  Gene Symbol: HNRNPCL3
  Gene Name: Heterogeneous nuclear ribonucleoprotein C-like 3
  ENST ID: ENST00000633863
  CDS Start-End: 244-1125

SEQ ID NO: 140478 - DNA, 1148 bp, Homo sapiens
  Payload ID: 7561
  Gene Symbol: HNRNPCL4
  Gene Name: heterogeneous nuclear ribonucleoprotein C-like 4
  ENST ID: ENST00000613240
  CDS Start-End: 244-1125
cctggagttcctgcttggttcttcctgaggtctgaacaccctgcaaactgagcccagatctgaattcttgttgggagccattttgtgaagagacgaagactgagctggtttggctgcatttctggcctcgagccgcagtcagcttctccacgtagaacccggcagtaggagacttagaatcgaatctcttctccctcccgcctcctgtttttggctttttgagaaaccttatcatccaacacaatggccagcaacgttaccaacaagatggatcctcactccatgaactcccgtgtgttcattgggaatctcaacactcttgttgtcaagaaatcggatgtggaggcgatcttttccaagtatggcaaaattgcgggctgctctgttcataagggctttgccttcgttcaatatgataaggagaaaaatgcccgggctgctgtagcaggagaggatggcagaatgattgctagccaggttgtagatattaacctggctgcagagccaaaagtgaaccgaggaaacgcaggtgtgaaacgatcagcagcagagatgtacggctcctcttttgacttggactataacttgcaacgggattattatggtgggatgtacagtttcccagcacgtgtacctcctcctcctcccattgctctggctgtagtgccctcgaaacgccagcgcatatcaggaaacacctcacgaaggggcaaaagtggcttcaattctaagagtggaaagcggggatcttccaagtctggaaagctgaaaggagatgaccttcaggccattaagcaggagttgacccagataaaacagaaagtggattctctcctggaaaacctggaaaaaattgaaaaggaacattgcaagcaaggagtagaggtaaagaatgctaagtctgaagaggagcagaccagcagctcctcgaagaaggataagactcacgtgaagatggagtctgaggggggtgcagatgactctgttgaggagggggacctactgtgtgatgatgataatgaagatcagggggacaaccagctggagttgatcaaggatgatgaaaaaggggttgaggaaggagaggatgacagagacagggcgaatggccaggatgactcttaagcacatagtggggttgagaaatc

SEQ ID NO: 140479 - DNA, 882 bp, Homo sapiens
  Payload ID: 7561
  Gene Symbol: HNRNPCL4
  Gene Name: heterogeneous nuclear ribonucleoprotein C-like 4
  Uniprot ID: P0DMR1
  ENST ID: ENST00000323770
  CDS Start-End: 1-882
atggccagcaacgttaccaacaagatggatcctcactccatgaactcccgtgtgttcattgggaatctcaacactcttgttgtcaagaaatcggatgtggaggcgatcttttccaagtatggcaaaattgcgggctgctctgttcataagggctttgccttcgttcaatatgataaggagaaaaatgcccgggctgctgtagcaggagaggatggcagaatgattgctagccaggttgtagatattaacctggctgcagagccaaaagtgaaccgaggaaacgcaggtgtgaaacgatcagcagcagagatgtacggctcctcttttgacttggactataacctgcaacgggattattatggtgggatgtacagtttcccagcacgtgtacctcctcctcctcccattgctctggctgtagtgccctcgaaacgccagcgcatatcaggaaacacctcacgaaggggcaaaagtggcttcaattctaagagtggaaagcggggatcttccaagtctggaaagctgaaaggagatgaccttcaggccattaagcaggagttgacccagataaaacagaaagtggattctctcctggaaaacctggaaaaaattgaaaaggaacattgcaagcaaggagtagaggtaaagaatgctaagtctgaagaggagcagaccagcagctcctcgaagaaggataagactcacgtgaagatggagtctgaggggggtgcagatgactctgttgaggagggggacctactgtgtgatgatgataatgaagatcagggggacaaccagctggagttgatcaaggatgatgaaaaaggggctgaggaaggagaggatgacagagacagggcgaatggccaggatgactcttaa

SEQ ID NO: 140480 - DNA, 882 bp, Homo sapiens; identical to SEQ ID NO: 140479
  Payload ID: 7561
  Gene Symbol: HNRNPCL4
  Gene Name: Heterogeneous nuclear ribonucleoprotein C-like 4
  ENST ID: ENST00000633805
  CDS Start-End: 1-882

SEQ ID NO: 140481 - DNA, 1667 bp, Homo sapiens
  Payload ID: 7562
  Gene Symbol: HNRNPD
  Gene Name: heterogeneous nuclear ribonucleoprotein D (AU-rich element RNA binding protein 1, 37kDa)
  Uniprot ID: Q14103
  ENST ID: ENST00000352301
  CDS Start-End: 306-1316
ttttaggtggtccgcggcggcgccattaaagcgaggaggaggcgagagcggccgccgctggtgcttattcttttttagtgcagcgggagagagcgggagtgtgcgccgcgcgagagtgggaggcgaagggggcaggccagggagaggcgcaggagcctttgcagccacgcgcgcgccttccctgtcttgtgtgcttcgcgaggtagagcgggcgcgcggcagcggcggggattactttgctgctagtttcggttcgcggcagcggcgggtgtagtctcggcggcagcggcggagacactagcactatgtcggaggagcagttcggcggggacggggcggcggcagcggcaacggcggcggtaggcggctcggcgggcgagcaggagggagccatggtggcggcgacacagggggcagcggcggcggcgggaagcggagccgggaccgggggcggaaccgcgtctggaggcaccgaagggggcagcgccgagtcggagggggcgaagattgacgccagtaagaacgaggaggatgaagggaaaatgtttataggaggccttagctgggacactacaaagaaagatctgaaggactacttttccaaatttggtgaagttgtagactgcactctgaagttagatcctatcacagggcgatcaaggggttttggctttgtgctatttaaagaatcggagagtgtagataaggtcatggatcaaaaagaacataaattgaatgggaaggtgattgatcctaaaagggccaaagccatgaaaacaaaagagccggttaaaaaaatttttgttggtggcctttctccagatacacctgaagagaaaataagggagtactttggtggttttggtgaggtggaatccatagagctccccatggacaacaagaccaataagaggcgtgggttctgctttattacctttaaggaagaagaaccagtgaagaagataatggaaaagaaataccacaatgttggtcttagtaaatgtgaaataaaagtagccatgtcgaaggaacaatatcagcaacagcaacagtggggatctagaggaggatttgcaggaagagctcgtggaagaggtggtggccccagtcaaaactggaaccagggatatagtaactattggaatcaaggctatggcaactatggatataacagccaaggttacggtggttatggaggatatgactacactggttacaacaactactatggatatggtgattatagcaaccagcagagtggttatgggaaggtatccaggcgaggtggtcatcaaaatagctacaaaccatactaaattattccatttgcaacttatccccaacaggtggtgaagcagtattttccaatttgaagattcatttgaaggtggctcctgccacctgctaatagcagttcaaactaaattttttgtatcaagtccctgaatggaagtatgacgttgggtccctctgaagtttaattctgagttctcattaaaagaaatttgctttcattgttttatttcttaattgctatgcttcagaatcaatttgtgttttatgccctttcccccagtattgtagagcaagtcttgtgttaaaagcccagtgtgacagtgtcatgatgtagtagtgtcttactggttttttaataaatccttttgtat

SEQ ID NO: 140482 - DNA, 3033 bp, Homo sapiens
  Payload ID: 7562
  Gene Symbol: HNRNPD
  Gene Name: heterogeneous nuclear ribonucleoprotein D (AU-rich element RNA binding protein 1, 37kDa)
  Uniprot ID: Q14103
  ENST ID: ENST00000313899
  CDS Start-End: 279-1346
aaagcgaggaggaggcgagagcggccgccgctggtgcttattcttttttagtgcagcgggagagagcgggagtgtgcgccgcgcgagagtgggaggcgaagggggcaggccagggagaggcgcaggagcctttgcagccacgcgcgcgccttccctgtcttgtgtgcttcgcgaggtagagcgggcgcgcggcagcggcggggattactttgctgctagtttcggttcgcggcagcggcgggtgtagtctcggcggcagcggcggagacactagcactatgtcggaggagcagttcggcggggacggggcggcggcagcggcaacggcggcggtaggcggctcggcgggcgagcaggagggagccatggtggcggcgacacagggggcagcggcggcggcgggaagcggagccgggaccgggggcggaaccgcgtctggaggcaccgaagggggcagcgccgagtcggagggggcgaagattgacgccagtaagaacgaggaggatgaaggccattcaaactcctccccacgacactctgaagcagcgacggcacagcgggaagaatggaaaatgtttataggaggccttagctgggacactacaaagaaagatctgaaggactacttttccaaatttggtgaagttgtagactgcactctgaagttagatcctatcacagggcgatcaaggggttttggctttgtgctatttaaagaatcggagagtgtagataaggtcatggatcaaaaagaacataaattgaatgggaaggtgattgatcctaaaagggccaaagccatgaaaacaaaagagccggttaaaaaaatttttgttggtggcctttctccagatacacctgaagagaaaataagggagtactttggtggttttggtgaggtggaatccatagagctccccatggacaacaagaccaataagaggcgtgggttctgctttattacctttaaggaagaagaaccagtgaagaagataatggaaaagaaataccacaatgttggtcttagtaaatgtgaaataaaagtagccatgtcgaaggaacaatatcagcaacagcaacagtggggatctagaggaggatttgcaggaagagctcgtggaagaggtggtggccccagtcaaaactggaaccagggatatagtaactattggaatcaaggctatggcaactatggatataacagccaaggttacggtggttatggaggatatgactacactggttacaacaactactatggatatggtgattatagcaaccagcagagtggttatgggaaggtatccaggcgaggtggtcatcaaaatagctacaaaccatactaaattattccatttgcaacttatccccaacaggtggtgaagcagtattttccaatttgaagattcatttgaaggtggctcctgccacctgctaatagcagttcaaactaaattttttgtatcaagtccctgaatggaagtatgacgttgggtccctctgaagtttaattctgagttctcattaaaagaaatttgctttcattgttttatttcttaattgctatgcttcagaatcaatttgtgttttatgccctttcccccagtattgtagagcaagtcttgtgttaaaagcccagtgtgacagtgtcatgatgtagtagtgtcttactggttttttaataaatccttttgtataaaaatgtattggctcttttatcatcagaataggaaaaattgtcatggattcaagttattaaaagcataagtttggaagacaggcttgccgaaattgaggacatgattaaaattgcagtgaagtttgaaatgtttttagcaaaatctaatttttgccataatgtgtcctccctgtccaaattgggaatgacttaatgtcaatttgtttgttggttgttttaataatacttccttatgtagccattaagatttatatgaatattttcccaaatgcccagtttttgcttaatatgtattgtgctttttagaacaaatctggataaatgtgcaaaagtacccctttgcacagatagttaatgttttatgcttccattaaataaaaaggacttaaaatctgttaattataatagaaatgcggctagttcagagagatttttagagctgtggtggacttcatagatgaattcaagtgttgagggaggattaaagaaatatataccgtgtttatgtgtgtgtgcttatttgtttgaatgattttattttccatttctcaaaggttttatttttttggttagggccttaaaatttcaggactgtgattattagtatgtgtgcctaaggaactttttgagtcactcttaagaaagtgaaactgaagagtctaagtgataactataggattaagtcagaattgtttttcctgtcatttgttggaagcttcttgagttctgttattagcattcagggaattgatacccatcaacttgaatggaaaatcgtttgtaggtattacttaagtgaatgttaagagttccaccctgagtggtaatctaaggctgtgcagtcagttacttcagactgctcagaatagttcattagaaaggtaacaaatgagaaatgtattattatacagttctatagtagtgaagtgatggaatacctttcttacttttgtggagttacatctgatgctaagaatttgacctccaactaagcaaacattttaatgagcaaaagttagtgttattaaagtttttttatgatagatccaaattgaggacctgtgtcctgtttttataagattgcaacccagctatgctcatttgtttatgttttgtatatggctgcttttgtgttacagtggtagagtttagtagttaggacagagacctgcaaagcaaaataatttacagtctggccctttacagaaaagtttgctgactcatggtcaaaataaatgaaaattttttgtgttagggttgttaagctagggttctttttggtatcatatgcttattttatgtaaatctctcaataaaaaattatttttaagaga

SEQ ID NO: 140483 - DNA, 1585 bp, Homo sapiens
  Payload ID: 7562
  Gene Symbol: HNRNPD
  Gene Name: heterogeneous nuclear ribonucleoprotein D (AU-rich element RNA binding protein 1, 37kDa)
  Uniprot ID: Q14103
  ENST ID: ENST00000353341
  CDS Start-End: 309-1229
ccattttaggtggtccgcggcggcgccattaaagcgaggaggaggcgagagcggccgccgctggtgcttattcttttttagtgcagcgggagagagcgggagtgtgcgccgcgcgagagtgggaggcgaagggggcaggccagggagaggcgcaggagcctttgcagccacgcgcgcgccttccctgtcttgtgtgcttcgcgaggtagagcgggcgcgcggcagcggcggggattactttgctgctagtttcggttcgcggcagcggcgggtgtagtctcggcggcagcggcggagacactagcactatgtcggaggagcagttcggcggggacggggcggcggcagcggcaacggcggcggtaggcggctcggcgggcgagcaggagggagccatggtggcggcgacacagggggcagcggcggcggcgggaagcggagccgggaccgggggcggaaccgcgtctggaggcaccgaagggggcagcgccgagtcggagggggcgaagattgacgccagtaagaacgaggaggatgaaggccattcaaactcctccccacgacactctgaagcagcgacggcacagcgggaagaatggaaaatgtttataggaggccttagctgggacactacaaagaaagatctgaaggactacttttccaaatttggtgaagttgtagactgcactctgaagttagatcctatcacagggcgatcaaggggttttggctttgtgctatttaaagaatcggagagtgtagataaggtcatggatcaaaaagaacataaattgaatgggaaggtgattgatcctaaaagggccaaagccatgaaaacaaaagagccggttaaaaaaatttttgttggtggcctttctccagatacacctgaagagaaaataagggagtactttggtggttttggtgaggtggaatccatagagctccccatggacaacaagaccaataagaggcgtgggttctgctttattacctttaaggaagaagaaccagtgaagaagataatggaaaagaaataccacaatgttggtcttagtaaatgtgaaataaaagtagccatgtcgaaggaacaatatcagcaacagcaacagtggggatctagaggaggatttgcaggaagagctcgtggaagaggtggtgaccagcagagtggttatgggaaggtatccaggcgaggtggtcatcaaaatagctacaaaccatactaaattattccatttgcaacttatccccaacaggtggtgaagcagtattttccaatttgaagattcatttgaaggtggctcctgccacctgctaatagcagttcaaactaaattttttgtatcaagtccctgaatggaagtatgacgttgggtccctctgaagtttaattctgagttctcattaaaagaaatttgctttcattgttttatttcttaattgctatgcttcagaatcaatttgtgttttatgccctttcccccagtattgtagagcaagtcttgtgttaaaagcccagtgtgacagtgtcatgatgtagtagtgtcttactggttttttaataaatccttttgtataaaaa

SEQ ID NO: 140484 - DNA, 782 bp, Homo sapiens
  Payload ID: 7562
  Gene Symbol: HNRNPD
  Gene Name: heterogeneous nuclear ribonucleoprotein D (AU-rich element RNA binding protein 1, 37kDa)
  ENST ID: ENST00000509263
  CDS Start-End: 1-782
agccgccaggattttttcccgcctgtcgtgggccattcaaactcctccccacgacactctgaagcagcgacggcacagcgggaagaatggaaaatgtttataggaggccttagctgggacactacaaagaaagatctgaaggactacttttccaaatttggtgaagttgtagactgcactctgaagttagatcctatcacagggcgatcaaggggttttggctttgtgctatttaaagaatcggagagtgtagataaggtcatggatcaaaaagaacataaattgaatgggaaggtgattgatcctaaaagggccaaagccatgaaaacaaaagagccggttaaaaaaatttttgttggtggcctttctccagatacacctgaagagaaaataagggagtactttggtggttttggtgaggtggaatccatagagctccccatggacaacaagaccaataagaggcgtgggttctgctttattacctttaaggaagaagaaccagtgaagaagataatggaaaagaaataccacaatgttggtcttagtaaatgtgaaataaaagtagccatgtcgaaggaacaatatcagcaacagcaacagtggggatctagaggaggatttgcaggaagagctcgtggaagaggtggtggccccagtcaaaactggaaccagggatatagtaactattggaatcaaggctatggcaactatggatataacagccaaggttacggtggttatggaggatatgactacactggttacaacaactactatgg

SEQ ID NO: 140485 - DNA, 748 bp, Homo sapiens
  Payload ID: 7562
  Gene Symbol: HNRNPD
  Gene Name: heterogeneous nuclear ribonucleoprotein D (AU-rich element RNA binding protein 1, 37kDa)
  ENST ID: ENST00000507010
  CDS Start-End: 86-748
tgtgcaacgcggagcgtgagaggaagtttcggttcgcggcagcggcgggtgtagtctcggcggcagcggcggagacactagcactatgtcggaggagcagttcggcggggacggggcggcggcagcggcaacggcggcggtaggcggctcggcgggcgagcaggagggagccatggtggcggcgacacagggggcagcggcggcggcgggaagcggagccgggaccgggggcggaaccgcgtctggaggcaccgaagggggcagcgccgagtcggagggggcgaagattgacgccagtaagaacgaggaggatgaaggccattcaaactcctccccacgacactctgaagcagcgacggcacagcgggaagaatggaaaatgtttataggaggccttagctgggacactacaaagaaagatctgaaggactacttttccaaatttggtgaagttgtagactgcactctgaagttagatcctatcacagggcgatcaaggggttttggctttgtgctatttaaagaatcggagagtgtagataaggtcatggatcaaaaagaacataaattgaatgggaaggtgattgatcctaaaagggccaaagccatgaaaacaaaagagccggttaaaaaaatttttgttggtggcctttctccagatacacctgaagagaaaataagggagtactttggtggttttggtgaggtggaatccatagagctccccatggacaacaagaccaataag

SEQ ID NO: 140486 - DNA, 607 bp, Homo sapiens
  Payload ID: 7562
  Gene Symbol: HNRNPD
  Gene Name: heterogeneous nuclear ribonucleoprotein D (AU-rich element RNA binding protein 1, 37kDa)
  ENST ID: ENST00000503822
  CDS Start-End: 143-607
ttaaaggcccccaaggctgtgcaacgcggagcgtgagaggaagagcgggcgcgcggcagcggcggggattactttgctgctagtttcggttcgcggcagcggcgggtgtagtctcggcggcagcggcggagacactagcactatgtcggaggagcagttcggcggggacggggcggcggcagcggcaacggcggcggtaggcggctcggcgggcgagcaggagggagccatggtggcggcgacacagggggcagcggcggcggcgggaagcggagccgggaccgggggcggaaccgcgtctggaggcaccgaagggggcagcgccgagtcggagggggcgaagattgacgccagtaagaacgaggaggatgaagggaaaatgtttataggaggccttagctgggacactacaaagaaagatctgaaggactacttttccaaatttggtgaagttgtagactgcactctgaagttagatcctatcacagggcgatcaaggggttttggctttgtgctatttaaagaatcggagagtgtagataaggtcatggatcaaaaagaacataaattgaatgggaaggtgattgatcctaaaagggccaaagcc

SEQ ID NO: 140487 - DNA, 1240 bp, Homo sapiens
  Payload ID: 7562
  Gene Symbol: HNRNPD
  Gene Name: heterogeneous nuclear ribonucleoprotein D (AU-rich element RNA binding protein 1, 37kDa)
  ENST ID: ENST00000513584
  CDS Start-End: 314-574
gtcggccattttaggtggtccgcggcggcgccattaaagcgaggaggaggcgagagcggccgccgctggtgcttattcttttttagtgcagcgggagagagcgggagtgtgcgccgcgcgagagtgggaggcgaagggggcaggccagggagaggcgcaggagcctttgcagccacgcgcgcgccttccctgtcttgtgtgcttcgcgaggtagagcgggcgcgcggcagcggcggggattactttgctgctagtttcggttcgcggcagcggcgggtgtagtctcggcggcagcggcggagacactagcactatgtcggaggagcagttcggcggggacggggcggcggcagcggcaacggcggcggtaggcggctcggcgggcgagcaggagggagccatggtggcggcgacacagggggcagcggcggcggcgggaagcggagccgggaccgggggcggaaccgcgtctggaggcaccgaagggggcagcgccgagtcggagggggcgaagattgacgccagtaagaacgaggaggatgaagggtcatggatcaaaaagaacataaattgaatgggaaggtgattgatcctaaaagggccaaagccatgaaaacaaaagagccggttaaaaaaatttttgttggtggcctttctccagatacacctgaagagaaaataagggagtactttggtggttttggtgaggtggaatccatagagctccccatggacaacaagaccaataagaggcgtgggttctgctttattacctttaaggaagaagaaccagtgaagaagataatggaaaagaaataccacaatgttggtcttagtaaatgtgaaataaaagtagccatgtcgaaggaacaatatcagcaacagcaacagtggggatctagaggaggatttgcaggaagagctcgtggaagaggtggtggccccagtcaaaactggaaccagggatatagtaactattggaatcaaggctatggcaactatggatataacagccaaggttacggtggttatggaggatatgactacactggttacaacaactactatggatatggtgattatagcaaccagcagagtggttatgggaaggtatccaggcgaggtggtcatcaaaatagctacaaaccatactaaattattccatttgcaacttatccccaacaggtatgttctaaaaatagtttttttttgtcatttacaatagtagtttttataatct

SEQ ID NO: 140488 - DNA, 583 bp, Homo sapiens
  Payload ID: 7562
  Gene Symbol: HNRNPD
  Gene Name: heterogeneous nuclear ribonucleoprotein D (AU-rich element RNA binding protein 1, 37kDa)
  ENST ID: ENST00000509107
  CDS Start-End: 308-583
cattttaggtggtccgcggcggcgccattaaagcgaggaggaggcgagagcggccgccgctggtgcttattcttttttagtgcagcgggagagagcgggagtgtgcgccgcgcgagagtgggaggcgaagggggcaggccagggagaggcgcaggagcctttgcagccacgcgcgcgccttccctgtcttgtgtgcttcgcgaggtagagcgggcgcgcggcagcggcggggattactttgctgctagtttcggttcgcggcagcggcgggtgtagtctcggcggcagcggcggagacactagcactatgtcggaggagcagttcggcggggacggggcggcggcagcggcaacggcggcgggggcgaagattgacgccagtaagaacgaggaggatgaaggccattcaaactcctccccacgacactctgaagcagcgacggcacagcgggaagaatggaaaatgtttataggaggccttagctgggacactacaaagaaagatctgaaggactacttttccaaatttggtgaagttgtagactgcactctgaagttagatcctatcacagggcgatcaagg

SEQ ID NO: 140489 - DNA, 1089 bp, Homo sapiens
  Payload ID: 7562
  Gene Symbol: HNRNPD
  Gene Name: heterogeneous nuclear ribonucleoprotein D (AU-rich element RNA binding protein 1, 37kDa)
  ENST ID: ENST00000514671
  CDS Start-End: 1-631
gaaaatgtttataggaggccttagctgggacactacaaagaaagatctgaaggactacttttccaaatttggtgaagttgtagactgcactctgaagttagatcctatcacagggcgatcaaggggttttggctttgtgctatttaaagaatcggagagtgtagataaggtcatggatcaaaaagaacataaattgaatgggaaggtgattgatcctaaaagggccaaagccatgaaaacaaaagagccggttaaaaaaatttttgttggtggcctttctccagatacacctgaagagaaaataagggagtactttggtggttttggtgaggtggaatccatagagctccccatggacaacaagaccaataagaggcgtgggttctgctttattacctttaaggaagaagaaccagtgaagaagataatggaaaagaaataccacaatgttggtcttagtaaatgtgaaataaaagtagccatgtcgaaggaacaatatcagcaacagcaacagtggggatctagaggaggatttgcaggaagagctcgtggaagaggtggtgaccagcagagtggttatgggaaggtatccaggcgaggtggtcatcaaaatagctacaaaccatactaaattattccatttgcaacttatccccaacagcgggaacttcattgcaggccctgtgtcgcgctgacttcacgattctcacaggcccgctcaatgcggacagggtacgagatgctcacgctctcgaatgctgccgtttggtggtgaagcagtattttccaatttgaagattcatttgaaggtggctcctgccacctgctaatagcagttcaaactaaattttttgtatcaagtccctgaatggaagtatgacgttgggtccctctgaagtttaattctgagttctcattaaaagaaatttgctttcattgttttatttcttaattgctatgcttcagaatcaatttgtgttttatgccctttcccccagtattgtagagcaagtcttgtgttaaaagcccagtgtgacagtgtcatgatgtagtagtgtcttactggttttttaataaatccttttgtat

SEQ ID NO: 140490 - DNA, 545 bp, Homo sapiens
  Payload ID: 7562
  Gene Symbol: HNRNPD
  Gene Name: heterogeneous nuclear ribonucleoprotein D (AU-rich element RNA binding protein 1, 37kDa)
  ENST ID: ENST00000515432
  CDS Start-End: 211-545
gacagcgccaggggcacagggctgacatctcagggctaattccctcctccagtgcgtaaatccaggcttaagccgccgcagggtgtgagcctcccctcccccacccgaacgccgcagctgcacggggcacgacagccttcgcagaggtgcagccacaccccggcctaacgctgctgctcccgccgctactggagtggtggggaggggaaaatgtttataggaggccttagctgggacactacaaagaaagatctgaaggactacttttccaaatttggtgaagttgtagactgcactctgaagttagatcctatcacagggcgatcaaggggttttggctttgtgctatttaaagaatcggagagtgtagataaggtcatggatcaaaaagaacataaattgaatgggaaggtgattgatcctaaaagggccaaagccatgaaaacaaaagagccggttaaaaaaatttttgttggtggcctttctccagatacacctgaagagaaaataagggagtactttggtggttttggtgaggtggaatc

SEQ ID NO: 140491 - DNA, 3781 bp, Homo sapiens
  Payload ID: 7563
  Gene Symbol: HNRNPDL
  Gene Name: heterogeneous nuclear ribonucleoprotein D-like
  Uniprot ID: O14979
  ENST ID: ENST00000295470
  CDS Start-End: 177-1439
ccggacgccagagacaaaggctcccaaggcaagagggactgtggccctgcgtcggctctgctcgggactgctgaccccaggaatttacgccccttcgtttttctcttctgattcttctcttctcccaagcccgcgtcccctcacgcgtggcctctctccttgccgggagggccgcgatggaggtcccgcccaggctttcccatgtgccgccgccattgttcccctccgctcccgctactttagcctcccgcagcctctcccattggcggccgcggccgccgcggcagctagccccgctcctcccttcgctcgctcccagctccgcccggcagggggcgcgccgggcccagcgccacgtcaccgcccagcagccctcccgattggcgggcggggcggctataaagggagggcgcaggcggcgcccggatctcttccgccgccattttaaatccagctccatacaacgctccgccgccgctgctgccgcgacccggactgcgcgccagcacccccctgccgacagctccgtcactatggaggatatgaacgagtacagcaatatagaggaattcgcagagggatccaagatcaacgcgagcaagaatcagcaggatgacggtaaaatgtttattggaggcttgagctgggatacaagcaaaaaagatctgacagagtacttgtctcgatttggggaagttgtagactgcacaattaaaacagatccagtcactgggagatcaagaggatttggatttgtgcttttcaaagatgctgctagtgttgataaggttttggaactgaaagaacacaaactggatggcaaattgatagatcccaaaagggccaaagctttaaaagggaaagaacctcccaaaaaggtttttgtgggtggattgagcccggatacttctgaagaacaaattaaagaatattttggagcctttggagagattgaaaatattgaacttcccatggatacaaaaacaaatgaaagaagaggattttgttttatcacatatactgatgaagagccagtaaaaaaattgttagaaagcagataccatcaaattggttctgggaagtgtgaaatcaaagttgcacaacccaaagaggtatataggcagcaacagcaacaacaaaaaggtggaagaggtgctgcagctggtggacgaggtggtacgaggggtcgtggccgaggtcagggccaaaactggaaccaaggatttaataactattatgatcaaggatatggaaattacaatagtgcctatggtggtgatcaaaactatagtggctatggcggatatgattatactgggtataactatgggaactatggatatggacagggatatgcagactacagtggccaacagagcacttatggcaaggcatctcgagggggtggcaatcaccaaaacaattaccagccatactaaaggagaacattggagaaaacaggaggagatgttaaagtaacccatcttgcaggacgacattgaagattggtcttctgttgatctaagatgattattttgtaaaagactttctagtgtacaagacaccattgtgtccaactgtatatagctgccaattagttttctttgtttttactttgtcctttgctatctgtgttatgactcaatgtggatttgtttatacacattttatttgtatcatttcatgttaaacctcaaataaatgcttccttatgtgattgcttttctgcgtcaggtactacatagctctgtaaaaaatgtaatttaaaataagcaataattaaggcacagttgattttgtagagtattggtccatacagagaaactgtggtcctttataaatagccagccagcgtcaccctcttctccaatttgtaggtgtattttatgctcttaaggcttcatcttctccctgtaactgagatttctaccacacctttgaacaatgttctttcccttctggttatctgaagactgtcctgaaaggaagacataagtgttgtgattagtagaagctttctagtagaccatatttcttctggattgtaataaaattgttagtagctccttttactttgttcctgtctctggaaagccatttttgaattgctgattactttggctttaatcagtggtcacctagaaaaagctttgtaatcataacacaatgagtaattcttgataaaagttcagatacaaaaggagcactgtaaaactggtaggagctatggtttaagagcattggaagtagttacaactcaaggattttggtagaaaggtatgagtttggtcgaaaaattaaaatagtggcaaaataagatttagttgtgttttctcagagccgccacaagattgaacaaaatgttttctgtttgggcatcctgaggaagttgtattagctgttaatgctctgtgagtttagaaaaagtcttgatagtaaatctagtttttgacacagtgcatgaactaagtagttaaatatttacatattcagaaaggaatagtggaaaaggtatcttggttatgacaaagtcattacaaatgtgactaagtcattacaaatgtgactgagtcattacagtggaccctctgggtgcattgaaaagaatccgttttatatccaggtttcagaggacctggaataataaaaagctttggattttgcattcagtgtagttggattttgggaccttggcctcagtgttatttactgggattggcatacgtgttcacaggcagagtagttgatctcacacaacgggtgatctcacaaaactggtaagtttcttatgctcatgagccctccctttttttttttaatttggtgcctgcaactttcttaacaatgattctacttcctgggctatcacattataatgctcttggcctcttttttgctgctgttttgctattcttaaacttaggccaagtaccaatgttggctgttagaagggattctgttcattcaacatgcaactttagggaatggaagtaagttcatttttaagttgtgttgtcagtaggtgcggtgtctagggtagtgaatcctgtaagttcaaatttatgattaggtgacgagttgacattgagattgtccttttccctgatcaaaaaatgaataaagcctttttaaacaaaatccaaacttttaatcaagtcttgatatgtatgactgagaaaaaatacactacatctagagatgattgagatgttttgcaaagaattgaagggggagtgagaattggtttttcttgcaggggctttgaactctagatttgggctttgaactctagatttaattcagatttcagggtctatcagttcaccaactgatgcaaatttgaacagatactctaaggctaagtgtcctaggttggatgaactgaagctactatcaagatctcgttcccaaggattaatttagaacaaagtaattggacaagtttattggggaggggatagaaatgaattctaaagtacctataacaaatactctgtgtatgttttttacatcgtatttgccttttacattgtttagaccaaattctgtgtgatgttatcctcgggaagaggatagaaattaattctaaagtacctataacaaatgctcggtttgtatatgtttttatacatcgtatttgccttttgcattgttcagaccaaattctgtgtgatgttatcctaacaaaacaccttagtaatttctttggttaacatgttaatctgtaatctcacttttataagatgaggactattaaaatgagatgtctgttgggatgcta

SEQ ID NO: 140492 - DNA, 1402 bp, Homo sapiens
  Payload ID: 7563
  Gene Symbol: HNRNPDL
  Gene Name: heterogeneous nuclear ribonucleoprotein D-like
  Uniprot ID: O14979
  ENST ID: ENST00000349655
  CDS Start-End: 115-1020
cgcccggatctcttccgccgccattttaaatccagctccatacaacgctccgccgccgctgctgccgcgacccggactgcgcgccagcacccccctgccgacagctccgtcactatggaggatatgaacgagtacagcaatatagaggaattcgcagagggatccaagatcaacgcgagcaagaatcagcaggatgacggtaaaatgtttattggaggcttgagctgggatacaagcaaaaaagatctgacagagtacttgtctcgatttggggaagttgtagactgcacaattaaaacagatccagtcactgggagatcaagaggatttggatttgtgcttttcaaagatgctgctagtgttgataaggttttggaactgaaagaacacaaactggatggcaaattgatagatcccaaaagggccaaagctttaaaagggaaagaacctcccaaaaaggtttttgtgggtggattgagcccggatacttctgaagaacaaattaaagaatattttggagcctttggagagattgaaaatattgaacttcccatggatacaaaaacaaatgaaagaagaggattttgttttatcacatatactgatgaagagccagtaaaaaaattgttagaaagcagataccatcaaattggttctgggaagtgtgaaatcaaagttgcacaacccaaagaggtatataggcagcaacagcaacaacaaaaaggtggaagaggtgctgcagctggtggacgaggtggtacgaggggtcgtggccgaggtcagggccaaaactggaaccaaggatttaataactattatgatcaaggatatggaaattacaatagtgcctatggtggtgatcaaaactatagtggctatggcggatatgattatactgggtataactatgggaactatggatatggacagggatatgcagactacagtggccaacagagcacttatggcaaggcatctcgagggggtggcaatcaccaaaacaattaccagccatactaaaggagaacattggagaaaacagcgggaacttcattgcaggccgtgtgtcaccctgaccacgtctatctctgggggtcgcacgttgcgggcagagcgcaaggcatacaccagaaaacgctgtcctgtggaggagatgttaaagtaacccatcttgcaggacgacattgaagattggtcttctgttgatctaagatgattattttgtaaaagactttctagtgtacaagacaccattgtgtccaactgtatatagctgccaattagttttctttgtttttactttgtcctttgctatctgtgttatgactcaatgtggatttgtttatacacattttatttgtatcatttcatgttaaacctcaaataaatgcttccttatgtg

SEQ ID NO: 140493 - DNA, 2356 bp, Homo sapiens
  Payload ID: 7563
  Gene Symbol: HNRNPDL
  Gene Name: heterogeneous nuclear ribonucleoprotein D-like
  Uniprot ID: O14979
  ENST ID: ENST00000502762
  CDS Start-End: 712-1974
cgagcgggagaggcccggggcacgtgcagaaaggagccccgcgagtggcgcgccggggatgtgagtgccccttgccctctactgaatccagccccctccccgcccaccgcctccgcctttgcatagatacagtcatctggccagcccccgcccctcctcccggcgtcagcccgccagaggccgcgcggggcccgggcttcggccgatcagcccgggaggccccgccgcgcccccttggcccgcgcgcccgtggtcacagtggaagaggcgcccgcgctgcgctgcccggaggagccgtcgcgcgcccgcttcctgttcggctggttcctgccagctcgaggacaaaacacgcgtgcgcgcggcgggcgagcgcgctcgccgcctcagtcgccagcgccgggcgcagtccgcctttttccggagcagactggccgcggtgctagtcggtagcagcggccgccgcagcggctccgcactggcgaaccgagggcagaaaaaggcggggttgacggctttttggtaggagtgggctggaccggacgccagagacaaaggctcccaaggcaagagggactgtggccctgcgtcggctctgctcgggactgctgaccccaggaatttacgccccttcgtttttctcttctgattcttctcttctcccaagcccgcgtcccctcacgcgtggcctctctccttgccgggagggccgcgatggaggtcccgcccaggctttcccatgtgccgccgccattgttcccctccgctcccgctactttagcctcccgcagcctctcccattggcggccgcggccgccgcggcagctagccccgctcctcccttcgctcgctcccagctccgcccggcagggggcgcgccgggcccagcgccacgtcaccgcccagcagccctcccgattggcgggcggggcggctataaagggagggcgcaggcggcgcccggatctcttccgccgccattttaaatccagctccatacaacgctccgccgccgctgctgccgcgacccggactgcgcgccagcacccccctgccgacagctccgtcactatggaggatatgaacgagtacagcaatatagaggaattcgcagagggatccaagatcaacgcgagcaagaatcagcaggatgacggtaaaatgtttattggaggcttgagctgggatacaagcaaaaaagatctgacagagtacttgtctcgatttggggaagttgtagactgcacaattaaaacagatccagtcactgggagatcaagaggatttggatttgtgcttttcaaagatgctgctagtgttgataaggttttggaactgaaagaacacaaactggatggcaaattgatagatcccaaaagggccaaagctttaaaagggaaagaacctcccaaaaaggtttttgtgggtggattgagcccggatacttctgaagaacaaattaaagaatattttggagcctttggagagattgaaaatattgaacttcccatggatacaaaaacaaatgaaagaagaggattttgttttatcacatatactgatgaagagccagtaaaaaaattgttagaaagcagataccatcaaattggttctgggaagtgtgaaatcaaagttgcacaacccaaagaggtatataggcagcaacagcaacaacaaaaaggtggaagaggtgctgcagctggtggacgaggtggtacgaggggtcgtggccgaggtcagggccaaaactggaaccaaggatttaataactattatgatcaaggatatggaaattacaatagtgcctatggtggtgatcaaaactatagtggctatggcggatatgattatactgggtataactatgggaactatggatatggacagggatatgcagactacagtggccaacagagcacttatggcaaggcatctcgagggggtggcaatcaccaaaacaattaccagccatactaaaggagaacattggagaaaacagcgggaacttcattgcaggccgtgtgtcaccctgaccacgtctatctctgggggtcgcacgttgcgggcagagcgcaaggcatacaccagaaaacgctgtcctgtggaggagatgttaaagtaacccatcttgcaggacgacattgaagattggtcttctgttgatctaagatgattattttgtaaaagactttctagtgtacaagacaccattgtgtccaactgtatatagctgccaattagttttctttgtttttactttgtcctttgctatctgtgttatgactcaatgtggatttgtttatacacattttatttgtatcatttcatgttaaacctcaaataaatgcttccttatgtg

SEQ ID NO: 140494 - DNA, 1291 bp, Homo sapiens
  Payload ID: 7563
  Gene Symbol: HNRNPDL
  Gene Name: heterogeneous nuclear ribonucleoprotein D-like
  Uniprot ID: O14979
  ENST ID: ENST00000602300
  CDS Start-End: 109-1014
gatctcttccgccgccattttaaatccagctccatacaacgctccgccgccgctgctgccgcgacccggactgcgcgccagcacccccctgccgacagctccgtcactatggaggatatgaacgagtacagcaatatagaggaattcgcagagggatccaagatcaacgcgagcaagaatcagcaggatgacggtaaaatgtttattggaggcttgagctgggatacaagcaaaaaagatctgacagagtacttgtctcgatttggggaagttgtagactgcacaattaaaacagatccagtcactgggagatcaagaggatttggatttgtgcttttcaaagatgctgctagtgttgataaggttttggaactgaaagaacacaaactggatggcaaattgatagatcccaaaagggccaaagctttaaaagggaaagaacctcccaaaaaggtttttgtgggtggattgagcccggatacttctgaagaacaaattaaagaatattttggagcctttggagagattgaaaatattgaacttcccatggatacaaaaacaaatgaaagaagaggattttgttttatcacatatactgatgaagagccagtaaaaaaattgttagaaagcagataccatcaaattggttctgggaagtgtgaaatcaaagttgcacaacccaaagaggtatataggcagcaacagcaacaacaaaaaggtggaagaggtgctgcagctggtggacgaggtggtacgaggggtcgtggccgaggtcagggccaaaactggaaccaaggatttaataactattatgatcaaggatatggaaattacaatagtgcctatggtggtgatcaaaactatagtggctatggcggatatgattatactgggtataactatgggaactatggatatggacagggatatgcagactacagtggccaacagagcacttatggcaaggcatctcgagggggtggcaatcaccaaaacaattaccagccatactaaaggagaacattggagaaaacaggaggagatgttaaagtaacccatcttgcaggacgacattgaagattggtcttctgttgatctaagatgattattttgtaaaagactttctagtgtacaagacaccattgtgtccaactgtatatagctgccaattagttttctttgtttttactttgtcctttgctatctgtgttatgactcaatgtggatttgtttatacacattttatttgtatcatttcatgttaaacctcaaataaatgcttccttatgtg

SEQ ID NO: 140495 - DNA, 1143 bp, Homo sapiens
  Payload ID: 7563
  Gene Symbol: HNRNPDL
  Gene Name: heterogeneous nuclear ribonucleoprotein D-like
  ENST ID: ENST00000514511
  CDS Start-End: 93-266
attttaaatccagctccatacaacgctccgccgccgctgctgccgcgacccggactgcgcgccagcacccccctgccgacagctccgtcactatggaggatatgaacgagtacagcaatatagaggaattcgcagagggatccaagatcaacgcgagcaagaatcagcaggatgacggattgaaaatattgaacttcccatggatacaaaaacaaatgaaagaagaggattttgttttatcacatatactgatgaagagccagtaaaaaaattgttagaaagcagataccatcaaattggttctgggaagtgtgaaatcaaagttgcacaacccaaagaggtatataggcagcaacagcaacaacaaaaaggtggaagaggtgctgcagctggtggacgaggtggtacgaggggtcgtggccgaggtcagggccaaaactggaaccaaggatttaataactattatgatcaaggatatggaaattacaatagtgcctatggtggtgatcaaaactatagtggctatggcggatatgattatactgggtataactatgggaactatggatatggacagggatatgcagactacagtggccaacagagcacttatggcaaggcatctcgagggggtggcaatcaccaaaacaattaccagccatactaaaggagaacattggagaaaacaggtgtgtataagagtacaggaaaacagtagaaatgtctaatttaatttaaagatcaatagacaaatgaaacgtaaaaacaaaatactatgtagcctgtttttactaaattgttgattttttaattgctttatgagcctgttttgcctaaagtgtctatagatctttaactttaaagtcttatctcactttctttagtattgcagaaaaacttaagagtttttctgtttgcttttgtgtaccaggtggtctagaggaataattaaacattttagaactattaacaggtaaagtactgaaatgggtacaacttaaggaaaacaagaatgttgtcttctaactctgacattataccttgtttgtacccgccagcgggaacttcattgcaggccgtgtgtcaccctgaccacgtctatctctgggggtcgcacgttgcgggcagagcgcaaggcataca

SEQ ID NO: 140496 - DNA, 3968 bp, Homo sapiens
  Payload ID: 7563
  Gene Symbol: HNRNPDL
  Gene Name: heterogeneous nuclear ribonucleoprotein D-like
  ENST ID: ENST00000614627
  CDS Start-End: 536-1627
gaggccgcgcggggcccgggcttcggccgatcagcccgggaggccccgccgcgcccccttggcccgcgcgcccgtggtcacagtggaagaggcgcccgcgctgcgctgcccggaggagccgtcgcgcgcccgcttcctgttcggctggttcctgccagctcgaggacaaaacacgcgtgcgcgcggcgggcgagcgcgctcgccgcctcagtcgccagcgccgggcgcagtccgcctttttccggagcagactggccgcggtgctagtcggtagcagcggccgccgcagcggctccgcactggcgaaccgagggcagaaaaaggcggggttgacggctttttggtaggagtgggctggaccggacgccagagacaaaggctcccaaggcaagagggactgtggccctgcgtcggctctgctcgggactgctgaccccaggaatttacgccccttcgtttttctcttctgattcttctcttctcccaagcccgcgtcccctcacgcgtggcctctctccttgccgggagggccgcgatggaggtcccgcccaggctttcccatgtgccgccgccattgttcccctccgctcccgctactttagcctcccgcagcctctcccattggcggccgcggccgccgcggcagctagccccgctcctcccttcgctcgctcccagctccgcccggcagggggcgcgccgggcccagcgccacgtcaccgcccagcagccctcccgattggcgggcggggcggctataaagggagggcgcaggcggcgcccggatctcttccgccgccattttaaatccagctccatacaacgctccgccgccgctgctgccgcgacccggactgcgcgccagcacccccctgccgacagctccgtcactatggaggatatgaacgagtacagcaatatagaggaattcgcagagggatccaagatcaacgcgagcaagaatcagcaggatgacggtaaaatgtttattggaggcttgagctgggatacaagcaaaaaagatctgacagagtacttgtctcgatttggggaagttgtagactgcacaattaaaacagatccagtcactgggagatcaagaggatttggatttgtgcttttcaaagatgctgctagtgttgataaggttttggaactgaaagaacacaaactggatggcaaattgatagatcccaaaagggccaaagctttaaaagggaaagaacctcccaaaaaggtttttgtgggtggattgagcccggatacttctgaagaacaaattaaagaatattttggagcctttggagagattgaaaatattgaacttcccatggatacaaaaacaaatgaaagaagaggattttgttttatcacatatactgatgaagagccagtaaaaaaattgttagaaagcagataccatcaaattggttctgggaagtgtgaaatcaaagttgcacaacccaaagaggtatataggcagcaacagcaacaacaaaaaggtggaagaggtgctgcagctggtggacgaggtggtacgaggggtcgtggccgaggccaacagagcacttatggcaaggcatctcgagggggtggcaatcaccaaaacaattaccagccatactaaaggagaacattggagaaaacaggaggagatgttaaagtaacccatcttgcaggacgacattgaagattggtcttctgttgatctaagatgattattttgtaaaagactttctagtgtacaagacaccattgtgtccaactgtatatagctgccaattagttttctttgtttttactttgtcctttgctatctgtgttatgactcaatgtggatttgtttatacacattttatttgtatcatttcatgttaaacctcaaataaatgcttccttatgtgattgcttttctgcgtcaggtactacatagctctgtaaaaaatgtaatttaaaataagcaataattaaggcacagttgattttgtagagtattggtccatacagagaaactgtggtcctttataaatagccagccagcgtcaccctcttctccaatttgtaggtgtattttatgctcttaaggcttcatcttctccctgtaactgagatttctaccacacctttgaacaatgttctttcccttctggttatctgaagactgtcctgaaaggaagacataagtgttgtgattagtagaagctttctagtagaccatatttcttctggattgtaataaaattgttagtagctccttttactttgttcctgtctctggaaagccatttttgaattgctgattactttggctttaatcagtggtcacctagaaaaagctttgtaatcataacacaatgagtaattcttgataaaagttcagatacaaaaggagcactgtaaaactggtaggagctatggtttaagagcattggaagtagttacaactcaaggattttggtagaaaggtatgagtttggtcgaaaaattaaaatagtggcaaaataagatttagttgtgttttctcagagccgccacaagattgaacaaaatgttttctgtttgggcatcctgaggaagttgtattagctgttaatgctctgtgagtttagaaaaagtcttgatagtaaatctagtttttgacacagtgcatgaactaagtagttaaatatttacatattcagaaaggaatagtggaaaaggtatcttggttatgacaaagtcattacaaatgtgactaagtcattacaaatgtgactgagtcattacagtggaccctctgggtgcattgaaaagaatccgttttatatccaggtttcagaggacctggaataataaaaagctttggattttgcattcagtgtagttggattttgggaccttggcctcagtgttatttactgggattggcatacgtgttcacaggcagagtagttgatctcacacaacgggtgatctcacaaaactggtaagtttcttatgctcatgagccctccctttttttttttaatttggtgcctgcaactttcttaacaatgattctacttcctgggctatcacattataatgctcttggcctcttttttgctgctgttttgctattcttaaacttaggccaagtaccaatgttggctgttagaagggattctgttcattcaacatgcaactttagggaatggaagtaagttcatttttaagttgtgttgtcagtaggtgcggtgtctagggtagtgaatcctgtaagttcaaatttatgattaggtgacgagttgacattgagattgtccttttccctgatcaaaaaatgaataaagcctttttaaacaaaatccaaacttttaatcaagtcttgatatgtatgactgagaaaaaatacactacatctagagatgattgagatgttttgcaaagaattgaagggggagtgagaattggtttttcttgcaggggctttgaactctagatttgggctttgaactctagatttaattcagatttcagggtctatcagttcaccaactgatgcaaatttgaacagatactctaaggctaagtgtcctaggttggatgaactgaagctactatcaagatctcgttcccaaggattaatttagaacaaagtaattggacaagtttattggggaggggatagaaatgaattctaaagtacctataacaaatactctgtgtatgttttttacatcgtatttgccttttacattgtttagaccaaattctgtgtgatgttatcctcgggaagaggatagaaattaattctaaagtacctataacaaatgctcggtttgtatatgtttttatacatcgtatttgccttttgcattgttcagaccaaattctgtgtgatgttatcctaacaaaacaccttagtaatttctttggttaacatgttaatctgtaatctcacttttataagatgaggactattaaaatgagatgtctgttgggatgct

SEQ ID NO: 140497 - DNA, 2404 bp, Homo sapiens
  Payload ID: 7563
  Gene Symbol: HNRNPDL
  Gene Name: heterogeneous nuclear ribonucleoprotein D-like
  Uniprot ID: O14979
  ENST ID: ENST00000507721
  CDS Start-End: 65-970
cgccgccgctgctgccgcgacccggactgcgcgccagcacccccctgccgacagctccgtcactatggaggatatgaacgagtacagcaatatagaggaattcgcagagggatccaagatcaacgcgagcaagaatcagcaggatgacggtaaaatgtttattggaggcttgagctgggatacaagcaaaaaagatctgacagagtacttgtctcgatttggggaagttgtagactgcacaattaaaacagatccagtcactgggagatcaagaggatttggatttgtgcttttcaaagatgctgctagtgttgataaggttttggaactgaaagaacacaaactggatggcaaattgatagatcccaaaagggccaaagctttaaaagggaaagaacctcccaaaaaggtttttgtgggtggattgagcccggatacttctgaagaacaaattaaagaatattttggagcctttggagagattgaaaatattgaacttcccatggatacaaaaacaaatgaaagaagaggattttgttttatcacatatactgatgaagagccagtaaaaaaattgttagaaagcagataccatcaaattggttctgggaagtgtgaaatcaaagttgcacaacccaaagaggtatataggcagcaacagcaacaacaaaaaggtggaagaggtgctgcagctggtggacgaggtggtacgaggggtcgtggccgaggtcagggccaaaactggaaccaaggatttaataactattatgatcaaggatatggaaattacaatagtgcctatggtggtgatcaaaactatagtggctatggcggatatgattatactgggtataactatgggaactatggatatggacagggatatgcagactacagtggccaacagagcacttatggcaaggcatctcgagggggtggcaatcaccaaaacaattaccagccatactaaaggagaacattggagaaaacaggtgtgtataagagtacaggaaaacagtagaaatgtctaatttaatttaaagatcaatagacaaatgaaacgtaaaaacaaaatactatgtagcctgtttttactaaattgttgattttttaattgctttatgagcctgttttgcctaaagtgtctatagatctttaactttaaagtcttatctcactttctttagtattgcagaaaaacttaagagtttttctgtttgcttttgtgtaccaggtggtctagaggaataattaaacattttagaactattaacaggtaaagtactgaaatgggtacaacttaaggaaaacaagaatgttgtcttctaactctgacattataccttgtttgtacccgccagcgggaacttcattgcaggccgtgtgtcaccctgaccacgtctatctctgggggtcgcacgttgcgggcagagcgcaaggcatacaccagaaaacgctgtcctgtggtatggtctcttccaacttcatgtaccagcgtaaagattaaagtggaaaacttcagactttggcttcatttttaatctttttggagattaagtgtctaaacttaacttaaatggttttttacaggagttaaagtacataaatgcctttttacagcttaatcattttggtcttctgtttagtgttgtatttcaattgtggagcctcattttaagtgttcattcttttaagatttaatgcttgctttttctttttatagctaatagtgaaatctacaaaccaaaacaagaacttttaaatctgggatataaattaaagatcatatgcacagatcaatttatgttcttgtaataaacttattagaaattggtgtttgtgatagcattttacttgggttactagagatgcttctagtagaccttaatctagcatagttgaacctctgaatatgggaaggttgtattcccagattctttcctgaatagatttgaatttaatgtcatttgggaactccagggtgagtttattgactacccaaactgtattttaccaataaatatgcatatgatctttaattattgaagaaaataaagtgaggacttaaaacaattcatgaaagtggacctttaaaagcttgtcagagttgcacaaatctaactggtattttgtttttgtttttaggaggagatgttaaagtaacccatcttgcaggacgacattgaagattggtcttctgttgatctaagatgattattttgtaaaagactttctagtgtacaagacaccattgtgtccaactgtatatagctgccaattagttttctttgtttttactttgtcctttgctatctgtgttatgactcaatgtggatttgtttatacacattttatttgtatcatttcatgttaaacctcaaataaatgcttccttatgtgattg

SEQ ID NO: 140498 - DNA, 4139 bp, Homo sapiens
  Payload ID: 7563
  Gene Symbol: HNRNPDL
  Gene Name: heterogeneous nuclear ribonucleoprotein D-like
  Uniprot ID: O14979
  ENST ID: ENST00000621267
  CDS Start-End: 536-1798
gaggccgcgcggggcccgggcttcggccgatcagcccgggaggccccgccgcgcccccttggcccgcgcgcccgtggtcacagtggaagaggcgcccgcgctgcgctgcccggaggagccgtcgcgcgcccgcttcctgttcggctggttcctgccagctcgaggacaaaacacgcgtgcgcgcggcgggcgagcgcgctcgccgcctcagtcgccagcgccgggcgcagtccgcctttttccggagcagactggccgcggtgctagtcggtagcagcggccgccgcagcggctccgcactggcgaaccgagggcagaaaaaggcggggttgacggctttttggtaggagtgggctggaccggacgccagagacaaaggctcccaaggcaagagggactgtggccctgcgtcggctctgctcgggactgctgaccccaggaatttacgccccttcgtttttctcttctgattcttctcttctcccaagcccgcgtcccctcacgcgtggcctctctccttgccgggagggccgcgatggaggtcccgcccaggctttcccatgtgccgccgccattgttcccctccgctcccgctactttagcctcccgcagcctctcccattggcggccgcggccgccgcggcagctagccccgctcctcccttcgctcgctcccagctccgcccggcagggggcgcgccgggcccagcgccacgtcaccgcccagcagccctcccgattggcgggcggggcggctataaagggagggcgcaggcggcgcccggatctcttccgccgccattttaaatccagctccatacaacgctccgccgccgctgctgccgcgacccggactgcgcgccagcacccccctgccgacagctccgtcactatggaggatatgaacgagtacagcaatatagaggaattcgcagagggatccaagatcaacgcgagcaagaatcagcaggatgacggtaaaatgtttattggaggcttgagctgggatacaagcaaaaaagatctgacagagtacttgtctcgatttggggaagttgtagactgcacaattaaaacagatccagtcactgggagatcaagaggatttggatttgtgcttttcaaagatgctgctagtgttgataaggttttggaactgaaagaacacaaactggatggcaaattgatagatcccaaaagggccaaagctttaaaagggaaagaacctcccaaaaaggtttttgtgggtggattgagcccggatacttctgaagaacaaattaaagaatattttggagcctttggagagattgaaaatattgaacttcccatggatacaaaaacaaatgaaagaagaggattttgttttatcacatatactgatgaagagccagtaaaaaaattgttagaaagcagataccatcaaattggttctgggaagtgtgaaatcaaagttgcacaacccaaagaggtatataggcagcaacagcaacaacaaaaaggtggaagaggtgctgcagctggtggacgaggtggtacgaggggtcgtggccgaggtcagggccaaaactggaaccaaggatttaataactattatgatcaaggatatggaaattacaatagtgcctatggtggtgatcaaaactatagtggctatggcggatatgattatactgggtataactatgggaactatggatatggacagggatatgcagactacagtggccaacagagcacttatggcaaggcatctcgagggggtggcaatcaccaaaacaattaccagccatactaaaggagaacattggagaaaacaggaggagatgttaaagtaacccatcttgcaggacgacattgaagattggtcttctgttgatctaagatgattattttgtaaaagactttctagtgtacaagacaccattgtgtccaactgtatatagctgccaattagttttctttgtttttactttgtcctttgctatctgtgttatgactcaatgtggatttgtttatacacattttatttgtatcatttcatgttaaacctcaaataaatgcttccttatgtgattgcttttctgcgtcaggtactacatagctctgtaaaaaatgtaatttaaaataagcaataattaaggcacagttgattttgtagagtattggtccatacagagaaactgtggtcctttataaatagccagccagcgtcaccctcttctccaatttgtaggtgtattttatgctcttaaggcttcatcttctccctgtaactgagatttctaccacacctttgaacaatgttctttcccttctggttatctgaagactgtcctgaaaggaagacataagtgttgtgattagtagaagctttctagtagaccatatttcttctggattgtaataaaattgttagtagctccttttactttgttcctgtctctggaaagccatttttgaattgctgattactttggctttaatcagtggtcacctagaaaaagctttgtaatcataacacaatgagtaattcttgataaaagttcagatacaaaaggagcactgtaaaactggtaggagctatggtttaagagcattggaagtagttacaactcaaggattttggtagaaaggtatgagtttggtcgaaaaattaaaatagtggcaaaataagatttagttgtgttttctcagagccgccacaagattgaacaaaatgttttctgtttgggcatcctgaggaagttgtattagctgttaatgctctgtgagtttagaaaaagtcttgatagtaaatctagtttttgacacagtgcatgaactaagtagttaaatatttacatattcagaaaggaatagtggaaaaggtatcttggttatgacaaagtcattacaaatgtgactaagtcattacaaatgtgactgagtcattacagtggaccctctgggtgcattgaaaagaatccgttttatatccaggtttcagaggacctggaataataaaaagctttggattttgcattcagtgtagttggattttgggaccttggcctcagtgttatttactgggattggcatacgtgttcacaggcagagtagttgatctcacacaacgggtgatctcacaaaactggtaagtttcttatgctcatgagccctccctttttttttttaatttggtgcctgcaactttcttaacaatgattctacttcctgggctatcacattataatgctcttggcctcttttttgctgctgttttgctattcttaaacttaggccaagtaccaatgttggctgttagaagggattctgttcattcaacatgcaactttagggaatggaagtaagttcatttttaagttgtgttgtcagtaggtgcggtgtctagggtagtgaatcctgtaagttcaaatttatgattaggtgacgagttgacattgagattgtccttttccctgatcaaaaaatgaataaagcctttttaaacaaaatccaaacttttaatcaagtcttgatatgtatgactgagaaaaaatacactacatctagagatgattgagatgttttgcaaagaattgaagggggagtgagaattggtttttcttgcaggggctttgaactctagatttgggctttgaactctagatttaattcagatttcagggtctatcagttcaccaactgatgcaaatttgaacagatactctaaggctaagtgtcctaggttggatgaactgaagctactatcaagatctcgttcccaaggattaatttagaacaaagtaattggacaagtttattggggaggggatagaaatgaattctaaagtacctataacaaatactctgtgtatgttttttacatcgtatttgccttttacattgtttagaccaaattctgtgtgatgttatcctcgggaagaggatagaaattaattctaaagtacctataacaaatgctcggtttgtatatgtttttatacatcgtatttgccttttgcattgttcagaccaaattctgtgtgatgttatcctaacaaaacaccttagtaatttctttggttaacatgttaatctgtaatctcacttttataagatgaggactattaaaatgagatgtctgttgggatgct

SEQ ID NO: 140499 - DNA, 1318 bp, Homo sapiens
  Payload ID: 7563
  Gene Symbol: HNRNPDL
  Gene Name: heterogeneous nuclear ribonucleoprotein D-like
  Uniprot ID: O14979
  ENST ID: ENST00000630827
  CDS Start-End: 138-1043
agcgggagaggcccggggcacgtgcagaaaggagccccgcgagtggcgcgccggggatctccatacaacgctccgccgccgctgctgccgcgacccggactgcgcgccagcacccccctgccgacagctccgtcactatggaggatatgaacgagtacagcaatatagaggaattcgcagagggatccaagatcaacgcgagcaagaatcagcaggatgacggtaaaatgtttattggaggcttgagctgggatacaagcaaaaaagatctgacagagtacttgtctcgatttggggaagttgtagactgcacaattaaaacagatccagtcactgggagatcaagaggatttggatttgtgcttttcaaagatgctgctagtgttgataaggttttggaactgaaagaacacaaactggatggcaaattgatagatcccaaaagggccaaagctttaaaagggaaagaacctcccaaaaaggtttttgtgggtggattgagcccggatacttctgaagaacaaattaaagaatattttggagcctttggagagattgaaaatattgaacttcccatggatacaaaaacaaatgaaagaagaggattttgttttatcacatatactgatgaagagccagtaaaaaaattgttagaaagcagataccatcaaattggttctgggaagtgtgaaatcaaagttgcacaacccaaagaggtatataggcagcaacagcaacaacaaaaaggtggaagaggtgctgcagctggtggacgaggtggtacgaggggtcgtggccgaggtcagggccaaaactggaaccaaggatttaataactattatgatcaaggatatggaaattacaatagtgcctatggtggtgatcaaaactatagtggctatggcggatatgattatactgggtataactatgggaactatggatatggacagggatatgcagactacagtggccaacagagcacttatggcaaggcatctcgagggggtggcaatcaccaaaacaattaccagccatactaaaggagaacattggagaaaacaggaggagatgttaaagtaacccatcttgcaggacgacattgaagattggtcttctgttgatctaagatgattattttgtaaaagactttctagtgtacaagacaccattgtgtccaactgtatatagctgccaattagttttctttgtttttactttgtcctttgctatctgtgttatgactcaatgtggatttgtttatacacattttatttgtatcatttcatgttaaacctcaaataaatgcttccttatg

SEQ ID NO: 140500 - DNA, 1433 bp, Homo sapiens
  Payload ID: 7563
  Gene Symbol: HNRNPDL
  Gene Name: heterogeneous nuclear ribonucleoprotein D-like
  Uniprot ID: O14979
  ENST ID: ENST00000630114
  CDS Start-End: 147-1052
ggttgagcgagcgggagaggcccggggcacgtgcagaaaggagccccgcgagtggcgcgccggggatctccatacaacgctccgccgccgctgctgccgcgacccggactgcgcgccagcacccccctgccgacagctccgtcactatggaggatatgaacgagtacagcaatatagaggaattcgcagagggatccaagatcaacgcgagcaagaatcagcaggatgacggtaaaatgtttattggaggcttgagctgggatacaagcaaaaaagatctgacagagtacttgtctcgatttggggaagttgtagactgcacaattaaaacagatccagtcactgggagatcaagaggatttggatttgtgcttttcaaagatgctgctagtgttgataaggttttggaactgaaagaacacaaactggatggcaaattgatagatcccaaaagggccaaagctttaaaagggaaagaacctcccaaaaaggtttttgtgggtggattgagcccggatacttctgaagaacaaattaaagaatattttggagcctttggagagattgaaaatattgaacttcccatggatacaaaaacaaatgaaagaagaggattttgttttatcacatatactgatgaagagccagtaaaaaaattgttagaaagcagataccatcaaattggttctgggaagtgtgaaatcaaagttgcacaacccaaagaggtatataggcagcaacagcaacaacaaaaaggtggaagaggtgctgcagctggtggacgaggtggtacgaggggtcgtggccgaggtcagggccaaaactggaaccaaggatttaataactattatgatcaaggatatggaaattacaatagtgcctatggtggtgatcaaaactatagtggctatggcggatatgattatactgggtataactatgggaactatggatatggacagggatatgcagactacagtggccaacagagcacttatggcaaggcatctcgagggggtggcaatcaccaaaacaattaccagccatactaaaggagaacattggagaaaacagcgggaacttcattgcaggccgtgtgtcaccctgaccacgtctatctctgggggtcgcacgttgcgggcagagcgcaaggcatacaccagaaaacgctgtcctgtggaggagatgttaaagtaacccatcttgcaggacgacattgaagattggtcttctgttgatctaagatgattattttgtaaaagactttctagtgtacaagacaccattgtgtccaactgtatatagctgccaattagttttctttgtttttactttgtcctttgctatctgtgttatgactcaatgtggatttgtttatacacattttatttgtatcatttcatgttaaacctcaaataaatgcttccttatgt

SEQ ID NO: 140501 - DNA, 2186 bp, Homo sapiens
  Payload ID: 7564
  Gene Symbol: HNRNPF
  Gene Name: heterogeneous nuclear ribonucleoprotein F
  Uniprot ID: P52597
  ENST ID: ENST00000337970
  CDS Start-End: 324-1571
gtcgtggaagcaggactgcgccgcgtcttcctcaaggtggggttcggggggccaccgaatcgctgtcacgccggcaggttgagaacaaaaacatgcacctggagtttccccggagccctctgcgtggttgagcttcggtggaatttcggggctcttggctgccagccgcgcttgcctggtagcaacagaaaccagtcctgctcgcctccgtggacatttcattaccatccagaagtgtctcccactgaaggcatccgtggttgtttttaagccacaaaaaagccacacccaagatcacctgacacccaccctgacaagtgtccatgatgctgggccctgagggaggtgaaggctttgtggtcaagctccgtggcctgccctggtcctgctctgttgaggacgtgcagaacttcctctctgactgcacgattcatgatggggccgcaggtgtccatttcatctacactagagagggcaggcagagtggtgaggcttttgttgaacttggatcagaagatgatgtaaaaatggccctgaaaaaagacagggaaagcatgggacaccggtacattgaggtgttcaagtcccacagaaccgagatggattgggtgttgaagcacagtggtcccaacagtgccgacagcgccaacgatggcttcgtgcggcttcgaggactcccatttggatgcacaaaggaagaaattgttcagttcttctcagggttggaaattgtgccaaacgggatcacattgcctgtggaccccgaaggcaagattacaggggaagcgttcgtgcagtttgcctcgcaggagttagctgagaaggctctagggaaacacaaggagaggatagggcacaggtacattgaggtgtttaagagcagccaggaggaagttaggtcatactcagatccccctctgaagttcatgtccgtgcagcggccagggccctatgaccggcccgggactgccaggaggtacattggcatcgtgaagcaggcaggcctggaaaggatgaggcctggtgcctacagcacaggctacgggggctacgaggagtacagtggcctcagtgatggctacggcttcaccaccgacctgttcgggagagacctcagctactgtctctccggaatgtatgaccacagatacggcgacagtgagttcacagtgcagagcaccacaggccactgtgtccacatgaggggcctgccgtacaaagcgaccgagaacgacatttacaacttcttctctcctctcaaccctgtgagagtccatattgagattggcccagatggaagagtgacgggtgaagcagatgttgagtttgctactcatgaagaagctgtggcagctatgtccaaagacagggccaatatgcagcacagatatatagaactcttcttgaattcaacaacaggggccagcaatggggcgtatagcagccaggtgatgcaaggcatgggggtgtctgctgcccaggccacttacagtggcctggagagccagtcagtgagtggctgttacggggccggctacagtgggcagaacagcatgggtggctatgactagttttgttaggaacatttgagttacttcaatcattttcacaggcagccaacaagcaattaagagcagttataatagaggaagctgggggacccattttgcaccatgagtttgtgaaaaatctggattaaaaaattacctcttcagtgttttctcatgcaaaattttcttctagcatgtgataatgagtaaactaaaactattttcagcttttctcaattaacattttggtagtatacttcagagtgatgttatctaagtttaagtagtttaagtatgttaaatgtggatcttttacaccacatcacagtgaacacactggggagacgtgcttttttggaaaactcaaaggtgctagctccctgattcaaagaaatatttctcatgtttgttcattctagtttatattttcatttaaaatcctttaggttaagtttaagctttttaaaagttagttttgagaattgagacacaatactaatactgtaggaattggtgaggccttgacttaaaactttctttgtactgtgatttccttttgggtgtattttgctaagtgaaacttgttaaattttttgttaactaaatttttttcttaaaataaagactttttcacaa

SEQ ID NO: 140502 - DNA, 2670 bp, Homo sapiens
  Payload ID: 7564
  Gene Symbol: HNRNPF
  Gene Name: heterogeneous nuclear ribonucleoprotein F
  Uniprot ID: P52597
  ENST ID: ENST00000356053
  CDS Start-End: 403-1650
gctcgcaggcgggggtttccatggtgatggtcaacaagcctcaactgcctctgctacaactgccaagttccccgcgtcccaccctcctctaggtgctccaagggaccaccggggtgcctgatatgagagcgggagtgtagagactcggaggccgaggttgagaacaaaaacatgcacctggagtttccccggagccctctgcgtggttgagcttcggtggaatttcggggctcttggctgccagccgcgcttgcctggtagcaacagaaaccagtcctgctcgcctccgtggacatttcattaccatccagaagtgtctcccactgaaggcatccgtggttgtttttaagccacaaaaaagccacacccaagatcacctgacacccaccctgacaagtgtccatgatgctgggccctgagggaggtgaaggctttgtggtcaagctccgtggcctgccctggtcctgctctgttgaggacgtgcagaacttcctctctgactgcacgattcatgatggggccgcaggtgtccatttcatctacactagagagggcaggcagagtggtgaggcttttgttgaacttggatcagaagatgatgtaaaaatggccctgaaaaaagacagggaaagcatgggacaccggtacattgaggtgttcaagtcccacagaaccgagatggattgggtgttgaagcacagtggtcccaacagtgccgacagcgccaacgatggcttcgtgcggcttcgaggactcccatttggatgcacaaaggaagaaattgttcagttcttctcagggttggaaattgtgccaaacgggatcacattgcctgtggaccccgaaggcaagattacaggggaagcgttcgtgcagtttgcctcgcaggagttagctgagaaggctctagggaaacacaaggagaggatagggcacaggtacattgaggtgtttaagagcagccaggaggaagttaggtcatactcagatccccctctgaagttcatgtccgtgcagcggccagggccctatgaccggcccgggactgccaggaggtacattggcatcgtgaagcaggcaggcctggaaaggatgaggcctggtgcctacagcacaggctacgggggctacgaggagtacagtggcctcagtgatggctacggcttcaccaccgacctgttcgggagagacctcagctactgtctctccggaatgtatgaccacagatacggcgacagtgagttcacagtgcagagcaccacaggccactgtgtccacatgaggggcctgccgtacaaagcgaccgagaacgacatttacaacttcttctctcctctcaaccctgtgagagtccatattgagattggcccagatggaagagtgacgggtgaagcagatgttgagtttgctactcatgaagaagctgtggcagctatgtccaaagacagggccaatatgcagcacagatatatagaactcttcttgaattcaacaacaggggccagcaatggggcgtatagcagccaggtgatgcaaggcatgggggtgtctgctgcccaggccacttacagtggcctggagagccagtcagtgagtggctgttacggggccggctacagtgggcagaacagcatgggtggctatgactagttttgttaggaacatttgagttacttcaatcattttcacaggcagccaacaagcaattaagagcagttataatagaggaagctgggggacccattttgcaccatgagtttgtgaaaaatctggattaaaaaattacctcttcagtgttttctcatgcaaaattttcttctagcatgtgataatgagtaaactaaaactattttcagcttttctcaattaacattttggtagtatacttcagagtgatgttatctaagtttaagtagtttaagtatgttaaatgtggatcttttacaccacatcacagtgaacacactggggagacgtgcttttttggaaaactcaaaggtgctagctccctgattcaaagaaatatttctcatgtttgttcattctagtttatattttcatttaaaatcctttaggttaagtttaagctttttaaaagttagttttgagaattgagacacaatactaatactgtaggaattggtgaggccttgacttaaaactttctttgtactgtgatttccttttgggtgtattttgctaagtgaaacttgttaaattttttgttaactaaatttttttcttaaaataaagactttttcacaatgactggcacagattactcagcaaaagatagcaaaacgggtggttgaagataattcattttaatcgtaatgtattttagtgtgaatttaaaaatttcatacatcaaatctatgatctcccttatattcttatgatgaggctaaataaaagtctaataaaaatgttaaatatgtgaatggtggaaatggtgactagcagcacacattctgggaagcatcaaatagacacacggccccagccacctgcaacttatgtgcactgttgtaaaccattcagaattttcctgctaggcccttgatgctggagtcacatctgttgatagctggagaactttagtttcaagtactacattgtgaaagcaattattttgtttctagtttttataaaatgctgatttaaactttt

SEQ ID NO: 140503 - DNA, 2617 bp, Homo sapiens
  Payload ID: 7564
  Gene Symbol: HNRNPF
  Gene Name: heterogeneous nuclear ribonucleoprotein F
  Uniprot ID: P52597
  ENST ID: ENST00000357065
  CDS Start-End: 350-1597
cggttcccgtagccttagctctcggccccgggccctttttcctcctcggctgcgccgcgtgtcctcggagcgcggtccctgtattggtctcctgctcctagaggttgagaacaaaaacatgcacctggagtttccccggagccctctgcgtggttgagcttcggtggaatttcggggctcttggctgccagccgcgcttgcctggtagcaacagaaaccagtcctgctcgcctccgtggacatttcattaccatccagaagtgtctcccactgaaggcatccgtggttgtttttaagccacaaaaaagccacacccaagatcacctgacacccaccctgacaagtgtccatgatgctgggccctgagggaggtgaaggctttgtggtcaagctccgtggcctgccctggtcctgctctgttgaggacgtgcagaacttcctctctgactgcacgattcatgatggggccgcaggtgtccatttcatctacactagagagggcaggcagagtggtgaggcttttgttgaacttggatcagaagatgatgtaaaaatggccctgaaaaaagacagggaaagcatgggacaccggtacattgaggtgttcaagtcccacagaaccgagatggattgggtgttgaagcacagtggtcccaacagtgccgacagcgccaacgatggcttcgtgcggcttcgaggactcccatttggatgcacaaaggaagaaattgttcagttcttctcagggttggaaattgtgccaaacgggatcacattgcctgtggaccccgaaggcaagattacaggggaagcgttcgtgcagtttgcctcgcaggagttagctgagaaggctctagggaaacacaaggagaggatagggcacaggtacattgaggtgtttaagagcagccaggaggaagttaggtcatactcagatccccctctgaagttcatgtccgtgcagcggccagggccctatgaccggcccgggactgccaggaggtacattggcatcgtgaagcaggcaggcctggaaaggatgaggcctggtgcctacagcacaggctacgggggctacgaggagtacagtggcctcagtgatggctacggcttcaccaccgacctgttcgggagagacctcagctactgtctctccggaatgtatgaccacagatacggcgacagtgagttcacagtgcagagcaccacaggccactgtgtccacatgaggggcctgccgtacaaagcgaccgagaacgacatttacaacttcttctctcctctcaaccctgtgagagtccatattgagattggcccagatggaagagtgacgggtgaagcagatgttgagtttgctactcatgaagaagctgtggcagctatgtccaaagacagggccaatatgcagcacagatatatagaactcttcttgaattcaacaacaggggccagcaatggggcgtatagcagccaggtgatgcaaggcatgggggtgtctgctgcccaggccacttacagtggcctggagagccagtcagtgagtggctgttacggggccggctacagtgggcagaacagcatgggtggctatgactagttttgttaggaacatttgagttacttcaatcattttcacaggcagccaacaagcaattaagagcagttataatagaggaagctgggggacccattttgcaccatgagtttgtgaaaaatctggattaaaaaattacctcttcagtgttttctcatgcaaaattttcttctagcatgtgataatgagtaaactaaaactattttcagcttttctcaattaacattttggtagtatacttcagagtgatgttatctaagtttaagtagtttaagtatgttaaatgtggatcttttacaccacatcacagtgaacacactggggagacgtgcttttttggaaaactcaaaggtgctagctccctgattcaaagaaatatttctcatgtttgttcattctagtttatattttcatttaaaatcctttaggttaagtttaagctttttaaaagttagttttgagaattgagacacaatactaatactgtaggaattggtgaggccttgacttaaaactttctttgtactgtgatttccttttgggtgtattttgctaagtgaaacttgttaaattttttgttaactaaatttttttcttaaaataaagactttttcacaatgactggcacagattactcagcaaaagatagcaaaacgggtggttgaagataattcattttaatcgtaatgtattttagtgtgaatttaaaaatttcatacatcaaatctatgatctcccttatattcttatgatgaggctaaataaaagtctaataaaaatgttaaatatgtgaatggtggaaatggtgactagcagcacacattctgggaagcatcaaatagacacacggccccagccacctgcaacttatgtgcactgttgtaaaccattcagaattttcctgctaggcccttgatgctggagtcacatctgttgatagctggagaactttagtttcaagtactacattgtgaaagcaattattttgtttctagtttttataaaatgctgatttaaactttt

SEQ ID NO: 140504 - DNA, 2755 bp, Homo sapiens
  Payload ID: 7564
  Gene Symbol: HNRNPF
  Gene Name: heterogeneous nuclear ribonucleoprotein F
  Uniprot ID: P52597
  ENST ID: ENST00000443950
  CDS Start-End: 488-1735
cgccgctcgctccgccccccgcccggaagctcccgcccgagcccgcgcaggccctggggccgaccttcctgccgggccgggcggtccgaggctgctggagtgccgtgagcaggccgcgggaacgtcgccgtcaccttgtctcggggcctcggcgctgcttcccgccaaaacacgtttaccgcgcgcccgggcctcccaccttgcggaagggaccccaccaccacttggatttctgttgcaggttgagaacaaaaacatgcacctggagtttccccggagccctctgcgtggttgagcttcggtggaatttcggggctcttggctgccagccgcgcttgcctggtagcaacagaaaccagtcctgctcgcctccgtggacatttcattaccatccagaagtgtctcccactgaaggcatccgtggttgtttttaagccacaaaaaagccacacccaagatcacctgacacccaccctgacaagtgtccatgatgctgggccctgagggaggtgaaggctttgtggtcaagctccgtggcctgccctggtcctgctctgttgaggacgtgcagaacttcctctctgactgcacgattcatgatggggccgcaggtgtccatttcatctacactagagagggcaggcagagtggtgaggcttttgttgaacttggatcagaagatgatgtaaaaatggccctgaaaaaagacagggaaagcatgggacaccggtacattgaggtgttcaagtcccacagaaccgagatggattgggtgttgaagcacagtggtcccaacagtgccgacagcgccaacgatggcttcgtgcggcttcgaggactcccatttggatgcacaaaggaagaaattgttcagttcttctcagggttggaaattgtgccaaacgggatcacattgcctgtggaccccgaaggcaagattacaggggaagcgttcgtgcagtttgcctcgcaggagttagctgagaaggctctagggaaacacaaggagaggatagggcacaggtacattgaggtgtttaagagcagccaggaggaagttaggtcatactcagatccccctctgaagttcatgtccgtgcagcggccagggccctatgaccggcccgggactgccaggaggtacattggcatcgtgaagcaggcaggcctggaaaggatgaggcctggtgcctacagcacaggctacgggggctacgaggagtacagtggcctcagtgatggctacggcttcaccaccgacctgttcgggagagacctcagctactgtctctccggaatgtatgaccacagatacggcgacagtgagttcacagtgcagagcaccacaggccactgtgtccacatgaggggcctgccgtacaaagcgaccgagaacgacatttacaacttcttctctcctctcaaccctgtgagagtccatattgagattggcccagatggaagagtgacgggtgaagcagatgttgagtttgctactcatgaagaagctgtggcagctatgtccaaagacagggccaatatgcagcacagatatatagaactcttcttgaattcaacaacaggggccagcaatggggcgtatagcagccaggtgatgcaaggcatgggggtgtctgctgcccaggccacttacagtggcctggagagccagtcagtgagtggctgttacggggccggctacagtgggcagaacagcatgggtggctatgactagttttgttaggaacatttgagttacttcaatcattttcacaggcagccaacaagcaattaagagcagttataatagaggaagctgggggacccattttgcaccatgagtttgtgaaaaatctggattaaaaaattacctcttcagtgttttctcatgcaaaattttcttctagcatgtgataatgagtaaactaaaactattttcagcttttctcaattaacattttggtagtatacttcagagtgatgttatctaagtttaagtagtttaagtatgttaaatgtggatcttttacaccacatcacagtgaacacactggggagacgtgcttttttggaaaactcaaaggtgctagctccctgattcaaagaaatatttctcatgtttgttcattctagtttatattttcatttaaaatcctttaggttaagtttaagctttttaaaagttagttttgagaattgagacacaatactaatactgtaggaattggtgaggccttgacttaaaactttctttgtactgtgatttccttttgggtgtattttgctaagtgaaacttgttaaattttttgttaactaaatttttttcttaaaataaagactttttcacaatgactggcacagattactcagcaaaagatagcaaaacgggtggttgaagataattcattttaatcgtaatgtattttagtgtgaatttaaaaatttcatacatcaaatctatgatctcccttatattcttatgatgaggctaaataaaagtctaataaaaatgttaaatatgtgaatggtggaaatggtgactagcagcacacattctgggaagcatcaaatagacacacggccccagccacctgcaacttatgtgcactgttgtaaaccattcagaattttcctgctaggcccttgatgctggagtcacatctgttgatagctggagaactttagtttcaagtactacattgtgaaagcaattattttgtttctagtttttataaaatgctgatttaaactttt

SEQ ID NO: 140505 - DNA, 2676 bp, Homo sapiens
  Payload ID: 7564
  Gene Symbol: HNRNPF
  Gene Name: heterogeneous nuclear ribonucleoprotein F
  Uniprot ID: P52597
  ENST ID: ENST00000544000
  CDS Start-End: 409-1656
acgcgtttcccattggtgacatcttggcgggcccggcaatggcacttcctcctctgcaccccgtgacccacgtccggctgccggtcttggatcacgaggcctccgcttcccggactccggaccccgcgcctcctcggggccgacgggccagtccctggcgtggttgagaacaaaaacatgcacctggagtttccccggagccctctgcgtggttgagcttcggtggaatttcggggctcttggctgccagccgcgcttgcctggtagcaacagaaaccagtcctgctcgcctccgtggacatttcattaccatccagaagtgtctcccactgaaggcatccgtggttgtttttaagccacaaaaaagccacacccaagatcacctgacacccaccctgacaagtgtccatgatgctgggccctgagggaggtgaaggctttgtggtcaagctccgtggcctgccctggtcctgctctgttgaggacgtgcagaacttcctctctgactgcacgattcatgatggggccgcaggtgtccatttcatctacactagagagggcaggcagagtggtgaggcttttgttgaacttggatcagaagatgatgtaaaaatggccctgaaaaaagacagggaaagcatgggacaccggtacattgaggtgttcaagtcccacagaaccgagatggattgggtgttgaagcacagtggtcccaacagtgccgacagcgccaacgatggcttcgtgcggcttcgaggactcccatttggatgcacaaaggaagaaattgttcagttcttctcagggttggaaattgtgccaaacgggatcacattgcctgtggaccccgaaggcaagattacaggggaagcgttcgtgcagtttgcctcgcaggagttagctgagaaggctctagggaaacacaaggagaggatagggcacaggtacattgaggtgtttaagagcagccaggaggaagttaggtcatactcagatccccctctgaagttcatgtccgtgcagcggccagggccctatgaccggcccgggactgccaggaggtacattggcatcgtgaagcaggcaggcctggaaaggatgaggcctggtgcctacagcacaggctacgggggctacgaggagtacagtggcctcagtgatggctacggcttcaccaccgacctgttcgggagagacctcagctactgtctctccggaatgtatgaccacagatacggcgacagtgagttcacagtgcagagcaccacaggccactgtgtccacatgaggggcctgccgtacaaagcgaccgagaacgacatttacaacttcttctctcctctcaaccctgtgagagtccatattgagattggcccagatggaagagtgacgggtgaagcagatgttgagtttgctactcatgaagaagctgtggcagctatgtccaaagacagggccaatatgcagcacagatatatagaactcttcttgaattcaacaacaggggccagcaatggggcgtatagcagccaggtgatgcaaggcatgggggtgtctgctgcccaggccacttacagtggcctggagagccagtcagtgagtggctgttacggggccggctacagtgggcagaacagcatgggtggctatgactagttttgttaggaacatttgagttacttcaatcattttcacaggcagccaacaagcaattaagagcagttataatagaggaagctgggggacccattttgcaccatgagtttgtgaaaaatctggattaaaaaattacctcttcagtgttttctcatgcaaaattttcttctagcatgtgataatgagtaaactaaaactattttcagcttttctcaattaacattttggtagtatacttcagagtgatgttatctaagtttaagtagtttaagtatgttaaatgtggatcttttacaccacatcacagtgaacacactggggagacgtgcttttttggaaaactcaaaggtgctagctccctgattcaaagaaatatttctcatgtttgttcattctagtttatattttcatttaaaatcctttaggttaagtttaagctttttaaaagttagttttgagaattgagacacaatactaatactgtaggaattggtgaggccttgacttaaaactttctttgtactgtgatttccttttgggtgtattttgctaagtgaaacttgttaaattttttgttaactaaatttttttcttaaaataaagactttttcacaatgactggcacagattactcagcaaaagatagcaaaacgggtggttgaagataattcattttaatcgtaatgtattttagtgtgaatttaaaaatttcatacatcaaatctatgatctcccttatattcttatgatgaggctaaataaaagtctaataaaaatgttaaatatgtgaatggtggaaatggtgactagcagcacacattctgggaagcatcaaatagacacacggccccagccacctgcaacttatgtgcactgttgtaaaccattcagaattttcctgctaggcccttgatgctggagtcacatctgttgatagctggagaactttagtttcaagtactacattgtgaaagcaattattttgtttctagtttttataaaatgctgatttaaactttt

SEQ ID NO: 140506 - DNA, 2114 bp, Homo sapiens
  Payload ID: 7565
  Gene Symbol: HNRNPH1
  Gene Name: heterogeneous nuclear ribonucleoprotein H1 (H)
  ENST ID: ENST00000329433
  CDS Start-End: 36-1454
gcagtttgtttcgacgccggaccgcgtaagagacgatgatgttgggcacggaaggtggagagggattcgtggtgaaggtccggggcttgccctggtcttgctcggccgatgaagtgcagaggtttttttctgactgcaaaattcaaaatggggctcaaggtattcgtttcatctacaccagagaaggcagaccaagtggcgaggcttttgttgaacttgaatcagaagatgaagtcaaattggccctgaaaaaagacagagaaactatgggacacagatatgttgaagtattcaagtcaaacaacgttgaaatggattgggtgttgaagcatactggtccaaatagtcctgacacggccaatgatggctttgtacggcttagaggacttccctttggatgtagcaaggaagaaattgttcagttcttctcagggttggaaatcgtgccaaatgggataacattgccggtggacttccaggggaggagtacgggggaggccttcgtgcagtttgcttcacaggaaatagctgaaaaggctctaaagaaacacaaggaaagaatagggcacaggtatattgaaatctttaagagcagtagagctgaagttagaactcattatgatccaccacgaaagcttatggccatgcagcggccaggtccttatgacagacctggggctggtagagggtataacagcattggcagaggagctggctttgagaggatgaggcgtggtgcttatggtggaggctatggaggctatgatgattacaatggctataatgatggctatggatttgggtcagatagatttggaagagacctcaattactgtttttcaggaatgtctgatcacagatacggggatggtggctctactttccagagcacaacaggacactgtgtacacatgcggggattaccttacagagctactgagaatgacatttataattttttttcaccgctcaaccctgtgagagtacacattgaaattggtcctgatggcagagtaactggtgaagcagatgtcgagttcgcaactcatgaagatgctgtggcagctatgtcaaaagacaaagcaaatatgcaacacagatatgtagaactcttcttgaattctacagcaggagcaagcggtggtgcttacgaacacagatatgtagaactcttcttgaattctacagcaggagcaagcggtggtgcttatggtagccaaatgatgggaggcatgggcttgtcaaaccagtccagctacgggggcccagccagccagcagctgagtgggggttacggaggcggctacggtggccagagcagcatgagtggatacggtaaccaaggagcagtgaacagcagctactacagtagtggaagccgtgcatctatgggcgtgaacggaatgggagggttgtctagcatgtccagtatgagtggtggatggggaatgtaattgatcgatcctgatcactgactcttggtcaaccttttttttttttttttttttttctttaagaaaacttcagtttaacagtttctgcaatacaagcttgtgatttatgcttactctaagtggaaatcaggattgttatgaagacttaaggcccagtatttttgaatacaatactcatctaggatgtaacagtgaagctgagtaaactataactgttaaacttaagttccagcttttctcaagttagttataggatgtacttaagcagtaagcgtatttaggtaaaagcagttgaattatgttaaatgttgccctttgccacgttaaattgaacactgttttggatgcatgttgaaagacatgcttttatttttttgtaaaacaatataggagctgtgtctactattaaaagtgaaacattttggcatgtttgttaattctagtttcatttaataacctgtaaggcacgtaagtttaagctttttttttttttaagttaatgggaaaaatttgagacgcaataccaatacttaggattttggtcttggtgtttgtatgaaattctgaggccttgatttaaatctttcattgtattgtgatttccttttaggtatattgcgctaagtgaaacttgtcaaataaatcctccttttaaaaact

SEQ ID NO: 140507 - DNA, 3667 bp, Homo sapiens
  Payload ID: 7565
  Gene Symbol: HNRNPH1
  Gene Name: heterogeneous nuclear ribonucleoprotein H1 (H)
  Uniprot ID: P31943
  ENST ID: ENST00000356731
  CDS Start-End: 1537-2886
gtgctgctagaaaccacgaacattagtcatctcgcagcatgtgtgcacatggggtgacccgggggcctcctcgaatgcagcgtctacgcctggtgaatggacgcactcttaccaattctgctctgggagatgcagcggtaacctaccgagcgcagaggccggcgcgcacccgtggagcccgcgctcgcgatccctcctcgtgccagggccccagggcagtcaaggcctgccgaccgttaggcgggtcaaggggtacacagggtgcgaattcgttaggcaaaagctgggtacaggcgcgagccacaggcacggaaacctcgcgccgaccggggccctaggcccgacgacggcaggtaaggggaagtggaggcacacagggctgggacgtgccccaggcaccatacgggtggcttcgggcgcgggacgtccgcagccccgcagctcccaggacgttcgacaatctgcagctgaccagcttcggccggtttggggataaagggaagacaggcggcgcggggagtgggaacgcctgaaggccgcgcccctcctttcaggtcggccaggagcgcgccggtaagagcctgggggcaaggggtagaaagacgcccacctcatcacaacccagagctcgggactcctatacagtcccatagggaacaggcggccgccattcccctcccccacgctggcgggtaaggctagagaacggtttcaaggaagacgcatgcgcatgaaataattataaaccgctaggactccgaagttcaatattcgcgggaaggcgcaggcgcaacaaaaagcccggcgggtttatgggtgggggtgctgagcccaaaacccaagcgtgtaataatccgccggcgggaggtgggctggctcttgaaattacgcatgcgccagagctctttgtgacgcaacggggcggtgcgggcagctggctgcgcgtgcgcagaactcgcacaagggaccttatttaggttgcgcaggcgcccgctggccatttcgtcttagccacgcagaagtcgcgtgtctaggtgagtcgcggtgggtcctcgcttgcagttcagcgaccacggtgggtaccgtttttgcgaggattgtttgtccccatatctctgggagggccacggggaccttggcgagctgcaggctgccgtcgagagccgcgagtggttcgctgaatctcggcaccgccgctgaggcctgcaggccgcgccgactctattgtgtgagaagtcggaggaggcggagcggaagcggccgccgccatttcctttcctctacgctggctctcggcccgggcccccacggttcggggcgccgacagctgttgctcaggacagctttgggggtccggtcgccggacgaggaggtgttggagtcgccggggtgggtgcatccgcccggtttttgctccgtgggggggcggtgcgggcccgggcgcgcctcggaggcgaaggacagcttaattggcgctctcagttctggtcctccccgctttgcagtttgtttcgacgccggaccgcgtaagagacgatgatgttgggcacggaaggtggagagggattcgtggtgaaggtccggggcttgccctggtcttgctcggccgatgaagtgcagaggtttttttctgactgcaaaattcaaaatggggctcaaggtattcgtttcatctacaccagagaaggcagaccaagtggcgaggcttttgttgaacttgaatcagaagatgaagtcaaattggccctgaaaaaagacagagaaactatgggacacagatatgttgaagtattcaagtcaaacaacgttgaaatggattgggtgttgaagcatactggtccaaatagtcctgacacggccaatgatggctttgtacggcttagaggacttccctttggatgtagcaaggaagaaattgttcagttcttctcagggttggaaatcgtgccaaatgggataacattgccggtggacttccaggggaggagtacgggggaggccttcgtgcagtttgcttcacaggaaatagctgaaaaggctctaaagaaacacaaggaaagaatagggcacaggtatattgaaatctttaagagcagtagagctgaagttagaactcattatgatccaccacgaaagcttatggccatgcagcggccaggtccttatgacagacctggggctggtagagggtataacagcattggcagaggagctggctttgagaggatgaggcgtggtgcttatggtggaggctatggaggctatgatgattacaatggctataatgatggctatggatttgggtcagatagatttggaagagacctcaattactgtttttcaggaatgtctgatcacagatacggggatggtggctctactttccagagcacaacaggacactgtgtacacatgcggggattaccttacagagctactgagaatgacatttataattttttttcaccgctcaaccctgtgagagtacacattgaaattggtcctgatggcagagtaactggtgaagcagatgtcgagttcgcaactcatgaagatgctgtggcagctatgtcaaaagacaaagcaaatatgcaacacagatatgtagaactcttcttgaattctacagcaggagcaagcggtggtgcttacgaacacagatatgtagaactcttcttgaattctacagcaggagcaagcggtggtgcttatggtagccaaatgatgggaggcatgggcttgtcaaaccagtccagctacgggggcccagccagccagcagctgagtgggggttacggaggcggctacggtggccagagcagcatgagtggatacgaccaagttttacaggaaaactccagtgattttcaatcaaacattgcataggtaaccaaggagcagtgaacagcagctactacagtagtggaagccgtgcatctatgggcgtgaacggaatgggagggttgtctagcatgtccagtatgagtggtggatggggaatgtaattgatcgatcctgatcactgactcttggtcaaccttttttttttttttttttttttctttaagaaaacttcagtttaacagtttctgcaatacaagcttgtgatttatgcttactctaagtggaaatcaggattgttatgaagacttaaggcccagtatttttgaatacaatactcatctaggatgtaacagtgaagctgagtaaactataactgttaaacttaagttccagcttttctcaagttagttataggatgtacttaagcagtaagcgtatttaggtaaaagcagttgaattatgttaaatgttgccctttgccacgttaaattgaacactgttttggatgcatgttgaaagacatgcttttatttttttgtaaaacaatataggagctgtgtctactattaaaagtgaaacattttggcatgtttgttaattctagtttcatttaataacctgtaaggcacgtaagtttaagctttttttttttttaagttaatgggaaaaatttgagacgcaataccaatacttaggattttggtcttggtgtttgtatgaaattctgaggccttgatttaaatctttcattgtattgtgatttccttttaggtatattgcgctaagtgaaacttgtcaaataaatcctccttttaaaaactgc

SEQ ID NO: 140508 - DNA, 2279 bp, Homo sapiens
  Payload ID: 7565
  Gene Symbol: HNRNPH1
  Gene Name: heterogeneous nuclear ribonucleoprotein H1 (H)
  Uniprot ID: P31943
  ENST ID: ENST00000393432
  CDS Start-End: 148-1497
acaagggaccttatttaggttgcgcaggcgcccgctggccatttcgtcttagccacgcagaagtcgcgtgtctaggtgagtcgcggtgggtcctcgcttgcagttcagcgaccacgtttgtttcgacgccggaccgcgtaagagacgatgatgttgggcacggaaggtggagagggattcgtggtgaaggtccggggcttgccctggtcttgctcggccgatgaagtgcagaggtttttttctgactgcaaaattcaaaatggggctcaaggtattcgtttcatctacaccagagaaggcagaccaagtggcgaggcttttgttgaacttgaatcagaagatgaagtcaaattggccctgaaaaaagacagagaaactatgggacacagatatgttgaagtattcaagtcaaacaacgttgaaatggattgggtgttgaagcatactggtccaaatagtcctgacacggccaatgatggctttgtacggcttagaggacttccctttggatgtagcaaggaagaaattgttcagttcttctcagggttggaaatcgtgccaaatgggataacattgccggtggacttccaggggaggagtacgggggaggccttcgtgcagtttgcttcacaggaaatagctgaaaaggctctaaagaaacacaaggaaagaatagggcacaggtatattgaaatctttaagagcagtagagctgaagttagaactcattatgatccaccacgaaagcttatggccatgcagcggccaggtccttatgacagacctggggctggtagagggtataacagcattggcagaggagctggctttgagaggatgaggcgtggtgcttatggtggaggctatggaggctatgatgattacaatggctataatgatggctatggatttgggtcagatagatttggaagagacctcaattactgtttttcaggaatgtctgatcacagatacggggatggtggctctactttccagagcacaacaggacactgtgtacacatgcggggattaccttacagagctactgagaatgacatttataattttttttcaccgctcaaccctgtgagagtacacattgaaattggtcctgatggcagagtaactggtgaagcagatgtcgagttcgcaactcatgaagatgctgtggcagctatgtcaaaagacaaagcaaatatgcaacacagatatgtagaactcttcttgaattctacagcaggagcaagcggtggtgcttacgaacacagatatgtagaactcttcttgaattctacagcaggagcaagcggtggtgcttatggtagccaaatgatgggaggcatgggcttgtcaaaccagtccagctacgggggcccagccagccagcagctgagtgggggttacggaggcggctacggtggccagagcagcatgagtggatacgaccaagttttacaggaaaactccagtgattttcaatcaaacattgcataggtaaccaaggagcagtgaacagcagctactacagtagtggaagccgtgcatctatgggcgtgaacggaatgggagggttgtctagcatgtccagtatgagtggtggatggggaatgtaattgatcgatcctgatcactgactcttggtcaaccttttttttttttttttttttttctttaagaaaacttcagtttaacagtttctgcaatacaagcttgtgatttatgcttactctaagtggaaatcaggattgttatgaagacttaaggcccagtatttttgaatacaatactcatctaggatgtaacagtgaagctgagtaaactataactgttaaacttaagttccagcttttctcaagttagttataggatgtacttaagcagtaagcgtatttaggtaaaagcagttgaattatgttaaatgttgccctttgccacgttaaattgaacactgttttggatgcatgttgaaagacatgcttttatttttttgtaaaacaatataggagctgtgtctactattaaaagtgaaacattttggcatgtttgttaattctagtttcatttaataacctgtaaggcacgtaagtttaagctttttttttttttaagttaatgggaaaaatttgagacgcaataccaatacttaggattttggtcttggtgtttgtatgaaattctgaggccttgatttaaatctttcattgtattgtgatttccttttaggtatattgcgctaagtgaaacttgtcaaataaatcctccttttaaaaactgca

SEQ ID NO: 140509 - DNA, 2248 bp, Homo sapiens
  Payload ID: 7565
  Gene Symbol: HNRNPH1
  Gene Name: heterogeneous nuclear ribonucleoprotein H1 (H)
  Uniprot ID: P31943
  ENST ID: ENST00000442819
  CDS Start-End: 118-1467
gcagaactcgcacaagggaccttatttaggttgcgcaggcgcccgctggccatttcgtcttagccacgcagaagtcgcgtgtctagtttgtttcgacgccggaccgcgtaagagacgatgatgttgggcacggaaggtggagagggattcgtggtgaaggtccggggcttgccctggtcttgctcggccgatgaagtgcagaggtttttttctgactgcaaaattcaaaatggggctcaaggtattcgtttcatctacaccagagaaggcagaccaagtggcgaggcttttgttgaacttgaatcagaagatgaagtcaaattggccctgaaaaaagacagagaaactatgggacacagatatgttgaagtattcaagtcaaacaacgttgaaatggattgggtgttgaagcatactggtccaaatagtcctgacacggccaatgatggctttgtacggcttagaggacttccctttggatgtagcaaggaagaaattgttcagttcttctcagggttggaaatcgtgccaaatgggataacattgccggtggacttccaggggaggagtacgggggaggccttcgtgcagtttgcttcacaggaaatagctgaaaaggctctaaagaaacacaaggaaagaatagggcacaggtatattgaaatctttaagagcagtagagctgaagttagaactcattatgatccaccacgaaagcttatggccatgcagcggccaggtccttatgacagacctggggctggtagagggtataacagcattggcagaggagctggctttgagaggatgaggcgtggtgcttatggtggaggctatggaggctatgatgattacaatggctataatgatggctatggatttgggtcagatagatttggaagagacctcaattactgtttttcaggaatgtctgatcacagatacggggatggtggctctactttccagagcacaacaggacactgtgtacacatgcggggattaccttacagagctactgagaatgacatttataattttttttcaccgctcaaccctgtgagagtacacattgaaattggtcctgatggcagagtaactggtgaagcagatgtcgagttcgcaactcatgaagatgctgtggcagctatgtcaaaagacaaagcaaatatgcaacacagatatgtagaactcttcttgaattctacagcaggagcaagcggtggtgcttacgaacacagatatgtagaactcttcttgaattctacagcaggagcaagcggtggtgcttatggtagccaaatgatgggaggcatgggcttgtcaaaccagtccagctacgggggcccagccagccagcagctgagtgggggttacggaggcggctacggtggccagagcagcatgagtggatacgaccaagttttacaggaaaactccagtgattttcaatcaaacattgcataggtaaccaaggagcagtgaacagcagctactacagtagtggaagccgtgcatctatgggcgtgaacggaatgggagggttgtctagcatgtccagtatgagtggtggatggggaatgtaattgatcgatcctgatcactgactcttggtcaaccttttttttttttttttttttttctttaagaaaacttcagtttaacagtttctgcaatacaagcttgtgatttatgcttactctaagtggaaatcaggattgttatgaagacttaaggcccagtatttttgaatacaatactcatctaggatgtaacagtgaagctgagtaaactataactgttaaacttaagttccagcttttctcaagttagttataggatgtacttaagcagtaagcgtatttaggtaaaagcagttgaattatgttaaatgttgccctttgccacgttaaattgaacactgttttggatgcatgttgaaagacatgcttttatttttttgtaaaacaatataggagctgtgtctactattaaaagtgaaacattttggcatgtttgttaattctagtttcatttaataacctgtaaggcacgtaagtttaagctttttttttttttaagttaatgggaaaaatttgagacgcaataccaatacttaggattttggtcttggtgtttgtatgaaattctgaggccttgatttaaatctttcattgtattgtgatttccttttaggtatattgcgctaagtgaaacttgtcaaataaatcctccttttaaaaactgc

SEQ ID NO: 140510 - DNA, 602 bp, Homo sapiens
  Payload ID: 7565
  Gene Symbol: HNRNPH1
  Gene Name: heterogeneous nuclear ribonucleoprotein H1 (H)
  ENST ID: ENST00000506721
  CDS Start-End: 90-602
atttcgtcttagccacgcagaagtcgcgtgtctagttctggtcctccccgctttgcagtttgtttcgacgccggaccgcgtaagagacgatgatgttgggcacggaaggtggagagggattcgtggtgaaggtccggggcttgccctggtcttgctcggccgatgaagtgcagaggtttttttctgactgcaaaattcaaaatggggctcaaggtattcgtttcatctacaccagagaaggcagaccaagtggcgaggcttttgttgaacttgaatcagaagatgaagtcaaattggccctgaaaaaagacagagaaactatgggacacagatatgttgaagtattcaagtcaaacaacgttgaaatggattgggtgttgaagcatactggtccaaatagtcctgacacggccaatgatggctttgtacggcttagaggacttccctttggatgtagcaaggaagaaattgttcagttcttctcaggtatattgaaatctttaagagcagtagagctgaagttagaactcattatgatccaccacgaaagcttatggccatgcagcggccaggtccttatgacagacctggggctggtagag

SEQ ID NO: 140511 - DNA, 850 bp, Homo sapiens
  Payload ID: 7565
  Gene Symbol: HNRNPH1
  Gene Name: heterogeneous nuclear ribonucleoprotein H1 (H)
  ENST ID: ENST00000515158
  CDS Start-End: 459-850
agggaccttatttaggttgcgcaggcgcccgctggccatttcgtcttagccacgcagaagtcgcgtgtctaggtgagtcgcggtgggtcctcgcttgcagttcagcgaccacggtgggtaccgtttttgcgaggattgtttgtccccatatctctgggagggccacggggaccttggcgagctgcaggctgccgtcgagagccgcgagtggttcgctgaatctcggcaccgccgctgaggcctgcaggccgcgccgactctattgtgtgagaagtcggaggaggcggagcggaagcggccgccgccatttcctttcctctacgctggctctcggcccgggcccccacggttcggggcgccgacagctgttgctcaggacagctttgggggtccggtcgccggacgaggaggtgttggagtcgccgggtttgtttcgacgccggaccgcgtaagagacgatgatgttgggcacggaaggtggagagggattcgtggtgaaggtccggggcttgccctggtcttgctcggccgatgaagtgcagaggtttttttctgactgcaaaattcaaaatggggctcaaggtattcgtttcatctacaccagagaaggcagaccaagtggcgaggcttttgttgaacttgaatcagaagatgaagtcaaattggccctgaaaaaagacagagaaactatgggacacagatatgttgaagtattcaagtcaaacaacgttgaaatggattgggtgttgaagcatactggtccaaatagtcctgacacggccaatgatggctttgtacggcttagaggacttccctttggatgtagcaaggaagaaattgttcagttctt

SEQ ID NO: 140512 - DNA, 792 bp, Homo sapiens
  Payload ID: 7565
  Gene Symbol: HNRNPH1
  Gene Name: heterogeneous nuclear ribonucleoprotein H1 (H)
  ENST ID: ENST00000504779
  CDS Start-End: 67-189
atttcgtcttagccacgcagaagtcgcgtgtctagtttgtttcgacgccggaccgcgtaagagacgatgatgttgggcacggaaggtggagagggattcgtggtgaaggtccggggcttgccctggtcttgctcggccgatgaagtgcagaggtttttttctgcgttggtaacggaaagcgacctgtaaaacaagaaccaagtacgctggaagccgccttgcagggggcaacactgggtttggcttcagctgtgcaacttggagcattttagcttggtaacactgatcccctttcagactgcaaaattcaaaatggggctcaaggtattcgtttcatctacaccagagaaggcagaccaagtggcgaggcttttgttgaacttgaatcagaagatgaagtcaaattggccctgaaaaaagacagagaaactatgggacacagatatgttgaagtattcaagtcaaacaacgttgaaatggattgggtgttgaagcatactggtccaaatagtcctgacacggccaatgatggctttgtacggcttagaggacttccctttggatgtagcaaggaagaaattgttcagttcttctcaggtatattgaaatctttaagagcagtagagctgaagttagaactcattatgatccaccacgaaagcttatggccatgcagcggccaggtccttatgacagacctggggctggtagagggtataacagcattggcagaggagctggctttgagaggatgaggcgtggtgcttatggtggaggctatggaggctatga

SEQ ID NO: 140513 - DNA, 620 bp, Homo sapiens
  Payload ID: 7565
  Gene Symbol: HNRNPH1
  Gene Name: heterogeneous nuclear ribonucleoprotein H1 (H)
  ENST ID: ENST00000510431
  CDS Start-End: 136-620
atttaggttgcgcaggcgcccgctggccatttcgtcttagccacgcagaagtcgcgtgtctaggtgagtcgcggtgggtcctcgcttgcagttcagcgaccacgtttgtttcgacgccggaccgcgtaagagacgatgatgttgggcacggaaggtggagagggattcgtggtgaaggtccggggcttgccctggtcttgctcggccgatgaagtgcagaggtttttttctgactgcaaaattcaaaatggggctcaaggtattcgtttcatctacaccagagaaggcagaccaagtggcgaggcttttgttgaacttgaatcagaagatgaagtcaaattggccctgaaaaaagacagagaaactatgggacacagatatgttgaagtattcaagtcaaacaacgttgaaatggattgggtgttgaagcatactggtccaaatagtcctgacacggccaatgatggctttgtacggcttagaggacttccctttggatgtagcaaggaagaaattgttcagttcttctcaggtatattgaaatctttaagagcagtagagctgaagttagaactcattatgatccaccacgaaagcttatggccatgcagcggccaggt

SEQ ID NO: 140514 - DNA, 1155 bp, Homo sapiens
  Payload ID: 7565
  Gene Symbol: HNRNPH1
  Gene Name: heterogeneous nuclear ribonucleoprotein H1 (H)
  ENST ID: ENST00000505811
  CDS Start-End: 520-1155
acgcctggtgaatggacgcactcttaccaattctgctctgggagatgcagcggtaacctaccgagcgcagaggccggcgcgcacccgtggagcccgcgctcgcgatccctcctcgtgccagggccccagggcagtcaaggcctgccgaccgttaggcgggtcaaggggtacacagggtgcgaattcgttaggcaaaagctgggtacaggcgcgagccacaggcacggaaacctcgcgccgaccggggccctaggcccgacgacggcaggtaaggggaagtggaggcacacagggctgggacgtgccccaggcaccatacgggtggcttcgggcgcgggacgtccgcagccccgcagctcccaggacgttcgacaatctgcagctgaccagcttcggccggtttggggataaagggaagacaggcggcgcggggagtgggaacgcctgaaggccgcgcccctcctttcaggtcggccaggagcgcgccgtttgtttcgacgccggaccgcgtaagagacgatgatgttgggcacggaaggtggagagggattcgtggtgaaggtccggggcttgccctggtcttgctcggccgatgaagtgcagaggtttttttctgactgcaaaattcaaaatggggctcaaggtattcgtttcatctacaccagagaaggcagaccaagtggcgaggcttttgttgaacttgaatcagaagatgaagtcaaattggccctgaaaaaagacagagaaactatgggacacagatatgttgaagtattcaagtcaaacaacgttgaaatggattgggtgttgaagcatactggtccaaatagtcctgacacggccaatgatggctttgtacggcttagaggacttccctttggatgtagcaaggaagaaattgttcagttcttctcagggttggaaatcgtgccaaatgggataacattgccggtggacttccaggggaggagtacgggggaggccttcgtgcagtttgcttcacaggaaatagctgaaaaggctctaaagaaacacaaggaaagaatagggcacaggtatattgaaatctttaagagcagtagagctgaagttagaactcattatgatccaccacgaaagcttatggccatgcagcggccaggtccttatgacaga

SEQ ID NO: 140515 - DNA, 690 bp, Homo sapiens
  Payload ID: 7565
  Gene Symbol: HNRNPH1
  Gene Name: heterogeneous nuclear ribonucleoprotein H1 (H)
  ENST ID: ENST00000515714
  CDS Start-End: 438-690
acgcctggtgaatggacgcactcttaccaattctgctctgggagatgcagcggtaacctaccgagcgcagaggccggcgcgcacccgtggagcccgcgctcgcgatccctcctcgtgccagggccccagggcagtcaaggcctgccgaccgttaggcgggtcaaggggtacacagggtgcgaattcgttaggcaaaagctgggtacaggcgcgagccacaggcacggaaacctcgcgccgaccggggccctaggcccgacgacggcaggtcggccaggagcgcgccggtaagagcctgggggcaaggggtagaaagacgcccacctcatcacaacccagagctcgggactcctatacagtcccatagggaacaggcggccgccattcccctcccccacgctggcggtttgtttcgacgccggaccgcgtaagagacgatgatgttgggcacggaaggtggagagggattcgtggtgaaggtccggggcttgccctggtcttgctcggccgatgaagtgcagaggtttttttctgactgcaaaattcaaaatggggctcaaggtattcgtttcatctacaccagagaaggcagaccaagtggcgaggcttttgttgaacttgaatcagaagatgaagtcaaattggccctgaaaaaagacagagaaactatgggacacagatatgttgaag

SEQ ID NO: 140516 - DNA, 610 bp, Homo sapiens
  Payload ID: 7565
  Gene Symbol: HNRNPH1
  Gene Name: heterogeneous nuclear ribonucleoprotein H1 (H)
  ENST ID: ENST00000508103
  CDS Start-End: 95-610
atttaggttgcgcaggcgcccgctggccatttcgtcttagccacgcagaagtcgcgtgtctagtttgtttcgacgccggaccgcgtaagagacgatgatgttgggcacggaaggtggagagggattcgtggtgaaggtccggggcttgccctggtcttgctcggccgatgaagtgcagaggtttttttctgactgcaaaattcaaaatggggctcaaggtattcgtttcatctacaccagagaaggcagaccaagtggcgaggcttttgttgaacttgaatcagaagatgaagtcaaattggccctgaaaaaagacagagaaactatgggacacagatatgttgaagtattcaagtcaaacaacgttgaaatggattgggtgttgaagcatactggtccaaatagtcctgacacggccaatgatggctttgtacggcttagaggacttccctttggatgtagcaaggaagaaattgttcagttcttctcaggtatattgaaatctttaagagcagtagagctgaagttagaactcattatgatccaccacgaaagcttatggccatgcagcggccaggtccttatgacagacctggggctggtagagggt

SEQ ID NO: 140517 - DNA, 1996 bp, Homo sapiens
  Payload ID: 7565
  Gene Symbol: HNRNPH1
  Gene Name: heterogeneous nuclear ribonucleoprotein H1 (H)
  ENST ID: ENST00000510678
  CDS Start-End: 37-591
tgcagtttgtttcgacgccggaccgcgtaagagacgatgatgttgggcacggaaggtggagagggattcgtggtgaaggtccggggcttgccctggtcttgctcggccgatgaagtgcagaggtttttttctgactgcaaaattcaaaatggggctcaaggtattcgtttcatctacaccagagaaggcagaccaagtggcgaggcttttgttgaacttgaatcagaagatgaagtcaaattggccctgaaaaaagacagagaaactatgggacacagatatgttgaagtattcaagtcaaacaacgttgaaatggattgggtgttgaagcatactggtccaaatagtcctgacacggccaatgatggctttgtacggcttagaggacttccctttggatgtagcaaggaagaaattgttcagttcttctcaggtatattgaaatctttaagagcagtagagctgaagttagaactcattatgatccaccacgaaagcttatggccatgcagcggccaggtccttatgacagacctggggctggtagagggtataacagcattggcagaggagctggctttgagaggatgaggcgtggtgcttatggtggaggctatggaggctatgatgattacaatggctataatgatggctatggatttgggtcagatagatttggaagagacctcaattactgtttttcaggaatgtctgatcacagatacggggatggtggctctactttccagagcacaacaggacactgtgtacacatgcggggattaccttacagagctactgagaatgacatttataattttttttcaccgctcaaccctgtgagagtacacattgaaattggtcctgatggcagagtaactggtgaagcagatgtcgagttcgcaactcatgaagatgctgtggcagctatgtcaaaagacaaagcaaatatgcaacacagatatgtagaactcttcttgaattctacagcaggagcaagcggtggtgcttacgaacacagatatgtagaactcttcttgaattctacagcaggagcaagcggtggtgcttatgcaaaccagtccagctacgggggcccagccagccagcagctgagtgggggttacggaggcggctacggtggccagagcagcatgagtggatacgaccaagttttacaggaaaactccagtgattttcaatcaaacattgcataggtaaccaaggagcagtgaacagcagctactacagtagtggaagccgtgcatctatgggcgtgaacggaatgggagggttgtctagcatgtccagtatgagtggtggatggggaatgtaattgatcgatcctgatcactgactcttggtcaaccttttttttttttttttttttttctttaagaaaacttcagtttaacagtttctgcaatacaagcttgtgatttatgcttactctaagtggaaatcaggattgttatgaagacttaaggcccagtatttttgaatacaatactcatctaggatgtaacagtgaagctgagtaaactataactgttaaacttaagttccagcttttctcaagttagttataggatgtacttaagcagtaagcgtatttaggtaaaagcagttgaattatgttaaatgttgccctttgccacgttaaattgaacactgttttggatgcatgttgaaagacatgcttttatttttttgtaaaacaatataggagctgtgtctactattaaaagtgaaacattttggcatgtttgttaattctagtttcatttaataacctgtaaggcacgtaagtttaagctttttttttttttaagttaatgggaaaaatttgagacgcaataccaatacttaggattttggtcttggtgtttgtatgaaattctgaggccttgatttaaatctttcattgtattgtgatttccttttaggtatattgcgctaagtgaaacttgtcaaataaatcctccttttaaaaact

SEQ ID NO: 140518 - DNA, 2105 bp, Homo sapiens
  Payload ID: 7565
  Gene Symbol: HNRNPH1
  Gene Name: heterogeneous nuclear ribonucleoprotein H1 (H)
  ENST ID: ENST00000510411
  CDS Start-End: 37-1326
tgcagtttgtttcgacgccggaccgcgtaagagacgatgatgttgggcacggaaggtggagagggattcgtggtgaaggtccggggcttgccctggtcttgctcggccgatgaagtgcagaggtttttttctgactgcaaaattcaaaatggggctcaaggtattcgtttcatctacaccagagaaggcagaccaagtggcgaggcttttgttgaacttgaatcagaagatgaagtcaaattggccctgaaaaaagacagagaaactatgggacacagatatgttgaagtattcaagtcaaacaacgttgaaatggattgggtgttgaagcatactggtccaaatagtcctgacacggccaatgatggctttgtacggcttagaggacttccctttggatgtagcaaggaagaaattgttcagttcttctcagggttggaaatcgtgccaaatgggataacattgccggtggacttccaggggaggagtacgggggaggccttcgtgcagtttgcttcacaggaaatagctgaaaaggctctaaagaaacacaaggaaagaatagggcacaggtatattgaaatctttaagagcagtagagctgaagttagaactcattatgatccaccacgaaagcttatggccatgcagcggccaggtccttatgacagacctggggctggtagagggtataacagcattggcagaggagctggctttgagaggatgaggcgtggtgcttatggtggaggctatggaggctatgatgattacaatggctataatgatggctatggatttgggtcagatagatttggaagagacctcaattactgtttttcaggaatgtctgatcacagatacggggatggtggctctactttccagagcacaacaggacactgtgtacacatgcggggattaccttacagagctactgagaatgacatttataattttttttcaccgctcaaccctgtgagagtacacattgaaattggtcctgatggcagagtaactggtgaagcagatgtcgagttcgcaactcatgaagatgctgtggcagctatgtcaaaagacaaagcaaatatgcaacacagatatgtagaactcttcttgaattctacagcaggagcaagcggtggtgcttacggtagccaaatgctaggaggcatgggtttgtcaaaccagtccagctacgggggcccagccagccagcagctgagtgggggttacggaggcggctacggtggccagagcagcatgagtggatacgaccaagttttacaggaaaactccagtgattttcaatcaaacattgcataggtaaccaaggagcagtgaacagcagctactacagtagtggaagccgtgcatctatgggcgtgaacggaatgggagggttgtctagcatgtccagtatgagtggtggatggggaatgtaattgatcgatcctgatcactgactcttggtcaaccttttttttttttttttttttttctttaagaaaacttcagtttaacagtttctgcaatacaagcttgtgatttatgcttactctaagtggaaatcaggattgttatgaagacttaaggcccagtatttttgaatacaatactcatctaggatgtaacagtgaagctgagtaaactataactgttaaacttaagttccagcttttctcaagttagttataggatgtacttaagcagtaagcgtatttaggtaaaagcagttgaattatgttaaatgttgccctttgccacgttaaattgaacactgttttggatgcatgttgaaagacatgcttttatttttttgtaaaacaatataggagctgtgtctactattaaaagtgaaacattttggcatgtttgttaattctagtttcatttaataacctgtaaggcacgtaagtttaagctttttttttttttaagttaatgggaaaaatttgagacgcaataccaatacttaggattttggtcttggtgtttgtatgaaattctgaggccttgatttaaatctttcattgtattgtgatttccttttaggtatattgcgctaagtgaaacttgtcaaataaatcctccttttaaaaact

SEQ ID NO: 140519 - DNA, 805 bp, Homo sapiens
  Payload ID: 7565
  Gene Symbol: HNRNPH1
  Gene Name: heterogeneous nuclear ribonucleoprotein H1 (H)
  ENST ID: ENST00000513225
  CDS Start-End: 316-805
ctcgaatgcagcgtctacgcctggtgaatggacgcactcttaccaattctgctctgggagatgcagcggtaacctaccgagcgcagaggccggcgcgcacccgtggagcccgcgctcgcgatccctcctcgtgccagggccccagggcagtcaaggcctgccgaccgttaggcgggtcaaggggtacacagggtgcgaattcgttaggcaaaagctgggtacaggcgcgagccacaggcacggaaacctcgcgccgaccggggccctaggcccgacgacggcagtttgtttcgacgccggaccgcgtaagagacgatgatgttgggcacggaaggtggagagggattcgtggtgaaggtccggggcttgccctggtcttgctcggccgatgaagtgcagaggtttttttctgactgcaaaattcaaaatggggctcaaggtattcgtttcatctacaccagagaaggcagaccaagtggcgaggcttttgttgaacttgaatcagaagatgaagtcaaattggccctgaaaaaagacagagaaactatgggacacagatatgttgaagtattcaagtcaaacaacgttgaaatggattgggtgttgaagcatactggtccaaatagtcctgacacggccaatgatggctttgtacggcttagaggacttccctttggatgtagcaaggaagaaattgttcagttcttctcagggttggaaatcgtgccaaatgggataacattgccggtggacttccaggggaggagtacgggggaggccttcgtgcagtttgcttcacaggaaa

SEQ ID NO: 140520 - DNA, 569 bp, Homo sapiens
  Payload ID: 7565
  Gene Symbol: HNRNPH1
  Gene Name: heterogeneous nuclear ribonucleoprotein H1 (H)
  ENST ID: ENST00000503664
  CDS Start-End: 422-569
ctcgaatgcagcgtctacgcctggtgaatggacgcactcttaccaattctgctctgggagatgcagcggtaacctaccgagcgcagaggccggcgcgcacccgtggagcccgcgctcgcgatccctcctcgtgccagggccccagggcagtcaaggcctgccgaccgttaggcgggtcaaggggtacacagggtgcgaattcgttaggcaaaagctgggtacaggcgcgagccacaggcacggaaacctcgcgccgaccggggccctaggcccgacgacggcagctgaccagcttcggccggtttggggataaagggaagacaggcggcgcggggagtgggaacgcctgaaggccgcgcccctcctttcaggtcggccaggagcgcgccgtttgtttcgacgccggaccgcgtaagagacgatgatgttgggcacggaaggtggagagggattcgtggtgaaggtccggggcttgccctggtcttgctcggccgatgaagtgcagaggtttttttctgactgcaaaattcaaaatggggctcaaggtattcgtttcatctacaccagag

SEQ ID NO: 140521 - DNA, 501 bp, Homo sapiens
  Payload ID: 7565
  Gene Symbol: HNRNPH1
  Gene Name: heterogeneous nuclear ribonucleoprotein H1 (H)
  ENST ID: ENST00000512273
  CDS Start-End: 127-249
agggtgcgaattcgttaggcaaaagctgggtacaggcgcgagccacaggcacggaaacctcgcgccgaccggggccctaggcccgacgacggcagtttgtttcgacgccggaccgcgtaagagacgatgatgttgggcacggaaggtggagagggattcgtggtgaaggtccggggcttgccctggtcttgctcggccgatgaagtgcagaggtttttttctgcgttggtaacggaaagcgacctgtaaaacaagaaccaagtacgctggaagccgccttgcagggggcaacactgggtttggcttcagctgtgcaacttggagcattttagcttggtaacactgatcccctttcagactgcaaaattcaaaatggggctcaaggtattcgtttcatctacaccagagaaggcagaccaagtggcgaggcttttgttgaacttgaatcagaagatgaagtcaaattggccctgaaaaaagacagagaaactatgggacaca

SEQ ID NO: 140522 - DNA, 594 bp, Homo sapiens
  Payload ID: 7565
  Gene Symbol: HNRNPH1
  Gene Name: heterogeneous nuclear ribonucleoprotein H1 (H)
  ENST ID: ENST00000504348
  CDS Start-End: 91-594
catttcgtcttagccacgcagaagtcgcgtgtctagttctggtcctccccgctttgcagtttgtttcgacgccggaccgcgtaagagacgatgatgttgggcacggaaggtggagagggattcgtggtgaaggtccggggcttgccctggtcttgctcggccgatgaagtgcagaggtttttttctgactgcaaaattcaaaatggggctcaaggtattcgtttcatctacaccagagaaggcagaccaagtggcgaggcttttgttgaacttgaatcagaagatgaagtcaaattggccctgaaaaaagacagagaaactatgggacacagatatgttgaagtattcaagtcaaacaacgttgaaatggattgggtgttgaagcatactggtccaaatagtcctgacacggccaatgatggctttgtacggcttagaggacttccctttggatgtagcaaggaagaaattgttcagttcttctcagggttggaaatcgtgccaaatgggataacattgccggtggacttccaggggaggagtacgggggaggccttcgtgcagtttgcttcacaggaaatagctgaaaaggct

SEQ ID NO: 140523 - DNA, 559 bp, Homo sapiens
  Payload ID: 7565
  Gene Symbol: HNRNPH1
  Gene Name: heterogeneous nuclear ribonucleoprotein H1 (H)
  ENST ID: ENST00000503105
  CDS Start-End: 68-559
catttcgtcttagccacgcagaagtcgcgtgtctagtttgtttcgacgccggaccgcgtaagagacgatgatgttgggcacggaaggtggagagggattcgtggtgaaggtccggggcttgccctggtcttgctcggccgatgaagtgcagaggtttttttctgactgcaaaattcaaaatggggctcaaggtattcgtttcatctacaccagagaaggcagaccaagtggcgaggcttttgttgaacttgaatcagaagatgaagtcaaattggccctgaaaaaagacagagaaactatgggacacagatatgttgaagtattcaagtcaaacaacgttgaaatggattgggtgttgaagcatactggtccaaatagtcctgacacggccaatgatggctttgtacggcttagaggacttccctttggatgtagcaaggaagaaattgttcagttcttctcaggaatgtctgatcacagatacggggatggtggctctactttccagagcacaacaggacactgtgtacacatgcggggattaccttacagagctact

SEQ ID NO: 140524 - DNA, 885 bp, Homo sapiens
  Payload ID: 7565
  Gene Symbol: HNRNPH1
  Gene Name: heterogeneous nuclear ribonucleoprotein H1 (H)
  ENST ID: ENST00000519958
  CDS Start-End: 1-396
agtggcgaggcttttgttgaacttgaatcagaagatgaagtcaaattggccctgaaaaaagacagagaaactatgggacacagatatgttgaagtattcaagtcaaacaacgttgaaatggattgggtgttgaagcatactggtccaaatagtcctgacacggccaatgatggctttgtacggcttagaggacttccctttggatgtagcaaggaagaaattgttcagttcttctcaggtatattgaaatctttaagagcagtagagctgaagttagaactcattatgatccaccacgaaagcttatggccatgcagcggccaggtccttatgacagacctggggctggtagagggtataacagcattggcagaggagctggctttgagaggatgaggcgtggtgcttatggtggaggaatgtctgatcacagatacggggatggtggctctactttccagagcacaacaggacactgtgtacacatgcggggattaccttacagagctactgagaatgacatttataattttttttcaccgctcaaccctgtgagagtacacattgaaattggtcctgatggcagagtaactggtgaagcagatgtcgagttcgcaactcatgaagatgctgtggcagctatgtcaaaagacaaagcaaatatgcaacacagatatgtagaactcttcttgaattctacagcaggagcaagcggtggtgcttacggtagccaaatgctaggaggcatgggtttgtcaaaccagtccagctacgggggcccagccagccagcagctgagtgggggttacggaggcggctacggtggccagagcagcatgagtggatacgaccaagttttacaggaaaactccagtgattttcaat

SEQ ID NO: 140525 - DNA, 1563 bp, Homo sapiens
  Payload ID: 7565
  Gene Symbol: HNRNPH1
  Gene Name: heterogeneous nuclear ribonucleoprotein H1 (H)
  ENST ID: ENST00000523137
  CDS Start-End: 1066-1563
gtgctgctagaaaccacgaacattagtcatctcgcagcatgtgtgcacatggggtgacccgggggcctcctcgaatgcagcgtctacgcctggtgaatggacgcactcttaccaattctgctctgggagatgcagcggtaacctaccgagcgcagaggccggcgcgcacccgtggagcccgcgctcgcgatccctcctcgtgccagggccccagggcagtcaaggcctgccgaccgttaggcgggtcaaggggtacacagggtgcgaattcgttaggcaaaagctgggtacaggcgcgagccacaggcacggaaacctcgcgccgaccggggccctaggcccgacgacggcaggtaaggggaagtggaggcacacagggctgggacgtgccccaggcaccatacgggtggcttcgggcgcgggacgtccgcagccccgcagctcccaggacgttcgacaatctgcagctgaccagcttcggccggtttggggataaagggaagacaggcggcgcggggagtgggaacgcctgaaggccgcgcccctcctttcaggtcggccaggagcgcgccggtaagagcctgggggcaaggggtagaaagacgcccacctcatcacaacccagagctcgggactcctatacagtcccatagggaacaggcggccgccattcccctcccccacgctggcgggtaaggctagagaacggtttcaaggaagacgcatgcgcatgaaataattataaaccgctaggactccgaagttcaatattcgcgggaaggcgcaggcgcaacaaaaagcccggcgggtttatgggtgggggtgctgagcccaaaacccaagcgtgtaataatccgccggcgggaggtgggctggctcttgaaattacgcatgcgccagagctctttgtgacgcaacggggcggtgcgggcagctggctgcgcgtgcgcagaactcgcacaagggaccttatttaggttgcgcaggcgcccgctggccatttcgtcttagccacgcagaagtcgcgtgtctagtttgtttcgacgccggaccgcgtaagagacgatgatgttgggcacggaaggtggagagggattcgtggtgaaggtccggggcttgccctggtcttgctcggccgatgaagtgcagaggtttttttctgactgcaaaattcaaaatggggctcaaggtattcgtttcatctacaccagagaaggcagaccaagtggcgaggcttttgttgaacttgaatcagaagatgaagtcaaattggccctgaaaaaagacagagaaactatgggacacagatatgttgaagggttggaaatcgtgccaaatgggataacattgccggtggacttccaggggaggagtacgggggaggccttcgtgcagtttgcttcacaggaaatagctgaaaaggctctaaagaaacacaaggaaagaatagggcacaggtatattgaaatctttaagagcagtagagctgaagttagaactcattatgatccaccacgaaagcttatggccatgcagcggccaggtccttatgacagacctggg

SEQ ID NO: 140526 - DNA, 831 bp, Homo sapiens
  Payload ID: 7565
  Gene Symbol: HNRNPH1
  Gene Name: heterogeneous nuclear ribonucleoprotein H1 (H)
  ENST ID: ENST00000521173
  CDS Start-End: 1-831
tggctttgtacggcttagaggacttccctttggatgtagcaaggaagaaattgttcagttcttctcaggggaggagtacgggggaggccttcgtgcagtttgcttcacaggaaatagctgaaaaggctctaaagaaacacaaggaaagaatagggcacaggtatattgaaatctttaagagcagtagagctgaagttagaactcattatgatccaccacgaaagcttatggccatgcagcggccaggtccttatgacagacctggggctggtagagggtataacagcattggcagaggagctggctttgagaggatgaggcgtggtgcttatggtggaggctatggaggctatgatgattacaatggctataatgatggctatggatttgggtcagatagatttggaagagacctcaattactgtttttcaggaatgtctgatcacagatacggggatggtggctctactttccagagcacaacaggacactgtgtacacatgcggggattaccttacagagctactgagaatgacatttataattttttttcaccgctcaaccctgtgagagtacacattgaaattggtcctgatggcagagtaactggtgaagcagatgtcgagttcgcaactcatgaagatgctgtggcagctatgtcaaaagacaaagcaaatatgcaacacagatatgtagaactcttcttgaattctacagcaggagcaagcggtggtgcttacgaacacagatatgtagaactcttcttgaattctacagcaggagcaagcggtggtgcttatggtagccaaatgatgggaggcatgggcttgt

SEQ ID NO: 140527 - DNA, 492 bp, Homo sapiens
  Payload ID: 7565
  Gene Symbol: HNRNPH1
  Gene Name: heterogeneous nuclear ribonucleoprotein H1 (H)
  ENST ID: ENST00000522256
  CDS Start-End: 408-492
ctttcattttcagccctgctctttaaatactagacataccgtctggcgcatgtcgaggcgtgtattattttgatccagtgcgcgtgccgtatgtgacttggcttggcttcccctgaaagcagcggctgtggggagttgattcggaagtgaagggccctgggcgacccggcgagtagaggcaacaccaacactcctccttagcgaggggtctccccgccgcggtggctgcccggccccaaggacaggagggatttgtgcactgactcctgaccccgtcctccagcgctgctctgaagggagagtctgtgcagtggcacctgcgcgaagctggccaaagcctgcccagacggctcacctgtgcgggatggaacaaaagtttgtttcgacgccggaccgcgtaagagacgatgatgttgggcacggaaggtggagagggattcgtggtgaaggtccggggcttgccctggtcttgctcggccgatgaagtgcaga

SEQ ID NO: 140528 - DNA, 584 bp, Homo sapiens
  Payload ID: 7565
  Gene Symbol: HNRNPH1
  Gene Name: heterogeneous nuclear ribonucleoprotein H1 (H)
  ENST ID: ENST00000523921
  CDS Start-End: 1-584
agtagagctgaagttagaactcattatgatccaccacgaaagcttatggccatgcagcggccaggtccttatgacagacctggggctggtagagggtataacagcattggcagaggagctggctttgagaggatgaggcgtggtgcttatggtggaggctatggaggctatgatgattacaatggctataatgatggctatggatttgggtcagatagatttggaagagacctcaattactgtttttcaggaatgtctgatcacagatacggggatggtggctctactttccagagcacaacaggacactgtgtacacatgcggggattaccttacagagctactgagaatgacatttataattttttttcaccgctcaaccctgtgagagtacacattgaaattggtcctgatggcagagtaactggtgaagcagatgtcgagttcgcaactcatgaagatgctgtggcagctatgtcaaaagacaaagcaaatatgcaacacagatatgtagaactcttcttgaattctacagcaggagcaagcggtggtgcttatggtagccaaatgatgggaggcatggg

SEQ ID NO: 140529 - DNA, 832 bp, Homo sapiens
  Payload ID: 7565
  Gene Symbol: HNRNPH1
  Gene Name: heterogeneous nuclear ribonucleoprotein H1 (H)
  ENST ID: ENST00000519033
  CDS Start-End: 1-558
gattacaatggctataatgatggctatggatttgggtcagatagatttggaagagacctcaattactgtttttcaggaatgtctgatcacagatacggggatggtggctctactttccagagcacaacaggacactgtgtacacatgcggggattaccttacagagctactgagaatgacatttataattttttttcaccgctcaaccctgtgagagtacacattgaaattggtcctgatggcagagtaactggtgaagcagatgtcgagttcgcaactcatgaagatgctgtggcagctatgtcaaaagacaaagcaaatatgcaacacagatatgtagaactcttcttgaattctacagcaggagcaagcggtggtgcttacggtagccaaatgctaggaggcatgggtttgtcaaaccagtccagctacgggggcccagccagccagcagctgagtgggggttacggaggcggctacggtggccagagcagcatgagtggatacgaccaagttttacaggaaaactccagtgattttcaatcaaacattgcataggtaaccaaggagcagtgaacagcagctactacagtagtggaagccgtgcatctatgggcgtgaacggaatgggagggttgtctagcatgtccagtatgagtggtggatggggaatgtaattgatcgatcctgatcactgactcttggtcaaccttttttttttttttttttttttctttaagaaaacttcagtttaacagtttctgcaatacaagcttgtgatttatgcttactctaagtggaaatcaggattgttatgaagacttaaggccca

SEQ ID NO: 140530 - DNA, 806 bp, Homo sapiens
  Payload ID: 7565
  Gene Symbol: HNRNPH1
  Gene Name: heterogeneous nuclear ribonucleoprotein H1 (H)
  ENST ID: ENST00000521116
  CDS Start-End: 461-806
agtcccggttccccgccatcagcacgacctgtgtgagagcacagggtatctgggcagaaggaaaactaggggagcctcatccagcgctggagatggagaagctttgggcttctcgacggcgaggcacccggggaacggggagtcacttagaacctcaaagtagcctcgggcgagaacaagcgaagcaattccaagctctaccaggtcacggagggcgcgaaacccgccccgcgctccggccggccggcagggggcgcgcgctccccgaactcccgcgcaccgcggaggaggcggccctggcgcggggaagcagtgggaaaatcgcaaggaagccggcgctgctctgaagggagagtctgtgcagtggcacctgcgcgaagctggccaaagcctgcccagacggctcacctgtgcgggatggaacaaaagtttgtttcgacgccggaccgcgtaagagacgatgatgttgggcacggaaggtggagagggattcgtggtgaaggtccggggcttgccctggtcttgctcggccgatgaagtgcagaggtttttttctgactgcaaaattcaaaatggggctcaaggtattcgtttcatctacaccagagaaggcagaccaagtggcgaggcttttgttgaacttgaatcagaagatgaagtcaaattggccctgaaaaaagacagagaaactatgggacacagatatgttgaagtattcaagtcaaacaacgttgaaatggattgggtgttgaagcatactggtccaaatagtcctgacacggccaatgatggctttgtacggctta

SEQ ID NO: 140531 - DNA, 793 bp, Homo sapiens
  Payload ID: 7565
  Gene Symbol: HNRNPH1
  Gene Name: heterogeneous nuclear ribonucleoprotein H1 (H)
  ENST ID: ENST00000523449
  CDS Start-End: 1-352
agcagatgtcgagttcgcaactcatgaagatgctgtggcagctatgtcaaaagacaaagcaaatatgcaacacagatatgtagaactcttcttgaattctacagcaggagcaagcggtgaacacagatatgtagaactcttcttgaattctacagcaggagcaagcggtggtgcttatggtagccaaatgatgggaggcatgggcttgtcaaaccagtccagctacgggggcccagccagccagcagctgagtgggggttacggaggcggctacggtggccagagcagcatgagtggatacgaccaagttttacaggaaaactccagtgattttcaatcaaacattgcataggtaaccaaggagcagtgaacagcagctactacagtagtggaagccgtgcatctatgggcgtgaacggaatgggagggttgtctagcatgtccagtatgagtggtggatggggaatgtaattgatcgatcctgatcactgactcttggtcaaccttttttttttttttttttttttctttaagaaaacttcagtttaacagtttctgcaatacaagcttgtgatttatgcttactctaagtggaaatcaggattgttatgaagacttaaggcccagtatttttgaatacaatactcatctaggatgtaacagtgaagctgagtaaactataactgttaaacttaagttccagcttttctcaagttagttataggatgtacttaagcagtaagcgtatttaggtaaaagcagttgaattatgttaaatgttgccctttgccac

SEQ ID NO: 140532 - DNA, 549 bp, Homo sapiens
  Payload ID: 7565
  Gene Symbol: HNRNPH1
  Gene Name: heterogeneous nuclear ribonucleoprotein H1 (H)
  ENST ID: ENST00000521790
  CDS Start-End: 249-549
aggcttcacaagttatgtaatttgtagtggggacatggaatagacatttcatctgtgtcacccagaggtggttttaggttttaaattctgtattaacggttgttttctttccagactgcaaaattcaaaatggggctcaaggtattcgtttcatctacaccagagaaggcagaccaagtggcgaggcttttgttgaacttgaatcagaagatgaagtcaaattggccctgaaaaaagacagagaaactatgggacacagatatgttgaagtattcaagtcaaacaacgttgaaatggattgggtgttgaagcatactggtccaaatagtcctgacacggccaatgatggctttgtacggcttagaggacttccctttggatgtagcaaggaagaaattgttcagttcttctcagggttggaaatcgtgccaaatgggataacattgccggtggacttccaggggaggagtacgggggaggccttcgtgcagtttgcttcacaggaaatagctgaaaaggctctaaagaaacacaaggaaagaatagggc

SEQ ID NO: 140533 - DNA, 143 bp, Homo sapiens
  Payload ID: 7565
  Gene Symbol: HNRNPH1
  Gene Name: heterogeneous nuclear ribonucleoprotein H1 (H)
  ENST ID: ENST00000523136
  CDS Start-End: 1-143
agcaggagcaagcggtggtgcttatggtagccaaatgatgggaggcatgggcttgtgtaaatatccaaaccagtccagctacgggggcccagccagccagcagctgagtgggggttacggaggcggctacggtggccagagca

SEQ ID NO: 140534 - DNA, 530 bp, Homo sapiens
  Payload ID: 7565
  Gene Symbol: HNRNPH1
  Gene Name: heterogeneous nuclear ribonucleoprotein H1 (H)
  ENST ID: ENST00000519056
  CDS Start-End: 66-530
tttcgtcttagccacgcagaagtcgcgtgtctagtttgtttcgacgccggaccgcgtaagagacgatgatgttgggcacggaaggtggagagggattcgtggtgaaggtccggggcttgccctggtcttgctcggccgatgaagtgcagaggtttttttctgtattcaagtcaaacaacgttgaaatggattgggtgttgaagcatactggtccaaatagtcctgacacggccaatgatggctttgtacggcttagaggacttccctttggatgtagcaaggaagaaattgttcagttcttctcagggttggaaatcgtgccaaatgggataacattgccggtggacttccaggggaggagtacgggggaggccttcgtgcagtttgcttcacaggaaatagctgaaaaggctctaaagaaacacaaggaaagaatagggcacaggtatattgaaatctttaagagcagtagagctgaagttagaactcattatgatccaccacgaaagcttatggccatgcagcggcca

SEQ ID NO: 140535 - DNA, 123 bp, Homo sapiens
  Payload ID: 7565
  Gene Symbol: HNRNPH1
  Gene Name: heterogeneous nuclear ribonucleoprotein H1 (H)
  ENST ID: ENST00000630639
  CDS Start-End: 1-123
atgatgttgggcacggaaggtggagagggattcgtggtgaaggtccggggcttgccctggtcttgctcggccgatgaagtgcagaggtttttttctgcgttggtaacggaaagcgacctgtaa

SEQ ID NO: 140536 - DNA, 2223 bp, Homo sapiens
  Payload ID: 7566
  Gene Symbol: HNRNPH2
  Gene Name: heterogeneous nuclear ribonucleoprotein H2 (H')
  Uniprot ID: P55795
  ENST ID: ENST00000316594
  CDS Start-End: 79-1428
ggaaaattacccggtatcgttagagctacaccaaaattgcattgagccaaacttgccaccaagagcccaacaatcaccatgatgctgagcacggaaggcagggaggggttcgtggtgaaggtcaggggcctaccctggtcctgctcagccgatgaagtgatgcgcttcttctctgattgcaagatccaaaatggcacatcaggtattcgtttcatctacaccagagaaggcagaccaagtggtgaagcatttgttgaacttgaatctgaagaggaagtgaaattggctttgaagaaggacagagaaaccatgggacacagatacgttgaagtattcaagtctaacagtgttgaaatggattgggtgttgaagcatacaggtccgaatagccctgatactgccaacgatggcttcgtccggcttagaggactcccatttggctgtagcaaggaagagattgttcagttcttttcagggttggaaattgtgccaaatgggatgacactgccagtggactttcaggggcgaagcacaggggaagcctttgtgcagtttgcttcacaggagatagctgagaaggccttaaagaaacacaaggaaagaatagggcacaggtacattgagatcttcaagagtagccgagctgaagttcgaacccactatgatccccctcgaaagctcatggctatgcagcggccaggtccctatgataggccgggggctggcagagggtataatagcattggcagaggagctgggtttgaaaggatgaggcgtggtgcctatggtggagggtatggaggctatgatgactatggtggctataatgatggatatggctttgggtctgatagatttggaagagacctcaattactgtttttcaggaatgtctgatcatagatacggagatggtgggtccagtttccagagcaccacagggcactgtgtacacatgagggggttaccttacagagccactgagaatgatatttataatttcttctcacctcttaatcccatgagagtacatattgaaattggacccgatggcagagttaccggtgaggcagatgttgaatttgctactcatgaagatgctgtggcagctatggcaaaagacaaagctaatatgcaacacagatatgtggagctcttcttaaattctactgcaggaacaagtgggggtgcttacgatcacagctatgtagaactttttttgaattctacagcaggggcaagtggtggcgcttatggtagccaaatgatgggagggatgggcttatccaaccagtctagttatggaggtcctgctagccagcagctgagtggtggttatggaggtggttatggtggtcagagcagtatgagtggatatgaccaagttctgcaggaaaactccagtgactatcagtcaaaccttgcttaggtagagaaggagcactaaatagctactccagatataaaagctgtacatttgtgggagttgaatagaatgggagggatgtttagtatatccagtatgattggtaaatgggaaatataattgattctgatcactcttggtcagcttctctttctttatctttctttctccttttttaagaaaacgagttaagtttaacagttttgcattacaggcttgtgattcatgcttactgtaaagtggaagttgagattattttaaaacttcaagctcagtaattttgaacactgaaacattcatctaggacataataacaaagttcagtattgaccataactgttaaaacaatttttagctttcctcaagttagttatgttgtaggagtgtacctaagcagtaagcgtatttaggttaatgcagtttcacttatgttaaatgttgctcttataccacaaatacattgaaaacttcggatgcatgttgagaaacatgcctttctgtaaaactcaaatataggagctgtgtctacgattcaaagtgaaaacatttggcatgtttgttaattctagctttttggtttaatatcctgtaaggcacgtgagtgtacactttttttttttttaaggatacgggacaattttaagatgtaataccaatactttagaagtttggtcgtgtcgtttgtatgaaaatctgaggctttggtttaaatctttccttgtattgtgatttccatttagatgtattgtactaagtgaaacttgttaaataaatcttccttttaaaaactggaaaaaa

SEQ ID NO: 140537 - DNA, 2339 bp, Homo sapiens
  Payload ID: 7567
  Gene Symbol: HNRNPH3
  Gene Name: heterogeneous nuclear ribonucleoprotein H3 (2H9)
  Uniprot ID: P31942
  ENST ID: ENST00000265866
  CDS Start-End: 166-1206
tgcgcagctccctaagcggttgtcaccgctggagacggttgggagaaccgttgtggcgagcgctacacgaggcaaacgacttctcccttctttgaactggaccccgcgagcaccagagtcggcgtaactatcgcctgacaggcatttaaatcaaacggtattgagatggattgggttatgaaacataatggtccaaatgacgctagtgatgggacagtacgacttcgtggactaccatttggttgcagcaaagaggaaatagttcagttctttcaagggttggaaatcgtgccaaatgggataacattgacgatggactaccaggggagaagcacaggggaggccttcgtgcagtttgcttcaaaggagatagcagaaaatgctctggggaaacacaaggaaagaatagggcacaggtatattgagatcttcagaagtagcaggagtgaaatcaaaggattttatgatccaccaagaagattgctgggacagcgaccgggaccatatgatagaccaataggaggaagagggggttattatggagctgggcgtggaagtatgtatgacagaatgcgacgaggaggtgatggatatgatggtggttatggaggttttgatgactatggtggctataataattacggctatgggaatgatggctttgatgacagaatgagagatggaagaggtatgggaggacatggctatggtggagctggtgatgcaagttcaggttttcatggtggtcatttcgtacatatgagagggttgccttttcgtgcaactgaaaatgacattgctaatttcttctcaccactaaatccaatacgagttcatattgatattggagctgatggcagagccacaggagaagcagatgtagagtttgtgacacatgaagatgcagtagctgccatgtctaaagataaaaataacatgcaacatcgatatattgaactcttcttgaattctactcctggaggcggctctggcatgggaggttctggaatgggaggctacggaagagatggaatggataatcagggaggctatggatcagttggaagaatgggaatggggaacaattacagtggaggatatggtactcctgatggtttgggtggttatggccgtggtggtggaggcagtggaggttactatgggcaaggcggcatgagtggaggtggatggcgtgggatgtactgaaagcaaaaacaccaacatacaagtcttgacaacagcatctggtctactagactttcttacagatttaatttcttttgtattttaagaactttataatgactgaaggaatgtgttttcaaaatattatttggtaaagcaacagattgtgatgggaaaatgttttctgtaggtttatttgttgcatactttgacttaaaaataaatttttatattcaaaccactgatgttgatactttttatatactagttactcctaaagatgtgctgccttcataagatttgggttgatgtattttactattagttctacaagaagtagtgtggtgtaattttagaggataatggttcacctctgcgtaaactgcaagtcttaagcagacatctggaatagagcttgacaaataattagtgtaacttttttctttagttcctcctggacaacactgtaaatataaagcctaaagatgaagtggcttcaggagtataaattcagctaattatttctatattattatttttcaaatgtcatttatcaggcatagctctgaaacattgatgatctaagaggtattgatttctgaatattcataattgtgttacctgggtatgagagtgttggaagctgaattctagccctagattttggagtaaaaccccttcagcacttgaccgaaataccaaaaatgtctccaaaaaattgatagttgcaggttatcgcaagatgtcttagagtagggttaaggttctcagtgacacaagaattcagtattaagtacataggtatttactatggagtataattctcacaattgtattttcagttttctgcccaatagagtttaaataactgtataaatgatgactttaaaaaaatgtaagcaacaagtccatgtcatagtcaataaaaacaatcctgcagttgggttttgtatctgatccctgcttggagttttagtttaaagaatctatatgtagcaaggaaaaggtgctttttaattttaatccctttgatcaatatggcttttttccaaattggctaatggatcaaaatgaaacctgttgatgtgaattcagttattgaacttgttacttgtttttgccagaaatgttattaataaatgtcattgtgggag

SEQ ID NO: 140538 - DNA, 1332 bp, Homo sapiens
  Payload ID: 7567
  Gene Symbol: HNRNPH3
  Gene Name: heterogeneous nuclear ribonucleoprotein H3 (2H9)
  Uniprot ID: P31942
  ENST ID: ENST00000354695
  CDS Start-End: 119-1114
ccgttgtggcgagcgctacacgaggcaaacgacttctcccttctttgaactggaccccgcgagcaccagagtcggcgtaactatcgcctgacaggcatttaaatcaaacggtattgagatggattgggttatgaaacataatggtccaaatgacgctagtgatgggacagtacgacttcgtggactaccatttggttgcagcaaagaggaaatagttcagttctttcaagggttggaaatcgtgccaaatgggataacattgacgatggactaccaggggagaagcacaggggaggccttcgtgcagtttgcttcaaaggagatagcagaaaatgctctggggaaacacaaggaaagaatagggcacaggtatattgagatcttcagaagtagcaggagtgaaatcaaaggattttatgatccaccaagaagattgctgggacagcgaccgggaccatatgatagaccaataggaggaagagggggttattatggagctgggcgtggaagttatggaggttttgatgactatggtggctataataattacggctatgggaatgatggctttgatgacagaatgagagatggaagaggtatgggaggacatggctatggtggagctggtgatgcaagttcaggttttcatggtggtcatttcgtacatatgagagggttgccttttcgtgcaactgaaaatgacattgctaatttcttctcaccactaaatccaatacgagttcatattgatattggagctgatggcagagccacaggagaagcagatgtagagtttgtgacacatgaagatgcagtagctgccatgtctaaagataaaaataacatgcaacatcgatatattgaactcttcttgaattctactcctggaggcggctctggcatgggaggttctggaatgggaggctacggaagagatggaatggataatcagggaggctatggatcagttggaagaatgggaatggggaacaattacagtggaggatatggtactcctgatggtttgggtggttatggccgtggtggtggaggcagtggaggttactatgggcaaggcggcatgagtggaggtggatggcgtgggatgtactgaaagcaaaaacaccaacatacaagtcttgacaacagcatctggtctactagactttcttacagatttaatttcttttgtattttaagaactttataatgactgaaggaatgtgttttcaaaatattatttggtaaagcaacagattgtgatgggaaaatgttttctgtaggtttatttgttgcatactttgacttaaaaataaatttttatattcaaac

SEQ ID NO: 140539 - DNA, 2652 bp, Homo sapiens
  Payload ID: 7568
  Gene Symbol: HNRNPK
  Gene Name: heterogeneous nuclear ribonucleoprotein K
  Uniprot ID: P61978
  ENST ID: ENST00000351839
  CDS Start-End: 108-1499
gctactgcagcactggggtgtcagttgttggtccgacccagaacgcttcagttctgctctgcaaggatatataataactgattggtgtgcccgtttaataaaagaatatggaaactgaacagccagaagaaaccttccctaacactgaaaccaatggtgaatttggtaaacgccctgcagaagatatggaagaggaacaagcatttaaaagatctagaaacactgatgagatggttgaattacgcattctgcttcagagcaagaatgctggggcagtgattggaaaaggaggcaagaatattaaggctctccgtacagactacaatgccagtgtttcagtcccagacagcagtggccccgagcgcatattgagtatcagtgctgatattgaaacaattggagaaattctgaagaaaatcatccctaccttggaagagggcctgcagttgccatcacccactgcaaccagccagctcccgctcgaatctgatgctgtggaatgcttaaattaccaacactataaaggaagtgactttgactgcgagttgaggctgttgattcatcagagtctagcaggaggaattattggggtcaaaggtgctaaaatcaaagaacttcgagagaacactcaaaccaccatcaagcttttccaggaatgctgtcctcattccactgacagagttgttcttattggaggaaaacccgatagggttgtagagtgcataaagatcatccttgatcttatatctgagtctcccatcaaaggacgtgcacagccttatgatcccaatttttacgatgaaacctatgattatggtggttttacaatgatgtttgatgaccgtcgcggacgcccagtgggatttcccatgcggggaagaggtggttttgacagaatgcctcctggtcggggtgggcgtcccatgcctccatctagaagagattatgatgatatgagccctcgtcgaggaccacctccccctcctcccggacgaggcggccggggtggtagcagagctcggaatcttcctcttcctccaccaccaccacctagagggggagacctcatggcctatgacagaagagggagacctggagaccgttacgacggcatggttggtttcagtgctgatgaaacttgggactctgcaatagatacatggagcccatcagaatggcagatggcttatgaaccacagggtggctccggatatgattattcctatgcagggggtcgtggctcatatggtgatcttggtggacctattattactacacaagtaactattcccaaagatttggctggatctattattggcaaaggtggtcagcggattaaacaaatccgtcatgagtcgggagcttcgatcaaaattgatgagcctttagaaggatccgaagatcggatcattaccattacaggaacacaggaccagatacagaatgcacagtatttgctgcagaacagtgtgaagcagtattctggaaagtttttctaagactagtgaagaactgaaggagtcctgcatctttttttttttatctgcttctgtttaaaaagccaacattcctctgcttcataggtgttctgcatttgaggtgtagtgaaatctttgctgttcaccagatgtaatgttttagttccttacaaacagggttgggggggggaagggcgtgcaaaaactaacattgaaattttgaaacagcagcagagtgagtggattttatttttcgttattgttggtggtttaaaaaattccccccatgtaattattgtgaacaccttgctttgtggtcactgtaacatttggggggtgggacagggaggaaaagtaacaatagtccacatgtccctggcatctgttcagagcagtgtgcagaatgtaatgctcttttgtaagaaacgttttatgatttttaaaataaatttagtgaacctatttttggtggtcattttttttttaagacagtcattttaaaatggtggctgaatttcccaacccacccccaaactaaacactaagtttaattttcagctcctctgttggacatataagtgcatctcttgttggacataggcaaaataacttggcaaacttagttctggtgatttcttgatggtttggaagtctattgctgggaagaaattccatcatacatattcatgcttataataagctggggattttttgtttgtttttgcaaatgcttgcccctacttttcaacaattttctatgttagttgtgaagaactaaggtggggagcagtactacaagttgagtaatggtatgagtatataccagaattctgattggcagcaagttttattaatcagaataacacttggttatggaagtgactaatgctgaaaaaattgattatttttattagataatttctcacctatagacttaaactgtcaatttgctctagtgtcttattagttaaactttgtaaaatatatatatacttgtttttccattgtatgcaaattgaaagaaaaagatgtaccatttctctgttgtatgttggattatgtaggaaatgtttgtgtacaattcaaaaaaaaaaaagatgaaaaaagttcctgtggatgttttgtgtagtatcttggcatttgtattgatagttaaaattcacttccaaataaa

SEQ ID NO: 140540 - DNA, 2038 bp, Homo sapiens
  Payload ID: 7568
  Gene Symbol: HNRNPK
  Gene Name: heterogeneous nuclear ribonucleoprotein K
  Uniprot ID: P61978
  ENST ID: ENST00000360384
  CDS Start-End: 206-1597
ggacgcgagaaggcgggggaggggagcctgcgctcgttttctgtctagctccgaccggctgaggcggcgcggcagcggagggacggcagtctcgcgcggctactgcagcactggggtgtcagttgttggtccgacccagaacgcttcagttctgctctgcaaggatatataataactgattggtgtgcccgtttaataaaagaatatggaaactgaacagccagaagaaaccttccctaacactgaaaccaatggtgaatttggtaaacgccctgcagaagatatggaagaggaacaagcatttaaaagatctagaaacactgatgagatggttgaattacgcattctgcttcagagcaagaatgctggggcagtgattggaaaaggaggcaagaatattaaggctctccgtacagactacaatgccagtgtttcagtcccagacagcagtggccccgagcgcatattgagtatcagtgctgatattgaaacaattggagaaattctgaagaaaatcatccctaccttggaagagggcctgcagttgccatcacccactgcaaccagccagctcccgctcgaatctgatgctgtggaatgcttaaattaccaacactataaaggaagtgactttgactgcgagttgaggctgttgattcatcagagtctagcaggaggaattattggggtcaaaggtgctaaaatcaaagaacttcgagagaacactcaaaccaccatcaagcttttccaggaatgctgtcctcattccactgacagagttgttcttattggaggaaaacccgatagggttgtagagtgcataaagatcatccttgatcttatatctgagtctcccatcaaaggacgtgcacagccttatgatcccaatttttacgatgaaacctatgattatggtggttttacaatgatgtttgatgaccgtcgcggacgcccagtgggatttcccatgcggggaagaggtggttttgacagaatgcctcctggtcggggtgggcgtcccatgcctccatctagaagagattatgatgatatgagccctcgtcgaggaccacctccccctcctcccggacgaggcggccggggtggtagcagagctcggaatcttcctcttcctccaccaccaccacctagagggggagacctcatggcctatgacagaagagggagacctggagaccgttacgacggcatggttggtttcagtgctgatgaaacttgggactctgcaatagatacatggagcccatcagaatggcagatggcttatgaaccacagggtggctccggatatgattattcctatgcagggggtcgtggctcatatggtgatcttggtggacctattattactacacaagtaactattcccaaagatttggctggatctattattggcaaaggtggtcagcggattaaacaaatccgtcatgagtcgggagcttcgatcaaaattgatgagcctttagaaggatccgaagatcggatcattaccattacaggaacacaggaccagatacagaatgcacagtatttgctgcagaacagtgtgaagcagtattctggaaagtttttctaagactagtgaagaactgaaggagtcctgcatctttttttttttatctgcttctgtttaaaaagccaacattcctctgcttcataggtgttctgcatttgaggtgtagtgaaatctttgctgttcaccagatgtaatgttttagttccttacaaacagggttgggggggggaagggcgtgcaaaaactaacattgaaattttgaaacagcagcagagtgagtggattttatttttcgttattgttggtggtttaaaaaattccccccatgtaattattgtgaacaccttgctttgtggtcactgtaacatttggggggtgggacagggaggaaaagtaacaatagtccacatgtccctggcatctgttcagagcagtgtgcagaatgtaatgctcttttgtaagaaacgttttatgatttttaaaataaatttagtgaaccta

SEQ ID NO: 140541 - DNA, 2942 bp, Homo sapiens
  Payload ID: 7568
  Gene Symbol: HNRNPK
  Gene Name: heterogeneous nuclear ribonucleoprotein K
  Uniprot ID: P61978
  ENST ID: ENST00000376263
  CDS Start-End: 225-1619
tagggcgcgacggcggggaggacgcgagaaggcgggggaggggagcctgcgctcgttttctgtctagctccgaccggctgaggcggcgcggcagcggagggacggcagtctcgcgcggctactgcagcactggggtgtcagttgttggtccgacccagaacgcttcagttctgctctgcaaggatatataataactgattggtgtgcccgtttaataaaagaatatggaaactgaacagccagaagaaaccttccctaacactgaaaccaatggtgaatttggtaaacgccctgcagaagatatggaagaggaacaagcatttaaaagatctagaaacactgatgagatggttgaattacgcattctgcttcagagcaagaatgctggggcagtgattggaaaaggaggcaagaatattaaggctctccgtacagactacaatgccagtgtttcagtcccagacagcagtggccccgagcgcatattgagtatcagtgctgatattgaaacaattggagaaattctgaagaaaatcatccctaccttggaagagggcctgcagttgccatcacccactgcaaccagccagctcccgctcgaatctgatgctgtggaatgcttaaattaccaacactataaaggaagtgactttgactgcgagttgaggctgttgattcatcagagtctagcaggaggaattattggggtcaaaggtgctaaaatcaaagaacttcgagagaacactcaaaccaccatcaagcttttccaggaatgctgtcctcattccactgacagagttgttcttattggaggaaaacccgatagggttgtagagtgcataaagatcatccttgatcttatatctgagtctcccatcaaaggacgtgcacagccttatgatcccaatttttacgatgaaacctatgattatggtggttttacaatgatgtttgatgaccgtcgcggacgcccagtgggatttcccatgcggggaagaggtggttttgacagaatgcctcctggtcggggtgggcgtcccatgcctccatctagaagagattatgatgatatgagccctcgtcgaggaccacctccccctcctcccggacgaggcggccggggtggtagcagagctcggaatcttcctcttcctccaccaccaccacctagagggggagacctcatggcctatgacagaagagggagacctggagaccgttacgacggcatggttggtttcagtgctgatgaaacttgggactctgcaatagatacatggagcccatcagaatggcagatggcttatgaaccacagggtggctccggatatgattattcctatgcagggggtcgtggctcatatggtgatcttggtggacctattattactacacaagtaactattcccaaagatttggctggatctattattggcaaaggtggtcagcggattaaacaaatccgtcatgagtcgggagcttcgatcaaaattgatgagcctttagaaggatccgaagatcggatcattaccattacaggaacacaggaccagatacagaatgcacagtatttgctgcagaacagtgtgaagcagtatgcagatgttgaaggattctaatgcaagatattttttcttttttatagtgtgaagcagtattctggaaagtttttctaagactagtgaagaactgaaggagtcctgcatctttttttttttatctgcttctgtttaaaaagccaacattcctctgcttcataggtgttctgcatttgaggtgtagtgaaatctttgctgttcaccagatgtaatgttttagttccttacaaacagggttgggggggggaagggcgtgcaaaaactaacattgaaattttgaaacagcagcagagtgagtggattttatttttcgttattgttggtggtttaaaaaattccccccatgtaattattgtgaacaccttgctttgtggtcactgtaacatttggggggtgggacagggaggaaaagtaacaatagtccacatgtccctggcatctgttcagagcagtgtgcagaatgtaatgctcttttgtaagaaacgttttatgatttttaaaataaatttagtgaacctatttttggtggtcattttttttttaagacagtcattttaaaatggtggctgaatttcccaacccacccccaaactaaacactaagtttaattttcagctcctctgttggacatataagtgcatctcttgttggacataggcaaaataacttggcaaacttagttctggtgatttcttgatggtttggaagtctattgctgggaagaaattccatcatacatattcatgcttataataagctggggattttttgtttgtttttgcaaatgcttgcccctacttttcaacaattttctatgttagttgtgaagaactaaggtggggagcagtactacaagttgagtaatggtatgagtatataccagaattctgattggcagcaagttttattaatcagaataacacttggttatggaagtgactaatgctgaaaaaattgattatttttattagataatttctcacctatagacttaaactgtcaatttgctctagtgtcttattagttaaactttgtaaaatatatatatacttgtttttccattgtatgcaaattgaaagaaaaagatgtaccatttctctgttgtatgttggattatgtaggaaatgtttgtgtacaattcaaaaaaaaaaaagatgaaaaaagttcctgtggatgttttgtgtagtatcttggcatttgtattgatagttaaaattcacttccaaataaataaaacacccatgatgctagatttgatgtgtgcccgatttgaacaagggttgattgacacctgtaaaatttgttgaaacgttcctcttaaaaggaaatatagtaatcttatgt

SEQ ID NO: 140542 - DNA, 2928 bp, Homo sapiens
  Payload ID: 7568
  Gene Symbol: HNRNPK
  Gene Name: heterogeneous nuclear ribonucleoprotein K
  Uniprot ID: P61978
  ENST ID: ENST00000376281
  CDS Start-End: 210-1604
agggcgctccaggcgacagcactgcagacgccattatcctctgtttctctgctgcaccgacctcgacgtcttgcctgtgtcccacttgttcgcggcctataggctactgcagcactggggtgtcagttgttggtccgacccagaacgcttcagttctgctctgcaaggatatataataactgattggtgtgcccgtttaataaaagaatatggaaactgaacagccagaagaaaccttccctaacactgaaaccaatggtgaatttggtaaacgccctgcagaagatatggaagaggaacaagcatttaaaagatctagaaacactgatgagatggttgaattacgcattctgcttcagagcaagaatgctggggcagtgattggaaaaggaggcaagaatattaaggctctccgtacagactacaatgccagtgtttcagtcccagacagcagtggccccgagcgcatattgagtatcagtgctgatattgaaacaattggagaaattctgaagaaaatcatccctaccttggaagagggcctgcagttgccatcacccactgcaaccagccagctcccgctcgaatctgatgctgtggaatgcttaaattaccaacactataaaggaagtgactttgactgcgagttgaggctgttgattcatcagagtctagcaggaggaattattggggtcaaaggtgctaaaatcaaagaacttcgagagaacactcaaaccaccatcaagcttttccaggaatgctgtcctcattccactgacagagttgttcttattggaggaaaacccgatagggttgtagagtgcataaagatcatccttgatcttatatctgagtctcccatcaaaggacgtgcacagccttatgatcccaatttttacgatgaaacctatgattatggtggttttacaatgatgtttgatgaccgtcgcggacgcccagtgggatttcccatgcggggaagaggtggttttgacagaatgcctcctggtcggggtgggcgtcccatgcctccatctagaagagattatgatgatatgagccctcgtcgaggaccacctccccctcctcccggacgaggcggccggggtggtagcagagctcggaatcttcctcttcctccaccaccaccacctagagggggagacctcatggcctatgacagaagagggagacctggagaccgttacgacggcatggttggtttcagtgctgatgaaacttgggactctgcaatagatacatggagcccatcagaatggcagatggcttatgaaccacagggtggctccggatatgattattcctatgcagggggtcgtggctcatatggtgatcttggtggacctattattactacacaagtaactattcccaaagatttggctggatctattattggcaaaggtggtcagcggattaaacaaatccgtcatgagtcgggagcttcgatcaaaattgatgagcctttagaaggatccgaagatcggatcattaccattacaggaacacaggaccagatacagaatgcacagtatttgctgcagaacagtgtgaagcagtatgcagatgttgaaggattctaatgcaagatattttttcttttttatagtgtgaagcagtattctggaaagtttttctaagactagtgaagaactgaaggagtcctgcatctttttttttttatctgcttctgtttaaaaagccaacattcctctgcttcataggtgttctgcatttgaggtgtagtgaaatctttgctgttcaccagatgtaatgttttagttccttacaaacagggttgggggggggaagggcgtgcaaaaactaacattgaaattttgaaacagcagcagagtgagtggattttatttttcgttattgttggtggtttaaaaaattccccccatgtaattattgtgaacaccttgctttgtggtcactgtaacatttggggggtgggacagggaggaaaagtaacaatagtccacatgtccctggcatctgttcagagcagtgtgcagaatgtaatgctcttttgtaagaaacgttttatgatttttaaaataaatttagtgaacctatttttggtggtcattttttttttaagacagtcattttaaaatggtggctgaatttcccaacccacccccaaactaaacactaagtttaattttcagctcctctgttggacatataagtgcatctcttgttggacataggcaaaataacttggcaaacttagttctggtgatttcttgatggtttggaagtctattgctgggaagaaattccatcatacatattcatgcttataataagctggggattttttgtttgtttttgcaaatgcttgcccctacttttcaacaattttctatgttagttgtgaagaactaaggtggggagcagtactacaagttgagtaatggtatgagtatataccagaattctgattggcagcaagttttattaatcagaataacacttggttatggaagtgactaatgctgaaaaaattgattatttttattagataatttctcacctatagacttaaactgtcaatttgctctagtgtcttattagttaaactttgtaaaatatatatatacttgtttttccattgtatgcaaattgaaagaaaaagatgtaccatttctctgttgtatgttggattatgtaggaaatgtttgtgtacaattcaaaaaaaaaaaagatgaaaaaagttcctgtggatgttttgtgtagtatcttggcatttgtattgatagttaaaattcacttccaaataaataaaacacccatgatgctagatttgatgtgtgcccgatttgaacaagggttgattgacacctgtaaaatttgttgaaacgttcctcttaaaaggaaatatagtaatcttatgta

SEQ ID NO: 140543 - DNA, 1283 bp, Homo sapiens
  Payload ID: 7568
  Gene Symbol: HNRNPK
  Gene Name: heterogeneous nuclear ribonucleoprotein K
  ENST ID: ENST00000457156
  CDS Start-End: 146-1283
gaggcggcgcggcagcggagggacggcagtctcgcgcggctactgcagcactggggtgtcagttgttggtccgacccagaacgcttcagttctgctctgcaaggatatataataactgattggtgtgcccgtttaataaaagaatatggaaactgaacagccagaagaaaccttccctaacactgaaaccaatggtgaatttggtaaacgccctgcagaagatatggaagaggaacaagcatttaaaagatctagaaacactgatgagatggttgaattacgcattctgcttcagagcaagaatgctggggcagtgattggaaaaggaggcaagaatattaaggctctccgtacagactacaatgccagtgtttcagtcccagacagcagtggccccgagcgcatattgagtatcagtgctgatattgaaacaattggagaaattctgaagaaaatcatccctaccttggaagagtaccaacactataaaggaagtgactttgactgcgagttgaggctgttgattcatcagagtctagcaggaggaattattggggtcaaaggtgctaaaatcaaagaacttcgagagaacactcaaaccaccatcaagcttttccaggaatgctgtcctcattccactgacagagttgttcttattggaggaaaacccgatagggttgtagagtgcataaagatcatccttgatcttatatctgagtctcccatcaaaggacgtgcacagccttatgatcccaatttttacgatgaaacctatgattatggtggttttacaatgatgtttgatgaccgtcgcggacgcccagtgggatttcccatgcggggaagaggtggttttgacagaatgcctcctggtcggggtgggcgtcccatgcctccatctagaagagattatgatgatatgagccctcgtcgaggaccacctccccctcctcccggacgaggcggccggggtggtagcagagctcggaatcttcctcttcctccaccaccaccacctagagggggagacctcatggcctatgacagaagagggagacctggagaccgttacgacggcatggttggtttcagtgctgatgaaacttgggactctgcaatagatacatggagcccatcagaatggcagatggcttatgaaccacagggtggctccggatatgattattcctatgcagggggtcgtggctcatatggtgatcttggtggacctattattactacacaagtaactattcccaaagatttggctggatctattattg

SEQ ID NO: 140544 - DNA, 957 bp, Homo sapiens
  Payload ID: 7568
  Gene Symbol: HNRNPK
  Gene Name: heterogeneous nuclear ribonucleoprotein K
  ENST ID: ENST00000481820
  CDS Start-End: 1-301
gcagatggcttatgaaccacagggtggctccggatatgattattcctatgcagggggtcgtggctcatatggtgatcttggtggacctattattactacacaagtaactattcccaaagatttggctggatctattattggcaaaggtggtcagcggattaaacaaatccgtcatgagtcgggagcttcgatcaaaattgatgagcctttagaaggatccgaagatcggatcattaccattacaggaacacaggaccagatacagaatgcacagtatttgctgcagaacaggtcagtttaagtttagctttgtgttagcttatacatactaaaacctttaaaaagcttttcttctcaattgatttttttcttttagaagccatggtgtctcaaccttttggggacctaacttctaaacattctaatagtttgccttaatttttcttctgctttcttactaaaaatgaagacattcaatactaatcttgctggaagaagccttaaccaagcaaacttctcatttctctggtgaaaactgctgccaaaaccacttgttaaaaattgtacagagcctgtagaaaatatagaagattcattggatgttggcctagttctgtgtggaagactagtgattttgttgtttttagataactaaatcgacaacaaatcacagtctgccatatggcacaggccatgcctctacaggacaaatgattggtgctgtaaaatgcagcatttcacaccttactagcattctttgtcttttctaccaaatattaacaactttcaattccgttttcttaattctgttctactaatgtccgatttactactcatcatttttcttgacacttaacattgctttaatttgtaattgctaatggtttttgaactcttctaattgtaatggacgtgtttatcattttaatttagcattgaaattgtcttgatgttgat

SEQ ID NO: 140545 - DNA, 822 bp, Homo sapiens
  Payload ID: 7568
  Gene Symbol: HNRNPK
  Gene Name: heterogeneous nuclear ribonucleoprotein K
  ENST ID: ENST00000472778
  CDS Start-End: 222-455
cgagaaaggaggagggcgctccaggcgacagcactgcagacgccattatcctctgtttctctgctgcaccgacctcgacgtcttgcctgtgtcccacttgttcgcggcctataggctactgcagcactggggtgtcagttgttggtccgacccagaacgcttcagttctgctctgcaaggatatataataactgattggtgtgcccgtttaataaaagaatatggaaactgaacagccagaagaaaccttccctaacactgaaaccaatggtgaatttggtaaacgccctgcagaagatatggaagaggaacaagcatttaaaagatctagaaacactgatgagatggttgaattacgcattctgcttcagagcaagaatgctggggcagtgattggaaaaggaggcaagaatattaaggctctccgtacagaccatattgagtatcagtgctgatattgaaacaattggagaaattctgaagaaaatcatccctaccttggaagagggcctgcagttgccatcacccactgcaaccagccagctcccgctcgaatctgatgctgtggaatgcttaaattaccaacactataaaggaagtgactttgactgcgagttgaggctgttgattcatcagagtctagcaggaggaattattggggtcaaaggtgctaaaatcaaagaacttcgagagaacactcaaaccaccatcaagcttttccaggaatgctgtcctcattccactgacagagttgttcttattggaggaaaacccgatagggttgtagagtgcataaagatcatccttgatcttatatctgag

SEQ ID NO: 140546 - DNA, 2471 bp, Homo sapiens
  Payload ID: 7569
  Gene Symbol: HNRNPL
  Gene Name: heterogeneous nuclear ribonucleoprotein L
  Uniprot ID: P14866
  ENST ID: ENST00000221419
  CDS Start-End: 368-2137
ggagaccaatgaaagtgggagggaggcggagattcttgggaggtttagagcgccgttcctatcaggtgcttttagggaggccagcagcgccagaaatccgacctatcaaattggattttattttaaggcggcggggtcgacggaaagactggcagaaagcgaccacctataaggagtgtctcagacaaacaagggcgggccctcctgcagaacggcgtgggcaatgtccaataagcgcgcaaggcgtgtggcggcctaccctccccccgcggcgggaccagtggctccccctatcgggtgggggcggcgggtgacgggcgtgtccctcccccaatgagaggcggggggaggcgggttctgcgccgccatgtcgcggaggctgctgccccgggcggagaagcggcgtcggcggctggagcagaggcagcagccggacgagcagcggaggcggtcgggagcgatggtgaagatggcggcggcgggcggcggaggcggcggtggccgctactacggcggcggcagtgagggcggccgggcccctaagcggctcaagactgacaacgccggcgaccagcacggaggcggcggcggtggcggtggaggagccggggcggcgggcggcggcggcggtggggagaactacgatgacccgcacaaaacccctgcctccccagttgtccacatcaggggcctgattgacggtgtggtggaagcagaccttgtggaggccttgcaggagtttggacccatcagctatgtggtggtaatgcctaaaaagagacaagcactggtggagtttgaagatgtgttgggggcttgcaacgcagtgaactacgcagccgacaaccaaatatacattgctggtcacccagcttttgtcaactactctaccagccagaagatctcccgccctggggactcggatgactcccggagcgtgaacagtgtgcttctctttaccatcctgaaccccatttattcgatcaccacggatgttctttacactatctgtaatccttgtggccctgtccagagaattgtcattttcaggaagaatggagttcaggcgatggtggaatttgactcagttcaaagtgcccagcgggccaaggcctctctcaatggggctgatatctattctggctgttgcactctgaagatcgaatacgcaaagcctacacgcttgaatgtgttcaagaatgatcaggatacttgggactacacaaaccccaatctcagtggacaaggtgaccctggcagcaaccccaacaaacgccagaggcagccccctctcctgggagatcaccccgcagaatatggagggccccacggtgggtaccacagccattaccatgatgagggctacgggccccccccacctcactacgaagggagaaggatgggtccaccagtggggggtcaccgtcggggcccaagtcgctacggcccccagtatgggcaccccccaccccctcccccaccacccgagtatggccctcacgccgacagccctgtgctcatggtctatggcttggatcaatctaagatgaactgtgaccgagtcttcaatgtcttctgcttatatggcaatgtggagaaggtgaaattcatgaaaagcaagccgggggccgccatggtggagatggctgatggctacgctgtagaccgggccattacccacctcaacaacaacttcatgtttgggcagaagctgaatgtctgtgtctccaagcagccagccatcatgcctggtcagtcatacgggttggaagacgggtcttgcagttacaaagacttcagtgaatcccggaacaatcggttctccaccccagagcaggcagccaagaaccgcatccagcaccccagcaacgtgctgcacttcttcaacgccccgctggaggtgaccgaggagaacttctttgagatctgcgatgagctgggagtgaagcggccatcttctgtgaaagtattctcaggcaaaagtgagcgcagctcctctggactgctggagtgggaatccaagagcgatgccctggagactctgggcttcctgaaccattaccagatgaaaaacccaaatggtccatacccttacactctgaagttgtgtttctccactgctcagcacgcctcctaattaggtgcctaggaagagtcccatctgagcaggaagacatttctctttcctttatgccattttttgtttttgttatttgcaaaagatcttgtattccttttttttttttttttttttttttttaaatgctaggtttgtagaggcttacttaaccttaatggaaacgctggaaatctgcagggggagggagaggggaactgttatctcccaagattaaccttcacttttaaaaaattattgtacatgtgatttttttttttcctgttcatacatttgtgctgcccatgtactcttggcacatttcaataaaattgtttggaaaataaacacagca

SEQ ID NO: 140547 - DNA, 1952 bp, Homo sapiens
  Payload ID: 7569
  Gene Symbol: HNRNPL
  Gene Name: heterogeneous nuclear ribonucleoprotein L
  ENST ID: ENST00000388749
  CDS Start-End: 185-724
agtgtctgctcttttcgatccgggacggccggtcaggctcgccgccgagctggagaactacgatgacccgcacaaaacccctgcctccccagttgtccacatcaggggcctgattgacggtgtggtggaagcagaccttgtggaggccttgcaggagtttggacccatcagctatgtggtggtaatgcctaaaaagagacaagcactggtggagtttgaagatgtgttgggggcttgcaacgcagtgaactacgcagccgacaaccaaatatacattgctggtcacccagcttttgtcaactactctaccagccagaagatctcccgccctggggactcggatgactcccggagcgtgaacagtgtgcttctctttaccatcctgaaccccatttattcgatcaccacggatgttctttacactatctgtaatccttgtggccctgtccagagaattgtcattttcaggaagaatggagttcaggcgatggtggaatttgactcagttcaaagtgcccagcgggccaaggcctctctcaatggggctgatatctattctggctgttgcactctgaagatcgaatacgcaaagcctacacgcttgaatgtgttcaagaatgatcaggatacttgggactacacaaaccccaatctcagtggacaagggtcgcagtgtatgtttgatgggacgccatctttcagaactgtgctaactcactgttgaagcgtccaatggtgaccctggcagcaaccccaacaaacgccagaggcagccccctctcctgggagatcaccccgcagaatatggagggccccacggtgggtaccacagccattaccatgatgagggctacgggccccccccacctcactacgaagggagaaggatgggtccaccagtggggggtcaccgtcggggcccaagtcgctacggcccccagtatgggcaccccccaccccctcccccaccacccgagtatggccctcacgccgacagccctgtgctcatggtctatggcttggatcaatctaagatgaactgtgaccgagtcttcaatgtcttctgcttatatggcaatgtggagaaggtgaaattcatgaaaagcaagccgggggccgccatggtggagatggctgatggctacgctgtagaccgggccattacccacctcaacaacaacttcatgtttgggcagaagctgaatgtctgtgtctccaagcagccagccatcatgcctggtcagtcatacgggttggaagacgggtcttgcagttacaaagacttcagtgaatcccggaacaatcggttctccaccccagagcaggcagccaagaaccgcatccagcaccccagcaacgtgctgcacttcttcaacgccccgctggaggtgaccgaggagaacttctttgagatctgcgatgagctgggagtgaagcggccatcttctgtgaaagtattctcaggcaaaagtgagcgcagctcctctggactgctggagtgggaatccaagagcgatgccctggagactctgggcttcctgaaccattaccagatgaaaaacccaaatggtccatacccttacactctgaagttgtgtttctccactgctcagcacgcctcctaattaggtgcctaggaagagtcccatctgagcaggaagacatttctctttcctttatgccattttttgtttttgttatttgcaaaagatcttgtattccttttttttttttttttttttttttttaaatgctaggtttgtagaggcttacttaaccttaatggaaacgctggaaatctgcagggggagggagaggggaactgttatctcccaagattaaccttcacttttaaaaaattattgtacatgtgatttttttttttcctgttcatacatttgtgctgcccatgtactcttggcacatttcaataaaattgtttggaaaataaa

SEQ ID NO: 140548 - DNA, 1918 bp, Homo sapiens
  Payload ID: 7569
  Gene Symbol: HNRNPL
  Gene Name: heterogeneous nuclear ribonucleoprotein L
  ENST ID: ENST00000601449
  CDS Start-End: 1-1591
gtgctgtactgggcgcttggtaggtggccaccctctccagggtcggggccaggacctcctgtggtgctcagaggggtcgagctgtcaggagaactacgatgacccgcacaaaacccctgcctccccagttgtccacatcaggggcctgattgacggtgtggtggaagcagaccttgtggaggccttgcaggagtttggacccatcagctatgtggtggtaatgcctaaaaagagacaagcactggtggagtttgaagatgtgttgggggcttgcaacgcagtgaactacgcagccgacaaccaaatatacattgctggtcacccagcttttgtcaactactctaccagccagaagatctcccgccctggggactcggatgactcccggagcgtgaacagtgtgcttctctttaccatcctgaaccccatttattcgatcaccacggatgttctttacactatctgtaatccttgtggccctgtccagagaattgtcattttcaggaagaatggagttcaggcgatggtggaatttgactcagttcaaagtgcccagcgggccaaggcctctctcaatggggctgatatctattctggctgttgcactctgaagatcgaatacgcaaagcctacacgcttgaatgtgttcaagaatgatcaggatacttgggactacacaaaccccaatctcagtggacaaggtgaccctggcagcaaccccaacaaacgccagaggcagccccctctcctgggagatcaccccgcagaatatggagggccccacggtgggtaccacagccattaccatgatgagggctacgggccccccccacctcactacgaagggagaaggatgggtccaccagtggggggtcaccgtcggggcccaagtcgctacggcccccagtatgggcaccccccaccccctcccccaccacccgagtatggccctcacgccgacagccctgtgctcatggtctatggcttggatcaatctaagatgaactgtgaccgagtcttcaatgtcttctgcttatatggcaatgtggagaaggtgaaattcatgaaaagcaagccgggggccgccatggtggagatggctgatggctacgctgtagaccgggccattacccacctcaacaacaacttcatgtttgggcagaagctgaatgtctgtgtctccaagcagccagccatcatgcctggtcagtcatacgggttggaagacgggtcttgcagttacaaagacttcagtgaatcccggaacaatcggttctccaccccagagcaggcagccaagaaccgcatccagcaccccagcaacgtgctgcacttcttcaacgccccgctggaggtgaccgaggagaacttctttgagatctgcgatgagctgggagtgaagcggccatcttctgtgaaagtattctcaggcaaaagtgagcgcagctcctctggactgctggagtgggaatccaagagcgatgccctggagactctgggcttcctgaaccattaccagatgaaaaacccaaatggtccatacccttacactctgaagttgtgtttctccactgctcagcacgcctcctaattaggtgcctaggaagagtcccatctgagcaggaagacatttctctttcctttatgccattttttgtttttgttatttgcaaaagatcttgtattccttttttttttttttttttttttttttaaatgctaggtttgtagaggcttacttaaccttaatggaaacgctggaaatctgcagggggagggagaggggaactgttatctcccaagattaaccttcacttttaaaaaattattgtacatgtgatttttttttttcctgttcatacatttgtgctgcccatgtactcttggcacatttcaataaaattgtttggaaaataaa

SEQ ID NO: 140549 - DNA, 593 bp, Homo sapiens
  Payload ID: 7569
  Gene Symbol: HNRNPL
  Gene Name: heterogeneous nuclear ribonucleoprotein L
  ENST ID: ENST00000601813
  CDS Start-End: 1-593
ggagaagcggcgtcggcggctggagcagaggcagcagccggacgagcagcggaggcggtcgggagcgatggagaactacgatgacccgcacaaaacccctgcctccccagttgtccacatcaggggcctgattgacggtgtggtggaagcagaccttgtggaggccttgcaggagtttggacccatcagctatgtggtggtaatgcctaaaaagagacaagcactggtggagtttgaagatgtgttgggggcttgcaacgcagtgaactacgcagccgacaaccaaatatacattgctggtcacccagcttttgtcaactactctaccagccagaagatctcccgccctggggactcggatgactcccggagcgtgaacagtgtgcttctctttaccatcctgaaccccatttattcgatcaccacggatgttctttacactatctgtaatccttgtggccctgtccagagaattgtcattttcaggaagaatggagttcaggcgatggtggaatttgactcagttcaaagtgcccagcgggccaaggcctctctcaatggggctgatatctattctggctgttgcactctga

SEQ ID NO: 140550 - DNA, 1633 bp, Homo sapiens
  Payload ID: 7569
  Gene Symbol: HNRNPL
  Gene Name: heterogeneous nuclear ribonucleoprotein L
  Uniprot ID: P14866
  ENST ID: ENST00000600873
  CDS Start-End: 176-1546
tcttttcgatccgggacggccggtcaggctcgccgccgagctggagaactacgatgacccgcacaaaacccctgcctccccagttgtccacatcaggggcctgattgacggtgtggtggaagcagaccttgtggaggccttgcaggagtttggacccatcagctatgtggtggtaatgcctaaaaagagacaagcactggtggagtttgaagatgtgttgggggcttgcaacgcagtgaactacgcagccgacaaccaaatatacattgctggtcacccagcttttgtcaactactctaccagccagaagatctcccgccctggggactcggatgactcccggagcgtgaacagtgtgcttctctttaccatcctgaaccccatttattcgatcaccacggatgttctttacactatctgtaatccttgtggccctgtccagagaattgtcattttcaggaagaatggagttcaggcgatggtggaatttgactcagttcaaagtgcccagcgggccaaggcctctctcaatggggctgatatctattctggctgttgcactctgaagatcgaatacgcaaagcctacacgcttgaatgtgttcaagaatgatcaggatacttgggactacacaaaccccaatctcagtggacaaggtgaccctggcagcaaccccaacaaacgccagaggcagccccctctcctgggagatcaccccgcagaatatggagggccccacggtgggtaccacagccattaccatgatgagggctacgggccccccccacctcactacgaagggagaaggatgggtccaccagtggggggtcaccgtcggggcccaagtcgctacggcccccagtatgggcaccccccaccccctcccccaccacccgagtatggccctcacgccgacagccctgtgctcatggtctatggcttggatcaatctaagatgaactgtgaccgagtcttcaatgtcttctgcttatatggcaatgtggagaaggtgaaattcatgaaaagcaagccgggggccgccatggtggagatggctgatggctacgctgtagaccgggccattacccacctcaacaacaacttcatgtttgggcagaagctgaatgtctgtgtctccaagcagccagccatcatgcctggtcagtcatacgggttggaagacgggtcttgcagttacaaagacttcagtgaatcccggaacaatcggttctccaccccagagcaggcagccaagaaccgcatccagcaccccagcaacgtgctgcacttcttcaacgccccgctggaggtgaccgaggagaacttctttgagatctgcgatgagctgggagtgaagcggccatcttctgtgaaagtattctcaggcaaaagtgagcgcagctcctctggactgctggagtgggaatccaagagcgatgccctggagactctgggcttcctgaaccattaccagatgaaaaacccaaatggtccatacccttacactctgaagttgtgtttctccactgctcagcacgcctcctaattaggtgcctaggaagagtcccatctgagcaggaagacatttctctttcctttatgccattttttgtttttgttatttgcaaaagat

SEQ ID NO: 140551 - DNA, 659 bp, Homo sapiens
  Payload ID: 7569
  Gene Symbol: HNRNPL
  Gene Name: heterogeneous nuclear ribonucleoprotein L
  ENST ID: ENST00000600233
  CDS Start-End: 1-659
tggctccatgcgcaggcgcagtgttcccgcccggcctcgtgggcggttaggggagcgcctggagaactacgatgacccgcacaaaacccctgcctccccagttgtccacatcaggggcctgattgacggtgtggtggaagcagaccttgtggaggccttgcaggagtttggacccatcagctatgtggtggtaatgcctaaaaagagacaagcactggtggagtttgaagatgtgttgggggcttgcaacgcagtgaactacgcagccgacaaccaaatatacattgctggtcacccagcttttgtcaactactctaccagccagaagatctcccgccctggggactcggatgactcccggagcgtgaacagtgtgcttctctttaccatcctgaaccccatttattcgatcaccacggatgttctttacactatctgtaatccttgtggccctgtccagagaattgtcattttcaggaagaatggagttcaggcgatggtggaatttgactcagttcaaagtgcccagcgggccaaggcctctctcaatggggctgatatctattctggctgttgcactctgaagatcgaatacgcaaagcctacacgcttgaatgtgttcaagaatgatcaggatacttgggactacacaaacccca

SEQ ID NO: 140552 - DNA, 659 bp, Homo sapiens; identical to SEQ ID NO: 140551
  Payload ID: 7569
  Gene Symbol: HNRNPL
  Gene Name: Heterogeneous nuclear ribonucleoprotein L
  ENST ID: ENST00000634376
  CDS Start-End: 1-659

SEQ ID NO: 140553 - DNA, 2471 bp, Homo sapiens; identical to SEQ ID NO: 140546
  Payload ID: 7569
  Gene Symbol: HNRNPL
  Gene Name: Heterogeneous nuclear ribonucleoprotein L
  ENST ID: ENST00000634753
  CDS Start-End: 368-2137

SEQ ID NO: 140554 - DNA, 1633 bp, Homo sapiens; identical to SEQ ID NO: 140550
  Payload ID: 7569
  Gene Symbol: HNRNPL
  Gene Name: Heterogeneous nuclear ribonucleoprotein L
  ENST ID: ENST00000634237
  CDS Start-End: 176-1546

SEQ ID NO: 140555 - DNA, 593 bp, Homo sapiens; identical to SEQ ID NO: 140549
  Payload ID: 7569
  Gene Symbol: HNRNPL
  Gene Name: Heterogeneous nuclear ribonucleoprotein L
  ENST ID: ENST00000635025
  CDS Start-End: 1-593

SEQ ID NO: 140556 - DNA, 1918 bp, Homo sapiens; identical to SEQ ID NO: 140548
  Payload ID: 7569
  Gene Symbol: HNRNPL
  Gene Name: Heterogeneous nuclear ribonucleoprotein L
  ENST ID: ENST00000634312
  CDS Start-End: 1-1591

SEQ ID NO: 140557 - DNA, 1952 bp, Homo sapiens; identical to SEQ ID NO: 140547
  Payload ID: 7569
  Gene Symbol: HNRNPL
  Gene Name: Heterogeneous nuclear ribonucleoprotein L
  ENST ID: ENST00000634983
  CDS Start-End: 185-724

SEQ ID NO: 140558 - DNA, 2190 bp, Homo sapiens
  Payload ID: 7570
  Gene Symbol: HNRNPLL
  Gene Name: heterogeneous nuclear ribonucleoprotein L-like
  ENST ID: ENST00000272249
  CDS Start-End: 1-653
gtggaagtcatcataaagtttctgtttcacccgtcgtccatgttcgaggactctgtgaatctgtggtggaagcagacctcgtggaagcgctggaaaaatttgggacaatatgctatgtgatgatgatgccatttaaacgacaggctctagtggaatttgaaaacatagatagtgccaaagaatgtgtgacatttgctgcagatgaacccgtgtacattgctggtcaacaggcttttttcaactattctacaagcaaaaggatcactcggccaggaaatactgatgatccatcaggaggcaacaaagttcttctgctctcaattcagaatccgctttatccaattacagtggatgttttatatactgtatgcaaccctgttggcaaagtgcaacgtattgttatattcaagagaaatgggatacaagcaatggttgagtttgaatcagtcctttgtgcccagaaagctaaagcagcactcaatggagctgatatatatgctggatgttgcacactaaaaattgaatatgcacggccaactcgtctaaatgttattaggaatgacaatgacagttgggactacactaaaccatatttgggaagacgaggttgttgttggcttatgctgaaacttcttgaaagaagcccactttgaaaatgtgttgctgttgaagctaatagtatgattcagatagaggaaagggtcgccagagacaagccattttgggagaacacccttcttcgtttagacatgatggctatggatcccatggtccattattgcctttaccaagtcgttacagaatgggctctcgagatacacctgaacttgttgcttatccattaccacaggcttcttcctcttacatgcatggaggaaatccctctggttcagttgtaatggttagtggattacatcaactaaaaatgaattgttcaagagtcttcaacctgttctgcttatatggaaatattgagaaggtaaaatttatgaagaccattcctggtacagcactggtagaaatgggtgatgagtatgctgtagaaagagctgtcacacaccttaataatgtcaaattatttgggaaaagacttaatgtttgcgtgtctaaacaacattcagttgttccaagtcaaatatttgagctggaggatggtaccagcagctacaaagattttgcaatgagcaaaaataatcgctttacaagtgctggccaagcatctaagaatataatccagccaccctcctgtgttttgcattattataatgttccattgtgtgtcacagaagagaccttcacaaagttgtgtaatgaccatgaagttcttacattcatcaaatataaagtgtttgatgcaaaaccttcagccaaaacactttctgggctattagaatgggagtgcaaaactgatgcagtagaagcccttacggcactgaatcactatcagataagagtgccgaatggttccaatccctatacattgaagctttgcttttctacatcatcccatttataagaagagaagagcatgttagaatttatgttcacctttattacaatttcaaagctacacttcattaaaaaaaaatctaaaatggttgatctcatgttgccttgcttactttaagatcctgttctgtaataaacatattttgccttgagtaaatttgttgtaagcttaaatattgaattgttttcattttaagatagaatatcataatgtagactatctacagcttcattgtagattatacagatatatgatttctaaccttattactggaatttttcttccacagtaaaaatatatttgcattcttaatgctaattatctgcaagtattttttcattgtgtaagagattaatgcaggtgaaagtattgcattttaatatagaattcctattatatgtttagatgtttaagtatgttgcagttactcatattaaacataacttgtatatttattattttaatgaagtttgagaataacgttacatatgttgaattttaagtactacagatttaactgattttatatttctgaaaggctaacagacatggatacacgtgtacagtatgcattcaaacttatttaaattggtgtatttttttttaagtcactgtccatttgtattgacatgcctctgtttctagtccagtttggagattttataaagttataacaatga

SEQ ID NO: 140559 - DNA, 2779 bp, Homo sapiens
  Payload ID: 7570
  Gene Symbol: HNRNPLL
  Gene Name: heterogeneous nuclear ribonucleoprotein L-like
  ENST ID: ENST00000358367
  CDS Start-End: 170-1783
ggattcgatcctgcgcgacggccgcgaaggcgggggcggaggctcggcctgcgcggctgggagcggcttaggggaggagggaagaccggaagccacggttgcgtccccatccttagattcgctcctccgggcagggagcggagacggaggaggaggagggagaggctgaatgttggctcgggagacgtacgaggaggaccgggagtacgagagccaggccaagcgtctcaagaccgaggagggggagatcgactactcggccgaggaaggcgagaaccgccgggaagcgacgccccggggcgggggcgatggcggcggcggcggccggagcttctctcagccggaggcaggtggaagtcatcataaagtttctgtttcacccgtcgtccatgttcgaggactctgtgaatctgtggtggaagcagacctcgtggaagcgctggaaaaatttgggacaatatgctatgtgatgatgatgccatttaaacgacaggctctagtggaatttgaaaacatagatagtgccaaagaatgtgtgacatttgctgcagatgaacccgtgtacattgctggtcaacaggcttttttcaactattctacaagcaaaaggatcactcggccaggaaatactgatgatccatcaggaggcaacaaagttcttctgctctcaattcagaatccgctttatccaattacagtggatgttttatatactgtatgcaaccctgttggcaaagtgcaacgtattgttatattcaagagaaatgggatacaagcaatgcttatgtttgaatcagtcctttgtgcccagaaagctaaagcagcactcaatggagctgatatatatgctggatgttgcacactaaaaattgaatatgcacggccaactcgtctaaatgttattaggaatgacaatgacagttgggactacactaaaccatatttgggaagacgagatagaggaaagggtcgccagagacaagccattttgggagaacacccttcttcgtttagacatgatggctatggatcccatggtccattattgcctttaccaagtcgttacagaatgggctctcgagatacacctgaacttgttgcttatccattaccacaggcttcttcctcttacatgcatggaggaaatccctctggttcagttgtaatggttagtggattacatcaactaaaaatgaattgttcaagagtcttcaacctgttctgcttatatggaaatattgagaaggtaaaatttatgaagaccattcctggtacagcactggtagaaatgggtgatgagtatgctgtagaaagagctgtcacacaccttaataatgtcaaattatttgggaaaagacttaatgtttgcgtgtctaaacaacattcagttgttccaagtcaaatatttgagctggaggatggtaccagcagctacaaagattttgcaatgagcaaaaataatcgctttacaagtgctggccaagcatctaagaatataatccagccaccctcctgtgttttgcattattataatgttccattgtgtgtcacagaagagaccttcacaaagttgtgtaatgaccatgaagttcttacattcatcaaatataaagtgtttgatgcaaaaccttcagccaaaacactttctgggctattagaatgggagtgcaaaactgatgcagtagaagcccttacggcactgaatcactatcagataagagtgccgaatggttccaatccctatacattgaagctttgcttttctacatcatcccatttataagaagagaagagcatgttagaatttatgttcacctttattacaatttcaaagctacacttcattaaaaaaaaatctaaaatggttgatctcatgttgccttgcttactttaagatcctgttctgtaataaacatattttgccttgagtaaatttgttgtaagcttaaatattgaattgttttcattttaagatagaatatcataatgtagactatctacagcttcattgtagattatacagatatatgatttctaaccttattactggaatttttcttccacagtaaaaatatatttgcattcttaatgctaattatctgcaagtattttttcattgtgtaagagattaatgcaggtgaaagtattgcattttaatatagaattcctattatatgtttagatgtttaagtatgttgcagttactcatattaaacataacttgtatatttattattttaatgaagtttgagaataacgttacatatgttgaattttaagtactacagatttaactgattttatatttctgaaaggctaacagacatggatacacgtgtacagtatgcattcaaacttatttaaattggtgtatttttttttaagtcactgtccatttgtattgacatgcctctgtttctagtccagtttggagattttataaagttataacaatgagttaatgtgttcattttcatttgttgcatgtgacttaaatacagctagtatttggcattgagattttaatagaggttataattaacagttcctcttatagataataatctgggatccatgggtgggcttcagagaatctgtgtaccccctaaaattgtatgtagaattttggatatttacatttttattttttaactcttggatccatcagtaatatgtatttttctatatggtacaagatttaaggatctaattttatttttattccaaacagatagctatttgtctcaataccatttattaaacattctttctcccactg

SEQ ID NO: 140560 - DNA, 2523 bp, Homo sapiens
  Payload ID: 7570
  Gene Symbol: HNRNPLL
  Gene Name: heterogeneous nuclear ribonucleoprotein L-like
  ENST ID: ENST00000378915
  CDS Start-End: 1-1527
atgtcctcctcctcttcctcccccagggagacgtacgaggaggaccgggagtacgagagccaggccaagcgtctcaagaccgaggagggggagatcgactactcggccgaggaaggcgagaaccgccgggaagcgacgccccggggcgggggcgatggcggcggcggcggccggagcttctctcagccggaggcaggtggaagtcatcataaagtttctgtttcacccgtcgtccatgttcgaggactctgtgaatctgtggtggaagcagacctcgtggaagcgctggaaaaatttgggacaatatgctatgtgatgatgatgccatttaaacgacaggctctagtggaatttgaaaacatagatagtgccaaagaatgtgtgacatttgctgcagatgaacccgtgtacattgctggtcaacaggcttttttcaactattctacaagcaaaaggatcactcggccaggaaatactgatgatccatcaggaggcaacaaagttcttctgctctcaattcagaatccgctttatccaattacagtggatgttttatatactgtatgcaaccctgttggcaaagtgcaacgtattgttatattcaagagaaatgggatacaagcaatgccaactcgtctaaatgttattaggaatgacaatgacagttgggactacactaaaccatatttgggaagacgagatagaggaaagggtcgccagagacaagccattttgggagaacacccttcttcgtttagacatgatggctatggatcccatggtccattattgcctttaccaagtcgttacagaatgggctctcgagatacacctgaacttgttgcttatccattaccacaggcttcttcctcttacatgcatggaggaaatccctctggttcagttgtaatggttagtggattacatcaactaaaaatgaattgttcaagagtcttcaacctgttctgcttatatggaaatattgagaaggtaaaatttatgaagaccattcctggtacagcactggtagaaatgggtgatgagtatgctgtagaaagagctgtcacacaccttaataatgtcaaattatttgggaaaagacttaatgtttgcgtgtctaaacaacattcagttgttccaagtcaaatatttgagctggaggatggtaccagcagctacaaagattttgcaatgagcaaaaataatcgctttacaagtgctggccaagcatctaagaatataatccagccaccctcctgtgttttgcattattataatgttccattgtgtgtcacagaagagaccttcacaaagttgtgtaatgaccatgaagttcttacattcatcaaatataaagtgtttgatgcaaaaccttcagccaaaacactttctgggctattagaatgggagtgcaaaactgatgcagtagaagcccttacggcactgaatcactatcagataagagtgccgaatggttccaatccctatacattgaagctttgcttttctacatcatcccatttataagaagagaagagcatgttagaatttatgttcacctttattacaatttcaaagctacacttcattaaaaaaaaatctaaaatggttgatctcatgttgccttgcttactttaagatcctgttctgtaataaacatattttgccttgagtaaatttgttgtaagcttaaatattgaattgttttcattttaagatagaatatcataatgtagactatctacagcttcattgtagattatacagatatatgatttctaaccttattactggaatttttcttccacagtaaaaatatatttgcattcttaatgctaattatctgcaagtattttttcattgtgtaagagattaatgcaggtgaaagtattgcattttaatatagaattcctattatatgtttagatgtttaagtatgttgcagttactcatattaaacataacttgtatatttattattttaatgaagtttgagaataacgttacatatgttgaattttaagtactacagatttaactgattttatatttctgaaaggctaacagacatggatacacgtgtacagtatgcattcaaacttatttaaattggtgtatttttttttaagtcactgtccatttgtattgacatgcctctgtttctagtccagtttggagattttataaagttataacaatgagttaatgtgttcattttcatttgttgcatgtgacttaaatacagctagtatttggcattgagattttaatagaggttataattaacagttcctcttatagataataatctgggatccatgggtgggcttcagagaatctgtgtaccccctaaaattgtatgtagaattttggatatttacatttttattttttaactcttggatccatcagtaatatgtatttttctatatggtacaagatttaaggatctaattttatttttattccaaacagatagctatttgtctcaataccatttattaaacattctttctcccactg

SEQ ID NO: 140561 - DNA, 1908 bp, Homo sapiens
  Payload ID: 7570
  Gene Symbol: HNRNPLL
  Gene Name: heterogeneous nuclear ribonucleoprotein L-like
  Uniprot ID: Q8WVV9
  ENST ID: ENST00000409328
  CDS Start-End: 232-1758
ggtaattgagaggagcggccgctccagagcttcctcccggggcgcccccctcagtccgtccgcgcttctcagccgccagtctcctggccgcgcagtccccgcggacggccgggccgcggagaccctcgcagaagaggcgctgccggcggcgaggactggccggcggcatccgaggcgcgcgccccaccgccacccccacccgcctgccagccggtccctccggccgccgccatgtcctcctcctcttcctcccccagggagacgtacgaggaggaccgggagtacgagagccaggccaagcgtctcaagaccgaggagggggagatcgactactcggccgaggaaggcgagaaccgccgggaagcgacgccccggggcgggggcgatggcggcggcggcggccggagcttctctcagccggaggcaggtggaagtcatcataaagtttctgtttcacccgtcgtccatgttcgaggactctgtgaatctgtggtggaagcagacctcgtggaagcgctggaaaaatttgggacaatatgctatgtgatgatgatgccatttaaacgacaggctctagtggaatttgaaaacatagatagtgccaaagaatgtgtgacatttgctgcagatgaacccgtgtacattgctggtcaacaggcttttttcaactattctacaagcaaaaggatcactcggccaggaaatactgatgatccatcaggaggcaacaaagttcttctgctctcaattcagaatccgctttatccaattacagtggatgttttatatactgtatgcaaccctgttggcaaagtgcaacgtattgttatattcaagagaaatgggatacaagcaatggttgatcgtctaaatgttattaggaatgacaatgacagttgggactacactaaaccatatttgggaagacgagatagaggaaagggtcgccagagacaagccattttgggagaacacccttcttcgtttagacatgatggctatggatcccatggtccattattgcctttaccaagtcgttacagaatgggctctcgagatacacctgaacttgttgcttatccattaccacaggcttcttcctcttacatgcatggaggaaatccctctggttcagttgtaatggttagtggattacatcaactaaaaatgaattgttcaagagtcttcaacctgttctgcttatatggaaatattgagaaggtaaaatttatgaagaccattcctggtacagcactggtagaaatgggtgatgagtatgctgtagaaagagctgtcacacaccttaataatgtcaaattatttgggaaaagacttaatgtttgcgtgtctaaacaacattcagttgttccaagtcaaatatttgagctggaggatggtaccagcagctacaaagattttgcaatgagcaaaaataatcgctttacaagtgctggccaagcatctaagaatataatccagccaccctcctgtgttttgcattattataatgttccattgtgtgtcacagaagagaccttcacaaagttgtgtaatgaccatgaagttcttacattcatcaaatataaagtgtttgatgcaaaaccttcagccaaaacactttctgggctattagaatgggagtgcaaaactgatgcagtagaagcccttacggcactgaatcactatcagataagagtgccgaatggttccaatccctatacattgaagctttgcttttctacatcatcccatttataagaagagaagagcatgttagaatttatgttcacctttattacaatttcaaagctacacttcattaaaaaaaaatctaaaatggttgatctcatgttgccttgcttactttaagatcctgttctgtaataaacatattttgccttgagtaaa

SEQ ID NO: 140562 - DNA, 1687 bp, Homo sapiens
  Payload ID: 7570
  Gene Symbol: HNRNPLL
  Gene Name: heterogeneous nuclear ribonucleoprotein L-like
  Uniprot ID: Q8WVV9
  ENST ID: ENST00000410076
  CDS Start-End: 63-890
catccttagattcgctcctccgggcagggagcggagacggaggaggaggagggagaggctgaatgttggctcgggagacgtacgaggaggaccgggagtacgagagccaggccaagcgtctcaagaccgaggagggggagatcgactactcggccgaggaaggcgagaaccgccgggaagcgacgccccggggcgggggcgatggcggcggcggcggccggagcttctctcagccggaggcaggtggaagtcatcataaagtttctgtttcacccgtcgtccatgttcgaggactctgtgaatctgtggtggaagcagacctcgtggaagcgctggaaaaatttgggacaatatgctatgtgatgatgatgccatttaaacgacaggctctagtggaatttgaaaacatagatagtgccaaagaatgtgtgacatttgctgcagatgaacccgtgtacattgctggtcaacaggcttttttcaactattctacaagcaaaaggatcactcggccaggaaatactgatgatccatcaggaggcaacaaagttcttctgctctcaattcagaatccgctttatccaattacagtggatgttttatatactgtatgcaaccctgttggcaaagtgcaacgtattgttatattcaagagaaatgggatacaagcaatggttgagtttgaatcagtcctttgtgcccagaaagctaaagcagcactcaatggagctgatatatatgctggatgttgcacactaaaaattgaatatgcacggccaactcgtctaaatgttattaggaatgacaatgacagttgggactacactaaaccatatttgggaagacgaggtaggtattttatacattttagaatgtacttgatctgctgacaaatttttatatgcagttagattcttttttcctgagatgagctagttaattcaaatgaaaaccttgttgatgaatgcttttgttgcaaaaggccatgtaatgctggaaaataaccttgaacattagtgccccctactggtatgtactgagctatttatatttagttcaacaaggagcccacacattcaggcacgcccgcagttcaaggacttgcatttctccaagcagctctctctctttggaggagaggaaactgattcagaatattccttacaaactgcaaacttgcacactgcttctctatggaaaggactttcccccaagctggacgaggcattaagaaggatagaggactccagcaggctgactctacacttcatcatgcacaacatcggcatcagcaaaaagccctctgaaaaactcagactcgcaattcaccttgactgcatactgcatgcaccatcaccccaagtttttaaaggaggacacttaacagtacttcagaattgcatgggatgaacaccatgatagactgtgcccatttatacaagttgtatgtatatattggtctgatttcccttaaggtttcagttgtagaatttaagactttccactaacggaaactagacttcatctgcaatgttgtaaatcttaatgcccattactgtgactgtgtgcagcttagattcaaattgttaattggcaaataaccaggaccagtttattaacaggtcttgggaattgataatgctcaaccaatccacacagatagaaaaataaaaggattagaaaggtg

SEQ ID NO: 140563 - DNA, 3980 bp, Homo sapiens
  Payload ID: 7570
  Gene Symbol: HNRNPLL
  Gene Name: heterogeneous nuclear ribonucleoprotein L-like
  Uniprot ID: Q8WVV9
  ENST ID: ENST00000409636
  CDS Start-End: 163-1776
atcctgcgcgacggccgcgaaggcgggggcggaggctcggcctgcgcggctgggagcggcttaggggaggagggaagaccggaagccacggttgcgtccccatccttagattcgctcctccgggcagggagcggagacggaggaggaggagggagaggctgaatgttggctcgggagacgtacgaggaggaccgggagtacgagagccaggccaagcgtctcaagaccgaggagggggagatcgactactcggccgaggaaggcgagaaccgccgggaagcgacgccccggggcgggggcgatggcggcggcggcggccggagcttctctcagccggaggcaggtggaagtcatcataaagtttctgtttcacccgtcgtccatgttcgaggactctgtgaatctgtggtggaagcagacctcgtggaagcgctggaaaaatttgggacaatatgctatgtgatgatgatgccatttaaacgacaggctctagtggaatttgaaaacatagatagtgccaaagaatgtgtgacatttgctgcagatgaacccgtgtacattgctggtcaacaggcttttttcaactattctacaagcaaaaggatcactcggccaggaaatactgatgatccatcaggaggcaacaaagttcttctgctctcaattcagaatccgctttatccaattacagtggatgttttatatactgtatgcaaccctgttggcaaagtgcaacgtattgttatattcaagagaaatgggatacaagcaatggttgagtttgaatcagtcctttgtgcccagaaagctaaagcagcactcaatggagctgatatatatgctggatgttgcacactaaaaattgaatatgcacggccaactcgtctaaatgttattaggaatgacaatgacagttgggactacactaaaccatatttgggaagacgagatagaggaaagggtcgccagagacaagccattttgggagaacacccttcttcgtttagacatgatggctatggatcccatggtccattattgcctttaccaagtcgttacagaatgggctctcgagatacacctgaacttgttgcttatccattaccacaggcttcttcctcttacatgcatggaggaaatccctctggttcagttgtaatggttagtggattacatcaactaaaaatgaattgttcaagagtcttcaacctgttctgcttatatggaaatattgagaaggtaaaatttatgaagaccattcctggtacagcactggtagaaatgggtgatgagtatgctgtagaaagagctgtcacacaccttaataatgtcaaattatttgggaaaagacttaatgtttgcgtgtctaaacaacattcagttgttccaagtcaaatatttgagctggaggatggtaccagcagctacaaagattttgcaatgagcaaaaataatcgctttacaagtgctggccaagcatctaagaatataatccagccaccctcctgtgttttgcattattataatgttccattgtgtgtcacagaagagaccttcacaaagttgtgtaatgaccatgaagttcttacattcatcaaatataaagtgtttgatgcaaaaccttcagccaaaacactttctgggctattagaatgggagtgcaaaactgatgcagtagaagcccttacggcactgaatcactatcagataagagtgccgaatggttccaatccctatacattgaagctttgcttttctacatcatcccatttataagaagagaagagcatgttagaatttatgttcacctttattacaatttcaaagctacacttcattaaaaaaaaatctaaaatggttgatctcatgttgccttgcttactttaagatcctgttctgtaataaacatattttgccttgagtaaatttgttgtaagcttaaatattgaattgttttcattttaagatagaatatcataatgtagactatctacagcttcattgtagattatacagatatatgatttctaaccttattactggaatttttcttccacagtaaaaatatatttgcattcttaatgctaattatctgcaagtattttttcattgtgtaagagattaatgcaggtgaaagtattgcattttaatatagaattcctattatatgtttagatgtttaagtatgttgcagttactcatattaaacataacttgtatatttattattttaatgaagtttgagaataacgttacatatgttgaattttaagtactacagatttaactgattttatatttctgaaaggctaacagacatggatacacgtgtacagtatgcattcaaacttatttaaattggtgtatttttttttaagtcactgtccatttgtattgacatgcctctgtttctagtccagtttggagattttataaagttataacaatgagttaatgtgttcattttcatttgttgcatgtgacttaaatacagctagtatttggcattgagattttaatagaggttataattaacagttcctcttatagataataatctgggatccatgggtgggcttcagagaatctgtgtaccccctaaaattgtatgtagaattttggatatttacatttttattttttaactcttggatccatcagtaatatgtatttttctatatggtacaagatttaaggatctaattttatttttattccaaacagatagctatttgtctcaataccatttattaaacattctttctcccactggatctgttttttttttctttttaagataatagattttatacataggcaagtaagatttaaggaccaaacatggtattaagagactatagcacgattgttaccaagttcacagcttttttacaatagaaaaactgatgtggccattttgttttcatctttaaaagaagggagaatatgtgtcatctacctagaataactgatatcagtagttgacaatatcagttttgtaatcctgacacttttaaacaaatttgtaaatgaaagttccatttagatcttttgtaaagactttattttaaattttaatataaaaaatccttttagaaataaggcaggcatttacaattttagagctgtttaataggaagtttagatggaaactaaacacacattaacatttatttcccctcattttgatggcagtggaccagcatttagccctctaaagataaagaaaaaattaaatttaatctagaagtattttagacccttatcacagaacccagtaagttatgccaagggtaactgtgtgaactgtgttcgatactgggctatgtatgtttcttattcattgccaatttaatacctaagtttatctaactttacaataaagctttttttcccctataaatacttttctacctcttttgaaaaattgaaataccttaattttggtttatgtaatagttgtctacgttccttcctcctctgaaaattaatgtgggttgtcagaattacagactttttaatgcctaagattttaagaaataaacctgtaggtgttggcaggacttatttcatttagattttaattagtttagatgtgtagaaatgatttttatctgtaaggctctctctccaccaaaataagtgaattgtttgggagtaaactagttggtaagttgggccttgctgatagatttatacactggtgtgtaagccctatactgctgctgtcactaatgtttttgatagtttacttaggcatgactgctgttaatgaagtttgctttgtgaatactctctctttccttagccttggcaacattcttctctgtgctatctttatgcttttagaagaactagaaaaagcagatttaagaactgtaaagaaataatactagctttgagtttttaaaaaaaatattgaaatcccatctctgtatccaaatcctactacacatttgataataaatctgccaaactga

SEQ ID NO: 140564 - DNA, 4173 bp, Homo sapiens
  Payload ID: 7570
  Gene Symbol: HNRNPLL
  Gene Name: heterogeneous nuclear ribonucleoprotein L-like
  Uniprot ID: Q8WVV9
  ENST ID: ENST00000449105
  CDS Start-End: 341-1969
ggggaggagggaagaccggaagccacggttgcgtccccatccttagattcgctcctccgggcagggagcggagacggaggaggaggagggagaggctgaatgttggctcggtaattgagaggagcggccgctccagagcttcctcccggggcgcccccctcagtccgtccgcgcttctcagccgccagtctcctggccgcgcagtccccgcggacggccgggccgcggagaccctcgcagaagaggcgctgccggcggcgaggactggccggcggcatccgaggcgcgcgccccaccgccacccccacccgcctgccagccggtccctccggccgccgccatgtcctcctcctcttcctcccccagggagacgtacgaggaggaccgggagtacgagagccaggccaagcgtctcaagaccgaggagggggagatcgactactcggccgaggaaggcgagaaccgccgggaagcgacgccccggggcgggggcgatggcggcggcggcggccggagcttctctcagccggaggcaggtggaagtcatcataaagtttctgtttcacccgtcgtccatgttcgaggactctgtgaatctgtggtggaagcagacctcgtggaagcgctggaaaaatttgggacaatatgctatgtgatgatgatgccatttaaacgacaggctctagtggaatttgaaaacatagatagtgccaaagaatgtgtgacatttgctgcagatgaacccgtgtacattgctggtcaacaggcttttttcaactattctacaagcaaaaggatcactcggccaggaaatactgatgatccatcaggaggcaacaaagttcttctgctctcaattcagaatccgctttatccaattacagtggatgttttatatactgtatgcaaccctgttggcaaagtgcaacgtattgttatattcaagagaaatgggatacaagcaatggttgagtttgaatcagtcctttgtgcccagaaagctaaagcagcactcaatggagctgatatatatgctggatgttgcacactaaaaattgaatatgcacggccaactcgtctaaatgttattaggaatgacaatgacagttgggactacactaaaccatatttgggaagacgagatagaggaaagggtcgccagagacaagccattttgggagaacacccttcttcgtttagacatgatggctatggatcccatggtccattattgcctttaccaagtcgttacagaatgggctctcgagatacacctgaacttgttgcttatccattaccacaggcttcttcctcttacatgcatggaggaaatccctctggttcagttgtaatggttagtggattacatcaactaaaaatgaattgttcaagagtcttcaacctgttctgcttatatggaaatattgagaaggtaaaatttatgaagaccattcctggtacagcactggtagaaatgggtgatgagtatgctgtagaaagagctgtcacacaccttaataatgtcaaattatttgggaaaagacttaatgtttgcgtgtctaaacaacattcagttgttccaagtcaaatatttgagctggaggatggtaccagcagctacaaagattttgcaatgagcaaaaataatcgctttacaagtgctggccaagcatctaagaatataatccagccaccctcctgtgttttgcattattataatgttccattgtgtgtcacagaagagaccttcacaaagttgtgtaatgaccatgaagttcttacattcatcaaatataaagtgtttgatgcaaaaccttcagccaaaacactttctgggctattagaatgggagtgcaaaactgatgcagtagaagcccttacggcactgaatcactatcagataagagtgccgaatggttccaatccctatacattgaagctttgcttttctacatcatcccatttataagaagagaagagcatgttagaatttatgttcacctttattacaatttcaaagctacacttcattaaaaaaaaatctaaaatggttgatctcatgttgccttgcttactttaagatcctgttctgtaataaacatattttgccttgagtaaatttgttgtaagcttaaatattgaattgttttcattttaagatagaatatcataatgtagactatctacagcttcattgtagattatacagatatatgatttctaaccttattactggaatttttcttccacagtaaaaatatatttgcattcttaatgctaattatctgcaagtattttttcattgtgtaagagattaatgcaggtgaaagtattgcattttaatatagaattcctattatatgtttagatgtttaagtatgttgcagttactcatattaaacataacttgtatatttattattttaatgaagtttgagaataacgttacatatgttgaattttaagtactacagatttaactgattttatatttctgaaaggctaacagacatggatacacgtgtacagtatgcattcaaacttatttaaattggtgtatttttttttaagtcactgtccatttgtattgacatgcctctgtttctagtccagtttggagattttataaagttataacaatgagttaatgtgttcattttcatttgttgcatgtgacttaaatacagctagtatttggcattgagattttaatagaggttataattaacagttcctcttatagataataatctgggatccatgggtgggcttcagagaatctgtgtaccccctaaaattgtatgtagaattttggatatttacatttttattttttaactcttggatccatcagtaatatgtatttttctatatggtacaagatttaaggatctaattttatttttattccaaacagatagctatttgtctcaataccatttattaaacattctttctcccactggatctgttttttttttctttttaagataatagattttatacataggcaagtaagatttaaggaccaaacatggtattaagagactatagcacgattgttaccaagttcacagcttttttacaatagaaaaactgatgtggccattttgttttcatctttaaaagaagggagaatatgtgtcatctacctagaataactgatatcagtagttgacaatatcagttttgtaatcctgacacttttaaacaaatttgtaaatgaaagttccatttagatcttttgtaaagactttattttaaattttaatataaaaaatccttttagaaataaggcaggcatttacaattttagagctgtttaataggaagtttagatggaaactaaacacacattaacatttatttcccctcattttgatggcagtggaccagcatttagccctctaaagataaagaaaaaattaaatttaatctagaagtattttagacccttatcacagaacccagtaagttatgccaagggtaactgtgtgaactgtgttcgatactgggctatgtatgtttcttattcattgccaatttaatacctaagtttatctaactttacaataaagctttttttcccctataaatacttttctacctcttttgaaaaattgaaataccttaattttggtttatgtaatagttgtctacgttccttcctcctctgaaaattaatgtgggttgtcagaattacagactttttaatgcctaagattttaagaaataaacctgtaggtgttggcaggacttatttcatttagattttaattagtttagatgtgtagaaatgatttttatctgtaaggctctctctccaccaaaataagtgaattgtttgggagtaaactagttggtaagttgggccttgctgatagatttatacactggtgtgtaagccctatactgctgctgtcactaatgtttttgatagtttacttaggcatgactgctgttaatgaagtttgctttgtgaatactctctctttccttagccttggcaacattcttctctgtgctatctttatgcttttagaagaactagaaaaagcagatttaagaactgtaaagaaataatactagctttgagtttttaaaaaaaatattgaaatcccatctctgtatccaaatcctactacacatttgataataaatctgccaaactga

SEQ ID NO: 140565 - DNA, 570 bp, Homo sapiens
  Payload ID: 7570
  Gene Symbol: HNRNPLL
  Gene Name: heterogeneous nuclear ribonucleoprotein L-like
  ENST ID: ENST00000425682
  CDS Start-End: 124-570
actgtcttgtgcttcttcgttcacatgtttggtaattcattgtaaccgaaaagggttttgcacaacttcagtggtccttcagcccagagaagaaatacctttgtggtcagactgttaaagtaaatgcaggaggcaggtggaagtcatcataaagtttctgtttcacccgtcgtccatgttcgaggactctgtgaatctgtggtggaagcagacctcgtggaagcgctggaaaaatttgggacaatatgctatgtgatgatgatgccatttaaacgacaggctctagtggaatttgaaaacatagatagtgccaaagaatgtgtgacatttgctgcagatgaacccgtgtacattgctggtcaacaggcttttttcaactattctacaagcaaaaggatcactcggccaggaaatactgatgatccatcaggaggcaacaaagttcttctgctctcaattcagaatccgctttatccaattacagtggatgttttatatactgtatgcaaccctgttggcaaagtgcaacgtattgttatattcaagagaaatgggatacaagcaatggtt

SEQ ID NO: 140566 - DNA, 512 bp, Homo sapiens
  Payload ID: 7570
  Gene Symbol: HNRNPLL
  Gene Name: heterogeneous nuclear ribonucleoprotein L-like
  ENST ID: ENST00000441689
  CDS Start-End: 1-400
tgtcaaattatttgggaaaagacttaatgtttgcgtgtctaaacaacattcagttgttccaagtcaaatatttgagctggaggatggtaccagcagctacaaagattttgcaatgagcaaaaataatcgctttacaagtgctggccaagcatctaagaatataatccagccaccctcctgtgttttgcattattataatgttccattgtgtgtcacagaagagaccttcacaaagttgtgtaatgaccatgaagttcttacattcatcaaatataaagtgtttgatgcaaaaccttcagccaaaacactttctgggctattagaatgggagtgcaaaactgatgcagtagaagcccttacggcactgaatcactatcagataagagtgccgagtaagtaaaatgctttatttgtgttgtaattatgtagtggcagttaccatcacagaaacattcatggtaatataaaaataacacttaataggcttcttaaaaaatacagataaatacaaa

SEQ ID NO: 140567 - DNA, 3035 bp, Homo sapiens
  Payload ID: 7570
  Gene Symbol: HNRNPLL
  Gene Name: heterogeneous nuclear ribonucleoprotein L-like
  ENST ID: ENST00000608859
  CDS Start-End: 411-2039
ggattcgatcctgcgcgacggccgcgaaggcgggggcggaggctcggcctgcgcggctgggagcggcttaggggaggagggaagaccggaagccacggttgcgtccccatccttagattcgctcctccgggcagggagcggagacggaggaggaggagggagaggctgaatgttggctcggtaattgagaggagcggccgctccagagcttcctcccggggcgcccccctcagtccgtccgcgcttctcagccgccagtctcctggccgcgcagtccccgcggacggccgggccgcggagaccctcgcagaagaggcgctgccggcggcgaggactggccggcggcatccgaggcgcgcgccccaccgccacccccacccgcctgccagccggtccctccggccgccgccatgtcctcctcctcttcctcccccagggagacgtacgaggaggaccgggagtacgagagccaggccaagcgtctcaagaccgaggagggggagatcgactactcggccgaggaaggcgagaaccgccgggaagcgacgccccggggcgggggcgatggcggcggcggcggccggagcttctctcagccggaggcaggtggaagtcatcataaagtttctgtttcacccgtcgtccatgttcgaggactctgtgaatctgtggtggaagcagacctcgtggaagcgctggaaaaatttgggacaatatgctatgtgatgatgatgccatttaaacgacaggctctagtggaatttgaaaacatagatagtgccaaagaatgtgtgacatttgctgcagatgaacccgtgtacattgctggtcaacaggcttttttcaactattctacaagcaaaaggatcactcggccaggaaatactgatgatccatcaggaggcaacaaagttcttctgctctcaattcagaatccgctttatccaattacagtggatgttttatatactgtatgcaaccctgttggcaaagtgcaacgtattgttatattcaagagaaatgggatacaagcaatgcttatgtttgaatcagtcctttgtgcccagaaagctaaagcagcactcaatggagctgatatatatgctggatgttgcacactaaaaattgaatatgcacggccaactcgtctaaatgttattaggaatgacaatgacagttgggactacactaaaccatatttgggaagacgagatagaggaaagggtcgccagagacaagccattttgggagaacacccttcttcgtttagacatgatggctatggatcccatggtccattattgcctttaccaagtcgttacagaatgggctctcgagatacacctgaacttgttgcttatccattaccacaggcttcttcctcttacatgcatggaggaaatccctctggttcagttgtaatggttagtggattacatcaactaaaaatgaattgttcaagagtcttcaacctgttctgcttatatggaaatattgagaaggtaaaatttatgaagaccattcctggtacagcactggtagaaatgggtgatgagtatgctgtagaaagagctgtcacacaccttaataatgtcaaattatttgggaaaagacttaatgtttgcgtgtctaaacaacattcagttgttccaagtcaaatatttgagctggaggatggtaccagcagctacaaagattttgcaatgagcaaaaataatcgctttacaagtgctggccaagcatctaagaatataatccagccaccctcctgtgttttgcattattataatgttccattgtgtgtcacagaagagaccttcacaaagttgtgtaatgaccatgaagttcttacattcatcaaatataaagtgtttgatgcaaaaccttcagccaaaacactttctgggctattagaatgggagtgcaaaactgatgcagtagaagcccttacggcactgaatcactatcagataagagtgccgaatggttccaatccctatacattgaagctttgcttttctacatcatcccatttataagaagagaagagcatgttagaatttatgttcacctttattacaatttcaaagctacacttcattaaaaaaaaatctaaaatggttgatctcatgttgccttgcttactttaagatcctgttctgtaataaacatattttgccttgagtaaatttgttgtaagcttaaatattgaattgttttcattttaagatagaatatcataatgtagactatctacagcttcattgtagattatacagatatatgatttctaaccttattactggaatttttcttccacagtaaaaatatatttgcattcttaatgctaattatctgcaagtattttttcattgtgtaagagattaatgcaggtgaaagtattgcattttaatatagaattcctattatatgtttagatgtttaagtatgttgcagttactcatattaaacataacttgtatatttattattttaatgaagtttgagaataacgttacatatgttgaattttaagtactacagatttaactgattttatatttctgaaaggctaacagacatggatacacgtgtacagtatgcattcaaacttatttaaattggtgtatttttttttaagtcactgtccatttgtattgacatgcctctgtttctagtccagtttggagattttataaagttataacaatgagttaatgtgttcattttcatttgttgcatgtgacttaaatacagctagtatttggcattgagattttaatagaggttataattaacagttcctcttatagataataatctgggatccatgggtgggcttcagagaatctgtgtaccccctaaaattgtatgtagaattttggatatttacatttttattttttaactcttggatccatcagtaatatgtatttttctatatggtacaagatttaaggatctaattttatttttattccaaacagatagctatttgtctcaataccatttattaaacattctttctcccactg

SEQ ID NO: 140568 - DNA, 2494 bp, Homo sapiens
  Payload ID: 7571
  Gene Symbol: HNRNPM
  Gene Name: heterogeneous nuclear ribonucleoprotein M
  Uniprot ID: P52272
  ENST ID: ENST00000325495
  CDS Start-End: 42-2234
gtgcagcccgttcgctcacacaaagcccagacgcggagaaaatggcggcaggggtcgaagcggcggcggaggtggcggcgacggagatcaaaatggaggaagagagcggcgcgcccggcgtgccgagcggcaacggggctccgggccctaagggtgaaggagaacgacctgctcagaatgagaagaggaaggagaaaaacataaaaagaggaggcaatcgctttgagccatatgccaatccaactaaaagatacagagccttcattacaaacataccttttgatgtgaaatggcagtcacttaaagacctggttaaagaaaaagttggtgaggtaacatacgtggagctcttaatggacgctgaaggaaagtcaaggggatgtgctgttgttgaattcaagatggaagagagcatgaaaaaagctgcggaagtcctaaacaagcatagtctgagcggaagaccactgaaagtcaaagaagatcctgatggtgaacatgccaggagagcaatgcaaaaggtgatggctacgactggtgggatgggtatgggaccaggtggcccaggaatgattactatcccacccagtatcctaaataatcccaacatcccaaatgagattatccatgcattacaggctggaagacttggaagcacagtatttgtagcaaatctggattataaagttggctggaagaaactgaaggaagtatttagtatggctggtgtggtggtccgagcagacattcttgaagataaagatggaaaaagtcgtggaataggcactgttacttttgaacagtccattgaagctgtgcaagctatatctatgttcaatggccagctgctatttgatagaccaatgcacgtcaagatggatgagagggccttaccaaaaggagatttcttccctcctgagcgtccacaacaacttccccatggccttggtggtattggcatggggttaggaccaggagggcaacccattgatgccaatcacctgaataaaggcatcggaatgggaaacataggtcccgcaggaatgggaatggaaggcataggatttggaataaataaaatgggaggaatggaggggccctttggtggtggtatggaaaacatgggtcgatttggatctgggatgaacatgggcaggataaatgaaatcctaagtaatgcactgaagagaggagagatcattgcaaagcagggaggaggtggaggtggaggaagcgtccctgggatcgagaggatgggtcctggcattgaccgcctcgggggtgccggcatggagcgcatgggcgcgggcctgggccacggcatggatcgcgtgggctccgagatcgagcgcatgggcctggtcatggaccgcatgggctccgtggagcgcatgggctccggcattgagcgcatgggcccgctgggcctcgaccacatggcctccagcattgagcgcatgggccagaccatggagcgcattggctctggcgtggagcgcatgggtgccggcatgggcttcggccttgagcgcatggccgctcccatcgaccgtgtgggccagaccattgagcgcatgggctctggcgtggagcgcatgggccctgccatcgagcgcatgggcctgagcatggagcgcatggtgcccgcaggtatgggagctggcctggagcgcatgggccccgtgatggatcgcatggccaccggcctggagcgcatgggcgccaacaatctggagcggatgggcctggagcgcatgggcgccaacagcctcgagcgcatgggcctggagcgcatgggtgccaacagcctcgagcgcatgggccctgccatgggcccggccctgggcgctggcattgagcgcatgggcctggccatgggtggcggtggcggtgccagctttgaccgtgccatcgagatggagcgtggcaacttcggaggaagcttcgcaggttcctttggtggagctggaggccatgctcctggggtggccaggaaggcctgccagatatttgtgagaaatctgccattcgatttcacatggaagatgctaaaggacaaattcaacgagtgcggccacgtgctgtacgccgacatcaagatggagaatgggaagtccaaggggtgtggcgtggttaagttcgagtcgccagaggtggccgagagagcctgccggatgatgaatggcatgaagctgagtggccgagagattgacgttcgaattgatagaaacgcttaagcagttgccttttttaaacatcgatacgagacctctgaatttgtattttttcttgttaaccattttaatttgttggctggatgtataaagatgtttaaaaaattcagttgctttttggggtaatttgaattacttttttaatgactggggttccatttgactgtttgcattgagattgcaatgtgcgcaattttttttgtagttgtggcatcttgttgacatcgaatatgactttgataataaataccggttcctgaaaa

SEQ ID NO: 140569 - DNA, 2568 bp, Homo sapiens
  Payload ID: 7571
  Gene Symbol: HNRNPM
  Gene Name: heterogeneous nuclear ribonucleoprotein M
  Uniprot ID: P52272
  ENST ID: ENST00000348943
  CDS Start-End: 233-2308
cgcgccgggaacagccagtcggtgcctaacgcgagtgtatctcgagagagaagcgatcaacagctgccggtctgcgcctgcgcgcggcgggggcgtggcccggggcgagtggggccaaggaggcagccgggagcggcgggcgcaggtgttactggttgcgtcgggtcacgtgggcgcgcaggcgcagcgcggtgcagcccgttcgctcacacaaagcccagacgcggagaaaatggcggcaggggtcgaagcggcggcggaggtggcggcgacggagatcaaaatggaggaagagagcggcgcgcccggcgtgccgagcggcaacggggctccgggccctaagggtgaaggagaacgacctgctcagaatgagaagaggaaggagaaaaacataaaaagaggaggcaatcgctttgagccatatgccaatccaactaaaagatacagagccttcattacaaacataccttttgatgtgaaatggcagtcacttaaagacctggttaaagaaaaagttggtgaggtaacatacgtggagctcttaatggacgctgaaggaaagtcaaggggatgtgctgttgttgaattcaagatggaagagagcatgaaaaaagctgcggaagtcctaaacaagcatagtctgagcggaagaccactgaaagtcaaagaagatcctgatggtgaacatgccaggagagcaatgcaaaaggctggaagacttggaagcacagtatttgtagcaaatctggattataaagttggctggaagaaactgaaggaagtatttagtatggctggtgtggtggtccgagcagacattcttgaagataaagatggaaaaagtcgtggaataggcactgttacttttgaacagtccattgaagctgtgcaagctatatctatgttcaatggccagctgctatttgatagaccaatgcacgtcaagatggatgagagggccttaccaaaaggagatttcttccctcctgagcgtccacaacaacttccccatggccttggtggtattggcatggggttaggaccaggagggcaacccattgatgccaatcacctgaataaaggcatcggaatgggaaacataggtcccgcaggaatgggaatggaaggcataggatttggaataaataaaatgggaggaatggaggggccctttggtggtggtatggaaaacatgggtcgatttggatctgggatgaacatgggcaggataaatgaaatcctaagtaatgcactgaagagaggagagatcattgcaaagcagggaggaggtggaggtggaggaagcgtccctgggatcgagaggatgggtcctggcattgaccgcctcgggggtgccggcatggagcgcatgggcgcgggcctgggccacggcatggatcgcgtgggctccgagatcgagcgcatgggcctggtcatggaccgcatgggctccgtggagcgcatgggctccggcattgagcgcatgggcccgctgggcctcgaccacatggcctccagcattgagcgcatgggccagaccatggagcgcattggctctggcgtggagcgcatgggtgccggcatgggcttcggccttgagcgcatggccgctcccatcgaccgtgtgggccagaccattgagcgcatgggctctggcgtggagcgcatgggccctgccatcgagcgcatgggcctgagcatggagcgcatggtgcccgcaggtatgggagctggcctggagcgcatgggccccgtgatggatcgcatggccaccggcctggagcgcatgggcgccaacaatctggagcggatgggcctggagcgcatgggcgccaacagcctcgagcgcatgggcctggagcgcatgggtgccaacagcctcgagcgcatgggccctgccatgggcccggccctgggcgctggcattgagcgcatgggcctggccatgggtggcggtggcggtgccagctttgaccgtgccatcgagatggagcgtggcaacttcggaggaagcttcgcaggttcctttggtggagctggaggccatgctcctggggtggccaggaaggcctgccagatatttgtgagaaatctgccattcgatttcacatggaagatgctaaaggacaaattcaacgagtgcggccacgtgctgtacgccgacatcaagatggagaatgggaagtccaaggggtgtggcgtggttaagttcgagtcgccagaggtggccgagagagcctgccggatgatgaatggcatgaagctgagtggccgagagattgacgttcgaattgatagaaacgcttaagcagttgccttttttaaacatcgatacgagacctctgaatttgtattttttcttgttaaccattttaatttgttggctggatgtataaagatgtttaaaaaattcagttgctttttggggtaatttgaattacttttttaatgactggggttccatttgactgtttgcattgagattgcaatgtgcgcaattttttttgtagttgtggcatcttgttgacatcgaatatgactttgataataaataccggttcctgaaaa

SEQ ID NO: 140570 - DNA, 409 bp, Homo sapiens
  Payload ID: 7571
  Gene Symbol: HNRNPM
  Gene Name: heterogeneous nuclear ribonucleoprotein M
  ENST ID: ENST00000598999
  CDS Start-End: 1-350
agcgcatgggcctggagcgcatgggtgccaacagcctcgagcgcatgggccctgccatgggcccggccctgggcgctggcattgagcgcatgggcctggccatgggtggcggtggcggtgccagctttgaccgtgccatcgagatggagcgtggcaacttcggaggaagcttcgcaggttcctttggtggagctggaggccatgctcctggggtggccaggaaggcctgccagatatttgtgagaaatctgccattcgatttcacatggaagatgctaaaggacaaattcaacgagtgcggtaagtgttgggaacggctttgtaggtgcttccctcgtgcttgttggtgacgcagccgagtcagcagcaaaacctccctcccagccccctccgtcggctcaggacccat

SEQ ID NO: 140571 - DNA, 298 bp, Homo sapiens
  Payload ID: 7571
  Gene Symbol: HNRNPM
  Gene Name: heterogeneous nuclear ribonucleoprotein M
  ENST ID: ENST00000598367
  CDS Start-End: 1-298
ggatgtgctgttgttgaattcaagatggaagagagcatgaaaaaagctgcggaacgtccacaacaacttccccatggccttggtggtattggcatggggttaggaccaggagggcaacccattgatgccaatcacctgaataaaggcatcggaatgggaaacataggtcccgcaggaatgggaatggaaggcataggatttggaataaataaaatgggaggaatggaggggccctttggtggtggtatggaaaacatgggtcgatttggatctgggatgaacatgggcaggataaatg

SEQ ID NO: 140572 - DNA, 664 bp, Homo sapiens
  Payload ID: 7571
  Gene Symbol: HNRNPM
  Gene Name: heterogeneous nuclear ribonucleoprotein M
  ENST ID: ENST00000596984
  CDS Start-End: 7-664
gagaaaatggcggcaggggtcgaagcggcggcggaggtggcggcgacggagatcaaaatggaggaagagagcggcgcgcccggcgtgccgagcggcaacggggctccgggccctaagggtgaaggagaacgacctgctcagaatgagaagaggaaggagaaaaacataaaaagaggaggcaatcgctttgagccatatgccaatccaactaaaagatacagagccttcattacaaacataccttttgatgtgaaatggcagtcacttaaagacctggttaaagaaaaagggattgttgttgaattcaagatggaagagagcatgaaaaaagctgcggaagtcctaaacaagcatagtctgagcggaagaccactgaaagtcaaagaagatcctgatggtgaacatgccaggagagcaatgcaaaaggctggaagacttggaagcacagtatttgtagcaaatctggattataaagttggctggaagaaactgaaggaagtatttagtatggctggtgtggtggtccgagcagacattcttgaagataaagatggaaaaagtcgtggaataggcactgttacttttgaacagtccattgaagctgtgcaagctatatctatgttcaatggccagctgctatttgatagaccaatgcacgtcaaga

SEQ ID NO: 140573 - DNA, 1147 bp, Homo sapiens
  Payload ID: 7571
  Gene Symbol: HNRNPM
  Gene Name: heterogeneous nuclear ribonucleoprotein M
  ENST ID: ENST00000597270
  CDS Start-End: 1-1147
tggctggaagaaactgaaggaagtatttagtatggctggtgtggtggtccgagcagacattcttgaagataaagatggaaaaagtcgtggaataggcactgttacttttgaacagtccattgaagctgtgcaagctatatctatgttcaatggccagctgctatttgatagaccaatgcacgtcaagatggatgagagggccttaccaaaaggagatttcttccctcctgagcgtccacaacaacttccccatggccttggtggtattggcatggggttaggaccaggagggcaacccattgatgccaatcacctgaataaaggcatcggaatgggaaacataggtcccgcaggaatgggaatggaaggcataggatttggaataaataaaatgggaggaatggaggggccctttggtggtggtatggaaaacatgggtcgatttggatctgggatgaacatgggcaggataaatggtggaggtggaggaagcgtccctgggatcgagaggatgggtcctggcattgaccgcctcgggggtgccggcatggagcgcatgggcgcgggcctgggccacggcatggatcgcgtgggctccgagatcgagcgcatgggcctggtcatggaccgcatgggctccgtggagcgcatgggctccggcattgagcgcatgggcccgctgggcctcgaccacatggcctccagcattgagcgcatgggccagaccatggagcgcattggctctggcgtggagcgcatgggtgccggcatgggcttcggccttgagcgcatggccgctcccatcgaccgtgtgggccagaccattgagcgcatgggctctggcgtggagcgcatgggccctgccatcgagcgcatgggcctgagcatggagcgcatggtgcccgcaggtatgggagctggcctggagcgcatgggccccgtgatggatcgcatggccaccggcctggagcgcatgggcgccaacaatctggagcggatgggcctggagcgcatgggcgccaacagcctcgagcgcatgggcctggagcgcatgggtgccaacagcctcgagcgcatgggccctgccatgggcccggccctgggcgctggcattgagcgcatgggcctggccatgggtggcggtggc

SEQ ID NO: 140574 - DNA, 1086 bp, Homo sapiens
  Payload ID: 7571
  Gene Symbol: HNRNPM
  Gene Name: heterogeneous nuclear ribonucleoprotein M
  ENST ID: ENST00000600092
  CDS Start-End: 29-1086
gctcacacaaagcccagacgcggagaaaatggcggcaggggtcgaagcggcggcggaggtggcggcgacggagatcaaaatggaggaagagagcggcgcgcccggcgtgccgagcggcaacggggctccgggccctaagggtgaaggagaacgacctgctcagaatgagaagaggaaggagaaaaacataaaaagaggaggcaatcgctttgagccatatgccaatccaactaaaagatacagagccttcattacaaacataccttttgatgtgaaatggcagtcacttaaagacctggttaaagaaaaagttggtgaggtaacatacgtggagctcttaatggacgctgaaggaaagtcaaggggatgtgctgttgttgaattcaagatggaagagagcatgaaaaaagctgcggaagtcctaaacaagcatagtctgagcggaagaccactgaaagtcaaagaagatcctgatggtgaacatgccaggagagcaatgcaaaaggctggaagacttggaagcacagtatttgtagcaaatctggattataaagttggctggaagaaactgaaggaagtatttagtatggctggtgtggtggtccgagcagacattcttgaagataaagatggaaaaagtcgtggaataggcactgttacttttgaacagtccattgaagctgtgcaagctatatctatgttcaatggccagctgctatttgatagaccaatgcacgtcaagatggatgagagggccttaccaaaaggagatttcttccctcctgagcgtccacaacaacttccccatggccttggtggtattggcatggggttaggaccaggagggcaacccattgatgccaatcacctgaataaaggcatcggaatgggaaacataggtcccgcaggaatggaggggccctttggtggtggtatggaaaacatgggtcgatttggatctgggatgaacatgggcaggataaatgaaatcctaagtaatgcactgaagagaggagagatcattgcaaagcagggaggaggtggaggtggaggaagcgtccctgggatcgagaggatgggtcctgg

SEQ ID NO: 140575 - DNA, 832 bp, Homo sapiens
  Payload ID: 7571
  Gene Symbol: HNRNPM
  Gene Name: heterogeneous nuclear ribonucleoprotein M
  ENST ID: ENST00000601645
  CDS Start-End: 6-832
agaaaatggcggcaggggtcgaagcggcggcggaggtggcggcgacggagatcaaaatggaggaagagagcggcgcgcccggcgtgccgagcggcaacggggctccgggccctaagggtgaaggagaacgacctgctcagaatgagaagaggaaggagaaaaacataaaaagaggaggcaatcgctttgagccatatgccaatccaactaaaagatacagagccttcattacaaacataccttttgatgtgaaatggcagtcacttaaagacctggttaaagaaaaagttggtgaggtaacatacgtggagctcttaatggacgctgaaggaaagtcaaggggatgtgctgttgttgaattcaagatggaagagagcatgaaaaaagctgcggaagtcctaaacaagcatagtctgagcggaagaccactgaaagtcaaagaagatcctgatggtgaacatgccaggagagcaatgcaaaagctggattataaagttggctggaagaaactgaaggaagtatttagtatggctggtgtggtggtccgagcagacattcttgaagataaagatggaaaaagtcgtggaataggcactgttacttttgaacagtccattgaagctgtgcaagctatatctatgttcaatggccagctgctatttgatagaccaatgcacgtcaagatggatgagagggccttaccaaaaggagatttcttccctcctgagcgtccacaacaacttccccatggccttggtggtattggcatggggttaggaccaggagggcaacccattgatgccaatcacctgaataaaggcatcggaatggg

SEQ ID NO: 140576 - DNA, 2373 bp, Homo sapiens
  Payload ID: 7571
  Gene Symbol: HNRNPM
  Gene Name: heterogeneous nuclear ribonucleoprotein M
  ENST ID: ENST00000600806
  CDS Start-End: 23-322
acaaagcccagacgcggagaaaatggcggcaggggtcgaagcggcggcggaggtggcggcgacggagatcaaaatggaggaagagagcggcgcgcccggcgtgccgagcggcaacggggctccgggccctaagggtgaaggagaacgacctgctcagaatgagaagaggaaggagaaaaacataaaaagaggaggcaatcgctttgagccatatgccaatccaactaaaagatacagagccttcattacaaacataccttttgatgtgaaatggcagtcacttaaagacctggttaaagaaaaagggatgtgctgttgttgaattcaagatggaagagagcatgaaaaaagctgcggaagtcctaaacaagcatagtctgagcggaagaccactgaaagtcaaagaagatcctgatggtgaacatgccaggagagcaatgcaaaaggtgatggctacgactggtgggatgggtatgggaccaggtggcccaggaatgattactatcccacccagtatcctaaataatcccaacatcccaaatgagattatccatgcattacaggctggaagacttggaagcacagtatttgtagcaaatctggattataaagttggctggaagaaactgaaggaagtatttagtatggctggtgtggtggtccgagcagacattcttgaagataaagatggaaaaagtcgtggaataggcactgttacttttgaacagtccattgaagctgtgcaagctatatctatgttcaatggccagctgctatttgatagaccaatgcacgtcaagatggatgagagggccttaccaaaaggagatttcttccctcctgagcgtccacaacaacttccccatggccttggtggtattggcatggggttaggaccaggagggcaacccattgatgccaatcacctgaataaaggcatcggaatgggaaacataggtcccgcaggaatggaggggccctttggtggtggtatggaaaacatgggtcgatttggatctgggatgaacatgggcaggataaatgaaatcctaagtaatgcactgaagagaggagagatcattgcaaagcagggaggaggtggaggtggaggaagcgtccctgggatcgagaggatgggtcctggcattgaccgcctcgggggtgccggcatggagcgcatgggcgcgggcctgggccacggcatggatcgcgtgggctccgagatcgagcgcatgggcctggtcatggaccgcatgggctccgtggagcgcatgggctccggcattgagcgcatgggcccgctgggcctcgaccacatggcctccagcattgagcgcatgggccagaccatggagcgcattggctctggcgtggagcgcatgggtgccggcatgggcttcggccttgagcgcatggccgctcccatcgaccgtgtgggccagaccattgagcgcatgggctctggcgtggagcgcatgggccctgccatcgagcgcatgggcctgagcatggagcgcatggtgcccgcaggtatgggagctggcctggagcgcatgggccccgtgatggatcgcatggccaccggcctggagcgcatgggcgccaacaatctggagcggatgggcctggagcgcatgggcgccaacagcctcgagcgcatgggcctggagcgcatgggtgccaacagcctcgagcgcatgggccctgccatgggcccggccctgggcgctggcattgagcgcatgggcctggccatgggtggcggtggcggtgccagctttgaccgtgccatcgagatggagcgtggcaacttcggaggaagcttcgcaggttcctttggtggagctggaggccatgctcctggggtggccaggaaggcctgccagatatttgtgagaaatctgccattcgatttcacatggaagatgctaaaggacaaattcaacgagtgcggccacgtgctgtacgccgacatcaagatggagaatgggaagtccaaggggtgtggcgtggttaagttcgagtcgccagaggtggccgagagagcctgccggatgatgaatggcatgaagctgagtggccgagagattgacgttcgaattgatagaaacgcttaagcagttgccttttttaaacatcgatacgagacctctgaatttgtattttttcttgttaaccattttaatttgttggctggatgtataaagatgtttaaaaaattcagttgctttttggggtaatttgaattacttttttaatgactggggttccatttgactgtttgcattgagattgcaatgtgcgcaattttttttgtagttgtggcatcttgttgacatcgaatatgactttgataataaataccggttcctg

SEQ ID NO: 140577 - DNA, 910 bp, Homo sapiens
  Payload ID: 7571
  Gene Symbol: HNRNPM
  Gene Name: heterogeneous nuclear ribonucleoprotein M
  ENST ID: ENST00000596295
  CDS Start-End: 1-643
cattggctctggcgtggagcgcatgggtgccggcatgggcttcggccttgagcgcatggccgctcccatcgaccgtgtgggccagaccattgagcgcatgggctctggcgtggagcgcatgggccctgccatcgagcgcatgggcctgagcatggagcgcatggtgcccgcaggtatgggagctggcctggagcgcatgggccccgtgatggatcgcatggccaccggcctggagcgcatgggcgccaacaatctggagcggatgggcctggagcgcatgggcgccaacagcctcgagcgcatgggcctggagcgcatgggtgccaacagcctcgagcgcatgggccctgccatgggcccggccctgggcgctggcattgagcgcatgggcctggccatgggtggcggtggcggtgccagctttgaccgtgccatcgagatggagcgtggcaacttcggaggaagcttcgcaggttcctttggtggagctggaggccatgctcctggggtggccaggaaggcctgccagatatttgtgagaaatctgccattcgatttcacatggaagatgctaaaggacaaattcaacgagtgcgaacctgagcggcaagtgctgcacgtgtcccgcaatgctctcgtgtgagccaattactggccacgtgctgtacgccgacatcaagatggagaatgggaagtccaaggggtgtggcgtggttaagttcgagtcgccagaggtggccgagagagcctgccggatgatgaatggcatgaagctgagtggccgagagattgacgttcgaattgatagaaacgcttaagcagttgccttttttaaacatcgatacgagacctctgaatttgtattttttcttgttaaccattttaatttgttggctggatgtataaagat

SEQ ID NO: 140578 - DNA, 1078 bp, Homo sapiens
  Payload ID: 7571
  Gene Symbol: HNRNPM
  Gene Name: heterogeneous nuclear ribonucleoprotein M
  ENST ID: ENST00000594907
  CDS Start-End: 8-1078
ggagaaaatggcggcaggggtcgaagcggcggcggaggtggcggcgacggagatcaaaatggaggaagagagcggcgcgcccggcgtgccgagcggcaacggggctccgggccctaagggtgaaggagaacgacctgctcagaatgagaagaggaaggagaaaaacataaaaagaggaggcaatcgctttgagccatatgccaatccaactaaaagatacagagccttcattacaaacataccttttgatgtgaaatggcagtcacttaaagacctggttaaagaaaaagttggtgaggtaacatacgtggagctcttaatggacgctgaaggaaagtcaaggggatgtgctgttgttgaattcaagatggaagagagcatgaaaaaagctgcggaagtcctaaacaagcatagtctgagcggaagaccactgaaagtcaaagaagatcctgatggtgaacatgccaggagagcaatgcaaaaggtgatggctacgactggtgggatgggtatgggaccaggtggcccaggaatgattactatcccacccagtatcctaaataatcccaacatcccaaatgagattatccatgcattacaggctggaagacttggaagcacagtatttgtagcaaatctggattataaagttggctggaagaaactgaaggaagtatttagtatggctggtgtggtggtccgagcagacattcttgaagataaagatggaaaaagtcgtggaataggcactgttacttttgaacagtccattgaagctgtgcaagctatatctatgttcaatggccagctgctatttgatagaccaatgcacgtcaagatggatgagagggccttaccaaaaggagatttcttccctcctgagcgtccacaacaacttccccaaatcctaagtaatgcactgaagagaggagagatcattgcaaagcagggaggaggtggaggtggaggaagcgtccctgggatcgagaggatgggtcctggcattgaccgcctcgggggtgccggcatggagcgcatgggcgcgggcctgggccacggcatggatcgcgtgggctcc

SEQ ID NO: 140579 - DNA, 2458 bp, Homo sapiens
  Payload ID: 7571
  Gene Symbol: HNRNPM
  Gene Name: heterogeneous nuclear ribonucleoprotein M
  ENST ID: ENST00000620401
  CDS Start-End: 10-2202
gcggagaaaatggcggcaggggtcgaagcggcggcggaggtggcggcgacggagatcaaaatggaggaagagagcggcgcgcccggcgtgccgagcggcaacggggctccgggccctaagggtgaaggagaacgacctgctcagaatgagaagaggaaggagaaaaacataaaaagaggaggcaatcgctttgagccatatgccaatccaactaaaagatacagagccttcattacaaacataccttttgatgtgaaatggcagtcacttaaagacctggttaaagaaaaagttggtgaggtaacatacgtggagctcttaatggacgctgaaggaaagtcaagggtaagtgttgttgttgaattcaagatggaagagagcatgaaaaaagctgcggaagtcctaaacaagcatagtctgagcggaagaccactgaaagtcaaagaagatcctgatggtgaacatgccaggagagcaatgcaaaaggtgatggctacgactggtgggatgggtatgggaccaggtggcccaggaatgattactatcccacccagtatcctaaataatcccaacatcccaaatgagattatccatgcattacaggctggaagacttggaagcacagtatttgtagcaaatctggattataaagttggctggaagaaactgaaggaagtatttagtatggctggtgtggtggtccgagcagacattcttgaagataaagatggaaaaagtcgtggaataggcactgttacttttgaacagtccattgaagctgtgcaagctatatctatgttcaatggccagctgctatttgatagaccaatgcacgtcaagatggatgagagggccttaccaaaaggagatttcttccctcctgagcgtccacaacaacttccccatggccttggtggtattggcatggggttaggaccaggagggcaacccattgatgccaatcacctgaataaaggcatcggaatgggaaacataggtcccgcaggaatgggaatggaaggcataggatttggaataaataaaatgggaggaatggaggggccctttggtggtggtatggaaaacatgggtcgatttggatctgggatgaacatgggcaggataaatgaaatcctaagtaatgcactgaagagaggagagatcattgcaaagcagggaggaggtggaggtggaggaagcgtccctgggatcgagaggatgggtcctggcattgaccgcctcgggggtgccggcatggagcgcatgggcgcgggcctgggccacggcatggatcgcgtgggctccgagatcgagcgcatgggcctggtcatggaccgcatgggctccgtggagcgcatgggctccggcattgagcgcatgggcccgctgggcctcgaccacatggcctccagcattgagcgcatgggccagaccatggagcgcattggctctggcgtggagcgcatgggtgccggcatgggcttcggccttgagcgcatggccgctcccatcgaccgtgtgggccagaccattgagcgcatgggctctggcgtggagcgcatgggccctgccatcgagcgcatgggcctgagcatggagcgcatggtgcccgcaggtatgggagctggcctggagcgcatgggccccgtgatggatcgcatggccaccggcctggagcgcatgggcgccaacaatctggagcggatgggcctggagcgcatgggcgccaacagcctcgagcgcatgggcctggagcgcatgggtgccaacagcctcgagcgcatgggccctgccatgggcccggccctgggcgctggcattgagcgcatgggcctggccatgggtggcggtggcggtgccagctttgaccgtgccatcgagatggagcgtggcaacttcggaggaagcttcgcaggttcctttggtggagctggaggccatgctcctggggtggccaggaaggcctgccagatatttgtgagaaatctgccattcgatttcacatggaagatgctaaaggacaaattcaacgagtgcggccacgtgctgtacgccgacatcaagatggagaatgggaagtccaaggggtgtggcgtggttaagttcgagtcgccagaggtggccgagagagcctgccggatgatgaatggcatgaagctgagtggccgagagattgacgttcgaattgatagaaacgcttaagcagttgccttttttaaacatcgatacgagacctctgaatttgtattttttcttgttaaccattttaatttgttggctggatgtataaagatgtttaaaaaattcagttgctttttggggtaatttgaattacttttttaatgactggggttccatttgactgtttgcattgagattgcaatgtgcgcaattttttttgtagttgtggcatcttgttgacatcgaatatgactttgataataaataccggttcctg

SEQ ID NO: 140580 - DNA, 2629 bp, Homo sapiens
  Payload ID: 7572
  Gene Symbol: HNRNPR
  Gene Name: heterogeneous nuclear ribonucleoprotein R
  Uniprot ID: O43390
  ENST ID: ENST00000302271
  CDS Start-End: 62-1963
gcgcctcgcgctgattctcacgggcccggctgccggcccccgctctgccctgcataataaaatggctaatcaggtgaatggtaatgcggtacagttaaaagaagaggaagaaccaatggatacttccagtgtaactcacacagaacactacaagacactgatagaggcaggcctcccacagaaggtggcagaaagacttgatgaaatatttcagacaggattggtagcttatgtcgatcttgatgaaagagcaattgatgctctcagggaatttaatgaagaaggagctctgtctgtactacagcagttcaaggaaagtgacttatcacatgttcagaacaaaagtgcatttttatgtggagttatgaagacctacaggcagagagagaaacaggggagcaaggtgcaagagtccacaaagggacctgatgaagcgaagatcaaggccttgcttgagagaactggttatactctggatgtaaccacaggacagaggaagtatggtggtcctccaccagacagtgtgtactctggcgtgcaacctggaattggaacggaggtatttgtaggcaaaataccaagggatttatatgaggatgagttggtgcccctttttgagaaggccggacccatttgggatctacgtcttatgatggatccactgtccggtcagaatagagggtatgcatttatcaccttctgtggaaaggaagctgcacaggaagccgtgaaactgtgtgacagctatgaaattcgccctggtaaacaccttggagtgtgcatttctgtggcaaacaacagactttttgttggatccattccgaagaataagactaaagaaaacattttggaagaattcagtaaagtcacagagggtttggtggacgttattctctatcatcaacccgatgacaaaaagaagaatcgggggttctgcttccttgaatatgaggatcacaagtcagcagcacaagccagacgccggctgatgagtggaaaagtaaaagtgtggggaaatgtagttacagttgaatgggctgaccctgtggaagaaccagatccagaagtcatggctaaggtaaaagttttgtttgtgagaaacttggctactacggtgacagaagaaatattggaaaagtcattttctgaatttggaaaactcgaaagagtaaagaagttgaaagattatgcatttgttcattttgaagacagaggagcagctgttaaggctatggatgaaatgaatggcaaagaaatagaaggggaagaaattgaaatagtcttagccaagccaccagacaagaaaaggaaagagcgccaagctgctagacaggcctccagaagcactgcgtatgaagattattactaccaccctcctcctcgcatgccacctccaattagaggtcggggtcgtggtggggggagaggtggatatggctaccctccagattactacggctatgaagattactatgatgattactatggttatgattatcacgactatcgtggaggctatgaagatccctactacggctatgatgatggctatgcagtaagaggaagaggaggaggaaggggagggcgaggtgctccaccaccaccaagggggaggggagcaccacctccaagaggtagagctggctattcacagaggggggcacctttgggaccaccaagaggctctaggggtggcagagggggtcctgctcaacagcagagaggccgtggttcccgtggatctcggggcaatcgtgggggcaatgtaggaggcaagagaaaggcagatgggtacaaccagcctgattccaagcgtcgtcagaccaacaaccaacagaactggggttcccaacccatcgctcagcagccgcttcagcaaggtggtgactattctggtaactatggttacaataatgacaaccaggaattttatcaggatacttatgggcaacagtggaagtagacaagtaagggcttgaaaatgatactggcaagatacgattggctctagatctacattcttcaaaaaaaaaaattggcttaactgtttcatctttaagtagcattttgctgccatttgtattgggctgaagaaatcactattgtgtatatactcaagtctttttatttttcctcttttcataaatgctcttggacattattgggcttgcagagttcccttattctggggattacaatgcttttatcgtttcaggcttcattttagcttcaaaacaagctgggcacactgttaaatcatgattttgcagaacctttggttttggacagtttcatttttttggatttgggatagattacataggagtatggagtatgctgtaaataaaaatacaagctagtgctttgtcttagtagttttaagaaattaaagcaaacaaatttaagttttcttgtattgaaaataacctatgattgtatgttttgcattcctagaagtaggttaactgtgtttttaaattgttataacttcacacctttttgaaatctgccctacaaaatttgtttggcttaaacgtcaaaagccgtgacaatttgttctttgatgtgattgtatttccaatttcttgttcatgtaagatttcaataaaactaaaaaatctattcaaaa

SEQ ID NO: 140581 - DNA, 2694 bp, Homo sapiens
  Payload ID: 7572
  Gene Symbol: HNRNPR
  Gene Name: heterogeneous nuclear ribonucleoprotein R
  Uniprot ID: O43390
  ENST ID: ENST00000374612
  CDS Start-End: 125-2026
gtctcagtccatcaggggggggagggggtggcgcgcgcgccatttctagtcgttttcaaagcgcctcgcgctgattctcacgggcccggctgccggcccccgctctgccctgcagcataataaaatggctaatcaggtgaatggtaatgcggtacagttaaaagaagaggaagaaccaatggatacttccagtgtaactcacacagaacactacaagacactgatagaggcaggcctcccacagaaggtggcagaaagacttgatgaaatatttcagacaggattggtagcttatgtcgatcttgatgaaagagcaattgatgctctcagggaatttaatgaagaaggagctctgtctgtactacagcagttcaaggaaagtgacttatcacatgttcagaacaaaagtgcatttttatgtggagttatgaagacctacaggcagagagagaaacaggggagcaaggtgcaagagtccacaaagggacctgatgaagcgaagatcaaggccttgcttgagagaactggttatactctggatgtaaccacaggacagaggaagtatggtggtcctccaccagacagtgtgtactctggcgtgcaacctggaattggaacggaggtatttgtaggcaaaataccaagggatttatatgaggatgagttggtgcccctttttgagaaggccggacccatttgggatctacgtcttatgatggatccactgtccggtcagaatagagggtatgcatttatcaccttctgtggaaaggaagctgcacaggaagccgtgaaactgtgtgacagctatgaaattcgccctggtaaacaccttggagtgtgcatttctgtggcaaacaacagactttttgttggatccattccgaagaataagactaaagaaaacattttggaagaattcagtaaagtcacagagggtttggtggacgttattctctatcatcaacccgatgacaaaaagaagaatcgggggttctgcttccttgaatatgaggatcacaagtcagcagcacaagccagacgccggctgatgagtggaaaagtaaaagtgtggggaaatgtagttacagttgaatgggctgaccctgtggaagaaccagatccagaagtcatggctaaggtaaaagttttgtttgtgagaaacttggctactacggtgacagaagaaatattggaaaagtcattttctgaatttggaaaactcgaaagagtaaagaagttgaaagattatgcatttgttcattttgaagacagaggagcagctgttaaggctatggatgaaatgaatggcaaagaaatagaaggggaagaaattgaaatagtcttagccaagccaccagacaagaaaaggaaagagcgccaagctgctagacaggcctccagaagcactgcgtatgaagattattactaccaccctcctcctcgcatgccacctccaattagaggtcggggtcgtggtggggggagaggtggatatggctaccctccagattactacggctatgaagattactatgatgattactatggttatgattatcacgactatcgtggaggctatgaagatccctactacggctatgatgatggctatgcagtaagaggaagaggaggaggaaggggagggcgaggtgctccaccaccaccaagggggaggggagcaccacctccaagaggtagagctggctattcacagaggggggcacctttgggaccaccaagaggctctaggggtggcagagggggtcctgctcaacagcagagaggccgtggttcccgtggatctcggggcaatcgtgggggcaatgtaggaggcaagagaaaggcagatgggtacaaccagcctgattccaagcgtcgtcagaccaacaaccaacagaactggggttcccaacccatcgctcagcagccgcttcagcaaggtggtgactattctggtaactatggttacaataatgacaaccaggaattttatcaggatacttatgggcaacagtggaagtagacaagtaagggcttgaaaatgatactggcaagatacgattggctctagatctacattcttcaaaaaaaaaaattggcttaactgtttcatctttaagtagcattttgctgccatttgtattgggctgaagaaatcactattgtgtatatactcaagtctttttatttttcctcttttcataaatgctcttggacattattgggcttgcagagttcccttattctggggattacaatgcttttatcgtttcaggcttcattttagcttcaaaacaagctgggcacactgttaaatcatgattttgcagaacctttggttttggacagtttcatttttttggatttgggatagattacataggagtatggagtatgctgtaaataaaaatacaagctagtgctttgtcttagtagttttaagaaattaaagcaaacaaatttaagttttcttgtattgaaaataacctatgattgtatgttttgcattcctagaagtaggttaactgtgtttttaaattgttataacttcacacctttttgaaatctgccctacaaaatttgtttggcttaaacgtcaaaagccgtgacaatttgttctttgatgtgattgtatttccaatttcttgttcatgtaagatttcaataaaactaaaaaatctattcaaaaca

SEQ ID NO: 140582 - DNA, 2691 bp, Homo sapiens
  Payload ID: 7572
  Gene Symbol: HNRNPR
  Gene Name: heterogeneous nuclear ribonucleoprotein R
  Uniprot ID: O43390
  ENST ID: ENST00000374616
  CDS Start-End: 110-2020
caggggggggagggggtggcgcgcgcgccatttctagtcgttttcaaagcgcctcgcgctgattctcacgggcccggctgccggcccccgctctgccctgcataataaaatggctaatcaggtgaatggtaatgcggtacagttaaaagaagaggaagaaccaatggatacttccagtgtaactcacacagaacactacaagacactgatagaggcaggcctcccacagaaggtggcagaaagacttgatgaaatatttcagacaggattggtagcttatgtcgatcttgatgaaagagcaattgatgctctcagggaatttaatgaagaaggagctctgtctgtactacagcagttcaaggaaagtgacttatcacatgttcagaacaaaagtgcatttttatgtggagttatgaagacctacaggcagagagagaaacaggggagcaaggtgcaagagtccacaaagggacctgatgaagcgaagatcaaggccttgcttgagagaactggttatactctggatgtaaccacaggacagaggaagtatggtggtcctccaccagacagtgtgtactctggcgtgcaacctggaattggaacggaggtatttgtaggcaaaataccaagggatttatatgaggatgagttggtgcccctttttgagaaggccggacccatttgggatctacgtcttatgatggatccactgtccggtcagaatagagggtatgcatttatcaccttctgtggaaaggaagctgcacaggaagccgtgaaactgtgtgacagctatgaaattcgccctggtaaacaccttggagtgtgcatttctgtggcaaacaacagactttttgttggatccattccgaagaataagactaaagaaaacattttggaagaattcagtaaagtcacaggtttaacagagggtttggtggacgttattctctatcatcaacccgatgacaaaaagaagaatcgggggttctgcttccttgaatatgaggatcacaagtcagcagcacaagccagacgccggctgatgagtggaaaagtaaaagtgtggggaaatgtagttacagttgaatgggctgaccctgtggaagaaccagatccagaagtcatggctaaggtaaaagttttgtttgtgagaaacttggctactacggtgacagaagaaatattggaaaagtcattttctgaatttggaaaactcgaaagagtaaagaagttgaaagattatgcatttgttcattttgaagacagaggagcagctgttaaggctatggatgaaatgaatggcaaagaaatagaaggggaagaaattgaaatagtcttagccaagccaccagacaagaaaaggaaagagcgccaagctgctagacaggcctccagaagcactgcgtatgaagattattactaccaccctcctcctcgcatgccacctccaattagaggtcggggtcgtggtggggggagaggtggatatggctaccctccagattactacggctatgaagattactatgatgattactatggttatgattatcacgactatcgtggaggctatgaagatccctactacggctatgatgatggctatgcagtaagaggaagaggaggaggaaggggagggcgaggtgctccaccaccaccaagggggaggggagcaccacctccaagaggtagagctggctattcacagaggggggcacctttgggaccaccaagaggctctaggggtggcagagggggtcctgctcaacagcagagaggccgtggttcccgtggatctcggggcaatcgtgggggcaatgtaggaggcaagagaaaggcagatgggtacaaccagcctgattccaagcgtcgtcagaccaacaaccaacagaactggggttcccaacccatcgctcagcagccgcttcagcaaggtggtgactattctggtaactatggttacaataatgacaaccaggaattttatcaggatacttatgggcaacagtggaagtagacaagtaagggcttgaaaatgatactggcaagatacgattggctctagatctacattcttcaaaaaaaaaaattggcttaactgtttcatctttaagtagcattttgctgccatttgtattgggctgaagaaatcactattgtgtatatactcaagtctttttatttttcctcttttcataaatgctcttggacattattgggcttgcagagttcccttattctggggattacaatgcttttatcgtttcaggcttcattttagcttcaaaacaagctgggcacactgttaaatcatgattttgcagaacctttggttttggacagtttcatttttttggatttgggatagattacataggagtatggagtatgctgtaaataaaaatacaagctagtgctttgtcttagtagttttaagaaattaaagcaaacaaatttaagttttcttgtattgaaaataacctatgattgtatgttttgcattcctagaagtaggttaactgtgtttttaaattgttataacttcacacctttttgaaatctgccctacaaaatttgtttggcttaaacgtcaaaagccgtgacaatttgttctttgatgtgattgtatttccaatttcttgttcatgtaagatttcaataaaactaaaaaatctattcaaaacatta

SEQ ID NO: 140583 - DNA, 1788 bp, Homo sapiens
  Payload ID: 7572
  Gene Symbol: HNRNPR
  Gene Name: heterogeneous nuclear ribonucleoprotein R
  Uniprot ID: O43390
  ENST ID: ENST00000427764
  CDS Start-End: 1-1788
atggctaatcaggtgaatggtaatgcggtacagttaaaagaagaggaagaaccaatggatacttccagtgtaactcacacagaacactacaagacactgatagaggcaggcctcccacagaaggtggcagaaagacttgatgaaatatttcagacaggattggtagcttatgtcgatcttgatgaaagagcaattgatgctctcagggaatttaatgaagaaggagctctgtctgtactacagcagttcaaggaaagtgacttatcacatgttcagaacaaaagtgcatttttatgtggagttatgaagacctacaggcagagagagaaacaggggagcaaggtgcaagagtccacaaagggacctgatgaagcgaagatcaaggtatttgtaggcaaaataccaagggatttatatgaggatgagttggtgcccctttttgagaaggccggacccatttgggatctacgtcttatgatggatccactgtccggtcagaatagagggtatgcatttatcaccttctgtggaaaggaagctgcacaggaagccgtgaaactgtgtgacagctatgaaattcgccctggtaaacaccttggagtgtgcatttctgtggcaaacaacagactttttgttggatccattccgaagaataagactaaagaaaacattttggaagaattcagtaaagtcacagagggtttggtggacgttattctctatcatcaacccgatgacaaaaagaagaatcgggggttctgcttccttgaatatgaggatcacaagtcagcagcacaagccagacgccggctgatgagtggaaaagtaaaagtgtggggaaatgtagttacagttgaatgggctgaccctgtggaagaaccagatccagaagtcatggctaaggtaaaagttttgtttgtgagaaacttggctactacggtgacagaagaaatattggaaaagtcattttctgaatttggaaaactcgaaagagtaaagaagttgaaagattatgcatttgttcattttgaagacagaggagcagctgttaaggctatggatgaaatgaatggcaaagaaatagaaggggaagaaattgaaatagtcttagccaagccaccagacaagaaaaggaaagagcgccaagctgctagacaggcctccagaagcactgcgtatgaagattattactaccaccctcctcctcgcatgccacctccaattagaggtcggggtcgtggtggggggagaggtggatatggctaccctccagattactacggctatgaagattactatgatgattactatggttatgattatcacgactatcgtggaggctatgaagatccctactacggctatgatgatggctatgcagtaagaggaagaggaggaggaaggggagggcgaggtgctccaccaccaccaagggggaggggagcaccacctccaagaggtagagctggctattcacagaggggggcacctttgggaccaccaagaggctctaggggtggcagagggggtcctgctcaacagcagagaggccgtggttcccgtggatctcggggcaatcgtgggggcaatgtaggaggcaagagaaaggcagatgggtacaaccagcctgattccaagcgtcgtcagaccaacaaccaacagaactggggttcccaacccatcgctcagcagccgcttcagcaaggtggtgactattctggtaactatggttacaataatgacaaccaggaattttatcaggatacttatgggcaacagtggaagtag

SEQ ID NO: 140584 - DNA, 7646 bp, Homo sapiens
  Payload ID: 7572
  Gene Symbol: HNRNPR
  Gene Name: heterogeneous nuclear ribonucleoprotein R
  Uniprot ID: O43390
  ENST ID: ENST00000478691
  CDS Start-End: 273-1880
gctgccgggatcgcgtctcagtccatcaggggggggagggggtggcgcgcgcgccatttctagtcgttttcaaagcgcctcgcgctgattctcacgggcccggctgccggcccccgctctgccctggattggtagcttatgtcgatcttgatgaaagagcaattgatgctctcagggaatttaatgaagaaggagctctgtctgtactacagcagttcaaggaaagtgacttatcacatgttcagaacaaaagtgcatttttatgtggagttatgaagacctacaggcagagagagaaacaggggagcaaggtgcaagagtccacaaagggacctgatgaagcgaagatcaaggccttgcttgagagaactggttatactctggatgtaaccacaggacagaggaagtatggtggtcctccaccagacagtgtgtactctggcgtgcaacctggaattggaacggaggtatttgtaggcaaaataccaagggatttatatgaggatgagttggtgcccctttttgagaaggccggacccatttgggatctacgtcttatgatggatccactgtccggtcagaatagagggtatgcatttatcaccttctgtggaaaggaagctgcacaggaagccgtgaaactgtgtgacagctatgaaattcgccctggtaaacaccttggagtgtgcatttctgtggcaaacaacagactttttgttggatccattccgaagaataagactaaagaaaacattttggaagaattcagtaaagtcacaggtttaacagagggtttggtggacgttattctctatcatcaacccgatgacaaaaagaagaatcgggggttctgcttccttgaatatgaggatcacaagtcagcagcacaagccagacgccggctgatgagtggaaaagtaaaagtgtggggaaatgtagttacagttgaatgggctgaccctgtggaagaaccagatccagaagtcatggctaaggtaaaagttttgtttgtgagaaacttggctactacggtgacagaagaaatattggaaaagtcattttctgaatttggaaaactcgaaagagtaaagaagttgaaagattatgcatttgttcattttgaagacagaggagcagctgttaaggctatggatgaaatgaatggcaaagaaatagaaggggaagaaattgaaatagtcttagccaagccaccagacaagaaaaggaaagagcgccaagctgctagacaggcctccagaagcactgcgtatgaagattattactaccaccctcctcctcgcatgccacctccaattagaggtcggggtcgtggtggggggagaggtggatatggctaccctccagattactacggctatgaagattactatgatgattactatggttatgattatcacgactatcgtggaggctatgaagatccctactacggctatgatgatggctatgcagtaagaggaagaggaggaggaaggggagggcgaggtgctccaccaccaccaagggggaggggagcaccacctccaagaggtagagctggctattcacagaggggggcacctttgggaccaccaagaggctctaggggtggcagagggggtcctgctcaacagcagagaggccgtggttcccgtggatctcggggcaatcgtgggggcaatgtaggaggcaagagaaaggcagatgggtacaaccagcctgattccaagcgtcgtcagaccaacaaccaacagaactggggttcccaacccatcgctcagcagccgcttcagcaaggtggtgactattctggtaactatggttacaataatgacaaccaggaattttatcaggatacttatgggcaacagtggaagtagacaagtaagggcttgaaaatgatactggcaagatacgattggctctagatctacattcttcaaaaaaaaaaattggcttaactgtttcatctttaagtagcattttgctgccatttgtattgggctgaagaaatcactattgtgtatatactcaagtctttttatttttcctcttttcataaatgctcttggacattattgggcttgcagagttcccttattctggggattacaatgcttttatcgtttcaggcttcattttagcttcaaaacaagctgggcacactgttaaatcatgattttgcagaacctttggttttggacagtttcatttttttggatttgggatagattacataggagtatggagtatgctgtaaataaaaatacaagctagtgctttgtcttagtagttttaagaaattaaagcaaacaaatttaagttttcttgtattgaaaataacctatgattgtatgttttgcattcctagaagtaggttaactgtgtttttaaattgttataacttcacacctttttgaaatctgccctacaaaatttgtttggcttaaacgtcaaaagccgtgacaatttgttctttgatgtgattgtatttccaatttcttgttcatgtaagatttcaataaaactaaaaaatctattcaaaacattacctatttcaaattcaattgtgtcctaaaacattattttattcgtaatccttgcaaggaatattgttttcaaagtataactgcctatgtgagtgatcaaattcatgcaaaatttcttgtttattccaacatgtgttgtggatattagactgaggattagtctaaattcaagtatttattccaattagcactttcattgattggtgttctctcatagtctcttctaattttgaaattttatcttttattaaaaaaaaaaaaacaggttcatagacttttgagcattcttgcaggcattggataatttgcattaaaacaaataaaatgtggctgggaaagcagactgcaatttattttgacccacattctttataagggataatttgtgactgaagaccttatttgctggataagtgaatgtacatacagggaaaattgttagtactgtggcgtcaattgcactgcggactttagttttagtgaaaatgatcgtgactaccatttcagttactggtttaggaatataatttcctattactatgtaaatttgctttgagaaacattcatgccttgtaagagaggcttaaaaatatccagtagtaatacctttgactttctgttaacacttcgtttatttttatttatctgctatccctgatgcccaaattttttgttggccaagacataacatctatttccctatttcctttagaaattctgatttattctaatgacttttttgcttgagaatgagaggaacaaaagaatctaagctttacggtacagaaaagtgaatcactttcaaattactattaagttttcccctccatcttattcttacgtggttctcaaatgtttttataatgataaaaatatcagaagccattggggaataattaaaatggatacaccattattctgtgttttgttcctgtttggtgtctttgtgataggaatattagatttcaaaatcataagccacttaattccgtgtaatcttggctagatcatattgggtttcatggcttcttttcatttcaatttaagattactatttactgatgaaagtcaatatatttcatttctttttcaaagtacactcattacacagtatagtcatttaacagaccttattgatattttagttttttggaaactgataaaggaattatggtctgttgtatgatagttttgagttaacatgggtatttctttggtaagacagatccagttgtttttcttatgcccatgtatgcaagtaaagacaccaaacattctttaaatgctgcttttaaactttgaaagtacaatttgaagttgtaactatacatctaattagacttaagtaaaaccctgatttttttcctggaaagaacaaaatctacaaataaaatttgagttgtttgtatttcttaattaggtgttacaagctacaaagttgtcataaagaatgctaagaatggggatagaaatgattctgagaaaacaaaccctcgcaaaaacataagattaaaacttgggttccatgtcaaaatcctttcctttaattgcaaattatattttgaattttaaagtggccacctcctcctctgtccttttcactaattaaaaatatatttgcagaggtaccctctaatatttggtttataggttttgtggctattttaaattgtaaagcataatcctataaacattaaaactcaagagcttttcttctttcatgtcttgtaaattaacactgtagcagcattcagagaaaatagattcagagctcaacttttcacataaataaatctaacagtgtaatatataaacctgaaaaatgtcagttgagggaggtctttattctagattggcatttttttttttttaaattaggtacaaattatgagtgtaaggaatttggtttcctgctctcctgtctttccatcttttttgttccccaagctaattgatttggctttatttatgagcctgttacagtaaagtgtgtgttgggaaatatattgaggtatagagctattctttgtaggtaccctggtgagaccgatacaaatatgcccctccccataatggaatactaatttttatttgatcactcatttatagcagttgcttaaatgtatgtatttatatgaaggtattttaatttttaagagcaaaaaagttctaataagttgccagatttctaataaatgcaggtttatttggtgaaaagataaggaaaatgagttatgattctgtagtttttttaaaatgagttcagcataattgtttttcaggtttttttagttactggggttattctgcataagaaagcccaatgctttctgatagtaggagataatttttctctcttttgactttgaaatctgacttaggagatgaattctttttaaaaaggtcagcatgcaaaaaaataaattatatattttaaattctaaaagagaagggacataaaatttcactcctagcataaagccatataatattattcttgaaactcattacatcatttgcctcctgcccatttgaatataatcatacctacgttttattaattgtgcatttgtaaaaccaaacccttccagtaaatacttgctataaggctattgcttgtcaattatcaaggcttctaaatatgttaaaacttgtcattttgatttttcaaagataattttattatactgagctaccaatattcttaaagaaaactaaccaaagttaatattagtgtagtccattattatgtggacaattattatgtggaatctcttaagtgagcaactaagaaaaagccttatagaaagactacactggatttataagtgtgtttatgtttctctaagaatgggagcttctgttaacttaggggtggagttgttctgaggaaaccagtagattggatgactgactggagaatccagaataacaaatccattagccagacatgtttacttttatattagaagtttgttgattaggtcttaattttcaaacgcaaacaccaagctttaaaaatattgcatatacaatgtattggtcagcaatttaataatatttaatttgaagttaattattgttaatccttctagaaaagttttttttctttaaataaaagtacatatatatacttttttatttagaggttaccagaagctctggttttgttttgttttgttttgtttttttgtttttttaatcattttcagatgttatccagaaatctgcaagtgtacttttcctgttttaactccttccttttatcacctgactatcagggaagcgaggttgaggctgccctgacctgacatgtcatgatgtcgacttgctaggtggggttcgctggggacgataaccagtggaattgttggtaagaacttttttttcctatttttttttttatcagtagtggggcattaagtgtgggagaatgcccatatcctataagtgggcaattatgtcagccttgtagaaaaataggactttaatattaaattattttgttcttaataggaacatataataacacttcacttacttttaaattggtagcagatcagcaggaaaggcctgcaagtatgaagtaatgaaatactcagggtatattttaagtgagcaaaatagacaccttataatcttaaaaagtctcttggagagacaataaatttgctttaactgtcatttcagtctagtattatattttctatattttgttggatagattaacatataatgcatcttaaagagatatttattgcacactaattttagtgaaaacaagaagacattgatagaatggagggcttaaacaccaaagatactatttttaaaaatcttccaaagtaatcttaacactgtaaaatgaaactttaaaaagttttagcagtttgacaataatggcctcaatttagagatatgttgagacaatgactttgggtcaagaggaaattacatagctgaaatattaagaccttgaacatagcagaaacataaacctatgaacaacttgtgttttgtgtgaaagctagggtagctgataggattagcagatattggtagaattaagagtcaatatttaaattattgctaaagattaaaatccctcatcttatagtttgtaggggattccatgatggtaaggtatagattgaaattaaatttagtaactaggcatttctgaccataccatataaaaaataattgtaatatggtataaacactgattaaaagtaattatggattttcatgcctgaagaaccttctcagtattcttacagcactgtatcttctttattggttgagaatatcagtctagaaagactttcctagatgttaaatgtgctagtcagtgtcatgaatataaacccttacttgtaagtttgctatagactagttgtacaacactagaatgaaattatgtaatacttttaagaattgtagtgattgcagggttgtgttaaggtaacattttatgcatgtgtcagtgacagaaaggatcagggtataaaacttagcactaaatagcatgctccttaggaagttttaaggtaagcagtaggaatattcatgtaattctgatgagtttatgtaagttaaggaaaatgcaatgccagtttgttgactttaaacactaaaaacaaaatacattttgtggaaccaacaaaggagacattctggggaaaaacttaaattgctcaaatttaaataagggctctcactttatatagtagatttgtcaggatcccatgaacattgcttttcttgatttctcacatatgagggttgggcaaaagggacttctctagcctcttcgataatgtaggtagacttgtacttagtgaatcccattataatgttaggtactatgttctaagactatttctataattggactgaaggctcctgcaaacataaattgctgatatggatatagtaacataagaaataccaaaatagggacatttgcaagaccttttccatttaatcatcagtttaataaaaatcatgcttttggtacagtgttcatgtaccataactgtattggaatatttgtacgatgttaaatatttttaataaaatttaacatgttcaaaa

SEQ ID NO: 140585 - DNA, 1837 bp, Homo sapiens
  Payload ID: 7572
  Gene Symbol: HNRNPR
  Gene Name: heterogeneous nuclear ribonucleoprotein R
  ENST ID: ENST00000606561
  CDS Start-End: 232-1716
gtggcgcgcgcgccatttctagtcgttttcaaagcgcctcgcgctgattctcacgggcccggctgccggcccccgctctgccctggattggtagcttatgtcgatcttgatgaaagagcaattgatgctctcagggaatttaatgaagaaggagctctgtctgtactacagcagttcaaggaaagtgacttatcacatgttcagaacaaaagtgcatttttatgtggagttatgaagacctacaggcagagagagaaacaggggagcaaggtgcaagagtccacaaagggacctgatgaagcgaagatcaaggtatttgtaggcaaaataccaagggatttatatgaggatgagttggtgcccctttttgagaaggccggacccatttgggatctacgtcttatgatggatccactgtccggtcagaatagagggtatgcatttatcaccttctgtggaaaggaagctgcacaggaagccgtgaaactgtgtgacagctatgaaattcgccctggtaaacaccttggagtgtgcatttctgtggcaaacaacagactttttgttggatccattccgaagaataagactaaagaaaacattttggaagaattcagtaaagtcacagagggtttggtggacgttattctctatcatcaacccgatgacaaaaagaagaatcgggggttctgcttccttgaatatgaggatcacaagtcagcagcacaagccagacgccggctgatgagtggaaaagtaaaagtgtggggaaatgtagttacagttgaatgggctgaccctgtggaagaaccagatccagaagtcatggctaaggtaaaagttttgtttgtgagaaacttggctactacggtgacagaagaaatattggaaaagtcattttctgaatttggaaaactcgaaagagtaaagaagttgaaagattatgcatttgttcattttgaagacagaggagcagctgttaaggctatggatgaaatgaatggcaaagaaatagaaggggaagaaattgaaatagtcttagccaagccaccagacaagaaaaggaaagagcgccaagctgctagacaggcctccagaagcactgcgtatgaagattattactaccaccctcctcctcgcatgccacctccaattagaggtcggggtcgtggtggggggagaggtggatatggctaccctccagattactacggctatgaagattactatgatgattactatggttatgattatcacgactatcgtggaggctatgaagatccctactacggctatgatgatggctatgcagtaagaggaagaggaggaggaaggggagggcgaggtgctccaccaccaccaagggggaggggagcaccacctccaagaggtagagctggctattcacagaggggggcacctttgggaccaccaagaggctctaggggtggcagagggggtcctgctcaacagcagagaggccgtggttcccgtggatctcggggcaatcgtgggggcaatgtaggaggcaagagaaaggcagatgggtacaaccagcctgattccaagcgtcgtcagaccaacaaccaacagaactggggttcccaacccatcgctcagcagccgcttcagcaaggtggtgactattctggtaactatggttacaataatgacaaccaggaattttatcaggatacttatgggcaacagtggaagtagacaagtaagggcttgaaaatgatactggcaagatacgattggctctagatctacattcttcaaaaaaaaaaattggcttaactgtttcatctttaagtagcattttgctgccatttgtatt

SEQ ID NO: 140586 - DNA, 1788 bp, Homo sapiens; identical to SEQ ID NO: 140583
  Payload ID: 7572
  Gene Symbol: HNRNPR
  Gene Name: Heterogeneous nuclear ribonucleoprotein R
  ENST ID: ENST00000634634
  CDS Start-End: 1-1788

SEQ ID NO: 140587 - DNA, 2691 bp, Homo sapiens; identical to SEQ ID NO: 140582
  Payload ID: 7572
  Gene Symbol: HNRNPR
  Gene Name: Heterogeneous nuclear ribonucleoprotein R
  ENST ID: ENST00000634713
  CDS Start-End: 110-2020

SEQ ID NO: 140588 - DNA, 2629 bp, Homo sapiens; identical to SEQ ID NO: 140580
  Payload ID: 7572
  Gene Symbol: HNRNPR
  Gene Name: Heterogeneous nuclear ribonucleoprotein R
  ENST ID: ENST00000634766
  CDS Start-End: 62-1963

SEQ ID NO: 140589 - DNA, 7646 bp, Homo sapiens; identical to SEQ ID NO: 140584
  Payload ID: 7572
  Gene Symbol: HNRNPR
  Gene Name: Heterogeneous nuclear ribonucleoprotein R
  ENST ID: ENST00000635150
  CDS Start-End: 273-1880

SEQ ID NO: 140590 - DNA, 2694 bp, Homo sapiens; identical to SEQ ID NO: 140581
  Payload ID: 7572
  Gene Symbol: HNRNPR
  Gene Name: Heterogeneous nuclear ribonucleoprotein R
  ENST ID: ENST00000634263
  CDS Start-End: 125-2026

SEQ ID NO: 140591 - DNA, 1837 bp, Homo sapiens; identical to SEQ ID NO: 140585
  Payload ID: 7572
  Gene Symbol: HNRNPR
  Gene Name: Heterogeneous nuclear ribonucleoprotein R
  ENST ID: ENST00000635199
  CDS Start-End: 232-1716

SEQ ID NO: 140592 - DNA, 3704 bp, Homo sapiens
  Payload ID: 7573
  Gene Symbol: HNRNPU
  Gene Name: heterogeneous nuclear ribonucleoprotein U (scaffold attachment factor A)
  Uniprot ID: Q00839
  ENST ID: ENST00000283179
  CDS Start-End: 165-2642
cgccgttcgacaccaggcggatccgctctgcagcacgaacccatctccagccgcagccgcagccgccgcccgggccgaggagcagccgcagcagccgccaccagtggccgagtgagcggagccgagtttgaggcagcgcctagcggtgaatcggggccctcaccatgagttcctcgcctgttaatgtaaaaaagctgaaggtgtcggagctgaaagaggagctcaagaagcgacgcctttctgacaagggtctcaaggccgagctcatggagcgactccaggctgcgctggacgacgaggaggccgggggccgccccgccatggagcccgggaacggcagcctagacctgggcggggattccgctgggcgctcgggagcaggcctcgagcaggaggccgcggccggcggcgatgaagaggaggaggaagaggaagaggaggaggaaggaatctccgctctggacggcgaccagatggagctaggagaggagaacggggccgcgggggcggccgactcgggcccgatggaggaggaggaggccgcctcggaagacgagaacggcgacgatcagggtttccaggaaggggaagatgagctcggggacgaagaggaaggcgcgggcgacgagaacgggcacggggagcagcagcctcaaccgccggcgacgcagcagcaacagccccaacagcagcgcggggccgccaaggaggccgcggggaagagcagcggccccacctcgctgttcgcggtgacggtggcgccgcccggggcgaggcagggccagcagcaggcgggaggtaagaagaaggcggaaggcggcggaggcggcggtcgccccggggctccggcggcgggggacggcaaaacagaacagaaaggcggagataaaaagaggggtgttaaaagaccacgagaagatcatggccgtggatattttgagtacattgaagagaacaagtatagcagagccaaatctcctcagccacctgttgaagaagaagatgaacacttcgatgacacagtggtttgtcttgatacttataattgtgatctacattttaaaatatcaagagatcgtctcagtgcttcttcccttacaatggagagttttgcttttctttgggctggaggaagagcatcctatggtgtgtcaaaaggcaaagtgtgttttgagatgaaggttacagagaagatcccagtaaggcatttatatacaaaagatattgacatacatgaagttcgtattggctggtcactaactacaagtggaatgttacttggtgaagaagaattttcttatgggtattctctaaaaggaataaaaacatgcaactgtgagactgaagattatggagaaaagtttgatgaaaatgatgtgattacatgttttgctaactttgaaagtgatgaagtagaactctcgtatgctaagaatggacaagatcttggcgttgccttcaaaatcagtaaggaagttcttgctggacggccactgttcccgcatgttctctgccacaactgtgcagttgaatttaattttggtcagaaggaaaagccatattttccaatacctgaagagtatactttcatccagaacgtccccttagaggatcgagttagaggaccaaaggggcctgaagagaagaaagattgtgaagttgtgatgatgattggcttgccaggagctggaaaaactacctgggttactaaacatgcagcagaaaatccagggaaatataacattcttggcacaaatactattatggataagatgatggtggcaggttttaagaagcaaatggcagatactggaaaactgaacacactgttgcagagagccccccagtgtcttgggaaatttattgagattgctgcccgaaagaagcgaaattttattctggatcagacaaatgtgtctgctgctgcccagaggagaaaaatgtgcctgtttgcaggcttccagcgaaaagctgttgtagtttgcccaaaagatgaagactataagcaaagaacacagaagaaagcagaagtagaggggaaagacctaccagaacatgcggtcctcaaaatgaaaggaaactttaccctcccagaggtagctgagtgctttgatgaaataacctatgttgaacttcagaaggaagaagcccaaaaactcttggagcaatataaggaagaaagcaaaaaggctcttccaccagaaaagaaacagaacactggctcaaagaaaagcaataaaaataagagtggcaagaaccagtttaacagaggtggtggccatagaggacgtggaggattcaatatgcgtggtggaaatttcagaggaggagcccctgggaatcgtggcggatataataggaggggcaacatgccacagagaggtggtggcggtggaggaagtggtggaatcggctatccataccctcgtgcccctgtttttcctggccgtggtagttactcaaacagagggaactacaacagaggtggaatgcccaacagagggaactacaaccagaacttcagaggacgaggaaacaatcgtggctacaaaaatcaatctcagggctacaaccagtggcagcagggtcaattctggggtcagaagccatggagtcagcattatcaccaaggatattattgaatacccaaataaaacgaactgatacatatttctccaaaaccttcacaagaagtcgactgttttctttagtaggctaactttttaaacattccacaagaggaagtgcctgcgggttccttttttagaagctttgtgggttgattttttttcttttcttttttgtacatttttaattgcagtttaaaagtgaatcgtaagagaacctcagcattgtgcacgataagagaatgtgtcagtatttcagggttctacattttatctgtaaaatgtgacttttttttttttttatcacaacagaagtaaaatgttgctttgtacctggtgtcttttattaagaatttactccccccatttctcacagagaataacagtcgggagtcattgtcacaatataatagaaatgttagcaaccagattcatgtaaggactaagtggtcctcatgaattgcattaagactctgtactgctcatattacactccatcctctctgtagtttgctgggtagtggagggggtaagctaaatcatagtttctgacaataactgggaaggttttttcttaaaataacaatggaattggtataattgggattgaaaactaaaacttggaactaagatagagaagatggagtgtatgtagaagggctgttaaaaatgtaaaacttggttgcattatttgtggaggctcaaacttgtgaaggttaataccataatttttccatttgttctgcattttgattctgaaaagaaagctggctttgcccatttcttattaaaaaaacttgttgtaaatccagttgtctaatgggatctatatgaagttagccatgtctgtatgcccttctcccacaaaatactgtataactagtgtgcttgtagtagttaactccaccatctttgtaagctaatgaaattgtgagtcacccatttatatcttaatttttaatcatgtcagttcttgaatgggtatctccttagcctgctgatttctttttctttctaaagaaagtgggtggagaaattaatttagacgtttgtttgcaataaaaagaattcatttta

SEQ ID NO: 140593 - DNA, 5940 bp, Homo sapiens
  Payload ID: 7573
  Gene Symbol: HNRNPU
  Gene Name: heterogeneous nuclear ribonucleoprotein U (scaffold attachment factor A)
  Uniprot ID: Q00839
  ENST ID: ENST00000444376
  CDS Start-End: 236-2656
aggacgttgcgtgctcgctcgcgccaggcgagtctccgcgtctccctcgcgaactcggtgaaaggaattggcgccgttcgacaccaggcggatccgctctgcagcacgaacccatctccagccgcagccgcagccgccgcccgggccgaggagcagccgcagcagccgccaccagtggccgagtgagcggagccgagtttgaggcagcgcctagcggtgaatcggggccctcaccatgagttcctcgcctgttaatgtaaaaaagctgaaggtgtcggagctgaaagaggagctcaagaagcgacgcctttctgacaagggtctcaaggccgagctcatggagcgactccaggctgcgctggacgacgaggaggccgggggccgccccgccatggagcccgggaacggcagcctagacctgggcggggattccgctgggcgctcgggagcaggcctcgagcaggaggccgcggccggcggcgatgaagaggaggaggaagaggaagaggaggaggaaggaatctccgctctggacggcgaccagatggagctaggagaggagaacggggccgcgggggcggccgactcgggcccgatggaggaggaggaggccgcctcggaagacgagaacggcgacgatcagggtttccaggaaggggaagatgagctcggggacgaagaggaaggcgcgggcgacgagaacgggcacggggagcagcagcctcaaccgccggcgacgcagcagcaacagccccaacagcagcgcggggccgccaaggaggccgcggggaagagcagcggccccacctcgctgttcgcggtgacggtggcgccgcccggggcgaggcagggccagcagcaggcgggaggggacggcaaaacagaacagaaaggcggagataaaaagaggggtgttaaaagaccacgagaagatcatggccgtggatattttgagtacattgaagagaacaagtatagcagagccaaatctcctcagccacctgttgaagaagaagatgaacacttcgatgacacagtggtttgtcttgatacttataattgtgatctacattttaaaatatcaagagatcgtctcagtgcttcttcccttacaatggagagttttgcttttctttgggctggaggaagagcatcctatggtgtgtcaaaaggcaaagtgtgttttgagatgaaggttacagagaagatcccagtaaggcatttatatacaaaagatattgacatacatgaagttcgtattggctggtcactaactacaagtggaatgttacttggtgaagaagaattttcttatgggtattctctaaaaggaataaaaacatgcaactgtgagactgaagattatggagaaaagtttgatgaaaatgatgtgattacatgttttgctaactttgaaagtgatgaagtagaactctcgtatgctaagaatggacaagatcttggcgttgccttcaaaatcagtaaggaagttcttgctggacggccactgttcccgcatgttctctgccacaactgtgcagttgaatttaattttggtcagaaggaaaagccatattttccaatacctgaagagtatactttcatccagaacgtccccttagaggatcgagttagaggaccaaaggggcctgaagagaagaaagattgtgaagttgtgatgatgattggcttgccaggagctggaaaaactacctgggttactaaacatgcagcagaaaatccagggaaatataacattcttggcacaaatactattatggataagatgatggtggcaggttttaagaagcaaatggcagatactggaaaactgaacacactgttgcagagagccccccagtgtcttgggaaatttattgagattgctgcccgaaagaagcgaaattttattctggatcagacaaatgtgtctgctgctgcccagaggagaaaaatgtgcctgtttgcaggcttccagcgaaaagctgttgtagtttgcccaaaagatgaagactataagcaaagaacacagaagaaagcagaagtagaggggaaagacctaccagaacatgcggtcctcaaaatgaaaggaaactttaccctcccagaggtagctgagtgctttgatgaaataacctatgttgaacttcagaaggaagaagcccaaaaactcttggagcaatataaggaagaaagcaaaaaggctcttccaccagaaaagaaacagaacactggctcaaagaaaagcaataaaaataagagtggcaagaaccagtttaacagaggtggtggccatagaggacgtggaggattcaatatgcgtggtggaaatttcagaggaggagcccctgggaatcgtggcggatataataggaggggcaacatgccacagagaggtggtggcggtggaggaagtggtggaatcggctatccataccctcgtgcccctgtttttcctggccgtggtagttactcaaacagagggaactacaacagaggtggaatgcccaacagagggaactacaaccagaacttcagaggacgaggaaacaatcgtggctacaaaaatcaatctcagggctacaaccagtggcagcagggtcaattctggggtcagaagccatggagtcagcattatcaccaaggatattattgaatacccaaataaaacgaactgatacatatttctccaaaaccttcacaagaagtcgactgttttctttagtaggctaactttttaaacattccacaagaggaagtgcctgcgggttccttttttagaagctttgtgggttgattttttttcttttcttttttgtacatttttaattgcagtttaaaagtgaatcgtaagagaacctcagcattgtgcacgataagagaatgtgtcagtatttcagggttctacattttatctgtaaaatgtgacttttttttttttttatcacaacagaagtaaaatgttgctttgtacctggtgtcttttattaagaatttactccccccatttctcacagagaataacagtcgggagtcattgtcacaatataatagaaatgttagcaaccagattcatgtaaggactaagtggtcctcatgaattgcattaagactctgtactgctcatattacactccatcctctctgtagtttgctgggtagtggagggggtaagctaaatcatagtttctgacaataactgggaaggttttttcttaaaataacaatggaattggtataattgggattgaaaactaaaacttggaactaagatagagaagatggagtgtatgtagaagggctgttaaaaatgtaaaacttggttgcattatttgtggaggctcaaacttgtgaaggttaataccataatttttccatttgttctgcattttgattctgaaaagaaagctggctttgcccatttcttattaaaaaaacttgttgtaaatccagttgtctaatgggatctatatgaagttagccatgtctgtatgcccttctcccacaaaatactgtataactagtgtgcttgtagtagttaactccaccatctttgtaagctaatgaaattgtgagtcacccatttatatcttaatttttaatcatgtcagttcttgaatgggtatctccttagcctgctgatttctttttctttctaaagaaagtgggtggagaaattaatttagacgtttgtttgcaataaaaagaattcattttactcttgttttgggattctcgccatcaaggttcaaaatccctttatataactcccaagaggagaaatttattaagtgtgtgctttctggacagcttattctttactctgcatagaacatttaggttttaaaaacttaaatgtatactgacaattgatacataattatgaagtaaagttgaattcttcccttcccctcccccccagacaacttttaacatatttaatgaggggaaaaggtactggctgggagaagttaacactgagtttatcatctttacagaatgctaatgctgtcctcaactgattattttatatacatatatatgatacatgaaactctgggatcagatgcttttagaagccatcatgcaagccagtcattgatgtcactgctacacaacactgctaacttgactgtagctatgtaataacattagatcccctaattgtaattatattgggtttgcacagaacactttaatcttcccctcaccaatgtgaagtgaggaatcaggagtcaaactgtagaactaaaatttgacttcagtctagcgtttccttggtgtttttaggttgctttggtaagtttaggtttgctatatttctgattgcttagaattttgttttagccctttaaaatcagatcataaatatgaattcatacttctaaggaattttcttgctataagctggagtttaggtgatgtataggttcagttgagacatttttggaacaggcaaatccttagttaacataagatatttaacagttgaagatagtgtcatggatttttatcttttttagcaagtaatgctaagaaccactggcctgagctactactcttcagtatacattattaggattgcatagacttactagaggaacagtttcaggttttgatgctaatcagtgttgtgtcctaaagttgtcctttgtgcctttaaaaagttttggatatatcttctagtttaaaattgcttattaaggaattcattttataattgcagtgggaaagtaatggtcaagtaacactaggtagactatcatgcctgtttagcccagagaatttggggggagagagaatagataaaaatggcacccagaaaaatgttaaaatctttagtcaagactagaattaatacaattgtctacacttgtatggcagaaataaccttataaagtgtttaaggaattcagagaagggaatgtaccaaataagcaacagggagaaaattaggtaagaagtaagatacgaacgagaaacctgatttattgctcatccttcccttgcctccctaatggcaagcaaaactctgaacatctgaaaaggatgtagttctggacaaatcctgactacccagaggaaactcactgtgagattgctgttgatttgaagggtgctttcactaaggttatattttaaagtagaataacacatgctgagtgtaaactggctttggattggtcagctgcagtagtacaaaaacagcatagaatttgagaaaactaaaactgctatgagatagctatgagaaaactaaaactgctatgagatagaaatgatgtaaaattatgtggaaagttttccctcatatactcacatacagcctttgaagggctctggctctgaccggttgatggccttgagcgagatgaaatcatgaaattgagtcaaatcaatttgacattgaaatgacaagaggaaactcttaaatacataaaaacaagctctcatttgcctaggatagatactgtcttaaaaataaagactgaacctagatgttctgagcactagcaacaaggtattttaacaagtttaaaggaattctctgaaaaagttataaaattattctaggaaacataaccataatagtgttttaagggactttcacctggggattttatattcatgaacagagtgtattctgtatttaaaatgtctcatttgtgggaattggatgacatgttttttgataaatttattcacaatataaattgactttttattctaggaccatgtgaataatgggttccattgcacaaatacaaatattttaatagcttcttaggcagtggtgtagacatcttggatataaataattgtagatcttgtatatttgatttttaaaaaactagaataaacagagaggcataaacatatcttagagtccaagtggtagtgtttagcattggatataataaatggatgttttacaaagtg

SEQ ID NO: 140594 - DNA, 1067 bp, Homo sapiens
  Payload ID: 7573
  Gene Symbol: HNRNPU
  Gene Name: heterogeneous nuclear ribonucleoprotein U (scaffold attachment factor A)
  ENST ID: ENST00000440865
  CDS Start-End: 343-1067
agtacaatgcggccgcggggagcgcgggcccgcgggggaggggagcgccgccgcgccgggctcggcccctccccctctctgcgctctcttcgggatacacgtgggcttcgggcctgggccgcgcagtttttctttggctttctcgaatcatcgaggagactggcaaaattagtaatgtctttagactgcgtcactagcgccaatcgaattcgtagttgattgttctttgaattcacatttgagtcctcggttaaaacctcagttaaaaagcaggataaagtcgagctgctttggttctcggaacggaaaagcgtttttttgttgtttagaggcttggcctttatggggctcgtgtgtgttttaggggacggcaaaacagaacagaaaggcggagataaaaagaggggtgttaaaagaccacgagaagatcatggccgtggatattttgagtacattgaagagaacaagtatagcagagccaaatctcctcagccacctgttgaagaagaagatgaacacttcgatgacacagtggtttgtcttgatacttataattgtgatctacattttaaaatatcaagagatcgtctcagtgcttcttcccttacaatggagagttttgcttttctttgggctggaggaagagcatcctatggtgtgtcaaaaggcaaagtgtgttttgagatgaaggttacagagaagatcccagtaaggcatttatatacaaaagatattgacatacatgaagttcgtattggctggtcactaactacaagtggaatgttacttggtgaagaagaattttcttatgggtattctctaaaaggaataaaaacatgcaactgtgagactgaagattatggagaaaagtttgatgaaaatgatgtgattacatgttttgctaactttgaaagtgatgaagtagaactctcgtatgctaagaatggacaagatcttggcgttgccttcaaaatcagtaaggaagttcttgctggacggccactgttcccgcatgttctctgccacaactgtgcagttgaatttaattttggtcagaaggaaaagcc

SEQ ID NO: 140595 - DNA, 2952 bp, Homo sapiens
  Payload ID: 7574
  Gene Symbol: HNRNPUL1
  Gene Name: heterogeneous nuclear ribonucleoprotein U-like 1
  ENST ID: ENST00000263367
  CDS Start-End: 195-2498
gttttccgtttgggttggggagggtctcgaaaatggggatcctagggtacggagctccgtgggcttggcggtcgtgctagcccagcgtgtgggctggggggtggggagccgtgtttccagggtggggaaggaatgtccaggtgtgcggggctgcgagagttctgaggaaggaggatcctggaatatgccgctggatgcgatcctgggcgttctcctatttggatgccatggacaatattaccaggcagaaccaattctacgatacccaagtcatcaaacaagaaaacgagtcaggctacgagaggagaccactggaaatggagcagcagcaggcctatcgtccagaaatgaagacagagatgaagcaaggagcacccaccagcttcctcccgcctgaagcttctcaactcaagccagacaggcagcaattccagagtcgaaagaggccttatgaagaaaaccggggacgggggtactttgagcaccgagaggataggaggggccgctctcctcagcctcctgctgaagaggatgaagatgactttgatgatacccttgttgctattgacacctataactgcgacctccacttcaaggtggcccgagatcggagtagtggctatccgctcacaattgagggctttgcatacctgtggtcaggagcccgtgccagctatggggtcagaaggggccgtgtatgcttcgagatgaagatcaatgaggaaatctccgtgaagcaccttccgtctacagagcctgacccccacgtggtccgtatcggctggtccctggactcctgcagcacccagctaggcgaagagcctttctcctatggctatggaggcactgggaagaagtccaccaatagccggtttgaaaactacggagacaagtttgcagagaacgatgtgattggctgctttgcggattttgaatgtggaaatgacgtggaactgtcttttaccaagaatggaaagtggatgggcattgctttccgaatccagaaggaagccttggggggtcaggccctctatcctcatgtcctggtgaagaattgcgcagtggagttcaacttcggacagagagcagagccctactgttctgtcctcccggggtttaccttcatccagcaccttccccttagtgagcgtatccggggcaccgttggaccaaagagcaaggcagaatgtgagattctgatgatggtgggcctgcctgctgctggcaagaccacatgggccatcaaacatgcagcctccaacccttccaagaagtacaacatcctgggtaccaatgccatcatggataagatgcgggtgatgggcctacgccggcagcggaactatgctggccgctgggatgtcctgatccagcaggccacccagtgcctcaaccgcctcatccagattgctgcccgcaagaaacgcaactatatcctagatcagacaaatgtttatgggtcagcccagagacgaaaaatgagaccatttgaaggcttccagcgcaaagctattgtaatttgtcccactgacgaggacctaaaagaccgaacaataaagcgaaccgacgaggaagggaaggatgtcccagatcatgcggtcttagaaatgaaagccaacttcacgttgccagatgttggggacttcctggatgaggttctgttcattgagctgcagcgggaggaagcggacaagctagtgaggcagtacaacgaggaaggccgcaaggctgggccaccccctgaaaagcgctttgacaaccgaggtggtggtggcttccggggccgcgggggtggtggtggcttccagcgctatgaaaaccgaggaccccctggaggcaaccgtggcggcttccagaaccgagggggaggcagcggtggaggaggcaactaccgaggaggtttcaaccgcagcggaggtggtggctatagccagaaccgctggggtaacaacaaccgggataacaacaactccaacaacagaggcagctacaaccgggctccccagcaacagccgccaccacagcagcctccgccaccacagccaccaccccagcagccaccgccaccacccagctacagccctgctcggaaccccccaggggccagcacctacaataagaacagcaacatccctggctcaagcgccaataccagcacccccaccgtcagcagctacagccctccacagccgagttacagccagccaccctacaaccagggaggttacagccagggctacacagccccaccgcctccacctccaccaccacctgcctacaactatgggagctacggcggttacaacccggccccctataccccaccgccaccccccactgcacagacctaccctcagcccagctataaccagtatcagcagtatgcccagcagtggaaccagtactatcagaaccagggccagtggccgccatactacgggaactacgactacgggagctactccgggaacacacagggtggcacaagtacacagtagccagtgtgacccagaggctcccggaggcccctgccggcttcctccaccagcgcctgcctcggcccctcctctgcccccgccagatcccgtggtgctggggatggggtcatcccagggctgcctccctccagcccactgcctcccctctgaggggcttccttcccctccatagggccaggcatttttttctggattcaaacaggcaacaatgaccttttattttctgtttgtccccacctccccagccttccacctcctgttcttcctaccttcttcctttttgactaaataatccccacctcccttgatcatacagtgaggctacagtgactgaggggagaatcccctcctgttcactctcccaaccctgctccagcccctcagcttcccagaccctcatgcagttggttgtaaattctcccaggagctgttttactgtctacttttcaggatt

SEQ ID NO: 140596 - DNA, 3426 bp, Homo sapiens
  Payload ID: 7574
  Gene Symbol: HNRNPUL1
  Gene Name: heterogeneous nuclear ribonucleoprotein U-like 1
  ENST ID: ENST00000352456
  CDS Start-End: 93-2393
attgtgggaagctgggaggagagagagagagaggaagtcggacgtgggcgaggggcggggtgtctggactggaacctctgggcccacatgccatggacaatattaccaggcagaaccaattctacgatacccaagtcatcaaacaagaaaacgagtcaggctacgagaggagaccactggaaatggagcagcagcaggcctatcgtccagaaatgaagacagagatgaagcaaggagcacccaccagcttcctcccgcctgaagcttctcaactcaagccagacaggcagcaattccagagtcgaaagaggccttatgaagaaaaccggggacgggggtactttgagcaccgagaggataggaggggccgctctcctcagcctcctgctgaagaggatgaagatgactttgatgatacccttgttgctattgacacctataactgcgacctccacttcaaggtggcccgagatcggagtagtggctatccgctcacaattgagggctttgcatacctgtggtcaggagcccgtgccagctatggggtcagaaggggccgtgtatgcttcgagatgaagatcaatgaggaaatctccgtgaagcaccttccgtctacagagcctgacccccacgtggtccgtatcggctggtccctggactcctgcagcacccagctaggcgaagagcctttctcctatggctatggaggcactgggaagaagtccaccaatagccggtttgaaaactacggagacaagtttgcagagaacgatgtgattggctgctttgcggattttgaatgtggaaatgacgtggaactgtcttttaccaagaatggaaagtggatgggcattgctttccgaatccagaaggaagccttggggggtcaggccctctatcctcatgtcctggtgaagaattgcgcagtggagttcaacttcggacagagagcagagccctactgttctgtcctcccggggtttaccttcatccagcaccttccccttagtgagcgtatccggggcaccgttggaccaaagagcaaggcagaatgtgagattctgatgatggtgggcctgcctgctgctggcaagaccacatgggccatcaaacatgcagcctccaacccttccaagaagtacaacatcctgggtaccaatgccatcatggataagatgcgggtgatgggcctacgccggcagcggaactatgctggccgctgggatgtcctgatccagcaggccacccagtgcctcaaccgcctcatccagattgctgcccgcaagaaacgcaactatatcctagatcagacaaatgtttatgggtcagcccagagacgaaaaatgagaccatttgaaggcttccagcgcaaagctattgtaatttgtcccactgacgaggacctaaaagaccgaacaataaagcgaaccgacgaggaagggaaggatgtcccagatcatgcggtcttagaaatgaaagccaacttcacgttgccagatgttggggacttcctggatgaggttctgttcattgagctgcagcgggaggaagcggacaagctagtgaggcagtacaacgaggaaggccgcaaggctgggccaccccctgaaaagcgctttgacaaccgaggtggtggtggcttccggggccgcgggggtggtggtggcttccagcgctatgaaaaccgaggaccccctggaggcaaccgtggcggcttccagaaccgagggggaggcagcggtggaggaggcaactaccgaggaggtttcaaccgcagcggaggtggtggctatagccagaaccgctggggtaacaacaaccgggataacaacaactccaacaacagaggcagctacaaccgggctccccagcaacagccgccaccacagcagcctccgccaccacagccaccaccccagcagccaccgccaccacccagctacagccctgctcggaaccccccaggggccagcacctacaataagaacagcaacatccctggctcaagcgccaataccagcacccccaccgtcagcagctacagccctccacagagctttggcttttttccctccactttccagccgagttacagccagccaccctacaaccagggaggttacagccagggctacacagccccaccgcctccacctccaccaccacctgcctacaactatgggagctacggcggttacaacccggccccctataccccaccgccaccccccactgcacagacctaccctcagcccagctataaccagtatcagcagtatgcccagcagtggaaccagtactatcagaaccagggccagtggccgccatactacgggaactacgactacgggagctactccgggaacacacagggtggcacaagtacacagtagccagtgtgacccagaggctcccggaggcccctgccggcttcctccaccagcgcctgcctcggcccctcctctgcccccgccagatcccgtggtgctggggatggggtcatcccagggctgcctccctccagcccactgcctcccctctgaggggcttccttcccctccatagggccaggcatttttttctggattcaaacaggcaacaatgaccttttattttctgtttgtccccacctccccagccttccacctcctgttcttcctaccttcttcctttttgactaaataatccccacctcccttgatcatacagtgaggctacagtgactgaggggagaatcccctcctgttcactctcccaaccctgctccagcccctcagcttcccagaccctcatgcagttggttgtaaattctcccaggagctgttttactgtctacttttcaggattaaaaaaaaaatcaaaacttaaaaaaaaaaaagtttaaaaagcaaaatggggagggggaggaagcagtgacttttttttggtaattatgcgcttttttttaatttttagaatttgtctttttactgtgggtgggctgttgatatttcatcaagataagcatttctttcctgagttcaggtgactgaggaagagccacaaaacaaaacacaacaaaaccaaaccacagaatcatctttaacccaactttttatacgatgccccagttccccataactttgcacacaagcttctgtgttcagttgaattgtaactgctttttgtatttggagagagtgactattgaacttgaaaccttttattccgggcgtcttggtagtttctggtgggattcagtgggtgagagggaagaaggggaggttggggggctccttcccttcagaacttgaagtttctcccactgcctcctctccagtggtctcccaggtgccagacccaaaagcttttcctacagtgataccctttatttttacttccccttgactcatatgttttaacatgattttaacaaactgcacttat

SEQ ID NO: 140597 - DNA, 2864 bp, Homo sapiens
  Payload ID: 7574
  Gene Symbol: HNRNPUL1
  Gene Name: heterogeneous nuclear ribonucleoprotein U-like 1
  Uniprot ID: Q9BUJ2
  ENST ID: ENST00000378215
  CDS Start-End: 133-2391
attttgagccgctgccgccattggagtgggccccccccctttcccccttcgcctcctgacaggaaaggtttaagggggacagagccctgggaggccgggccgggctcgggggccaccccgggggcccgggccatggatgtgcgccgtctgaaggtgaacgaacttcgcgaggagctgcagcgccgcggcctggacactcgaggcctcaaggccgagcttgctgagcggctgcagccaccgccgcccgggctgcagccgcacgcggagcccggcggctactcggggccggacggacattatgccatggacaatattaccaggcagaaccaattctacgatacccaagtcatcaaacaagaaaacgagtcaggctacgagaggagaccactggaaatggagcagcagcaggcctatcgtccagaaatgaagacagagatgaagcaaggagcacccaccagcttcctcccgcctgaagcttctcaactcaagccagacaggcagcaattccagagtcgaaagaggccttatgaagaaaaccggggacgggggtactttgagcaccgagaggataggaggggccgctctcctcagcctcctgctgaagaggatgaagatgactttgatgatacccttgttgctattgacacctataactgcgacctccacttcaaggtggcccgagatcggagtagtggctatccgctcacaattgagggctttgcatacctgtggtcaggagcccgtgccagctatggggtcagaaggggccgtgtatgcttcgagatgaaggattttgaatgtggaaatgacgtggaactgtcttttaccaagaatggaaagtggatgggcattgctttccgaatccagaaggaagccttggggggtcaggccctctatcctcatgtcctggtgaagaattgcgcagtggagttcaacttcggacagagagcagagccctactgttctgtcctcccggggtttaccttcatccagcaccttccccttagtgagcgtatccggggcaccgttggaccaaagagcaaggcagaatgtgagattctgatgatggtgggcctgcctgctgctggcaagaccacatgggccatcaaacatgcagcctccaacccttccaagaagtacaacatcctgggtaccaatgccatcatggataagatgcgggtgatgggcctacgccggcagcggaactatgctggccgctgggatgtcctgatccagcaggccacccagtgcctcaaccgcctcatccagattgctgcccgcaagaaacgcaactatatcctagatcagacaaatgtttatgggtcagcccagagacgaaaaatgagaccatttgaaggcttccagcgcaaagctattgtaatttgtcccactgacgaggacctaaaagaccgaacaataaagcgaaccgacgaggaagggaaggatgtcccagatcatgcggtcttagaaatgaaagccaacttcacgttgccagatgttggggacttcctggatgaggttctgttcattgagctgcagcgggaggaagcggacaagctagtgaggcagtacaacgaggaaggccgcaaggctgggccaccccctgaaaagcgctttgacaaccgaggtggtggtggcttccggggccgcgggggtggtggtggcttccagcgctatgaaaaccgaggaccccctggaggcaaccgtggcggcttccagaaccgagggggaggcagcggtggaggaggcaactaccgaggaggtttcaaccgcagcggaggtggtggctatagccagaaccgctggggtaacaacaaccgggataacaacaactccaacaacagaggcagctacaaccgggctccccagcaacagccgccaccacagcagcctccgccaccacagccaccaccccagcagccaccgccaccacccagctacagccctgctcggaaccccccaggggccagcacctacaataagaacagcaacatccctggctcaagcgccaataccagcacccccaccgtcagcagctacagccctccacagagctttggcttttttccctccactttccagccgagttacagccagccaccctacaaccagggaggttacagccagggctacacagccccaccgcctccacctccaccaccacctgcctacaactatgggagctacggcggttacaacccggccccctataccccaccgccaccccccactgcacagacctaccctcagcccagctataaccagtatcagcagtatgcccagcagtggaaccagtactatcagaaccagggccagtggccgccatactacgggaactacgactacgggagctactccgggaacacacagggtggcacaagtacacagtagccagtgtgacccagaggctcccggaggcccctgccggcttcctccaccagcgcctgcctcggcccctcctctgcccccgccagatcccgtggtgctggggatggggtcatcccagggctgcctccctccagcccactgcctcccctctgaggggcttccttcccctccatagggccaggcatttttttctggattcaaacaggcaacaatgaccttttattttctgtttgtccccacctccccagccttccacctcctgttcttcctaccttcttcctttttgactaaataatccccacctcccttgatcatacagtgaggctacagtgactgaggggagaatcccctcctgttcactctcccaaccctgctccagcccctcagcttcccagaccctcatgcagttggttgtaaattctcccaggagctgttttactgtctacttttcaggattaaaaaaaaaatcaaaactt

SEQ ID NO: 140598 - DNA, 3555 bp, Homo sapiens
  Payload ID: 7574
  Gene Symbol: HNRNPUL1
  Gene Name: heterogeneous nuclear ribonucleoprotein U-like 1
  Uniprot ID: Q9BUJ2
  ENST ID: ENST00000392006
  CDS Start-End: 174-2744
cggacgaggcacgagtgaggggggaggcggtggcggcggccattttgagccgctgccgccattggagtgggccccccccctttcccccttcgcctcctgacaggaaaggtttaagggggacagagccctgggaggccgggccgggctcgggggccaccccgggggcccgggccatggatgtgcgccgtctgaaggtgaacgaacttcgcgaggagctgcagcgccgcggcctggacactcgaggcctcaaggccgagcttgctgagcggctgcaggcggcgttggaggccgaggagcctgacgacgagcgggagctcgacgccgacgacgaaccggggcgacccgggcacatcaacgaggaggtcgagaccgaggggggctccgagctggaggggaccgcgcagccaccgccgcccgggctgcagccgcacgcggagcccggcggctactcggggccggacggacattatgccatggacaatattaccaggcagaaccaattctacgatacccaagtcatcaaacaagaaaacgagtcaggctacgagaggagaccactggaaatggagcagcagcaggcctatcgtccagaaatgaagacagagatgaagcaaggagcacccaccagcttcctcccgcctgaagcttctcaactcaagccagacaggcagcaattccagagtcgaaagaggccttatgaagaaaaccggggacgggggtactttgagcaccgagaggataggaggggccgctctcctcagcctcctgctgaagaggatgaagatgactttgatgatacccttgttgctattgacacctataactgcgacctccacttcaaggtggcccgagatcggagtagtggctatccgctcacaattgagggctttgcatacctgtggtcaggagcccgtgccagctatggggtcagaaggggccgtgtatgcttcgagatgaagatcaatgaggaaatctccgtgaagcaccttccgtctacagagcctgacccccacgtggtccgtatcggctggtccctggactcctgcagcacccagctaggcgaagagcctttctcctatggctatggaggcactgggaagaagtccaccaatagccggtttgaaaactacggagacaagtttgcagagaacgatgtgattggctgctttgcggattttgaatgtggaaatgacgtggaactgtcttttaccaagaatggaaagtggatgggcattgctttccgaatccagaaggaagccttggggggtcaggccctctatcctcatgtcctggtgaagaattgcgcagtggagttcaacttcggacagagagcagagccctactgttctgtcctcccggggtttaccttcatccagcaccttccccttagtgagcgtatccggggcaccgttggaccaaagagcaaggcagaatgtgagattctgatgatggtgggcctgcctgctgctggcaagaccacatgggccatcaaacatgcagcctccaacccttccaagaagtacaacatcctgggtaccaatgccatcatggataagatgcgggtgatgggcctacgccggcagcggaactatgctggccgctgggatgtcctgatccagcaggccacccagtgcctcaaccgcctcatccagattgctgcccgcaagaaacgcaactatatcctagatcagacaaatgtttatgggtcagcccagagacgaaaaatgagaccatttgaaggcttccagcgcaaagctattgtaatttgtcccactgacgaggacctaaaagaccgaacaataaagcgaaccgacgaggaagggaaggatgtcccagatcatgcggtcttagaaatgaaagccaacttcacgttgccagatgttggggacttcctggatgaggttctgttcattgagctgcagcgggaggaagcggacaagctagtgaggcagtacaacgaggaaggccgcaaggctgggccaccccctgaaaagcgctttgacaaccgaggtggtggtggcttccggggccgcgggggtggtggtggcttccagcgctatgaaaaccgaggaccccctggaggcaaccgtggcggcttccagaaccgagggggaggcagcggtggaggaggcaactaccgaggaggtttcaaccgcagcggaggtggtggctatagccagaaccgctggggtaacaacaaccgggataacaacaactccaacaacagaggcagctacaaccgggctccccagcaacagccgccaccacagcagcctccgccaccacagccaccaccccagcagccaccgccaccacccagctacagccctgctcggaaccccccaggggccagcacctacaataagaacagcaacatccctggctcaagcgccaataccagcacccccaccgtcagcagctacagccctccacagccgagttacagccagccaccctacaaccagggaggttacagccagggctacacagccccaccgcctccacctccaccaccacctgcctacaactatgggagctacggcggttacaacccggccccctataccccaccgccaccccccactgcacagacctaccctcagcccagctataaccagtatcagcagtatgcccagcagtggaaccagtactatcagaaccagggccagtggccgccatactacgggaactacgactacgggagctactccgggaacacacagggtggcacaagtacacagtagccagtgtgacccagaggctcccggaggcccctgccggcttcctccaccagcgcctgcctcggcccctcctctgcccccgccagatcccgtggtgctggggatggggtcatcccagggctgcctccctccagcccactgcctcccctctgaggggcttccttcccctccatagggccaggcatttttttctggattcaaacaggcaacaatgaccttttattttctgtttgtccccacctccccagccttccacctcctgttcttcctaccttcttcctttttgactaaataatccccacctcccttgatcatacagtgaggctacagtgactgaggggagaatcccctcctgttcactctcccaaccctgctccagcccctcagcttcccagaccctcatgcagttggttgtaaattctcccaggagctgttttactgtctacttttcaggattaaaaaaaaaatcaaaacttaaaaaaaaaaaagtttaaaaagcaaaatggggagggggaggaagcagtgacttttttttggtaattatgcgcttttttttaatttttagaatttgtctttttactgtgggtgggctgttgatatttcatcaagataagcatttctttcctgagttcaggtgactgaggaagagccacaaaacaaaacacaacaaaaccaaaccacagaatcatctttaacccaactttttatacgatgccccagttccccataactttgcacacaagcttctgtgttcagttgaattgtaactgctttttgtatttggagagagtgactattgaacttgaaacctttt

SEQ ID NO: 140599 - DNA, 644 bp, Homo sapiens
  Payload ID: 7574
  Gene Symbol: HNRNPUL1
  Gene Name: heterogeneous nuclear ribonucleoprotein U-like 1
  ENST ID: ENST00000600332
  CDS Start-End: 1-80
gaaggggccgtgtatgcttcgagatgaaggtgagtaggagcaagagaaggggaagggacagagaagtccatccattgtaatatcctgataccagccaccttggtcagagctgcaactgcaaaagagattggattgtgcaataccatgtccaagcagacaaaactgtgatgaactcaagacaactacatcattgctaaatatcatatcagaaaagcaggccaaccatgcattgcttcatcaagcagatatttccttggtgagatttgacccaggtattatgtagtcaaccagtgtagtgatgacatgtttgtagaactgagaaaagaagttgtttggaagaaaagtgatctagaaagaatagactcagatgtcacttattaaagggaggccagagggagaacagggcaaagaactgccagcttaggccagcctctgctgtcatctctccacagttccatgtcaagttatgtttatgaaaataatagatgctcatgtttaacaaaagttcagacagcacagaaaagtacaggataaaacaggcttgagccaccgtgcccggcctactttgctctttttaactgttgcatcatattttgtggcatggatataccataatcagtgctttattgatattttttctgatg

SEQ ID NO: 140600 - DNA, 573 bp, Homo sapiens
  Payload ID: 7574
  Gene Symbol: HNRNPUL1
  Gene Name: heterogeneous nuclear ribonucleoprotein U-like 1
  ENST ID: ENST00000597725
  CDS Start-End: 56-573
aagtcggacgtgggcgaggggcggggtgtctggactggaacctctgggcccacaaatgaagacagagatgaagcaaggagcacccaccagcttcctcccgcctgaagcttctcaactcaagccagacaggcagcaattccagagtcgaaagaggccttatgaagaaaaccggggacgggggtactttgagcaccgagaggataggaggggccgctctcctcagcctcctgctgaagaggatgaagatgactttgatgatacccttgttgctattgacacctataactgcgacctccacttcaaggtggcccgagatcggagtagtggctatccgctcacaattgagggctttgcatacctgtggtcaggagcccgtgccagctatggggtcagaaggggccgtgtatgcttcgagatgaagatcaatgaggaaatctccgtgaagcaccttccgtctacagagcctgacccccacgtggtccgtatcggctggtccctggactcctgcagcacccagctaggcgaagagcctttctcctatggctatggaggcactgggaagaagtccaccaa

SEQ ID NO: 140601 - DNA, 581 bp, Homo sapiens
  Payload ID: 7574
  Gene Symbol: HNRNPUL1
  Gene Name: heterogeneous nuclear ribonucleoprotein U-like 1
  ENST ID: ENST00000600596
  CDS Start-End: 1-271
tacccttgttgctattgacacctataactgcgacctccacttcaaggtggcccgagatcggagtagtggctatccgctcacaattgagggctttgcatacctgtggtcaggagcccgtgccagctatggggtcagaaggggccgtgtatgcttcgagatgaagatcaatgaggaaatctccgtgaagcaccttccgtctacagagcctgacccccacgtggtccgtatcggctggtccctggactcctgcagcacccagctaggattttgaatgtggaaatgacgtggaactgtcttttaccaagaatggaaagtggatgggcattgctttccgaatccagaaggaagccttggggggtcaggccctctatcctcatgtcctggtgaagaattgcgcagtggagttcaacttcggacagagagcagagccctactgttctgtcctcccggggtttaccttcatccagcaccttccccttagtgagcgtatccggggcaccgttggaccaaagagcaaggcagaatgtgagattctgatgatggtgggcctgcctgctgctggcaagaccacatgggccatc

SEQ ID NO: 140602 - DNA, 1473 bp, Homo sapiens
  Payload ID: 7574
  Gene Symbol: HNRNPUL1
  Gene Name: heterogeneous nuclear ribonucleoprotein U-like 1
  ENST ID: ENST00000599719
  CDS Start-End: 361-1473
gttatctttattattcgatgccgcctgcctctgcggaccgtagtgggcacatctacactgcagcggggtgccttacccaaagcagatcggaattggggccgggcgcggtggctcacgcctgtaatcccagcactttgggaggccgaggcgggcggatcacttgaggtcaggagttcgagaccagcctggccaacatggtgaaaccccgtctctactaaaaatacaaaaattagtcgggcatggtggcggggacctgtaatcccagctactcggaaggctgaggcaggagaatcgcttgaacacgggaggcggaggttgcggtgagctgagatagaggccctgcactccagccaggatgccatggacaatattaccaggcagaaccaattctacgatacccaagtcatcaaacaagaaaacgagtcaggctacgagaggagaccactggaaatggagcagcagcaggcctatcgtccagaaatgaagacagagatgaagcaaggagcacccaccagcttcctcccgcctgaagcttctcaactcaagccagacaggcagcaattccagagtcgaaagaggccttatgaagaaaaccggggacgggggtactttgagcaccgagaggataggaggggccgctctcctcagcctcctgctgaagaggatgaagatgactttgatgatacccttgttgctattgacacctataactgcgacctccacttcaaggtggcccgagatcggagtagtggctatccgctcacaattgagggctttgcatacctgtggtcaggagcccgtgccagctatggggtcagaaggggccgtgtatgcttcgagatgaagatcaatgaggaaatctccgtgaagcaccttccgtctacagagcctgacccccacgtggtccgtatcggctggtccctggactcctgcagcacccagctaggcgaagagcctttctcctatggctatggaggcactgggaagaagtccaccaatagccggtttgaaaactacggagacaagtttgcagagaacgatgtgattggctgctttgcggattttgaatgtggaaatgacgtggaactgtcttttaccaagaatggaaagtggatgggcattgctttccgaatccagaaggaagccttggggggtcaggccctctatcctcatgtcctggtgaagaattgcgcagtggagttcaacttcggacagagagcagagccctactgttctgtcctcccggggtttaccttcatccagcaccttccccttagtgagcgtatccggggcaccgttggaccaaagagcaaggcagaatgtgagattctgatgatggtgggcctgcctgctgctggcaagaccacatgggccatcaaacatgcagcctccaacccttccaagaagtacaacatcctgggtaccaatgccatcatggataagatgcgggtgatgggcctacgccggcagcgg

SEQ ID NO: 140603 - DNA, 2932 bp, Homo sapiens
  Payload ID: 7574
  Gene Symbol: HNRNPUL1
  Gene Name: heterogeneous nuclear ribonucleoprotein U-like 1
  Uniprot ID: Q9BUJ2
  ENST ID: ENST00000602130
  CDS Start-End: 54-2468
cagagccctgggaggccgggccgggctcgggggccaccccgggggcccgggccatggatgtgcgccgtctgaaggtgaacgaacttcgcgaggagctgcagcgccgcggcctggacactcgaggcctcaaggccgagcttgctgagcggctgcaggcggcgttggaggccgaggagcctgacgacgagcgggagctcgacgccgacgacgaaccggggcgacccgggcacatcaacgaggaggtcgagaccgaggggggctccgagctggaggggaccgcgcagccaccgccgcccgggctgcagccgcacgcggagcccggcggctactcggggccggacggacattatgccatggacaatattaccaggcagaaccaattctacgatacccaagtcatcaaacaagaaaacgagtcaggctacgagaggagaccactggaaatggagcagcagcaggcctatcgtccagaaatgaagacagagatgaagcaaggagcacccaccagcttcctcccgcctgaagcttctcaactcaagccagacaggcagcaattccagagtcgaaagaggccttatgaagaaaaccggggacgggggtactttgagcaccgagaggataggaggggccgctctcctcagcctcctgctgaagaggatgaagatgactttgatgatacccttgttgctattgacacctataactgcgacctccacttcaaggtggcccgagatcggagtagtggctatccgctcacaattgagggctttgcatacctgtggtcaggagcccgtgccagctatggggtcagaaggggccgtgtatgcttcgagatgaagatcaatgaggaaatctccgtgaagcaccttccgtctacagagcctgacccccacgtggtccgtatcggctggtccctggactcctgcagcacccagctaggcgaagagcctttctcctatggctatggaggcactgggaagaagtccaccaatagccggtttgaaaactacggagacaagtttgcagagaacgatgtgattggctgctttgcggattttgaatgtggaaatgacgtggaactgtcttttaccaagaatggaaagtggatgggcattgctttccgaatccagaaggaagccttggggggtcaggccctctatcctcatgtcctggtgaagaattgcgcagtggagttcaacttcggacagagagcagagccctactgttctgtcctcccggggtttaccttcatccagcaccttccccttagtgagcgtatccggggcaccgttggaccaaagagcaaggcagaatgtgagattctgatgatggtgggcctgcctgctgctggcaagaccacatgggccatcaaacatgcagcctccaacccttccaagaagtacaacatcctgggtaccaatgccatcatggataagatgcgggtgatgggcctacgccggcagcggaactatgctggccgctgggatgtcctgatccagcaggccacccagtgcctcaaccgcctcatccagattgctgcccgcaagaaacgcaactatatcctagatcagacaaatgtttatgggtcagcccagagacgaaaaatgagaccatttgaaggcttccagcgcaaagctattgtaatttgtcccactgacgaggacctaaaagaccgaacaataaagcgaaccgacgaggaagggaaggatgtcccagatcatgcggtcttagaaatgaaagccaacttcacgttgccagatgttggggacttcctggatgaggttctgttcattgagctgcagcgggaggaagcggacaagctagtgaggcagtacaacgaggaaggccgcaaggctgggccaccccctgaaaagcgctttgacaaccgaggtggtggtggcttccggggccgcgggggtggtggtggcttccagcgctatgaaaaccgaggaccccctggaggcaaccgtggcggcttccagaaccgagggggaggcagcggtggaggaggcaactaccgaggaggtttcaaccgcagcggaggtggtggctatagccagaaccgctggggtaacaacaaccgggataacaacaactccaacaacagaggcagctacaaccgggctccccagcaacagccgccaccacagcagcctccgccaccacagccaccaccccagcagccaccgccaccacccagctacagccctgctcggaaccccccaggggccagcacctacaataagaacagcaacatccctggctcaagcgccaataccagcacccccaccgtcagcagctacagccctccacagacctaccctcagcccagctataaccagtatcagcagtatgcccagcagtggaaccagtactatcagaaccagggccagtggccgccatactacgggaactacgactacgggagctactccgggaacacacagggtggcacaagtacacagtagccagtgtgacccagaggctcccggaggcccctgccggcttcctccaccagcgcctgcctcggcccctcctctgcccccgccagatcccgtggtgctggggatggggtcatcccagggctgcctccctccagcccactgcctcccctctgaggggcttccttcccctccatagggccaggcatttttttctggattcaaacaggcaacaatgaccttttattttctgtttgtccccacctccccagccttccacctcctgttcttcctaccttcttcctttttgactaaataatccccacctcccttgatcatacagtgaggctacagtgactgaggggagaatcccctcctgttcactctcccaaccctgctccagcccctcagcttcccagaccctcatgcagttggttgtaaattctcccaggagctgttttactgtctacttttcaggattaaaaaaaaaa

SEQ ID NO: 140604 - DNA, 672 bp, Homo sapiens
  Payload ID: 7574
  Gene Symbol: HNRNPUL1
  Gene Name: heterogeneous nuclear ribonucleoprotein U-like 1
  ENST ID: ENST00000601309
  CDS Start-End: 317-672
attattcgatgccgcctgcctctgcggaccgtagtgggcacatctacactgcagcggggtgccttacccaaagcagatcggaattggggccgggcgcggtggctcacgcctgtaatcccagcactttgggaggccgaggcgggcggatcacttgaggtcaggagttcgagaccagcctggccaacatggtgaaaccccgtctctactaaaaatacaaaaattagtcgggcatggtggcggggacctgtaatcccagctactcggaaggctgaggcaggagaatcgcttgaacacgggaggcggaggttgcgatgccatggacaatattaccaggcagaaccaattctacgatacccaagtcatcaaacaagaaaacgagtcaggctacgagaggagaccactggaaatggagcagcagcaggcctatcgtccagaaatgaagacagagatgaagcaaggagcacccaccagcttcctcccgcctgaagcttctcaactcaagccagacaggcagcaattccagagtcgaaagaggccttatgaagaaaaccggggacgggggtactttgagcaccgagaggataggaggggccgctctcctcagcctcctgctgaagaggatgaagatgactttgatgatacccttgttgctattgacacctataactgcga

SEQ ID NO: 140605 - DNA, 754 bp, Homo sapiens
  Payload ID: 7574
  Gene Symbol: HNRNPUL1
  Gene Name: heterogeneous nuclear ribonucleoprotein U-like 1
  ENST ID: ENST00000601336
  CDS Start-End: 281-754
gaaagggctgtgggacgcgggagtccagcgcctgaggtcggggagacgacctgaggatcgggggatcccgctacccgccgccgaaaaggatctggggaccagggccccagcacgaccggagggtggatcctgacactcagtgcaggggggacactgggggaggggcctctgggtttcggaggtgagggacgggggtggcggggaggattccgtaccgtagggatcggagaccggaaactgctttctggagccgaagagagtcggaagaacaagagatgccatggacaatattaccaggcagaaccaattctacgatacccaagtcatcaaacaagaaaacgagtcaggctacgagaggagaccactggaaatggagcagcagcaggcctatcgtccagaaatgaagacagagatgaagcaaggagcacccaccagcttcctcccgcctgaagcttctcaactcaagccagacaggcagcaattccagagtcgaaagaggccttatgaagaaaaccggggacgggggtactttgagcaccgagaggataggaggggccgctctcctcagcctcctgctgaagaggatgaagatgactttgatgatacccttgttgctattgacacctataactgcgacctccacttcaaggtggcccgagatcggagtagtggctatccgctcacaattgagggctttgcatacctgtggtcaggagcccgtgccagctatggggtcagaaggggccgtgtatgc

SEQ ID NO: 140606 - DNA, 393 bp, Homo sapiens
  Payload ID: 7574
  Gene Symbol: HNRNPUL1
  Gene Name: heterogeneous nuclear ribonucleoprotein U-like 1
  ENST ID: ENST00000595336
  CDS Start-End: 151-393
tagtatgcatgccatgaatagttaatattattattcttaccactcttagttgagctcctggacctgcagatgccttctggatgctttggtccagggttcttcatgaaccgcccctctaattggccatttttaattttgttttaagatgccatggacaatattaccaggcagaaccaattctacgatacccaagtcatcaaacaagaaaacgagtcaggctacgagaggagaccactggaaatggagcagcagcaggcctatcgtccagaaatgaagacagagatgaagcaaggagcacccaccagcttcctcccgcctgaagcttctcaactcaagccagacaggcagcaattccagagtcgaaagaggccttatgaagaaaaccggggacgg

SEQ ID NO: 140607 - DNA, 3043 bp, Homo sapiens
  Payload ID: 7574
  Gene Symbol: HNRNPUL1
  Gene Name: heterogeneous nuclear ribonucleoprotein U-like 1
  ENST ID: ENST00000595196
  CDS Start-End: 94-411
tttcccccttcgcctcctgacaggaaaggtttaagggggacagagccctgggaggccgggccgggctcgggggccaccccgggggcccgggccatggatgtgcgccgtctgaaggtgaacgaacttcgcgaggagctgcagcgccgcggcctggacactcgaggcctcaaggccgagcttgctgagcggctgcaggcggcgttggaggccgaggagcctgacgacgagcgggagctcgacgccgacgacgaaccggggcgacccgggcacatcaacgaggagatgccatggacaatattaccaggcagaaccaattctacgatacccaagtcatcaaacaagaaaacgagtcaggctacgagaggagaccactggaaatggagcagcagcaggcctatcgtccagaaatgaagacagagatgaagcaaggagcacccaccagcttcctcccgcctgaagcttctcaactcaagccagacaggcagcaattccagagtcgaaagaggccttatgaagaaaaccggggacgggggtactttgagcaccgagaggataggaggggccgctctcctcagcctcctgctgaagaggatgaagatgactttgatgatacccttgttgctattgacacctataactgcgacctccacttcaaggtggcccgagatcggagtagtggctatccgctcacaattgagggctttgcatacctgtggtcaggagcccgtgccagctatggggtcagaaggggccgtgtatgcttcgagatgaagatcaatgaggaaatctccgtgaagcaccttccgtctacagagcctgacccccacgtggtccgtatcggctggtccctggactcctgcagcacccagctaggcgaagagcctttctcctatggctatggaggcactgggaagaagtccaccaatagccggtttgaaaactacggagacaagtttgcagagaacgatgtgattggctgctttgcggattttgaatgtggaaatgacgtggaactgtcttttaccaagaatggaaagtggatgggcattgctttccgaatccagaaggaagccttggggggtcaggccctctatcctcatgtcctggtgaagaattgcgcagtggagttcaacttcggacagagagcagagccctactgttctgtcctcccggggtttaccttcatccagcaccttccccttagtgagcgtatccggggcaccgttggaccaaagagcaaggcagaatgtgagattctgatgatggtgggcctgcctgctgctggcaagaccacatgggccatcaaacatgcagcctccaacccttccaagaagtacaacatcctgggtaccaatgccatcatggataagatgcgggtgatgggcctacgccggcagcggaactatgctggccgctgggatgtcctgatccagcaggccacccagtgcctcaaccgcctcatccagattgctgcccgcaagaaacgcaactatatcctagatcagacaaatgtttatgggtcagcccagagacgaaaaatgagaccatttgaaggcttccagcgcaaagctattgtaatttgtcccactgacgaggacctaaaagaccgaacaataaagcgaaccgacgaggaagggaaggatgtcccagatcatgcggtcttagaaatgaaagccaacttcacgttgccagatgttggggacttcctggatgaggttctgttcattgagctgcagcgggaggaagcggacaagctagtgaggcagtacaacgaggaaggccgcaaggctgggccaccccctgaaaagcgctttgacaaccgaggtggtggtggcttccggggccgcgggggtggtggtggcttccagcgctatgaaaaccgaggaccccctggaggcaaccgtggcggcttccagaaccgagggggaggcagcggtggaggaggcaactaccgaggaggtttcaaccgcagcggaggtggtggctatagccagaaccgctggggtaacaacaaccgggataacaacaactccaacaacagaggcagctacaaccgggctccccagcaacagccgccaccacagcagcctccgccaccacagccaccaccccagcagccaccgccaccacccagctacagccctgctcggaaccccccaggggccagcacctacaataagaacagcaacatccctggctcaagcgccaataccagcacccccaccgtcagcagctacagccctccacagccgagttacagccagccaccctacaaccagggaggttacagccagggctacacagccccaccgcctccacctccaccaccacctgcctacaactatgggagctacggcggttacaacccggccccctataccccaccgccaccccccactgcacagacctaccctcagcccagctataaccagtatcagcagtatgcccagcagtggaaccagtactatcagaaccagggccagtggccgccatactacgggaactacgactacgggagctactccgggaacacacagggtggcacaagtacacagtagccagtgtgacccagaggctcccggaggcccctgccggcttcctccaccagcgcctgcctcggcccctcctctgcccccgccagatcccgtggtgctggggatggggtcatcccagggctgcctccctccagcccactgcctcccctctgaggggcttccttcccctccatagggccaggcatttttttctggattcaaacaggcaacaatgaccttttattttctgtttgtccccacctccccagccttccacctcctgttcttcctaccttcttcctttttgactaaataatccccacctcccttgatcatacagtgaggctacagtgactgaggggagaatcccctcctgttcactctcccaaccctgctccagcccctcagcttcccagaccctcatgcagttggttgtaaattctcccaggagctgttttactgtctacttttcaggattaaaaaaaaaatcaaaacttaaaaaaaaaaaa

SEQ ID NO: 140608 - DNA, 2725 bp, Homo sapiens
  Payload ID: 7574
  Gene Symbol: HNRNPUL1
  Gene Name: heterogeneous nuclear ribonucleoprotein U-like 1
  Uniprot ID: Q9BUJ2
  ENST ID: ENST00000593587
  CDS Start-End: 95-2365
ggaaactgctttctggagccgaagagagtcggaagaacaagaggttttccgtttgggttggggagggtctcgaaaatggggatcctaggatgccatggacaatattaccaggcagaaccaattctacgatacccaagtcatcaaacaagaaaacgagtcaggctacgagaggagaccactggaaatggagcagcagcaggcctatcgtccagaaatgaagacagagatgaagcaaggagcacccaccagcttcctcccgcctgaagcttctcaactcaagccagacaggcagcaattccagagtcgaaagaggccttatgaagaaaaccggggacgggggtactttgagcaccgagaggataggaggggccgctctcctcagcctcctgctgaagaggatgaagatgactttgatgatacccttgttgctattgacacctataactgcgacctccacttcaaggtggcccgagatcggagtagtggctatccgctcacaattgagggctttgcatacctgtggtcaggagcccgtgccagctatggggtcagaaggggccgtgtatgcttcgagatgaagatcaatgaggaaatctccgtgaagcaccttccgtctacagagcctgacccccacgtggtccgtatcggctggtccctggactcctgcagcacccagctaggcgaagagcctttctcctatggctatggaggcactgggaagaagtccaccaatagccggtttgaaaactacggagacaagtttgcagagaacgatgtgattggctgctttgcggattttgaatgtggaaatgacgtggaactgtcttttaccaagaatggaaagtggatgggcattgctttccgaatccagaaggaagccttggggggtcaggccctctatcctcatgtcctggtgaagaattgcgcagtggagttcaacttcggacagagagcagagccctactgttctgtcctcccggggtttaccttcatccagcaccttccccttagtgagcgtatccggggcaccgttggaccaaagagcaaggcagaatgtgagattctgatgatggtgggcctgcctgctgctggcaagaccacatgggccatcaaacatgcagcctccaacccttccaagaagtacaacatcctgggtaccaatgccatcatggataagatgcgggtgatgggcctacgccggcagcggaactatgctggccgctgggatgtcctgatccagcaggccacccagtgcctcaaccgcctcatccagattgctgcccgcaagaaacgcaactatatcctagatcagacaaatgtttatgggtcagcccagagacgaaaaatgagaccatttgaaggcttccagcgcaaagctattgtaatttgtcccactgacgaggacctaaaagaccgaacaataaagcgaaccgacgaggaagggaaggatgtcccagatcatgcggtcttagaaatgaaagccaacttcacgttgccagatgttggggacttcctggatgaggttctgttcattgagctgcagcgggaggaagcggacaagctagtgaggcagtacaacgaggaaggccgcaaggctgggccaccccctgaaaagcgctttgacaaccgaggtggtggtggcttccggggccgcgggggtggtggtggcttccagcgctatgaaaaccgaggaccccctggaggcaaccgtggcggcttccagaaccgagggggaggcagcggtggaggaggcaactaccgaggaggtttcaaccgcagcggaggtggtggctatagccagaaccgctggggtaacaacaaccgggataacaacaactccaacaacagaggcagctacaaccgggctccccagcaacagccgccaccacagcagcctccgccaccacagccaccaccccagcagccaccgccaccacccagctacagccctgctcggaaccccccaggggccagcacctacaataagaacagcaacatccctggctcaagcgccaataccagcacccccaccgtcagcagctacagccctccacagccgagttacagccagccaccctacaaccagggaggttacagccagggctacacagccccaccgcctccacctccaccaccacctgcctacaactatgggagctacggcggttacaacccggccccctataccccaccgccaccccccactgcacagacctaccctcagcccagctataaccagtatcagcagtatgcccagcagtggaaccagtactatcagaaccagggccagtggccgccatactacgggaactacgactacgggagctactccgggaacacacagggtggcacaagtacacagtagccagtgtgacccagaggctcccggaggcccctgccggcttcctccaccagcgcctgcctcggcccctcctctgcccccgccagatcccgtggtgctggggatggggtcatcccagggctgcctccctccagcccactgcctcccctctgaggggcttccttcccctccatagggccaggcatttttttctggattcaaacaggcaacaatgaccttttattttctgtttgtccccacctccccagccttccacctcctgttcttcctaccttcttcctttttgactaaataatccccacctcccttgatcatacagtgaggctacagtgactgaggggagaatcccctcctgttcactct

SEQ ID NO: 140609 - DNA, 2794 bp, Homo sapiens
  Payload ID: 7574
  Gene Symbol: HNRNPUL1
  Gene Name: heterogeneous nuclear ribonucleoprotein U-like 1
  Uniprot ID: Q9BUJ2
  ENST ID: ENST00000595018
  CDS Start-End: 70-2340
agagagagaggaagtcggacgtgggcgaggggcggggtgtctggactggaacctctgggcccacatgccatggacaatattaccaggcagaaccaattctacgatacccaagtcatcaaacaagaaaacgagtcaggctacgagaggagaccactggaaatggagcagcagcaggcctatcgtccagaaatgaagacagagatgaagcaaggagcacccaccagcttcctcccgcctgaagcttctcaactcaagccagacaggcagcaattccagagtcgaaagaggccttatgaagaaaaccggggacgggggtactttgagcaccgagaggataggaggggccgctctcctcagcctcctgctgaagaggatgaagatgactttgatgatacccttgttgctattgacacctataactgcgacctccacttcaaggtggcccgagatcggagtagtggctatccgctcacaattgagggctttgcatacctgtggtcaggagcccgtgccagctatggggtcagaaggggccgtgtatgcttcgagatgaagatcaatgaggaaatctccgtgaagcaccttccgtctacagagcctgacccccacgtggtccgtatcggctggtccctggactcctgcagcacccagctaggcgaagagcctttctcctatggctatggaggcactgggaagaagtccaccaatagccggtttgaaaactacggagacaagtttgcagagaacgatgtgattggctgctttgcggattttgaatgtggaaatgacgtggaactgtcttttaccaagaatggaaagtggatgggcattgctttccgaatccagaaggaagccttggggggtcaggccctctatcctcatgtcctggtgaagaattgcgcagtggagttcaacttcggacagagagcagagccctactgttctgtcctcccggggtttaccttcatccagcaccttccccttagtgagcgtatccggggcaccgttggaccaaagagcaaggcagaatgtgagattctgatgatggtgggcctgcctgctgctggcaagaccacatgggccatcaaacatgcagcctccaacccttccaagaagtacaacatcctgggtaccaatgccatcatggataagatgcgggtgatgggcctacgccggcagcggaactatgctggccgctgggatgtcctgatccagcaggccacccagtgcctcaaccgcctcatccagattgctgcccgcaagaaacgcaactatatcctagatcagacaaatgtttatgggtcagcccagagacgaaaaatgagaccatttgaaggcttccagcgcaaagctattgtaatttgtcccactgacgaggacctaaaagaccgaacaataaagcgaaccgacgaggaagggaaggatgtcccagatcatgcggtcttagaaatgaaagccaacttcacgttgccagatgttggggacttcctggatgaggttctgttcattgagctgcagcgggaggaagcggacaagctagtgaggcagtacaacgaggaaggccgcaaggctgggccaccccctgaaaagcgctttgacaaccgaggtggtggtggcttccggggccgcgggggtggtggtggcttccagcgctatgaaaaccgaggaccccctggaggcaaccgtggcggcttccagaaccgagggggaggcagcggtggaggaggcaactaccgaggaggtttcaaccgcagcggaggtggtggctatagccagaaccgctggggtaacaacaaccgggataacaacaactccaacaacagaggcagctacaaccgggctccccagcaacagccgccaccacagcagcctccgccaccacagccaccaccccagcagccaccgccaccacccagctacagccctgctcggaaccccccaggggccagcacctacaataagaacagcaacatccctggctcaagcgccaataccagcacccccaccgtcagcagctacagccctccacagccgagttacagccagccaccctacaaccagggaggttacagccagggctacacagccccaccgcctccacctccaccaccacctgcctacaactatgggagctacggcggttacaacccggccccctataccccaccgccaccccccactgcacagacctaccctcagcccagctataaccagtatcagcagtatgcccagcagtggaaccagtactatcagaaccagggccagtggccgccatactacgggaactacgactacgggagctactccgggaacacacagggtggcacaagtacacagtagccagtgtgacccagaggctcccggaggcccctgccggcttcctccaccagcgcctgcctcggcccctcctctgcccccgccagatcccgtggtgctggggatggggtcatcccagggctgcctccctccagcccactgcctcccctctgaggggcttccttcccctccatagggccaggcatttttttctggattcaaacaggcaacaatgaccttttattttctgtttgtccccacctccccagccttccacctcctgttcttcctaccttcttcctttttgactaaataatccccacctcccttgatcatacagtgaggctacagtgactgaggggagaatcccctcctgttcactctcccaaccctgctccagcccctcagcttcccagaccctcatgcagttggttgtaaattctcccaggagctgttttactgtctacttttcaggatt

SEQ ID NO: 140610 - DNA, 2447 bp, Homo sapiens
  Payload ID: 7574
  Gene Symbol: HNRNPUL1
  Gene Name: heterogeneous nuclear ribonucleoprotein U-like 1
  ENST ID: ENST00000599614
  CDS Start-End: 1-1925
gcttcctcccgcctgaagcttctcaactcaagccagacaggcagcaattccagagtcgaaagaggccttatgaagaaaaccggggacgggggtactttgagcaccgagaggataggaggggccgctctcctcagcctcctgctgaagaggatgaagatgactttgatgatacccttgttgctattgacacctataactgcgacctccacttcaaggtggcccgagatcggagtagtggctatccgctcacaattgagggctttgcatacctgtggtcaggagcccgtgccagctatggggtcagaaggggccgtgtatgcttcgagatgaagatcaatgaggaaatctccgtgaagcaccttccgtctacagagcctgacccccacgtggtccgtatcggctggtccctggactcctgcagcacccagctaggcgaagagcctttctcctatggctatggaggcactgggaagaagtccaccaatagccggtttgaaaactacggagacaagtttgcagagaacgatgtgattggctgctttgcggattttgaatgtggaaatgacgtggaactgtcttttaccaagaatggaaagtggatgggcattgctttccgaatccagaaggaagccttggggggtcaggccctctatcctcatgtcctggtgaagaattgcgcagtggagttcaacttcggacagagagcagagccctactgttctgtcctcccggggtttaccttcatccagcaccttccccttagtgagcgtatccggggcaccgttggaccaaagagcaaggcagaatgtgagattctgatgatggtgggcctgcctgctgctggcaagaccacatgggccatcaaacatgcagcctccaacccttccaagaagtacaacatcctgggtaccaatgccatcatggataagatgcgggtgatgggcctacgccggcagcggaactatgctggccgctgggatgtcctgatccagcaggccacccagtgcctcaaccgcctcatccagattgctgcccgcaagaaacgcaactatatcctagatcagacaaatgtttatgggtcagcccagagacgaaaaatgagaccatttgaaggcttccagcgcaaagctattgtaatttgtcccactgacgaggacctaaaagaccgaacaataaagcgaaccgacgaggaagggaaggatgtcccagatcatgcggtcttagaaatgaaagccaacttcacgttgccagatgttggggacttcctggatgaggttctgttcattgagctgcagcgggaggaagcggacaagctagtgaggcagtacaacgaggaaggccgcaaggctgggccaccccctgaaaagcgctttgacaaccgaggtggtggtggcttccggggccgcgggggtggtggtggcttccagcgctatgaaaaccgaggaccccctggaggcaaccgtggcggcttccagaaccgagggggaggcagcggtggaggaggcaactaccgaggaggtttcaaccgcagcggaggtggtggctatagccagaaccgctggggtaacaacaaccgggataacaacaactccaacaacagaggcagctacaaccgggctccccagcaacagccgccaccacagcagcctccgccaccacagccaccaccccagcagccaccgccaccacccagctacagccctgctcggaaccccccaggggccagcacctacaataagaacagcaacatccctggctcaagcgccaataccagcacccccaccgtcagcagctacagccctccacagtatgcccagcagtggaaccagtactatcagaaccagggccagtggccgccatactacgggaactacgactacgggagctactccgggaacacacagggtggcacaagtacacagtagccagtgtgacccagaggctcccggaggcccctgccggcttcctccaccagcgcctgcctcggcccctcctctgcccccgccagatcccgtggtgctggggatggggtcatcccagggctgcctccctccagcccactgcctcccctctgaggggcttccttcccctccatagggccaggcatttttttctggattcaaacaggcaacaatgaccttttattttctgtttgtccccacctccccagccttccacctcctgttcttcctaccttcttcctttttgactaaataatccccacctcccttgatcatacagtgaggctacagtgactgaggggagaatcccctcctgttcactctcccaaccctgctccagcccctcagcttcccagaccctcatgcagttggttgtaaattctcccaggagctgttttactgtctacttttcaggattaaaaaaaaaatcaaaacttaaaaaaaaaaaagtttaaaaagcaaaatggggagggggaggaagcagtg

SEQ ID NO: 140611 - DNA, 451 bp, Homo sapiens
  Payload ID: 7574
  Gene Symbol: HNRNPUL1
  Gene Name: heterogeneous nuclear ribonucleoprotein U-like 1
  ENST ID: ENST00000617774
  CDS Start-End: 83-451
gcctcctgacaggaaaggtttaagggggacagagccctgggaggccgggccgggctcgggggccaccccgggggcccgggccatggatgtgcgccgtctgaaggtgaacgaacttcgcgaggagctgcagcgccgcggcctggacactcgaggcctcaaggccgagcttgctgagcggctgcaggcggcgttggaggccgaggagcctgacgacgagcgggagctcgacgccgacgacgaaccggggcgacccgggcacatcaacgaggaggctgagttacagccagccaccctacaaccagggaggttacagccagggctacacagccccaccgcctccacctccaccaccacctgcctacaactatgggagctacggcggttacaacccggccccctataccccaccgccaccccccactgcacagacctaccctcagcccagctataa

SEQ ID NO: 140612 - DNA, 1018 bp, Homo sapiens
  Payload ID: 7574
  Gene Symbol: HNRNPUL1
  Gene Name: heterogeneous nuclear ribonucleoprotein U-like 1
  ENST ID: ENST00000617305
  CDS Start-End: 47-415
ctgggaggccgggccgggctcgggggccaccccgggggcccgggccatggatgtgcgccgtctgaaggtgaacgaacttcgcgaggagctgcagcgccgcggcctggacactcgaggcctcaaggccgagcttgctgagcggctgcaggcggcgttggaggccgaggagcctgacgacgagcgggagctcgacgccgacgacgaaccggggcgacccgggcacatcaacgaggaggccgagttacagccagccaccctacaaccagggaggttacagccagggctacacagccccaccgcctccacctccaccaccacctgcctacaactatgggagctacggcggttacaacccggccccctataccccaccgccaccccccactgcacagacctaccctcagcccagctataaccagtatcagcagtatgcccagcagtggaaccagtactatcagaaccagggccagtggccgccatactacgggaactacgactacgggagctactccgggaacacacagggtggcacaagtacacagtagccagtgtgacccagaggctcccggaggcccctgccggcttcctccaccagcgcctgcctcggcccctcctctgcccccgccagatcccgtggtgctggggatggggtcatcccagggctgcctccctccagcccactgcctcccctctgaggggcttccttcccctccatagggccaggcatttttttctggattcaaacaggcaacaatgaccttttattttctgtttgtccccacctccccagccttccacctcctgttcttcctaccttcttcctttttgactaaataatccccacctcccttgatcatacagtgaggctacagtgactgaggggagaatcccctcctgttcactctcccaaccctgctccagcccctcagcttcccagaccctcatgcagttggttgtaaattctcccaggagctgttttactgtctacttttcaggattaaaaaaaaaatcaaaactt

SEQ ID NO: 140613 - DNA, 5106 bp, Homo sapiens
  Payload ID: 7575
  Gene Symbol: HNRNPUL2
  Gene Name: heterogeneous nuclear ribonucleoprotein U-like 2
  Uniprot ID: Q1KMD3
  ENST ID: ENST00000301785
  CDS Start-End: 194-2437
acgaaggagaagcaaacactgcgcagcgggaccgtgcgcggcctccgctcctgcgtgcgtgcgctcgctcgcgcgggctcagtgctggcgcgtgaggcggaggcgggcggcggcggcggcgcctgcgcggtcggactcggtcgacggttcgcaggggaggaggcggcgggaggcggaggaggcggcggcggcgatggaggtgaagcggctgaaagtgaccgagctgcggtcggagctgcagcggcggggcctggactcgcgcggcctcaaggtggatctggcgcagcggctgcaggaggcgctggacgccgagatgctcgaggacgaggccggcggcggcggggccgggcccggcggggcctgcaaggcggagcctcggcctgtggccgcgtcgggcggcggcccgggcggggacgaggaggaggacgaagaggaggaggaggaggacgaggaggcgctgcttgaggacgaggacgaggagccaccccctgctcaagccttgggtcaggccgcgcagccgccgccggagcccccggaggcggcagccatggaggccgcggccgagccagatgcttccgagaagccggcggaggccacggccgggtcaggcggggtaaatggtggcgaagagcagggcctcggcaagagggaggaagacgaacccgaggagcggagcggggacgagacgccgggatccgaggtgccgggtgacaaggccgccgaggaacagggagatgaccaggatagtgaaaagtcaaaaccagcaggctcagatggtgagcggcggggggtaaagagacagcgggatgagaaggatgaacatggccgagcttactatgaattccgagaggaggcttaccacagccgctcaaagtctccactgcctcctgaagaagaggcaaaagatgaggaggaggatcaaactcttgtgaacctggacacgtatacctcggatctgcattttcaagtgagcaaagaccgctatggagggcagccacttttctcagagaagttccccaccctttggtctggggcaaggagtacttacggagtgacaaagggaaaagtctgctttgaggcaaaggtaacccagaatctcccaatgaaagaaggctgcacagaggtctctctccttcgagttgggtggtctgttgatttttcccgtccacagcttggtgaagatgaattctcttacggtttcgatggacgaggactcaaggcagaaaatggacaatttgaggaatttggccagacttttggggagaatgatgttattggctgctttgctaattttgagactgaagaagtagaactttccttctccaagaatggagaagacctaggtgtggcattctggatcagcaaggattccctggcagaccgggcccttctaccccatgtcctctgcaaaaattgtgttgtagaattaaacttcggtcagaaggaggagcccttcttcccaccaccagaagagtttgtgttcattcatgctgtgcctgttgaggagcgtgtacgcactgcagtccctcccaagaccatagaggaatgtgaggtgattctgatggtgggactacccggatctggaaagacccagtgggcactgaaatatgcaaaagaaaaccctgagaaaagatacaatgtcctgggagctgagactgtgctcaatcaaatgaggatgaagggtctcgaggagccagagatggaccccaaaagccgagaccttttagttcagcaagcctcccagtgccttagtaagctggtccagattgcttcccggacaaagaggaactttattcttgatcagtgtaatgtgtacaattctggccaacggcggaagctattgctgttcaagaccttctctcggaaagtggtggtggttgtccctaatgaggaagattggaagaagaggctggagttgaggaaggaagtagagggagatgatgtgcctgaatctataatgctggagatgaaagccaacttctctttgcctgaaaaatgcgactatatggatgaggtgacatatggggagctggagaaggaggaagctcagcccattgtcactaagtacaaggaggaggcaaggaagcttctgcccccctccgagaagcggacaaatcgccgaaacaaccgaaacaagcgtaaccggcagaaccgaagccggggccaaggctatgtgggcgggcagcgccgaggctacgacaaccgggcctacgggcagcagtactgggggcagcctggaaacagagggggttaccgtaatttctatgatcgatacaggggagactatgatcgattttacgggcgagattatgagtacaacagatacagagactattacagacaatacaatcgggattggcagagttactactaccaccacccccaggacagagaccgatactacaggaattactacgggtaccaagggtatcggtgaagcccctgccatggtcacctgtcagccatgaagctgaatctctgggggtgccaggcacccccgcaaaacacaaccaaggaaaacaggggctgtcggggtggggctgagctgccggggaggggtggtggggggggagggtgctcaagcaggggtgggggaggggggaggtggaaacaaacaacaaaactgtacattttttttaaagtttgttgaaaagaatattgtcttattctataaaacatttcaaacctagttagagatttgtaatcaaaaaacatttgcgcagaaagcagcacttagggctgcctgttctataccctacagtcagacaggaaaagaactgaaaatggcacccttctgacattctgaggcagctggactggcagccaagtaaaggagagtgatgaggtggtgtggggagggtggggaggcagcgcgagggtgctctccacagcaggtaggagcaggcaggagtggggacagagggagagcttgtgactgggacagtgaaaataaacgattggctcttatcaatcacttgcaccaactaaccgtttgtattttctttaccgacctttcccttttgggatatgtggtctggtgggctgggaggcttacagtgtcccaactctccattttcctgtgcctttgtgctgtttggctgaggcatggagactgccagtgggtggttctattttacaggattcccaggccaagaaagcctggggactgtccttgatggcagagcagaatagcctgccccttctatagacccattgattaattcctgtaaaatcttggggagaatgggattgcagccctcagcctaaagattgtgatttgccagtctctagtctctgtcttccaaggttgagagaggtgggaggtctctgaaatcatccctgttagagtgtctgtcctcttacagtgcgagagaaggaacgtttctcagggtttcagctcacacgaaaacacagcaggattcttttcactgcagcgggatatgtatataggtgaatcctgtggtgtgggctcacaggcccaggtgctgagaatagcaactagcaactattttctacagtgtggagggctcgtgccctgctggtttttttgatacacaggtagagaatgaatagaagaggggagggtggtgggggggggtgggaggcagctcagtggggctgctgaaccttgggaagagtgtgagtgtgaacgtgtgtaaatgtgcgtgtgaaagggagcaccccttcccgacttctagaaacaaaattccttttggggcgctttccctgtgtgtccccagagaggcctctagccaggagccttcagttgggatagtttcatttgtgactttaccaataccctcccagttcttgatagacagctgtaggttgctgggttcaagaatatgggtgggatatggaatgctctttcaatgtctagcttcagttttcattcatcctcctgctcagcactgtcagccaagagcttactcagcagacaccacatactgcagcagttcctagtgagaaaatctgtgccactagaaaatgcttcacttccatttcctcacctgggcagttctctgtttaaaattgtgggctgatttggtcttcctctcctcctcccactgttactgccctgcagcccttgttcaggtgtacagacccttattctggcctctagtgtccttgtctgtcatgacacacccttccgcccaaatacctctgaccccaaggctggaatggggctggtaggagataagtttgcttactcatagtcatgtcctttctcttggcacctgcttccctgcggtgtcctcaaatggatttctgtgtggcagtggagtgattgcatgaatttttctgtaacacattaactttgtattattattaagggagtttgagaaagctttgcttataatgtcaaggcaaggaggtaaaaactggagcccaaagaaattcccttagggcaagattatgttataatagaaaattgaatttcctgaggcagtggctgccaccccttttcagatgtttagtcctgcaaatagcatctttcttgtagtctgtgacatggatggggatgctagggcccttaggggcaaggggactaaactaaatcaagttgagtttttttccagcaggggttaggggaggtactcgctgttgatatttgacactagaaagtaatcttttttacaaaactgtttttctaggtgggtggaaagtgaaactgccacatccttgttggtttagtccaagagatcatttgcaacaacagtagatgtccgggttttgtttctgtctttttattatgaaaaactatgttaagggggaaaatgtggattatggtaaccagaggaatccctagccttgttttccttagaagacttgtttagtgttttatcagacgtctgttgtagttgtagacaggaaagcttgtgagaaaaacaccacatggagcctgtaaatgtttttgcacaacctgtaaagcattcttggaagtggccagtaaaaaggggttttaccatttaaaaaaaaaatgtaactgtgtcattgtttacatctgtaactttttcctcccctgttctcattacaccattctggcgaaaatgtaggcaaagtagcttccagttttagaataaataaccatttggattgaattca

SEQ ID NO: 140614 - DNA, 3600 bp, Homo sapiens
  Payload ID: 7576
  Gene Symbol: HEXIM1
  Gene Name: hexamethylene bis-acetamide inducible 1
  Uniprot ID: O94992
  ENST ID: ENST00000332499
  CDS Start-End: 690-1769
gcaggttgggagggaaagtcgggggaggacgcggaagaggagctgtgggaagggggaggagggagggaggaaaagaggaggaggcggaggagaactgagcagagcagagcatcgagccaaaggggagatgagtttgtctgtcctctgctgaggctacggccgggcctagggaactgggagcttgggtggaagcgacacccgtggaagtgggaggaggtggcgccgggactttaaccccttgtgggctctgcggcaggggatttaaccctttgtggatctggcccctcggaggcagcgtcatcggtagttttaaccccttcggggctgggtttcacgcactggacttaccctcatcaccttgctcaccaactcctttattggggtgctccgcttggaggtttgaggcccacctccgcccattacgtactgttcctgccgctgcacccccttggacccgctagctggccgcactgtgggcgcttaaccctttactgacttgagctccccagattgcagttggagtttgctgatagaaggactagctaaaggcgtcactgcaggaattacaaactgaagaggactctgttggactgttttttttttctttttcttttttttaagaaaaacccatttttttccttaaggacttactagccaaaatttcttaaacttcgaggactctactagccatggccgagccattcttgtcagaatatcaacaccagcctcaaactagcaactgtacaggtgctgctgctgtccaggaagagctgaaccctgagcgccccccaggcgcggaggagcgggtgcccgaggaggacagtaggtggcaatcgagagcgttcccccagttgggtggccgtccggggccggagggggaagggagcctggaatcccaaccacctcccttgcagacccaggcctgtccagaatctagctgcctgagagagggcgagaagggccagaatggggacgactcgtccgctggcggcgacttcccgccgccggcagaagtggaaccgacgcccgaggccgagctgctcgcccagccttgtcatgactccgaggccagtaagttgggggctcctgccgcagggggcgaagaggagtggggacagcagcagagacagctggggaagaaaaaacataggagacgcccgtccaagaagaagcggcattggaaaccgtactacaagctgacctgggaagagaagaaaaagttcgacgagaaacagagccttcgagcttcaaggatccgagccgagatgttcgccaagggccagccggtcgcgccctataacaccacgcagttcctcatggatgatcacgaccaggaggagccggatctcaaaaccggcctgtactccaagcgggccgccgccaaatccgacgacaccagcgatgacgacttcatggaagaagggggtgaggaggatgggggcagcgatgggatgggaggggacggcagcgagtttctgcagcgggacttctcggagacgtacgagcggtaccacacggagagcctgcagaacatgagcaagcaggagctcatcaaggagtacctggaactggagaagtgcctctcgcgcatggaggacgagaacaaccggctgcggctggagagcaagcggctgggtggcgacgacgcgcgtgtgcgggagctggagctggagctggaccggctgcgcgccgagaacctccagctgctgaccgagaacgaactgcaccggcagcaggagcgagcgccgctttccaagtttggagactagactgaaacttttttgggggagggggcaaaggggactttttacagtgatggaatgtaacattatatacatgtgtatataagacagtggacctttttatgacacataatcagaagagaaatccccctggctttggtttcgtaaatttagctatatgtagcttgcgtgctttctcctgttcttttaattatgtgaaactgaagagttgcttttcttgttttcctttttagaagtttttttccttaatgtgaaagtaatttgaccaagttataatgcatttttgtttttaacaaatcccctccttaaacggagctataaggtggccaaatctgagaacaattaaattcattttagttataataaatttaatatttgtaaatgtaacatagtttcagtgtgatttctagagctaattcaaaatagtattgatatattttatgtgactgcatttttggggaggggtaccgaaatcgttaaatttgtcagtttgcaaaaatatcaatctttaatgggagaattttcaatttgccaattttttccttgaatgggtttaagtatgctacaatatacagttcaggcaaaatttaagatgtaattatcttcaatacttaagtgtgcttgctttctagtgccttggttttctttcttgatgctggaaaaataaacaaaccggtattgagtgtttaggcgagtggaaagtggctacaatccaaaattttaaatttaactctgcctcggccattcaaaagtctaataacaaaaaatgtaaacctaatttggcagtttgttaggttagacaactgacagcctcatttcattcctacaagttggttttcagtaatctcttccttccccccagtaaggctggaagaggctcttggcaaacttcttagtgcaagcaatggttagattaatttgtgaggcagctctttaagacgttcagaggtaagaaatactggatttataaagcaaatggctgtttgggggattccaaggatttacctaattgtccaattctacgtgctctctataccaaaacaaaaaaaaaaagctatccacctttccatgtgggtcaaactaaaattagaaatgtcccctcactgcagatcaaatgtaaagcttccagttaaggagctaaatgaggtcctcagctgaatgaggaaccctgtacatccccttgcacagccctattctaaatcgcttaaactatgctgatagctgcttaggttcttgagtagttctgctcttaaacgtagggaggccctgagaactaaattttgccccaaaataaaaacagaaattatgagattgcctcctgtcattttggttaacccagtccttcacctgccctgtgtcagtgtcttctgagggcaattgcgttgctcaaatcactagcacagaggttccttaatttggggccttagaaaccattgtgggccttggggtccatgaaccccatgaaattatttgtagacttgtatgtacatttttctggggagaaggttcaagagattcataagattgtcaaactccttgaaggttcagaacctctgcagggaagggggaagaaaaccctcccattaggaagcatgcttttgcagttaaatggcgatggtggaggtgatagggacttcaagagtaaaatgcaccttgtattgcataagaagcatacacaaatcaataaatcaagggagattataccagtaggactgaatcagggccttcaaagctggactgagttggtcctgttctggcacatatggtccactggagacaatgtatgattgagtttttctttggtctaaaaattatattaaacatttattttgaaata

SEQ ID NO: 140615 - DNA, 1528 bp, Homo sapiens
  Payload ID: 7577
  Gene Symbol: HEXIM2
  Gene Name: hexamethylene bis-acetamide inducible 2
  Uniprot ID: Q96MH2
  ENST ID: ENST00000307275
  CDS Start-End: 437-1297
acactttaggcgtttcaccaagaggctggcgacatgctaggtcaggttgtccggagaatcggggctgaatgggagagatcttgagggcaagagcctcagagaccttcaggcaccgagctcgtgaaggtttccaagtgcccctctctagctgctcccagggggaattagtggttgctacagtagtttaagagggtcgtggtttttcgcaacccgggcggcgagatggcgctttggtgtaagcgaggaggacagtacaggacatgagtcctggtgagggacccgaggagcaggacagagaagacggcccctgaatcccatttggccccttgctggctggaggtgtgaaaaccagcggtggaggcagccttcggggcctgcatttgagaataagggtgtcactagttccaggcgtctgctgaaagatttggaacagaagatgatggccactccgaaccagaccgcctgtaatgcagagtcaccagtggccctggaggaggccaagacctctggtgccccggggagcccccaaacaccccctgagcgtcatgactctggtggttccctgcccctgacaccgcggatggagagccactcagaggatgaagatcttgctggggctgtcggtggcctgggctggaacagtaggagtccccggacccagagcccagggggctgctcagcggaggctgtgctggcccggaagaaacaccgtcggcggccatcgaagcgcaaaaggcactggcgaccctacctggagctgagctgggctgagaaacaacagcgggatgagaggcagagccagagggcctcccgggtccgcgaagagatgttcgccaaaggccagcccgtggccccctacaacaccacccagttcctgatgaatgacagggacccggaggagcccaacttggatgtgccccatgggatctcccacccaggttccagtggggagagtgaggccggggacagtgatgggcggggccgagcgcacggtgagttccagcggaaggacttctctgagacttacgaacgcttccacaccgagagcctgcagggccgcagcaagcaggagctggtgcgagactacctggagctggagaagcggctgtcgcaggcggaggaggagactaggaggctgcagcagctgcaggcgtgcaccggccagcagtcctgccgccaggtggaggagctggctgccgaggtccagaggctccggaccgaaaaccagcggcttcgtcaggagaaccagatgtggaaccgagagggctgccgctgtgatgaggagccgggtacctaggggtgcctcccagcctggtggacccaaggagaaggtcccatttcgtgcacactcaggccagctgggtctcaaggaggcaggtggcagatgaaaaccaccgtcaacaccctgtgcgccctgagaacagctaaatcggttcagactcccacctcaccgtttccatagttggctcttttgtgtcatcttaccctttacagagaaattaaatggccttggtgggaccaaatggga

SEQ ID NO: 140616 - DNA, 473 bp, Homo sapiens
  Payload ID: 7577
  Gene Symbol: HEXIM2
  Gene Name: hexamethylene bis-acetamide inducible 2
  ENST ID: ENST00000591070
  CDS Start-End: 237-473
tggcctgagcggcttgaccagagctgctgcaactgcagcaagaggaggacagtacaggacatgagtcctggtgagggacccgaggagcaggacagagaagacggcccctgaatcccatttggccccttgctggctggaggtgtgaaaaccagcggtggaggcagccttcggggcctgcatttgagaataagggtgtcactagttccaggcgtctgctgaaagatttggaacagaagatgatggccactccgaaccagaccgcctgtaatgcagagtcaccagtggccctggaggaggccaagacctctggtgccccggggagcccccaaacaccccctgagcgtcatgactctggtggttccctgcccctgacaccgcggatggagagccactcagaggatgaagatcttgctggggctgtcggtggcctgggctggaacagtaggagtccccggacccagagcccagggggc

SEQ ID NO: 140617 - DNA, 783 bp, Homo sapiens
  Payload ID: 7577
  Gene Symbol: HEXIM2
  Gene Name: hexamethylene bis-acetamide inducible 2
  ENST ID: ENST00000586681
  CDS Start-End: 352-783
cctctgtgcggggcctcgccgccatacccaggccgaatgggggtggggagggaagctggcagagctcggcctcaggatccgcgcccctgtggaaagaccgcagagggaagccgtttcaccagcctctccccttctggggtctcgggaaacacgcggtaattaccgaagaaccccgcactctgtgagaggcgaggctgcggggctgccgggacggtttgaggaccgggctcggccgaggagactccaaccttcaccctccctggcccccggtcccacttcccgccgtctcccggcgccgccacttcaggtgtcactagttccaggcgtctgctgaaagatttggaacagaagatgatggccactccgaaccagaccgcctgtaatgcagagtcaccagtggccctggaggaggccaagacctctggtgccccggggagcccccaaacaccccctgagcgtcatgactctggtggttccctgcccctgacaccgcggatggagagccactcagaggatgaagatcttgctggggctgtcggtggcctgggctggaacagtaggagtccccggacccagagcccagggggctgctcagcggaggctgtgctggcccggaagaaacaccgtcggcggccatcgaagcgcaaaaggcactggcgaccctacctggagctgagctgggctgagaaacaacagcgggatgagaggcagagccagagggcctcccgggtccgcgaagagatgttcgccaaaggccagcccgtggccccctacaacaccacc

SEQ ID NO: 140618 - DNA, 1176 bp, Homo sapiens
  Payload ID: 7577
  Gene Symbol: HEXIM2
  Gene Name: hexamethylene bis-acetamide inducible 2
  Uniprot ID: Q96MH2
  ENST ID: ENST00000591576
  CDS Start-End: 90-950
gtggcctgagcggcttgaccagagctgctgcaactgcagcaagaggtgtcactagttccaggcgtctgctgaaagatttggaacagaagatgatggccactccgaaccagaccgcctgtaatgcagagtcaccagtggccctggaggaggccaagacctctggtgccccggggagcccccaaacaccccctgagcgtcatgactctggtggttccctgcccctgacaccgcggatggagagccactcagaggatgaagatcttgctggggctgtcggtggcctgggctggaacagtaggagtccccggacccagagcccagggggctgctcagcggaggctgtgctggcccggaagaaacaccgtcggcggccatcgaagcgcaaaaggcactggcgaccctacctggagctgagctgggctgagaaacaacagcgggatgagaggcagagccagagggcctcccgggtccgcgaagagatgttcgccaaaggccagcccgtggccccctacaacaccacccagttcctgatgaatgacagggacccggaggagcccaacttggatgtgccccatgggatctcccacccaggttccagtggggagagtgaggccggggacagtgatgggcggggccgagcgcacggtgagttccagcggaaggacttctctgagacttacgaacgcttccacaccgagagcctgcagggccgcagcaagcaggagctggtgcgagactacctggagctggagaagcggctgtcgcaggcggaggaggagactaggaggctgcagcagctgcaggcgtgcaccggccagcagtcctgccgccaggtggaggagctggctgccgaggtccagaggctccggaccgaaaaccagcggcttcgtcaggagaaccagatgtggaaccgagagggctgccgctgtgatgaggagccgggtacctaggggtgcctcccagcctggtggacccaaggagaaggtcccatttcgtgcacactcaggccagctgggtctcaaggaggcaggtggcagatgaaaaccaccgtcaacaccctgtgcgccctgagaacagctaaatcggttcagactcccacctcaccgtttccatagttggctcttttgtgtcatcttaccctttacagagaaattaaatggccttggtgggaccaaa

SEQ ID NO: 140619 - DNA, 796 bp, Homo sapiens
  Payload ID: 7577
  Gene Symbol: HEXIM2
  Gene Name: hexamethylene bis-acetamide inducible 2
  ENST ID: ENST00000589230
  CDS Start-End: 380-796
aatccccagcaggcaccgcgcgtccaggctctctcttcccccccatcttagtggcctgagcggcttgaccagagctgctgcaactgcagcaagaggtagggctcaggcgttgggaattgcaccgacaggcagtcgcacagaaaggcacacagatgtagtggtgtgcatagcccttgacagcgaataggaggacagtacaggacatgagtcctggtgagggacccgaggagcaggacagagaagacggcccctgaatcccatttggccccttgctggctggaggtgtgaaaaccagcggtggaggcagccttcggggcctgcatttgagaataagggtgtcactagttccaggcgtctgctgaaagatttggaacagaagatgatggccactccgaaccagaccgcctgtaatgcagagtcaccagtggccctggaggaggccaagacctctggtgccccggggagcccccaaacaccccctgagcgtcatgactctggtggttccctgcccctgacaccgcggatggagagccactcagaggatgaagatcttgctggggctgtcggtggcctgggctggaacagtaggagtccccggacccagagcccagggggctgctcagcggaggctgtgctggcccggaagaaacaccgtcggcggccatcgaagcgcaaaaggcactggcgaccctacctggagctgagctgggctgagaaacaacagcgggatgagaggcagagccagagggcctcccgggtccgcgaagagatgttcgccaaaggccagcccgtggcc

SEQ ID NO: 140620 - DNA, 1246 bp, Homo sapiens
  Payload ID: 7577
  Gene Symbol: HEXIM2
  Gene Name: hexamethylene bis-acetamide inducible 2
  Uniprot ID: Q96MH2
  ENST ID: ENST00000592695
  CDS Start-End: 160-1020
agctgctgcaactgcagcaagaggtagggctcaggcgttgggaattgcaccgacaggcagtcgcacagaaaggcacacagatgtagtggtgtgcatagcccttgacagcgaataggtgtcactagttccaggcgtctgctgaaagatttggaacagaagatgatggccactccgaaccagaccgcctgtaatgcagagtcaccagtggccctggaggaggccaagacctctggtgccccggggagcccccaaacaccccctgagcgtcatgactctggtggttccctgcccctgacaccgcggatggagagccactcagaggatgaagatcttgctggggctgtcggtggcctgggctggaacagtaggagtccccggacccagagcccagggggctgctcagcggaggctgtgctggcccggaagaaacaccgtcggcggccatcgaagcgcaaaaggcactggcgaccctacctggagctgagctgggctgagaaacaacagcgggatgagaggcagagccagagggcctcccgggtccgcgaagagatgttcgccaaaggccagcccgtggccccctacaacaccacccagttcctgatgaatgacagggacccggaggagcccaacttggatgtgccccatgggatctcccacccaggttccagtggggagagtgaggccggggacagtgatgggcggggccgagcgcacggtgagttccagcggaaggacttctctgagacttacgaacgcttccacaccgagagcctgcagggccgcagcaagcaggagctggtgcgagactacctggagctggagaagcggctgtcgcaggcggaggaggagactaggaggctgcagcagctgcaggcgtgcaccggccagcagtcctgccgccaggtggaggagctggctgccgaggtccagaggctccggaccgaaaaccagcggcttcgtcaggagaaccagatgtggaaccgagagggctgccgctgtgatgaggagccgggtacctaggggtgcctcccagcctggtggacccaaggagaaggtcccatttcgtgcacactcaggccagctgggtctcaaggaggcaggtggcagatgaaaaccaccgtcaacaccctgtgcgccctgagaacagctaaatcggttcagactcccacctcaccgtttccatagttggctcttttgtgtcatcttaccctttacagagaaattaaatggccttggtgggaccaaa

SEQ ID NO: 140621 - DNA, 803 bp, Homo sapiens
  Payload ID: 7577
  Gene Symbol: HEXIM2
  Gene Name: hexamethylene bis-acetamide inducible 2
  ENST ID: ENST00000585340
  CDS Start-End: 193-803
gacatgctaggtcaggttgtccggagaatcggggctgaatgggagagatcttgagggcaagagcctcagagaccttcaggcaccgagctcgtgaaggtttccaagtgcccctctctagctgctcccagggggaattagtggttgctacagtagtttaagagggtcgtggtttttcgcaacccgggcggcgagatggcgctttggtgtaagcgaggtgtcactagttccaggcgtctgctgaaagatttggaacagaagatgatggccactccgaaccagaccgcctgtaatgcagagtcaccagtggccctggaggaggccaagacctctggtgccccggggagcccccaaacaccccctgagcgtcatgactctggtggttccctgcccctgacaccgcggatggagagccactcagaggatgaagatcttgctggggctgtcggtggcctgggctggaacagtaggagtccccggacccagagcccagggggctgctcagcggaggctgtgctggcccggaagaaacaccgtcggcggccatcgaagcgcaaaaggcactggcgaccctacctggagctgagctgggctgagaaacaacagcgggatgagaggcagagccagagggcctcccgggtccgcgaagagatgttcgccaaaggccagcccgtggccccctacaacaccacccagttcctgatgaatgacagggacccggaggagcccaacttggatgtgccccatgggatctcccacccaggttccagtggggagagtgaggccggggacagtgatgggcgggg

SEQ ID NO: 140622 - DNA, 581 bp, Homo sapiens
  Payload ID: 7577
  Gene Symbol: HEXIM2
  Gene Name: hexamethylene bis-acetamide inducible 2
  ENST ID: ENST00000593138
  CDS Start-End: 216-581
agtcgaagtgggagtccctctgtgcggggcctcgccgccatacccaggccgaatgggggtggggagggaagctggcagagctcggcctcaggatccgcgcccctgtggaaagaccgcagagggaagccgtttcaccagcctctccccttctggggtctcgggaaacacgcggtgtcactagttccaggcgtctgctgaaagatttggaacagaagatgatggccactccgaaccagaccgcctgtaatgcagagtcaccagtggccctggaggaggccaagacctctggtgccccggggagcccccaaacaccccctgagcgtcatgactctggtggttccctgcccctgacaccgcggatggagagccactcagaggatgaagatcttgctggggctgtcggtggcctgggctggaacagtaggagtccccggacccagagcccagggggctgctcagcggaggctgtgctggcccggaagaaacaccgtcggcggccatcgaagcgcaaaaggcactggcgaccctacctggagctgagctgggctgagaaacaacagcgggatgagaggcagagccag

SEQ ID NO: 140623 - DNA, 3596 bp, Homo sapiens
  Payload ID: 7578
  Gene Symbol: HK1
  Gene Name: hexokinase 1
  Uniprot ID: P19367
  ENST ID: ENST00000298649
  CDS Start-End: 102-2852
cctggctcaaaactctaccacaacctgacactgggcaagatggcccacctgtggcatcccaggttcctgccctgtaaagaggagtctgggtgtatatccagatggactgtgagcacagcctgagtttgccctgtcgaggtgctgaggcctgggagattgggattgacaagtatctctatgccatgcggctctccgatgaaactctcatagatatcatgactcgcttcaggaaggagatgaagaatggcctctcccgggattttaatccaacagccacagtcaagatgttgccaacattcgtaaggtccattcctgatggctctgaaaagggagatttcattgccctggatcttggtgggtcttcctttcgaattctgcgggtgcaagtgaatcatgagaaaaaccagaatgttcacatggagtccgaggtttatgacaccccagagaacatcgtgcacggcagtggaagccagctttttgatcatgttgctgagtgcctgggagatttcatggagaaaaggaagatcaaggacaagaagttacctgtgggattcacgttttcttttccttgccaacaatccaaaatagatgaggccatcctgatcacctggacaaagcgatttaaagcgagcggagtggaaggagcagatgtggtcaaactgcttaacaaagccatcaaaaagcgaggggactatgatgccaacatcgtagctgtggtgaatgacacagtgggcaccatgatgacctgtggctatgacgaccagcactgtgaagtcggcctgatcatcggcactggcaccaatgcttgctacatggaggaactgaggcacattgatctggtggaaggagacgaggggaggatgtgtatcaatacagaatggggagcctttggagacgatggatcattagaagacatccggacagagtttgacagggagatagaccggggatccctcaaccctggaaaacagctgtttgagaagatggtcagtggcatgtacttgggagagctggttcgactgatcctagtcaagatggccaaggagggcctcttatttgaagggcggatcaccccggagctgctcacccgagggaagtttaacaccagtgatgtgtcagccatcgaaaagaataaggaaggcctccacaatgccaaagaaatcctgacccgcctgggagtggagccgtccgatgatgactgtgtctcagtccagcacgtttgcaccattgtctcatttcgctcagccaacttggtggctgccacactgggcgccatcttgaaccgcctgcgtgataacaagggcacacccaggctgcggaccacggttggtgtcgacggatctctttacaagacgcacccacagtattcccggcgtttccacaagactctaaggcgcttggtgccagactccgatgtgcgcttcctcctctcggagagtggcagcggcaagggggctgccatggtgacggcggtggcctaccgcttggccgagcagcaccggcagatagaggagaccctggctcatttccacctcaccaaggacatgctgctggaggtgaagaagaggatgcgggccgagatggagctggggctgaggaagcagacgcacaacaatgccgtggttaagatgctgccctccttcgtccggagaactcccgacgggaccgagaatggtgacttcttggccctggatcttggaggaaccaatttccgtgtgctgctggtgaaaatccgtagtgggaaaaagagaacggtggaaatgcacaacaagatctacgccattcctattgaaatcatgcagggcactggggaagagctgtttgatcacattgtctcctgcatctctgacttcttggactacatggggatcaaaggccccaggatgcctctgggcttcacgttctcatttccctgccagcagacgagtctggacgcgggaatcttgatcacgtggacaaagggttttaaggcaacagactgcgtgggccacgatgtagtcaccttactaagggatgcgataaaaaggagagaggaatttgacctggacgtggtggctgtggtcaacgacacagtgggcaccatgatgacctgtgcttatgaggagcccacctgtgaggttggactcattgttgggaccggcagcaatgcctgctacatggaggagatgaagaacgtggagatggtggagggggaccaggggcagatgtgcatcaacatggagtggggggcctttggggacaacgggtgtctggatgatatcaggacacactacgacagactggtggacgaatattccctaaatgctgggaaacaaaggtatgagaagatgatcagtggtatgtacctgggtgaaatcgtccgcaacatcttaatcgacttcaccaagaagggattcctcttccgagggcagatctctgagacgctgaagacccggggcatctttgagaccaagtttctctctcagatcgagagtgaccgattagcactgctccaggtccgggctatcctccagcagctaggtctgaatagcacctgcgatgacagtatcctcgtcaagacagtgtgcggggtggtgtccaggagggccgcacagctgtgtggcgcaggcatggctgcggttgtggataagatccgcgagaacagaggactggaccgtctgaatgtgactgtgggagtggacgggacactctacaagcttcatccacacttctccagaatcatgcaccagacggtgaaggaactgtcaccaaaatgtaacgtgtccttcctcctgtctgaggatggcagcggcaagggggccgccctcatcacggccgtgggcgtgcggttacgcacagaggcaagcagctaagagtccgggatccccagcctactgcctctccagcacttctctcttcaagcggcgaccccctaccctcccagcgagttgcgctgggagacgctggcgccagggcctgccggcgcggggaggaaagcaaaatccaactaatggtatatattgtagggtacagaatagagcgtgtgctgttgataatatctctcacccggatccctcctcacttgccctgccactttgcatggtttgattttgacctggtcccccacgtgtgaagtgtagtggcatccatttctaatgtatgcattcatccaacagagttatttattggctggagatggaaaatcacaccacctgacaggccttctgggcctccaaagcccatccttggggttccccctccctgtgtgaaatgtattatcaccagcagacactgccgggcctccctcccgggggcactgcctgaaggcgagtgtgggcatagcattagctgcttcctcccctcctggcacccactgtggcctggcatcgcatcgtggtgtgtcaatgccacaaaatcgtgtgtccgtggaaccagtcctagccgcgtgtgacagtcttgcattctgtttgtctcgtggggggaggtggacagtcctgcggaaatgtgtcttgtctccatttggataaaaggaaccaaccaacaaacaatgccatcactggaatttcccaccgctttgtgagccgtgtcgtatgacctagtaaactttgtaccaattc

SEQ ID NO: 140624 - DNA, 3605 bp, Homo sapiens
  Payload ID: 7578
  Gene Symbol: HK1
  Gene Name: hexokinase 1
  Uniprot ID: P19367
  ENST ID: ENST00000359426
  CDS Start-End: 105-2858
gaggaggaggagccgccgagcagccgccggaggaccacggctcgccagggctgcggaggaccgaccgtccccacgcctgccgccccgcgaccccgaccgccagcatgatcgccgcgcagctcctggcctattacttcacggagctgaaggatgaccaggtcaaaaagattgacaagtatctctatgccatgcggctctccgatgaaactctcatagatatcatgactcgcttcaggaaggagatgaagaatggcctctcccgggattttaatccaacagccacagtcaagatgttgccaacattcgtaaggtccattcctgatggctctgaaaagggagatttcattgccctggatcttggtgggtcttcctttcgaattctgcgggtgcaagtgaatcatgagaaaaaccagaatgttcacatggagtccgaggtttatgacaccccagagaacatcgtgcacggcagtggaagccagctttttgatcatgttgctgagtgcctgggagatttcatggagaaaaggaagatcaaggacaagaagttacctgtgggattcacgttttcttttccttgccaacaatccaaaatagatgaggccatcctgatcacctggacaaagcgatttaaagcgagcggagtggaaggagcagatgtggtcaaactgcttaacaaagccatcaaaaagcgaggggactatgatgccaacatcgtagctgtggtgaatgacacagtgggcaccatgatgacctgtggctatgacgaccagcactgtgaagtcggcctgatcatcggcactggcaccaatgcttgctacatggaggaactgaggcacattgatctggtggaaggagacgaggggaggatgtgtatcaatacagaatggggagcctttggagacgatggatcattagaagacatccggacagagtttgacagggagatagaccggggatccctcaaccctggaaaacagctgtttgagaagatggtcagtggcatgtacttgggagagctggttcgactgatcctagtcaagatggccaaggagggcctcttatttgaagggcggatcaccccggagctgctcacccgagggaagtttaacaccagtgatgtgtcagccatcgaaaagaataaggaaggcctccacaatgccaaagaaatcctgacccgcctgggagtggagccgtccgatgatgactgtgtctcagtccagcacgtttgcaccattgtctcatttcgctcagccaacttggtggctgccacactgggcgccatcttgaaccgcctgcgtgataacaagggcacacccaggctgcggaccacggttggtgtcgacggatctctttacaagacgcacccacagtattcccggcgtttccacaagactctaaggcgcttggtgccagactccgatgtgcgcttcctcctctcggagagtggcagcggcaagggggctgccatggtgacggcggtggcctaccgcttggccgagcagcaccggcagatagaggagaccctggctcatttccacctcaccaaggacatgctgctggaggtgaagaagaggatgcgggccgagatggagctggggctgaggaagcagacgcacaacaatgccgtggttaagatgctgccctccttcgtccggagaactcccgacgggaccgagaatggtgacttcttggccctggatcttggaggaaccaatttccgtgtgctgctggtgaaaatccgtagtgggaaaaagagaacggtggaaatgcacaacaagatctacgccattcctattgaaatcatgcagggcactggggaagagctgtttgatcacattgtctcctgcatctctgacttcttggactacatggggatcaaaggccccaggatgcctctgggcttcacgttctcatttccctgccagcagacgagtctggacgcgggaatcttgatcacgtggacaaagggttttaaggcaacagactgcgtgggccacgatgtagtcaccttactaagggatgcgataaaaaggagagaggaatttgacctggacgtggtggctgtggtcaacgacacagtgggcaccatgatgacctgtgcttatgaggagcccacctgtgaggttggactcattgttgggaccggcagcaatgcctgctacatggaggagatgaagaacgtggagatggtggagggggaccaggggcagatgtgcatcaacatggagtggggggcctttggggacaacgggtgtctggatgatatcaggacacactacgacagactggtggacgaatattccctaaatgctgggaaacaaaggtatgagaagatgatcagtggtatgtacctgggtgaaatcgtccgcaacatcttaatcgacttcaccaagaagggattcctcttccgagggcagatctctgagacgctgaagacccggggcatctttgagaccaagtttctctctcagatcgagagtgaccgattagcactgctccaggtccgggctatcctccagcagctaggtctgaatagcacctgcgatgacagtatcctcgtcaagacagtgtgcggggtggtgtccaggagggccgcacagctgtgtggcgcaggcatggctgcggttgtggataagatccgcgagaacagaggactggaccgtctgaatgtgactgtgggagtggacgggacactctacaagcttcatccacacttctccagaatcatgcaccagacggtgaaggaactgtcaccaaaatgtaacgtgtccttcctcctgtctgaggatggcagcggcaagggggccgccctcatcacggccgtgggcgtgcggttacgcacagaggcaagcagctaagagtccgggatccccagcctactgcctctccagcacttctctcttcaagcggcgaccccctaccctcccagcgagttgcgctgggagacgctggcgccagggcctgccggcgcggggaggaaagcaaaatccaactaatggtatatattgtagggtacagaatagagcgtgtgctgttgataatatctctcacccggatccctcctcacttgccctgccactttgcatggtttgattttgacctggtcccccacgtgtgaagtgtagtggcatccatttctaatgtatgcattcatccaacagagttatttattggctggagatggaaaatcacaccacctgacaggccttctgggcctccaaagcccatccttggggttccccctccctgtgtgaaatgtattatcaccagcagacactgccgggcctccctcccgggggcactgcctgaaggcgagtgtgggcatagcattagctgcttcctcccctcctggcacccactgtggcctggcatcgcatcgtggtgtgtcaatgccacaaaatcgtgtgtccgtggaaccagtcctagccgcgtgtgacagtcttgcattctgtttgtctcgtggggggaggtggacagtcctgcggaaatgtgtcttgtctccatttggataaaaggaaccaaccaacaaacaatgccatcactggaatttcccaccgctttgtgagccgtgtcgtatgacctagtaaactttgtaccaattcaaa

SEQ ID NO: 140625 - DNA, 3961 bp, Homo sapiens
  Payload ID: 7578
  Gene Symbol: HK1
  Gene Name: hexokinase 1
  Uniprot ID: P19367
  ENST ID: ENST00000360289
  CDS Start-End: 500-3217
aaaacatctatcttgctgtgtttggacaggccagcccctgaaacatcttgggcaatggagggttaacttctcaaagtttaataggcaagaccagcaaccatgcaacaaggacttcaactaaccaactaaagaactgttccccagagcattgttcctgagaaggaaaagagtccaaacacctacccacacctgctttgtgccaagaatccacagttggattgcaaggacagtgtatgttgtccttttggaaaaatgagagtgagcccaaatgaagaacaagcaaaggcgttcaagacccagctgttgagagtagaaaagcagaagaaaggacccgaggtcagcaagtgccctccccacaatggggcagatctgccagcgagaatcggctacagcagctgaaaaaccaaaacttcatctacttgctgaaagtgagcattgttgatgctcttgagagcatcagccaggacattaatgtgcaccactgtggtggcgtggaaagatggcaaaaagagccctgcatgattttattgacaagtatctctatgccatgcggctctccgatgaaactctcatagatatcatgactcgcttcaggaaggagatgaagaatggcctctcccgggattttaatccaacagccacagtcaagatgttgccaacattcgtaaggtccattcctgatggctctgaaaagggagatttcattgccctggatcttggtgggtcttcctttcgaattctgcgggtgcaagtgaatcatgagaaaaaccagaatgttcacatggagtccgaggtttatgacaccccagagaacatcgtgcacggcagtggaagccagctttttgatcatgttgctgagtgcctgggagatttcatggagaaaaggaagatcaaggacaagaagttacctgtgggattcacgttttcttttccttgccaacaatccaaaatagatgaggccatcctgatcacctggacaaagcgatttaaagcgagcggagtggaaggagcagatgtggtcaaactgcttaacaaagccatcaaaaagcgaggggactatgatgccaacatcgtagctgtggtgaatgacacagtgggcaccatgatgacctgtggctatgacgaccagcactgtgaagtcggcctgatcatcggcactggcaccaatgcttgctacatggaggaactgaggcacattgatctggtggaaggagacgaggggaggatgtgtatcaatacagaatggggagcctttggagacgatggatcattagaagacatccggacagagtttgacagggagatagaccggggatccctcaaccctggaaaacagctgtttgagaagatggtcagtggcatgtacttgggagagctggttcgactgatcctagtcaagatggccaaggagggcctcttatttgaagggcggatcaccccggagctgctcacccgagggaagtttaacaccagtgatgtgtcagccatcgaaaagaataaggaaggcctccacaatgccaaagaaatcctgacccgcctgggagtggagccgtccgatgatgactgtgtctcagtccagcacgtttgcaccattgtctcatttcgctcagccaacttggtggctgccacactgggcgccatcttgaaccgcctgcgtgataacaagggcacacccaggctgcggaccacggttggtgtcgacggatctctttacaagacgcacccacagtattcccggcgtttccacaagactctaaggcgcttggtgccagactccgatgtgcgcttcctcctctcggagagtggcagcggcaagggggctgccatggtgacggcggtggcctaccgcttggccgagcagcaccggcagatagaggagaccctggctcatttccacctcaccaaggacatgctgctggaggtgaagaagaggatgcgggccgagatggagctggggctgaggaagcagacgcacaacaatgccgtggttaagatgctgccctccttcgtccggagaactcccgacgggaccgagaatggtgacttcttggccctggatcttggaggaaccaatttccgtgtgctgctggtgaaaatccgtagtgggaaaaagagaacggtggaaatgcacaacaagatctacgccattcctattgaaatcatgcagggcactggggaagagctgtttgatcacattgtctcctgcatctctgacttcttggactacatggggatcaaaggccccaggatgcctctgggcttcacgttctcatttccctgccagcagacgagtctggacgcgggaatcttgatcacgtggacaaagggttttaaggcaacagactgcgtgggccacgatgtagtcaccttactaagggatgcgataaaaaggagagaggaatttgacctggacgtggtggctgtggtcaacgacacagtgggcaccatgatgacctgtgcttatgaggagcccacctgtgaggttggactcattgttgggaccggcagcaatgcctgctacatggaggagatgaagaacgtggagatggtggagggggaccaggggcagatgtgcatcaacatggagtggggggcctttggggacaacgggtgtctggatgatatcaggacacactacgacagactggtggacgaatattccctaaatgctgggaaacaaaggtatgagaagatgatcagtggtatgtacctgggtgaaatcgtccgcaacatcttaatcgacttcaccaagaagggattcctcttccgagggcagatctctgagacgctgaagacccggggcatctttgagaccaagtttctctctcagatcgagagtgaccgattagcactgctccaggtccgggctatcctccagcagctaggtctgaatagcacctgcgatgacagtatcctcgtcaagacagtgtgcggggtggtgtccaggagggccgcacagctgtgtggcgcaggcatggctgcggttgtggataagatccgcgagaacagaggactggaccgtctgaatgtgactgtgggagtggacgggacactctacaagcttcatccacacttctccagaatcatgcaccagacggtgaaggaactgtcaccaaaatgtaacgtgtccttcctcctgtctgaggatggcagcggcaagggggccgccctcatcacggccgtgggcgtgcggttacgcacagaggcaagcagctaagagtccgggatccccagcctactgcctctccagcacttctctcttcaagcggcgaccccctaccctcccagcgagttgcgctgggagacgctggcgccagggcctgccggcgcggggaggaaagcaaaatccaactaatggtatatattgtagggtacagaatagagcgtgtgctgttgataatatctctcacccggatccctcctcacttgccctgccactttgcatggtttgattttgacctggtcccccacgtgtgaagtgtagtggcatccatttctaatgtatgcattcatccaacagagttatttattggctggagatggaaaatcacaccacctgacaggccttctgggcctccaaagcccatccttggggttccccctccctgtgtgaaatgtattatcaccagcagacactgccgggcctccctcccgggggcactgcctgaaggcgagtgtgggcatagcattagctgcttcctcccctcctggcacccactgtggcctggcatcgcatcgtggtgtgtcaatgccacaaaatcgtgtgtccgtggaaccagtcctagccgcgtgtgacagtcttgcattctgtttgtctcgtggggggaggtggacagtcctgcggaaatgtgtcttgtctccatttggataaaaggaaccaaccaacaaacaatgccatcactggaatttcccaccgctttgtgagccgtgtcgtatgacctagtaaactttgtaccaattc

SEQ ID NO: 140626 - DNA, 707 bp, Homo sapiens
  Payload ID: 7578
  Gene Symbol: HK1
  Gene Name: hexokinase 1
  ENST ID: ENST00000421088
  CDS Start-End: 365-707
gttccccagagcattgttcctgagaaggaaaagagtccaaacacctacccacacctgctttgtgccaagaatccacagttggattgcaaggacagtgtatgttgtccttttggaaaaatgagagtgagcccaaatgaagaacaagcaaaggcgttcaagacccagctgttgagagtagaaaagcagaagaaaggacccgaggtcagcaagtgccctccccacaatggggcagatctgccagcgagaatcggctacagcagctgaaaaaccaaaacttcatctacttgctgaaagtgagcattgttgatgctcttgagagcatcagccaggacattaatgtgcaccactgtggtggcgtggaaagatggcaaaaagagccctgcatgattttattgacaagtatctctatgccatgcggctctccgatgaaactctcatagatatcatgactcgcttcaggaaggagatgaagaatggcctctcccgggattttaatccaacagccacagtcaagatgttgccaacattcgtaaggtccattcctgatggctctgaaaagggagatttcattgccctggatcttggtgggtcttcctttcgaattctgcgggtgcaagtgaatcatgagaaaaaccagaatgttcacatggagtccgaggtttatgacaccccagagaacatcgtgcacggcagtggaagccagcttt

SEQ ID NO: 140627 - DNA, 3868 bp, Homo sapiens
  Payload ID: 7578
  Gene Symbol: HK1
  Gene Name: hexokinase 1
  Uniprot ID: P19367
  ENST ID: ENST00000448642
  CDS Start-End: 359-3124
aaaacatctatcttgctgtgtttggacaggccagcccctgaaacatcttgggcaatggagggttaacttctcaaagtttaataggcaagaccagcaaccatgcaacaaggacttcaactaaccaactaaagaactgttccccagagcattgttcctgagaaggaaaagagtccaaacacctacccacacctgctttgtgccaagaatccacagttggattgcaaggacagtgtatgttgtccttttggaaaaatgagagtgagcccaaatgaagaacaagcaaaggcgttcaagacccagctgttgagagtagaaaagcagaagaaaggacccgaggtcagcaagtgccctccccacaatggggcagatctgccagcgagaatcggctacagcagctgaaaaaccaaaacttcatctacttgctgaaagtgagattgacaagtatctctatgccatgcggctctccgatgaaactctcatagatatcatgactcgcttcaggaaggagatgaagaatggcctctcccgggattttaatccaacagccacagtcaagatgttgccaacattcgtaaggtccattcctgatggctctgaaaagggagatttcattgccctggatcttggtgggtcttcctttcgaattctgcgggtgcaagtgaatcatgagaaaaaccagaatgttcacatggagtccgaggtttatgacaccccagagaacatcgtgcacggcagtggaagccagctttttgatcatgttgctgagtgcctgggagatttcatggagaaaaggaagatcaaggacaagaagttacctgtgggattcacgttttcttttccttgccaacaatccaaaatagatgaggccatcctgatcacctggacaaagcgatttaaagcgagcggagtggaaggagcagatgtggtcaaactgcttaacaaagccatcaaaaagcgaggggactatgatgccaacatcgtagctgtggtgaatgacacagtgggcaccatgatgacctgtggctatgacgaccagcactgtgaagtcggcctgatcatcggcactggcaccaatgcttgctacatggaggaactgaggcacattgatctggtggaaggagacgaggggaggatgtgtatcaatacagaatggggagcctttggagacgatggatcattagaagacatccggacagagtttgacagggagatagaccggggatccctcaaccctggaaaacagctgtttgagaagatggtcagtggcatgtacttgggagagctggttcgactgatcctagtcaagatggccaaggagggcctcttatttgaagggcggatcaccccggagctgctcacccgagggaagtttaacaccagtgatgtgtcagccatcgaaaagaataaggaaggcctccacaatgccaaagaaatcctgacccgcctgggagtggagccgtccgatgatgactgtgtctcagtccagcacgtttgcaccattgtctcatttcgctcagccaacttggtggctgccacactgggcgccatcttgaaccgcctgcgtgataacaagggcacacccaggctgcggaccacggttggtgtcgacggatctctttacaagacgcacccacagtattcccggcgtttccacaagactctaaggcgcttggtgccagactccgatgtgcgcttcctcctctcggagagtggcagcggcaagggggctgccatggtgacggcggtggcctaccgcttggccgagcagcaccggcagatagaggagaccctggctcatttccacctcaccaaggacatgctgctggaggtgaagaagaggatgcgggccgagatggagctggggctgaggaagcagacgcacaacaatgccgtggttaagatgctgccctccttcgtccggagaactcccgacgggaccgagaatggtgacttcttggccctggatcttggaggaaccaatttccgtgtgctgctggtgaaaatccgtagtgggaaaaagagaacggtggaaatgcacaacaagatctacgccattcctattgaaatcatgcagggcactggggaagagctgtttgatcacattgtctcctgcatctctgacttcttggactacatggggatcaaaggccccaggatgcctctgggcttcacgttctcatttccctgccagcagacgagtctggacgcgggaatcttgatcacgtggacaaagggttttaaggcaacagactgcgtgggccacgatgtagtcaccttactaagggatgcgataaaaaggagagaggaatttgacctggacgtggtggctgtggtcaacgacacagtgggcaccatgatgacctgtgcttatgaggagcccacctgtgaggttggactcattgttgggaccggcagcaatgcctgctacatggaggagatgaagaacgtggagatggtggagggggaccaggggcagatgtgcatcaacatggagtggggggcctttggggacaacgggtgtctggatgatatcaggacacactacgacagactggtggacgaatattccctaaatgctgggaaacaaaggtatgagaagatgatcagtggtatgtacctgggtgaaatcgtccgcaacatcttaatcgacttcaccaagaagggattcctcttccgagggcagatctctgagacgctgaagacccggggcatctttgagaccaagtttctctctcagatcgagagtgaccgattagcactgctccaggtccgggctatcctccagcagctaggtctgaatagcacctgcgatgacagtatcctcgtcaagacagtgtgcggggtggtgtccaggagggccgcacagctgtgtggcgcaggcatggctgcggttgtggataagatccgcgagaacagaggactggaccgtctgaatgtgactgtgggagtggacgggacactctacaagcttcatccacacttctccagaatcatgcaccagacggtgaaggaactgtcaccaaaatgtaacgtgtccttcctcctgtctgaggatggcagcggcaagggggccgccctcatcacggccgtgggcgtgcggttacgcacagaggcaagcagctaagagtccgggatccccagcctactgcctctccagcacttctctcttcaagcggcgaccccctaccctcccagcgagttgcgctgggagacgctggcgccagggcctgccggcgcggggaggaaagcaaaatccaactaatggtatatattgtagggtacagaatagagcgtgtgctgttgataatatctctcacccggatccctcctcacttgccctgccactttgcatggtttgattttgacctggtcccccacgtgtgaagtgtagtggcatccatttctaatgtatgcattcatccaacagagttatttattggctggagatggaaaatcacaccacctgacaggccttctgggcctccaaagcccatccttggggttccccctccctgtgtgaaatgtattatcaccagcagacactgccgggcctccctcccgggggcactgcctgaaggcgagtgtgggcatagcattagctgcttcctcccctcctggcacccactgtggcctggcatcgcatcgtggtgtgtcaatgccacaaaatcgtgtgtccgtggaaccagtcctagccgcgtgtgacagtcttgcattctgtttgtctcgtggggggaggtggacagtcctgcggaaatgtgtcttgtctccatttggataaaaggaaccaaccaacaaacaatgccatcactggaatttcccaccgctttgtgagccgtgtcgtatgacctagtaaactttgtaccaattc

SEQ ID NO: 140628 - DNA, 739 bp, Homo sapiens
  Payload ID: 7578
  Gene Symbol: HK1
  Gene Name: hexokinase 1
  ENST ID: ENST00000450646
  CDS Start-End: 321-739
agaactccagagagggaaaacatctatcttgctgtgtttggacaggccagcccctgaaacatcttgggcaatggagggttaacttctcaaagtttaataggcaagaccagcaaccatgcaacaaggacttcaactaaccaactaaagaactgttccccagagcattgttcctgagaaggaaaagagtccaaacacctacccacacctgctttgtgccaagaatccacagttggattgcaaggacagtgcgttcaagacccagctgttgagagtagaaaagcagaagaaaggacccgaggtcagcaagtgccctccccacaatggggcagatctgccagcgagaatcggctacagcagctgaaaaaccaaaacttcatctacttgctgaaagtgagattgacaagtatctctatgccatgcggctctccgatgaaactctcatagatatcatgactcgcttcaggaaggagatgaagaatggcctctcccgggattttaatccaacagccacagtcaagatgttgccaacattcgtaaggtccattcctgatggctctgaaaagggagatttcattgccctggatcttggtgggtcttcctttcgaattctgcgggtgcaagtgaatcatgagaaaaaccagaatgttcacatggagtccgaggtttatgacaccccagagaacatcgtgcacggcagtggaagccagctttttgatcatgttgctgagtgcctgggaga

SEQ ID NO: 140629 - DNA, 1042 bp, Homo sapiens
  Payload ID: 7578
  Gene Symbol: HK1
  Gene Name: hexokinase 1
  ENST ID: ENST00000436817
  CDS Start-End: 171-1042
ccaggttgcatgaggggttgggggtgggatggacagagcactggctgggcatcaggactaggctggagtcctggctcaaaactctaccacaacctgacactgggcaagatggcccacctgtggcatcccaggttcctgccctgtaaagaggagtctgggtgtatatccagatggactgtgagcacagcctgagtttgccctgtcgaggtgctgaggcctgggagattgggattgacaagtatctctatgccatgcggctctccgatgaaactctcatagatatcatgactcgcttcaggaaggagatgaagaatggcctctcccgggattttaatccaacagccacagtcaagatgttgccaacattcgtaaggtccattcctgatggctctgaaaagggagatttcattgccctggatcttggtgggtcttcctttcgaattctgcgggtgcaagtgaatcatgagaaaaaccagaatgttcacatggagtccgaggtttatgacaccccagagaacatcgtgcacggcagtggaagccagctttttgatcatgttgctgagtgcctgggagatttcatggagaaaaggaagatcaaggacaagaagttacctgtgggattcacgttttcttttccttgccaacaatccaaaatagatgaggccatcctgatcacctggacaaagcgatttaaagcgagcggagtggaaggagcagatgtggtcaaactgcttaacaaagccatcaaaaagcgaggggactatgatgccaacatcgtagctgtggtgaatgacacagtgggcaccatgatgacctgtggctatgacgaccagcactgtgaagtcggcctgatcatcggcactggcaccaatgcttgctacatggaggaactgaggcacattgatctggtggaaggagacgaggggaggatgtgtatcaatacagaatggggagcctttggagacgatggatcattagaagacatccggacagagtttgacagggagatagaccggggatccctcaaccctggaaaacagct

SEQ ID NO: 140630 - DNA, 5772 bp, Homo sapiens
  Payload ID: 7579
  Gene Symbol: HK2
  Gene Name: hexokinase 2
  Uniprot ID: P52789
  ENST ID: ENST00000290573
  CDS Start-End: 601-3354
cggccgcgcccgcgagccgtgagcgatgattggctgcgccacggcggcgggcggtccgtgggcgcacacaccctccccgcgcagccaatgggcgtgcgcacgtcactgatccggaggcccgcgggccggcagcccctcaataagccacattgttgcatgaaactccggcgcaggagtcccgggctgccgctggcaacatcgtgtcacccagctaagaaaatccgcgggcccgagccacgcgcctgtgaatcggagaggtcccactgcccgagtggagccgggctgagattcttctcaagttgagcctcagtgatcctgtggccgaagttagcgccttgacgtgggacaaccggacacgtcgccaggagagaactgaggcgccttctagcagttgtgacgccaaaatcacgtctccggagacccgcgccctccgccagccgggcgcaccctcgccggtagccttctttgtgcgccgtccggactcccagctcccggcccggcagccgagccccagcacaaagcagtcggaccgcgccgcccgcctcccctctcgcgtctccgcctcggtttcccaactctgcgccgtcgggccgcggcaggatgattgcctcgcatctgcttgcctacttcttcacggagctcaaccatgaccaagtgcagaaggttgaccagtatctctaccacatgcgcctctctgatgagaccctcttggagatctctaagcggttccgcaaggagatggagaaagggcttggagccaccactcaccctactgcagcagtgaagatgctgcccacctttgtgaggtccactccagatgggacagaacacggagagttcctggctctggatcttggagggaccaacttccgtgtgctttgggtgaaagtaacggacaatgggctccagaaggtggagatggagaatcagatctatgccatccctgaggacatcatgcgaggcagtggcacccagctgtttgaccacattgccgaatgcctggctaacttcatggataagctacaaatcaaagacaagaagctcccactgggttttaccttctcgttcccctgccaccagactaaactagacgagagtttcctggtctcatggaccaagggattcaagtccagtggagtggaaggcagagacgttgtggctctgatccggaaggccatccagaggagaggggactttgatatcgacattgtggctgtggtgaatgacacagttgggaccatgatgacctgtggttatgatgaccacaactgtgagattggtctcattgtgggcacgggcagcaacgcctgctacatggaagagatgcgccacatcgacatggtggaaggcgatgaggggcggatgtgtatcaatatggagtggggggccttcggggacgatggctcgctcaacgacattcgcactgagtttgaccaggagattgacatgggctcactgaacccgggaaagcaactgtttgagaagatgatcagtgggatgtacatgggggagctggtgaggcttatcctggtgaagatggccaaggaggagctgctctttggggggaagctcagcccagagcttctcaacaccggtcgctttgagaccaaagacatctcagacattgaaggggagaaggatggcatccggaaggcccgtgaggtcctgatgcggttgggcctggacccgactcaggaggactgcgtggccactcaccggatctgccagatcgtgtccacacgctccgccagcctgtgcgcagccaccctggccgccgtgctgcagcgcatcaaggagaacaaaggcgaggagcggctgcgctctactattggggtcgacggttccgtctacaagaaacacccccattttgccaagcgtctacataagaccgtgcggcggctggtgcccggctgcgatgtccgcttcctccgctccgaggatggcagtggcaaaggtgcagccatggtgacagcagtggcttaccggctggccgatcaacaccgtgcccgccagaagacattagagcatctgcagctgagccatgaccagctgctggaggtcaagaggaggatgaaggtagaaatggagcgaggtctgagcaaggagactcatgccagtgcccccgtcaagatgctgcccacctacgtgtgtgctaccccggacggcacagagaaaggggacttcttggccttggaccttggaggaacaaatttccgggtcctgctggtccgtgttcggaatgggaagtggggtggagtggagatgcacaacaagatctacgccatcccgcaggaggtcatgcacggcaccggggacgagctctttgaccacattgtccagtgcatcgcggacttcctcgagtacatgggcatgaagggcgtgtccctgcctctgggttttaccttctccttcccctgccagcagaacagcctggacgagagcatcctcctcaagtggacaaaaggcttcaaggcatctggctgcgagggcgaggacgtggtgaccctgctgaaggaagcgatccaccggcgagaggagtttgacctggatgtggttgctgtggtgaacgacacagtcggaactatgatgacctgtggctttgaagaccctcactgtgaagttggcctcattgttggcacgggcagcaatgcctgctacatggaggagatgcgcaacgtggaactggtggaaggagaagaggggcggatgtgtgtgaacatggaatggggggccttcggggacaatggatgcctagatgacttccgcacagaatttgatgtggctgtggatgagctttcactcaaccccggcaagcagaggttcgagaaaatgatcagtggaatgtacctgggtgagattgtccgtaacattctcatcgatttcaccaagcgtggactactcttccgaggccgcatctcagagcggctcaagacaaggggcatctttgaaaccaagttcttgtctcagattgagagtgactgcctggccctgctgcaagtccgagccatcctgcaacacttagggcttgagagcacctgtgacgacagcatcattgttaaggaggtgtgcactgtggtggcccggcgggcagcccagctctgtggcgcaggcatggccgctgtggtggacaggatacgagaaaaccgtgggctggacgctctcaaagtgacagtgggtgtggatgggaccctctacaagctacatcctcactttgccaaagtcatgcatgagacagtgaaggacctggctccgaaatgtgatgtgtctttcctgcagtcagaggatggcagcgggaagggggcggcgctcatcactgctgtggcctgccgcatccgtgaggctggacagcgatagaacccctgaaatcggaagggacttcctctttctctccttcttccctgttttaaattataagatgtcatccccttgtgtcagagacagaccccttggcttttgcttggcagagaggaccccactggactgggttttgtctctgcatctcattgtagagcttggtggctgagcttggccctattaagataaatagagttccaaataaggatttgttcacatgcatcataaccattcccattggttctcctaaaacatgaaaattatctcccttagtaatcccccttgccaaattccatgtccctgtataattctacaggatggggacactaatgaagatacggttgcttcaccttggagcctgaacatgacatttctaagtggggtgcatcccccagcactgatgttgttactgattctcctgtcagagatctgggaggtctccactgaggatgtgagcctgattatcctataggcagacgtggggagggtggaggggtgacagtggaggaaaatccatggatatccacgcagcagcccctctttaacctcatctacaagcatttgccctgtggattccagcatttgccattcctggaatcaaggaatcctgagtctgggcaatgaaaccaaagccaggagttgacgcatcctgcagttgggccagctgtcgcatctcagcggggcgcacatgttatccacaagcaatggacctttggggaagggggagtttttagtttgttttacaaatttttcctgcaaaagtggaatcactgtattttcattttaatttatatttgaaattttatttagttcttgagtagatctgcttcttcatcttgacatgtaatgaatggtcagttgtacgtaatgtatttatatgttaatttgttatgtatatagatgtgcaagtcttgtcagaattggcctcagtgtagttaaagggcagaaggggaagatactgactagtcatagaaatacctcattcgcctgtgggaagagaagggaagcctcttcagggtgagtgaatggcaaagcggttgcttctggctcctccttcccctgtggtcttggaagtgtgtggaaggcagggacagagatggaggccgagccaatagactgaagagaccacagcaattggctcctccatctagagattttcttggcagtattccatgggatgttaagcaaaggaaaccaaaggaatcgtttcaaatggactcatggcttagaaatctttattcttagggcagtcagtagtattctaaagctttctgacaagataaaggaagtcaccaaaatttctttttttaaattgtatctaatcctcaacaacaaaccaaaacagaacaattaaacagccaaataaaacctcagggacaacatttttggtgtatttgagccctcccagcaagtttcaccttgggtttgtattttaaatgttttacaagaattgtccatgtgcttccctaggctgagctggcattggtctgctgacctgtttttgtgtttttcttttttttatacacaacatttatttcaaactattgggagggatgagagtggcttaaaaacttccatccctacttttcaagagtgcagttgattctgaatctgaaagcccgcctctgtcctaaaatacaaacaagcacagacattaaacctggatactatatgataaagagggatgtaactattgaattggatacaaggatcagaatggaaagaaactcacgatgaaattgaacctggtttttgtatatttatcaaacttgtgctgagaatagtgtctgattatacgacttttaagcaaagttgggtgtaattaggtgaaaacagcccaggtcctcccgggagcacagaggggctaggggctggtccttctcgtttgctctagtcttgctttgctgtctggtgtagctcctctgctgctcccatctgcactaattgacccaaaacgtgggtatttcctgctacacaaaagccaaaaggtttcatgtagattttagttcactaaagggtgcccacaaaatagagattaattttaacttaaattttaagcttgaagattaggtactatctgtgaagttacacttttttttttttttttaaaggtagagatgtgtgtgtgtgtaggtattaaagatgtgttgttggtttccaaaaaggaacactggaaaataaattttgaatgtttatgttctcagaatcaggttgacagtcccttgctgacatggctttgctttgtgtaaatacagtggatctcaatcttcggggtgtgatgaatagcgaatcatctcaaatccttgagcactcagtctagtgaagatgttgtcattatgtacaatacataactagtttaattaactatgtgatgttaactattattaataaattttaacattttccaaaataatcaaa

SEQ ID NO: 140631 - DNA, 5278 bp, Homo sapiens
  Payload ID: 7579
  Gene Symbol: HK2
  Gene Name: hexokinase 2
  ENST ID: ENST00000409174
  CDS Start-End: 191-2860
acccgggaaggagtaggaaaggggcagaggaactccgcccgccgcgccccctccccggaactgtggcgcccggaactgaggctcggcgaggggcgtcccccattaacccccgcccctccaaatcagcctcgggaccgcccagcctcgtgtcctcaggatctgcctctgagttgaccagtatctctaccacatgcgcctctctgatgagaccctcttggagatctctaagcggttccgcaaggagatggagaaagggcttggagccaccactcaccctactgcagcagtgaagatgctgcccacctttgtgaggtccactccagatgggacagaacacggagagttcctggctctggatcttggagggaccaacttccgtgtgctttgggtgaaagtaacggacaatgggctccagaaggtggagatggagaatcagatctatgccatccctgaggacatcatgcgaggcagtggcacccagctgtttgaccacattgccgaatgcctggctaacttcatggataagctacaaatcaaagacaagaagctcccactgggttttaccttctcgttcccctgccaccagactaaactagacgagagtttcctggtctcatggaccaagggattcaagtccagtggagtggaaggcagagacgttgtggctctgatccggaaggccatccagaggagaggggactttgatatcgacattgtggctgtggtgaatgacacagttgggaccatgatgacctgtggttatgatgaccacaactgtgagattggtctcattgtgggcacgggcagcaacgcctgctacatggaagagatgcgccacatcgacatggtggaaggcgatgaggggcggatgtgtatcaatatggagtggggggccttcggggacgatggctcgctcaacgacattcgcactgagtttgaccaggagattgacatgggctcactgaacccgggaaagcaactgtttgagaagatgatcagtgggatgtacatgggggagctggtgaggcttatcctggtgaagatggccaaggaggagctgctctttggggggaagctcagcccagagcttctcaacaccggtcgctttgagaccaaagacatctcagacattgaaggggagaaggatggcatccggaaggcccgtgaggtcctgatgcggttgggcctggacccgactcaggaggactgcgtggccactcaccggatctgccagatcgtgtccacacgctccgccagcctgtgcgcagccaccctggccgccgtgctgcagcgcatcaaggagaacaaaggcgaggagcggctgcgctctactattggggtcgacggttccgtctacaagaaacacccccattttgccaagcgtctacataagaccgtgcggcggctggtgcccggctgcgatgtccgcttcctccgctccgaggatggcagtggcaaaggtgcagccatggtgacagcagtggcttaccggctggccgatcaacaccgtgcccgccagaagacattagagcatctgcagctgagccatgaccagctgctggaggtcaagaggaggatgaaggtagaaatggagcgaggtctgagcaaggagactcatgccagtgcccccgtcaagatgctgcccacctacgtgtgtgctaccccggacggcacagagaaaggggacttcttggccttggaccttggaggaacaaatttccgggtcctgctggtccgtgttcggaatgggaagtggggtggagtggagatgcacaacaagatctacgccatcccgcaggaggtcatgcacggcaccggggacgagctctttgaccacattgtccagtgcatcgcggacttcctcgagtacatgggcatgaagggcgtgtccctgcctctgggttttaccttctccttcccctgccagcagaacagcctggacgagagcatcctcctcaagtggacaaaaggcttcaaggcatctggctgcgagggcgaggacgtggtgaccctgctgaaggaagcgatccaccggcgagaggagtttgacctggatgtggttgctgtggtgaacgacacagtcggaactatgatgacctgtggctttgaagaccctcactgtgaagttggcctcattgttggcacgggcagcaatgcctgctacatggaggagatgcgcaacgtggaactggtggaaggagaagaggggcggatgtgtgtgaacatggaatggggggccttcggggacaatggatgcctagatgacttccgcacagaatttgatgtggctgtggatgagctttcactcaaccccggcaagcagaggttcgagaaaatgatcagtggaatgtacctgggtgagattgtccgtaacattctcatcgatttcaccaagcgtggactactcttccgaggccgcatctcagagcggctcaagacaaggggcatctttgaaaccaagttcttgtctcagattgagagtgactgcctggccctgctgcaagtccgagccatcctgcaacacttagggcttgagagcacctgtgacgacagcatcattgttaaggaggtgtgcactgtggtggcccggcgggcagcccagctctgtggcgcaggcatggccgctgtggtggacaggatacgagaaaaccgtgggctggacgctctcaaagtgacagtgggtgtggatgggaccctctacaagctacatcctcactttgccaaagtcatgcatgagacagtgaaggacctggctccgaaatgtgatgtgtctttcctgcagtcagaggatggcagcgggaagggggcggcgctcatcactgctgtggcctgccgcatccgtgaggctggacagcgatagaacccctgaaatcggaagggacttcctctttctctccttcttccctgttttaaattataagatgtcatccccttgtgtcagagacagaccccttggcttttgcttggcagagaggaccccactggactgggttttgtctctgcatctcattgtagagcttggtggctgagcttggccctattaagataaatagagttccaaataaggatttgttcacatgcatcataaccattcccattggttctcctaaaacatgaaaattatctcccttagtaatcccccttgccaaattccatgtccctgtataattctacaggatggggacactaatgaagatacggttgcttcaccttggagcctgaacatgacatttctaagtggggtgcatcccccagcactgatgttgttactgattctcctgtcagagatctgggaggtctccactgaggatgtgagcctgattatcctataggcagacgtggggagggtggaggggtgacagtggaggaaaatccatggatatccacgcagcagcccctctttaacctcatctacaagcatttgccctgtggattccagcatttgccattcctggaatcaaggaatcctgagtctgggcaatgaaaccaaagccaggagttgacgcatcctgcagttgggccagctgtcgcatctcagcggggcgcacatgttatccacaagcaatggacctttggggaagggggagtttttagtttgttttacaaatttttcctgcaaaagtggaatcactgtattttcattttaatttatatttgaaattttatttagttcttgagtagatctgcttcttcatcttgacatgtaatgaatggtcagttgtacgtaatgtatttatatgttaatttgttatgtatatagatgtgcaagtcttgtcagaattggcctcagtgtagttaaagggcagaaggggaagatactgactagtcatagaaatacctcattcgcctgtgggaagagaagggaagcctcttcagggtgagtgaatggcaaagcggttgcttctggctcctccttcccctgtggtcttggaagtgtgtggaaggcagggacagagatggaggccgagccaatagactgaagagaccacagcaattggctcctccatctagagattttcttggcagtattccatgggatgttaagcaaaggaaaccaaaggaatcgtttcaaatggactcatggcttagaaatctttattcttagggcagtcagtagtattctaaagctttctgacaagataaaggaagtcaccaaaatttctttttttaaattgtatctaatcctcaacaacaaaccaaaacagaacaattaaacagccaaataaaacctcagggacaacatttttggtgtatttgagccctcccagcaagtttcaccttgggtttgtattttaaatgttttacaagaattgtccatgtgcttccctaggctgagctggcattggtctgctgacctgtttttgtgtttttcttttttttatacacaacatttatttcaaactattgggagggatgagagtggcttaaaaacttccatccctacttttcaagagtgcagttgattctgaatctgaaagcccgcctctgtcctaaaatacaaacaagcacagacattaaacctggatactatatgataaagagggatgtaactattgaattggatacaaggatcagaatggaaagaaactcacgatgaaattgaacctggtttttgtatatttatcaaacttgtgctgagaatagtgtctgattatacgacttttaagcaaagttgggtgtaattaggtgaaaacagcccaggtcctcccgggagcacagaggggctaggggctggtccttctcgtttgctctagtcttgctttgctgtctggtgtagctcctctgctgctcccatctgcactaattgacccaaaacgtgggtatttcctgctacacaaaagccaaaaggtttcatgtagattttagttcactaaagggtgcccacaaaatagagattaattttaacttaaattttaagcttgaagattaggtactatctgtgaagttacacttttttttttttttttaaaggtagagatgtgtgtgtgtgtaggtattaaagatgtgttgttggtttccaaaaaggaacactggaaaataaattttgaatgtttatgttctcagaatcaggttgacagtcccttgctgacatggctttgctttgtgtaaatacagtggatctcaatcttcggggtgtgatgaatagcgaatcatctcaaatccttgagcactcagtctagtgaagatgttgtcattatgtacaatacataactagtttaattaactatgtgatgttaactattattaataaattttaacattttccaaaataatcaaa

SEQ ID NO: 140632 - DNA, 3066 bp, Homo sapiens
  Payload ID: 7580
  Gene Symbol: HK3
  Gene Name: hexokinase 3 (white cell)
  Uniprot ID: P52790
  ENST ID: ENST00000292432
  CDS Start-End: 93-2864
gggtgcctcatattgccagacaagagctcagacctgaggagagtgactagcttctctgtgtcccaggtggccaccttccactgtggaagctcatggactccattgggtcttcagggttgcggcagggggaagaaaccctgagttgctctgaggagggcttgcccgggccctcagacagctcagagctggtgcaggagtgcctgcagcagttcaaggtgacaagggcacagctacagcagatccaagccagcctcttgggttccatggagcaggcgctgaggggacaggccagccctgcccctgcggtccggatgctgcctacatacgtggggtccaccccacatggcactgagcaaggagacttcgtggtgctggagctgggggccacaggggcctcactgcgtgttttgtgggtgactctaactggcattgaggggcatagggtggagcccagaagccaggagtttgtgatcccccaagaggtgatgctgggtgctggccagcagctctttgactttgctgcccactgcctgtctgagttcctggatgcgcagcctgtgaacaaacagggtctgcagcttggcttcagcttctctttcccttgtcaccagacgggcttggacaggagcaccctcatttcctggaccaaaggttttaggtgcagtggtgtggaaggccaggatgtggtccagctgctgagagatgccattcggaggcagggggcctacaacatcgacgtggttgctgtggtgaacgacacagtgggcaccatgatgggctgtgagccgggggtcaggccgtgtgaggttgggctagttgtagacacgggcaccaacgcgtgttacatggaggaggcacggcatgtggcagtgctggacgaagaccggggccgcgtctgcgtcagcgtcgagtggggctccttcagcgatgatggggcgctgggaccagtgctgaccaccttcgaccataccctggaccatgagtccctgaatcctggtgctcagaggtttgagaagatgatcggaggcctgtacctgggtgagctggtgcggctggtgctggctcacttggcccggtgtggggtcctctttggtggctgcacctcccctgccctgctgagccaaggcagcatcctcctggaacacgtggctgagatggaggacccctctactggggcagcccgtgtccatgctatcctgcaggacttgggcctgagccctggggcttcggatgttgagcttgtgcagcacgtctgtgcggccgtgtgcacgcgggctgcccagctctgtgctgccgccctggccgctgttctctcctgcctccagcacagccgggagcaacaaacactccaggttgctgtggccaccggaggccgagtgtgtgagcggcaccccaggttctgcagcgtcctgcaggggacagtgatgctcctggccccggaatgcgatgtctccttaatcccctctgtggatggtggtggccggggagtggcgatggtgactgccgtggctgcccgtctggctgcccaccggcgcctgctggaggagaccctggccccattccggttgaaccatgatcaactggctgcggttcaggcacagatgcggaaggccatggccaaggggctccgaggggaggcctcctcccttcgcatgctgcccactttcgtccgggccacccctgacggcagcgagcgaggggatttcctggccctggacctcgggggcacgaacttccgtgtcctcctggtacgtgtgaccacaggcgtgcagatcaccagcgagatctactccattcccgagactgtggcccagggttctgggcagcagctctttgaccacatcgtggactgcatcgtggacttccagcagaagcagggcctgagcgggcagagcctcccactgggttttaccttctccttcccatgtaggcagcttggcctagaccagggcatcctcctgaactggaccaagggtttcaaggcatcagactgcgagggccaagatgtcgtgagtctgttgcgggaagccatcactcgcagacaggcagtggagctgaatgtggttgccattgtcaatgacacggtggggaccatgatgtcctgtggctatgaggacccccgttgcgagataggcctcattgtcggaaccggcaccaatgcctgctacatggaggagctccggaatgtggcgggcgtgcctggggactcaggccgcatgtgcatcaacatggagtggggcgcctttggggacgatggctctctggccatgctcagcacccgctttgatgcaagtgtggaccaggcgtccatcaaccccggcaagcagaggtttgaaaagatgatcagcggcatgtacctgggggagatcgtccgccacatccttttacatttaaccagccttggcgttctcttccggggccagcagatccagcgccttcagaccagggacatcttcaagaccaagttcctctctgagatcgaaagtgacagcctggccctgcggcaggtccgagccatcctagaggatctggggctacccctgacctcagatgacgccctgatggtgctagaggtgtgccaggctgtgtcccagagggctgcccagctctgtggggcgggtgtagctgccgtggtggagaagatccgggagaaccggggcctggaagagctggcagtgtctgtgggggtggatggaacgctctacaagctgcacccgcgcttctccagcctggtggcggccacagtgcgggagctggcccctcgctgtgtggtcacgttcctgcagtcagaggatgggtccggcaaaggtgcggccctggtcaccgctgttgcctgccgccttgcgcagttgactcgtgtctgaggaaacctccaggctgaggaggtctccgccgcagccttgctggagccgggtcggggtctgcctgtttcccagccaggcccagccacccaggactcctgggacatcccatgtgtgacccctctgcggccatttggccttgctccctggctttccctgagagaagtagcactcaggttagcaatatatatatataatttattta

SEQ ID NO: 140633 - DNA, 450 bp, Homo sapiens
  Payload ID: 7580
  Gene Symbol: HK3
  Gene Name: hexokinase 3 (white cell)
  ENST ID: ENST00000509717
  CDS Start-End: 1-321
ctgcagcagttcaaggtgacaagggcacagctacagcagatccaagccagcctcttgggttccatggagcaggcgctgaggggacaggccagccctgcccctgcggtccggatgctgcctacatacgtggggtccaccccacatggcactgactttgcaggccttaggaatttgggaagtgggcagagggctctggtcttgccagctgcatggctttctgtgacctgcttgccctccagagcaaggagacttcgtggtgctggagctgggggccacaggggcctcactgcgtgttttgtgggtgactctaactggcattgaggggcatagggtggagcccagaagccaggagtttgtgatcccccaagaggtgatgctgggtgctggccagcagctctttgaccacatcgtggactgcatcgtggacttccagcagaagcagggcctgag

SEQ ID NO: 140634 - DNA, 395 bp, Homo sapiens
  Payload ID: 7580
  Gene Symbol: HK3
  Gene Name: hexokinase 3 (white cell)
  ENST ID: ENST00000514058
  CDS Start-End: 1-395
ggcatcctcctgaactggaccaagggtttcaaggcatcagactgcgagggccaagatgtcgtgagtctgttgcgggaagccatcactcgcagacaggcagtggagctgaatgtggttgccattgtcaatgacacggtggggaccatgatgtcctgtggctatgaggacccccgttgcgagataggcctcattgtcgcttccacgttgtctggcctctctgcaggaaccggcaccaatgcctgctacatggaggagctccggaatgtggcgggcgtgcctggggactcaggccgcatgtgcatcaacatggagtggggcgcctttggggacgatggctctctggccatgctcagcacccgctttgatgcaagtgtggaccaggcgtccatcaaccc

SEQ ID NO: 140635 - DNA, 547 bp, Homo sapiens
  Payload ID: 7580
  Gene Symbol: HK3
  Gene Name: hexokinase 3 (white cell)
  ENST ID: ENST00000504910
  CDS Start-End: 1-174
actgactttgcaggccttaggaatttgggaagtgggcagagggctctggtcttgccagctgcatggctttctgtgacctgcttgccctccagagcaaggagacttcgtggtgctggagctgggggccacaggggcctcactgcgtgttttgtgggtgactctaactggcattgaggggcatagggtggagcccagaagccaggagtttgtgatcccccaagaggtgatgctgggtgctggccagcagctctttgactttgctgcccactgcctgtctgagttcctggatgcgcagcctgtgaacaaacagggtctgcagcttggcttcagcttctctttcccttgtcaccagacgggcttggacaggagcaccctcatttcctggaccaaaggttttaggtgcagtggtgtggaaggccaggatgtggtccagctgctgagagatgccattcggaggcagggggcctacaacatcgacgtggttgctgtggtgaacgacacagtgggcaccatgatgggctgtgagccgggggtcaggccgtgtgag

SEQ ID NO: 140636 - DNA, 3689 bp, Homo sapiens
  Payload ID: 7581
  Gene Symbol: HKDC1
  Gene Name: hexokinase domain containing 1
  Uniprot ID: Q2TB90
  ENST ID: ENST00000354624
  CDS Start-End: 134-2887
atttagtccgcaacacctcgctccccaggaggtctgccagcctggactggaagcgtgcaacactccagagtcgtaggagtgaacactgcacaggaatctctgcccatctcaggagaaaccaaacttggggaaaatgtttgcggtccacttgatggcattttacttcagcaagctgaaggaggaccagatcaagaaggtggacaggttcctgtatcacatgcggctctccgatgacacccttttggacatcatgaggcggttccgggctgagatggagaagggcctggcaaaggacaccaaccccacggctgcagtgaagatgttgcccaccttcgtcagggccattcccgatggttccgaaaatggggagttcctttccctggatctcggagggtccaagttccgagtgctgaaggtgcaagtcgctgaagaggggaagcgacacgtgcagatggagagtcagttctacccaacgcccaatgaaatcatccgcgggaacggcacagagctgtttgaatatgtagctgactgtctggcagatttcatgaagaccaaagatttaaagcataagaaattgccccttggcctaactttttctttcccctgtcgacagactaaactggaagagggtgtcctactttcgtggacaaaaaagtttaaggcacgaggagttcaggacacggatgtggtgagccgtctgaccaaagccatgagaagacacaaggacatggacgtggacatcctggccctggtcaatgacaccgtggggaccatgatgacctgtgcctatgacgacccctactgcgaagttggtgtcatcatcggaactggcaccaatgcgtgttacatggaggacatgagcaacattgacctggtggagggcgacgagggcaggatgtgcatcaacacagagtggggggccttcggggacgacggggccctggaggacattcgcactgagttcgacagggagctggacctcggctctctcaacccaggaaagcaactgttcgagaagatgatcagtggcctgtacctgggggagcttgtcaggcttatcttgctgaagatggccaaggctggcctcctgtttggtggtgagaaatcttctgctctccacactaagggcaagatcgaaacacggcacgtggctgccatggagaagtataaagaaggccttgctaatacaagagagatcctggtggacctgggtctggaaccgtctgaggctgactgcattgccgtccagcatgtctgtaccatcgtctccttccgctcggccaatctctgtgcagcagctctggcggccatcctgacacgcctccgggagaacaagaaggtggaacggctccggaccacagtgggcatggacggcaccctctacaagatacaccctcagtacccaaaacgcctgcacaaggtggtgaggaaactggtcccaagctgtgatgtccgcttcctcctgtcagagagtggcagcaccaagggggccgccatggtgaccgcggtggcctcccgcgtgcaggcccagcggaagcagatcgacagggtgctggctttgttccagctgacccgagagcagctcgtggacgtgcaggccaagatgcgggctgagctggagtatgggctgaagaagaagagccacgggctggccacggtcaggatgctgcccacctacgtctgcgggctgccggacggcacagagaaaggaaagtttctcgccctggatcttgggggaaccaacttccgggtcctcctggtgaagatcagaagtggacggaggtcagtgcgaatgtacaacaagatcttcgccatccccctggagatcatgcagggcactggtgaggagctctttgatcacattgtgcagtgcatcgccgacttcctggactacatgggcctcaagggagcctccctacctttgggcttcacattctcatttccctgcaggcagatgagcattgacaagggaacactcatagggtggaccaaaggtttcaaggccactgactgtgaaggggaggacgtggtggacatgctcagggaagccatcaagaggagaaacgagtttgacctggacattgttgcagtcgtgaatgatacagtggggaccatgatgacctgtggctatgaagatcctaattgtgagattggcctgattgcaggaacaggcagcaacatgtgctacatggaggacatgaggaacatcgagatggtggaggggggtgaagggaagatgtgcatcaatacagagtggggaggatttggagacaatggctgcatagatgacatctggacccgatacgacacggaggtggatgaggggtccttgaatcctggcaagcagagatacgagaaaatgaccagtgggatgtacttgggggagattgtgcggcagatcctgatcgacctgaccaagcagggtctcctcttccgagggcagatttcagagcgtctccggaccaggggcatcttcgaaaccaagttcctgtcccagatcgaaagcgatcggctggcccttctccaggtcaggaggattctgcagcagctgggcctggacagcacgtgtgaggacagcatcgtggtgaaggaggtgtgcggagccgtgtcccggcgggcggcccagctctgcggtgctggcctggccgctatagtggaaaaaaggagagaagaccaggggctagagcacctgaggatcactgtgggtgtggacggcaccctgtacaagctgcaccctcacttttctagaatattgcaggaaactgtgaaggaactagcccctcgatgtgatgtgacattcatgctgtcagaagatggcagtggaaaaggggcagcactgatcactgctgtggccaagaggttacagcaggcacagaaggagaactaggaacccctgggattggacctgatgcatcttggatactgaacagcttttcctctggcagatcagttggtcagagaccaatgggcaccctcctggctgacctcaccttctggatggccgaaagagaaccccaggttctcgggtactcttagtatcttgtactggatttgcagtgacattacatgacatctctatttggtatatttgggccaaaatgggccaacttatgaaatcaaagtgtctgtcctgagagatcccctttcaacacattgttcaggtgaggcttgagctgtcaattctctatggctttcagtcttgtggctgcgggacttggaaatatatagaatctgcccatgtggctggcaggctgtttccccattgggatgcttaagccatctcttataggggattggaccctgtacttgtggatgaacattggagagcaagaggaactcacgttatgaactagggggatctcatctaacttgtccttaacttgccatgttgacttcaaacctattaagagaacaaagactttgaagtatccagccccagggtgcagagaggttgattgccagggagcactgcaggaatcattgcatgcttaaagcgagttatgtcagcaccctgtaggattttgttccttattaagtgtgtgccatgtggtggggtgctgtctggggcatctgtttttcattttgcctgtggtttgtgttgcaggtgttgatagttgttttaaggattgttaggtataggaaatccagtaaattaataaaaaaattttgattttccaataaactttgca

SEQ ID NO: 140637 - DNA, 1733 bp, Homo sapiens
  Payload ID: 7582
  Gene Symbol: HEXDC
  Gene Name: hexosaminidase (glycosyl hydrolase family 20, catalytic domain) containing
  Uniprot ID: Q8WVB3
  ENST ID: ENST00000327949
  CDS Start-End: 12-1472
gaaatattgaaatgtcaggttccactccatttcagatgagattagttcatttagaccttaaaggagctccaccaaaggtctcgtacctctcagagatttttcctctgttccgtgcgctaggtgcaaacggcctcctcattgagtatgaagacatgtttccctacgagggccctctgaggctgctgagggccaagtacgcctacagcccctctgaaatcaaagagatcttgcatctggctggactcaatgagctggaggtgattcccttggtgcagacatttggacacatggagtttgtgctgaagcacacggccttcgcccacctgcgggaggtgggctccttcccctgcaccctgaacccccacgaggcagagtccctggcgctggtgggcgccatgattgaccaggtcctggagctacacccaggcgcccagcggctgcacatcgggtgtgatgaggtctattacctcggagagggggaggcctcgcgccggtggctacagcaagagcagaacagcacggggaagttgtgcctgtcacacatgcgggcggtggccagcggcgtgaaggcccggcgccccagcgtgacacccctggtgtgggacgacatgctccgagacctgcctgaggaccagctcgcagcgtccggggtgccgcagctggtggagccggtgctctgggactacacggccgacctggatgtgcacggcaaggtcctcctcatgcagaagtaccggcggtgcggctttccgcagctgtgggcagccagtgccttcaagggtgccacggggcccagccaggccgtgccccctgttgagcaccacctcaggaaccacgtgcagtggctgcaggtggcgggcagcgggcccacggactcactgcagggcatcatcctgaccggctggcagaggtacgaccactactctgtgctgtgcgagctgctgcccgcaggagtcccgtccctggccgcctgcctgcagttgcttctacgcggaggatttgatgaagatgttaaagcgaaagtggagaaccttctcgggatttccagcctggaaaaaacggaccctgttagggagggggccggctccttccctggcagcaacatccttgcccttgtcacacaagtcagcctccatctgcgcagctctgtggatgcgctgctggagggcaacaggtatgtcactggctggttcagcccctaccaccgccagcggaagctcatccacccggtcatggttcagcacatccagcccgcagcgctcagcctcctggcacagtggagcaccctcgtgcaggagctggaggctgccctgcagctggctttctacccggatgccgtggaggagtggctggaggaaaacgtgcaccccagcctgcagcggctgcaagctctgctgcaggacctcagcgaggtgtctgcccccccgctgccacccaccagccctggcagggacgttgctcaggacccctgaggggagagctcatgccagggggctcctgctggaggctgggggggctctgcactgccaaatggcctgggcaatacgggcccacgtgggcgtcgtgccctctggcccagcagtgtcttgcccacactcagttcctgagggccctgggcagcccctgggggagagactagaaaacacagaaggaagcagcacagggagacccgctttgtgatctgcatgtgtgacactgattctttggaaataaagagtggaagctgcaggtga

SEQ ID NO: 140638 - DNA, 2285 bp, Homo sapiens
  Payload ID: 7582
  Gene Symbol: HEXDC
  Gene Name: hexosaminidase (glycosyl hydrolase family 20, catalytic domain) containing
  Uniprot ID: Q8WVB3
  ENST ID: ENST00000337014
  CDS Start-End: 475-2232
gtcgggccaggccccgccccatcagccccagtcccgcccactccatggccctgtccgccgccgcagcgcgcgcccttcccctcctcaccgctacctgctccggttccggcgctcggccgctccgttgccctcgggcgccttggttgcggccctccgctgaggagccatcggaccaggccgccgcggagccgggccggacgcgggcgccaggcccggggacgaacgccgtaacagggagcgcgaggcaggcacggcgcagggacgcgagtgcgacgcgctcggccatcggcccctgggctggcggccaggcccgagcaatcggcggccgagcggggcggggctcagagcggaggcggcggccgcgagggcggggcggccgggcctggctgcgcccccggacctcgcgggaccgcggcggcgcaggaagaagtccccaaggagacttcgccataggagttcacaggaaatattgaaatgtcaggttccactccatttcagatgagattagttcatttagaccttaaaggagctccaccaaaggtctcgtacctctcagagatttttcctctgttccgtgcgctaggtgcaaacggcctcctcattgagtatgaagacatgtttccctacgagggccctctgaggctgctgagggccaagtacgcctacagcccctctgaaatcaaagagatcttgcatctggctggactcaatgagctggaggtgattcccttggtgcagacatttggacacatggagtttgtgctgaagcacacggccttcgcccacctgcgggaggtgggctccttcccctgcaccctgaacccccacgaggcagagtccctggcgctggtgggcgccatgattgaccaggtcctggagctacacccaggcgcccagcggctgcacatcgggtgtgatgaggtctattacctcggagagggggaggcctcgcgccggtggctacagcaagagcagaacagcacggggaagttgtgcctgtcacacatgcgggcggtggccagcggcgtgaaggcccggcgccccagcgtgacacccctggtgtgggacgacatgctccgagacctgcctgaggaccagctcgcagcgtccggggtgccgcagctggtggagccggtgctctgggactacacggccgacctggatgtgcacggcaaggtcctcctcatgcagaagtaccggcggtgcggctttccgcagctgtgggcagccagtgccttcaagggtgccacggggcccagccaggccgtgccccctgttgagcaccacctcaggaaccacgtgcagtggctgcaggtggcgggcagcgggcccacggactcactgcagggcatcatcctgaccggctggcagaggtacgaccactactctgtgctgtgcgagctgctgcccgcaggagtcccgtccctggccgcctgcctgcagttgcttctacgcggaggatttgatgaagatgttaaagcgaaagtggagaaccttctcgggatttccagcctggaaaaaacggaccctgttaggcaagcaccctgcagccctccctgtccccttcttcccctccccttcccccgcccgtggagacagctgttctcagcagggctctccgcagggagggggccggctccttccctggcagcaacatccttgcccttgtcacacaagtcagcctccatctgcgcagctctgtggatgcgctgctggagggcaacaggtatgtcactggctggttcagcccctaccaccgccagcggaagctcatccacccggtcatggttcagcacatccagcccgcagcgctcagcctcctggcacagtggagcaccctcgtgcaggagctggaggctgccctgcagctggctttctacccggatgccgtggaggagtggctggaggaaaacgtgcaccccagcctgcagcggctgcaagctctgctgcaggacctcagcgaggtgtctgcccccccgctgccacccaccagccctggcagggacgttgctcaggacccctgaggggagagctcatgccagggggctcctgctggaggctgggggggctctgcactgccaaatggcctgggcaatacgggcccacgtgggcgtcgtgccctctggcccagcagtgtcttgcccacactcagttcctgagggccctgggcagcccctgggggagagactagaaaacacagaaggaagcagcacagggagacccgctttgtgatctgcatgtgtgacactgattctttggaaataaagagtggaagctgcaggtga

SEQ ID NO: 140639 - DNA, 853 bp, Homo sapiens
  Payload ID: 7582
  Gene Symbol: HEXDC
  Gene Name: hexosaminidase (glycosyl hydrolase family 20, catalytic domain) containing
  ENST ID: ENST00000578130
  CDS Start-End: 1-645
cacggcaaggtcctcctcatgcagaagtaccggcggtgcggctttccgcagctgtgggcagccagtgccttcaagggtgccacggggcccagccaggccgtgccccctgttgagcaccacctcaggaaccacgtgcagtggctgcaggtggcgggcagcgggcccacggactcactgcagggcatcatcctgaccggctggcagaggtacgaccactactctgtgctgtgcgagctgctgcccgcaggagtcccgtccctggccgcctgcctgcagttgcttctacgcggaggatttgatgaagatgttaaagcgaaagtggagaaccttctcgggatttccagcctggaaaaaacggaccctgttagcccctaccaccgccagcggaagctcatccacccggtcatggttcagcacatccagcccgcagcgctcagcctcctggcacagtggagcaccctcgtgcaggagctggaggctgccctgcagctggctttctacccggatgccgtggaggagtggctggaggaaaacgtgcaccccagcctgcagcggctgcaagctctgctgcaggacctcagcgaggtgtctgcccccccgctgccacccaccagccctggcagggacgttgctcaggacccctgaggggagagctcatgccagggggctcctgctggaggctgggggggctctgcactgccaaatggcctgggcaatacgggcccacgtgggcgtcgtgccctctggcccagcagtgtcttgcccacactcagttcctgagggccctgggcagcccctgggggagagactagaaaacacagaaggaagcagcacagggagacccgctttgtga

SEQ ID NO: 140640 - DNA, 779 bp, Homo sapiens
  Payload ID: 7582
  Gene Symbol: HEXDC
  Gene Name: hexosaminidase (glycosyl hydrolase family 20, catalytic domain) containing
  ENST ID: ENST00000578775
  CDS Start-End: 1-231
ggcctcctcattgagtatgaagacatgtttccctacgagggccctctgaggctgctgagggccaagtacgcctacaggctggagtgcagtggtgcgatcttggctcaccgcgaactctgcctcccgggttcaagtgattctcctgcctcagcctcccgagtagctgggattacagcccctctgaaatcaaagagatcttgcatctggctggactcaatgagctggaggtgattcccttggtgcagacatttggacacatggagtttgtgctgaagcacacggccttcgcccacctgcgggaggtgggctccttcccctgcaccctgaacccccacgaggcagagtccctggcgctggtgggcgccatgattgaccaggtcctggagctacacccaggcgcccagcggctgcacatcgggtgtgatgaggtctattacctcggagagggggaggcctcgcgccggtggctacagcaagagcagaacagcacggggaagttgtgcctgtcacacatgcgggcggtggccagcggcgtgaaggcccggcgccccagcgtgacacccctggtgtgggacgacatgctccgagacctgcctgaggaccagctcgcagcgtccggggtgccgcagctggtggagccggtgctctgggactacacggccgacctggatgtgcacggcaaggtcctcctcatgcagaagtaccggcggtgcggctttccgcagctgtgggcagccagtgccttcaagggtgccacggggcccagccaggccgtgccc

SEQ ID NO: 140641 - DNA, 638 bp, Homo sapiens
  Payload ID: 7582
  Gene Symbol: HEXDC
  Gene Name: hexosaminidase (glycosyl hydrolase family 20, catalytic domain) containing
  ENST ID: ENST00000580235
  CDS Start-End: 286-638
gcggccgcgagggcggggcggccgggcctggctgcgcccccggacctcgcgggaccgcggcggcgcaggaagaagtccccaaggagacttcgccataggagttcacaggaaatattgaaatgtcaggttccactccatttcagatgagattagttcatttagaccttaaaggagctccaccaaaggtctcgtacctctcagagcccctctgaaatcaaagagatcttgcatctggctggactcaatgagctggaggtgattcccttggtgcagacatttggacacatggagtttgtgctgaagcacacggccttcgcccacctgcgggaggtgggctccttcccctgcaccctgaacccccacgaggcagagtccctggcgctggtgggcgccatgattgaccaggtcctggagctacacccaggcgcccagcggctgcacatcgggtgtgatgaggtctattacctcggagagggggaggcctcgcgccggtggctacagcaagagcagaacagcacggggaagttgtgcctgtcacacatgcgggcggtggccagcggcgtgaaggcccggcgccccagcgtgacacccctggtgtgggacgacatgctccgagacctgcctgaggaccagctcgc

SEQ ID NO: 140642 - DNA, 873 bp, Homo sapiens
  Payload ID: 7582
  Gene Symbol: HEXDC
  Gene Name: hexosaminidase (glycosyl hydrolase family 20, catalytic domain) containing
  ENST ID: ENST00000582315
  CDS Start-End: 103-246
gcggccgggcctggctgcgcccccggacctcgcgggaccgcggcggcgcaggaagaagtccccaaggagacttcgccataggagttcacaggaaatattgaaatgtcaggttccactccatttcagatgagattagttcatttagaccttaaaggagctccaccaaaggtctcgtacctctcagaggctggagtgcagtggtgcgatcttggctcaccgcgaactctgcctcccgggttcaagtgattctcctgcctcagcctcccgagtagctgggattacagcccctctgaaatcaaagagatcttgcatctggctggactcaatgagctggaggtgattcccttggtgcagacatttggacacatggagtttgtgctgaagcacacggccttcgcccacctgcgggaggtgggctccttcccctgcaccctgaacccccacgaggcagagtccctggcgctggtgggcgccatgattgaccaggtcctggagctacacccaggcgcccagcggctgcacatcgggtgtgatgaggtctattacctcggagagggggaggcctcgcgccggtggctacagcaagagcagaacagcacggggaagttgtgcctgtcacacatgcgggcggtggccagcggcgtgaaggcccggcgccccagcgtgacacccctggtgtgggacgacatgctccgagacctgcctgaggaccagctcgcagcgtccggggtgccgcagctggtggagccggtgctctgggactacacggccgacctggatgtgcacggcaaggtcctcctcatgcagaagtaccggcggtgcggctttccgcagctgtgggcagccagtgccttcaagggtgccacggggccc

SEQ ID NO: 140643 - DNA, 1820 bp, Homo sapiens
  Payload ID: 7582
  Gene Symbol: HEXDC
  Gene Name: hexosaminidase (glycosyl hydrolase family 20, catalytic domain) containing
  ENST ID: ENST00000577944
  CDS Start-End: 96-1730
ggcctggctgcgcccccggacctcgcgggaccgcggcggcgcaggaagaagtccccaaggagacttcgccataggagttcacaggaaatattgaaatgtcaggttccactccatttcagatgagattagttcatttagaccttaaaggagctccaccaaaggtctcgtacctctcagagatttttcctctgttccgtgcgctaggtgcaaacggcctcctcattgagtatgaagacatgtttccctacgagggccctctgaggctgctgagggccaagtacgcctacagcccctctgaaatcaaagagatcttgcatctggctggactcaatgagctggaggtgattcccttggtgcagacatttggacacatggagtttgtgctgaagcacacggccttcgcccacctgcgggaggtgggctccttcccctgcaccctgaacccccacgaggcagagtccctggcgctggtgggcgccatgattgaccaggtcctggagctacacccaggcgcccagcggctgcacatcgggtgtgatgaggtctattacctcggagagggggaggcctcgcgccggtggctacagcaagagcagaacagcacggggaagttgtgcctgtcacacatgcgggcggtggccagcggcgtgaaggcccggcgccccagcgtgacacccctggtgtgggacgacatgctccgagacctgcctgaggaccagctcgcagcgtccggggtgccgcagctggtggagccggtgctctgggactacacggccgacctggatgtgcacggcaaggtcctcctcatgcagaagtaccggcggtgcggctttccgcagctgtgggcagccagtgccttcaagggtgccacggggcccagccaggccgtgccccctgttgagcaccacctcaggaaccacgtgcagtggctgcaggtggcgggcagcgggcccacggactcactgcagggcatcatcctgaccggctggcagaggtacgaccactactctgtgctgtgcgagctgctgcccgcaggagtcccgtccctggccgcctgcctgcagttgcttctacgcggaggatttgatgaagatgttaaagcgaaagtggagaaccttctcgggatttccagcctggaaaaaacggaccctggctctccgcagggagggggccggctccttccctggcagcaacatccttgcccttgtcacacaagtcagcctccatctgcgcagctctgtggatgcgctgctggagggcaacaggtatgtcactggctggttcagcccctaccaccgccagcggaagctcatccacccggtcatggttcagcacatccagcccgcagcgctcagcctcctggcacagtggagcaccctcgtgcaggagctggaggctgccctgcagctggctttctacccggatgccgtggaggagtggctggaggaaaacgtgcaccccagcctgcagcggctgcaagctctgctgcaggacctcagcgaggtgtctgcccccccgctgccacccaccagccctggcagggacgttgctcaggacccctgaggggagagctcatgccagggggctcctgctggaggctgggggggctctgcactgccaaatggcctgggcaatacgggcccacgtgggcgtcgtgccctctggcccagcagtgtcttgcccacactcagttcctgagggccctgggcagcccctgggggagagactagaaaacacagaaggaagcagcacagggagacccgctttgtgatctgcatgtgtgacactgattctttggaaataaagagtggaagctgcag

SEQ ID NO: 140644 - DNA, 862 bp, Homo sapiens
  Payload ID: 7582
  Gene Symbol: HEXDC
  Gene Name: hexosaminidase (glycosyl hydrolase family 20, catalytic domain) containing
  ENST ID: ENST00000578616
  CDS Start-End: 1-267
gcagccagtgccttcaagggtgccacggggcccagccaggccgtgccccctgttgagcaccacctcaggaaccacgtgcagtggctgcaggtggcgggcagcgggcccacggactcactgcagggcatcatcctgaccggctggcagaggtacgaccactactctgtgctgtgcgagctgctgcccgcaggagtcccgtccctggccgcctgcctgcagttgcttctacgcgtgtcccttgcccacggccccatccgccacccgtgactggggcacttccctcctgccctctggccgtcagcctcttgcagcaagcatttccatgaacaccaagtcggagattcgtccacgctggtgcctgcaggcctcatgggaggatttgatgaagatgttaaagcgaaagtggagaaccttctcgggatttccagcctggaaaaaacggaccctgttagggagggggccggctccttccctggcagcaacatccttgcccttgtcacacaagtcagcctccatctgcgcagctctgtggatgcgctgctggagggcaacaggtatgtcactggctggttcagcccctaccaccgccagcggaagctcatccacccggtcatggttcagcacatccagcccgcagcgctcagcctcctggcacagtggagcaccctcgtgcaggagctggaggctgccctgcagctggctttctacccggatgccgtggaggagtggctggaggaaaacgtgcaccccagcctgcagcggctgcaagctctgctgcaggacctcagcgaggtgtctgcccccccgctgccacccaccagccctggcagggacgttgctcaggacccctgaggggagagct

SEQ ID NO: 140645 - DNA, 582 bp, Homo sapiens
  Payload ID: 7582
  Gene Symbol: HEXDC
  Gene Name: hexosaminidase (glycosyl hydrolase family 20, catalytic domain) containing
  ENST ID: ENST00000578632
  CDS Start-End: 348-582
atgtccggcagttcatcccaactgtcagctggggctccttagttctcctgcatgtgtgtcatccaggaggcctagcatgtgcctgtagtcccagctccttggaaggctgaggctggaggatcacttgagcccaggagttgggtgctgcagcgagccatgatcatgccagcacgctccagcctgggcaacagagtgagaccccatctgttaaaaaaaagagagaggccgggcacagtggctcacacctgtaatcccagcattttggaaggccgaggggcagattacctgagatttttcctctgttccgtgcgctaggtgcaaacggcctcctcattgagtatgaagacatgtttccctacgagggccctctgaggctgctgagggccaagtacgcctacagcccctctgaaatcaaagagatcttgcatctggctggactcaatgagctggaggtgattcccttggtgcagacatttggacacatggagtttgtgctgaagcacacggccttcgcccacctgcgggaggtgggctccttcccctgcaccctgaacccccacgaggcagagtccctggcgctgg

SEQ ID NO: 140646 - DNA, 553 bp, Homo sapiens
  Payload ID: 7582
  Gene Symbol: HEXDC
  Gene Name: hexosaminidase (glycosyl hydrolase family 20, catalytic domain) containing
  ENST ID: ENST00000581482
  CDS Start-End: 80-220
cggacctcgcgggaccgcggcggcgcaggaagaagtccccaaggagacttcgccataggagttcacaggaaatattgaaatgtcaggttccactccatttcagatgagattagttcatttagaccttaaaggagctccaccaaaggtctcgtacctctcagaggtgcaaacggcctcctcattgagtatgaagacatgtttccctacgagggccctctgaggctgctgagggccaagtacgcctacagcccctctgaaatcaaagagatcttgcatctggctggactcaatgagctggaggtgattcccttggtgcagacatttggacacatggagtttgtgctgaagcacacggccttcgcccacctgcgggaggtgggctccttcccctgcaccctgaacccccacgaggcagagtccctggcgctggtgggcgccatgattgaccaggtcctggagctacacccaggcgcccagcggctgcacatcgggtgtgatgaggtctattacctcggagagggggaggcctcgcgccggtggctacagcaagagc

SEQ ID NO: 140647 - DNA, 1824 bp, Homo sapiens
  Payload ID: 7582
  Gene Symbol: HEXDC
  Gene Name: hexosaminidase (glycosyl hydrolase family 20, catalytic domain) containing
  ENST ID: ENST00000582429
  CDS Start-End: 1-1085
ggctgcacatcgggtgtgatgaggtctattacctcggagagggggaggcctcgcgccggtggctacagcaagagcagaacagcacggggaagttgtgcctgtcacacatgcgggcggtggccagcggcgtgaaggcccggcgccccagcgtgacacccctggtgtgggacgacatgctccgagacctgcctgaggaccagctcgcagcgtccggggtgccgcagctggtggagccggtgctctgggactacacggccgacctggatgtgcacggcaaggtcctcctcatgcagaagtaccggcggtgcggctttccgcagctgtgggcagccagtgccttcaagggtgccacggggcccagccaggccgtgccccctgttgagcaccacctcaggaaccacgtgcagtggctgcaggtggcgggcagcgggcccacggactcactgcagggcatcatcctgaccggctggcagaggtacgaccactactctgtgctgtgcgagctgctgcccgcaggagtcccgtccctggccgcctgcctgcagttgcttctacgcggtatgtctggtctggccaccccaagccccaccggcccctccccgaaagacccggagggcaggaggccaagcacccagtgctccaaccaccctgctggactgtggtggtcctcacagtcggaggatggtctcaccgccccagctcagccacccacctgccctgaagtccacccaggctgggcctgtgtctgggtctccaggcctaagcccaaagcaggctggagagtgacgcgggaggcacccctcagacacagtgaatccgcagaaatgcacgcaggtcggaggtggggaacggctccacctttgctgcacacacgtcctgcccacctggccgagcaggtgtggggctcaggcgcccggccctggaaggccccgcaccctggacccagcactcacacttccaggtctcctgagggagcagcgggacccatgggcaggggcaggcaccggggaaccccttggggtcggcagggggcttggccagaggagctgtgtgtgtggaaactcgcaggccacacgggaaattagcgactgcgtggtgctgatgcagaaagaaaaatggccgagacgcgcggagagcgggacccgcaggcgcggcggcccagggacggggacgcggccggaggatttgatgaagatgttaaagcgaaagtggagaaccttctcgggatttccagcctggaaaaaacggaccctgttagggagggggccggctccttccctggcagcaacatccttgcccttgtcacacaagtcagcctccatctgcgcagctctgtggatgcgctgctggagggcaacaggtatgtcactggctggttcagcccctaccaccgccagcggaagctcatccacccggtcatggttcagcacatccagcccgcagcgctcagcctcctggcacagtggagcaccctcgtgcaggagctggaggctgccctgcagctggctttctacccggatgccgtggaggagtggctggaggaaaacgtgcaccccagcctgcagcggctgcaagctctgctgcaggacctcagcgaggtgtctgcccccccgctgccacccaccagccctggcagggacgttgctcaggacccctgaggggagagctcatgccagggggctcctgctggaggctgggggggctctgcactgccaaatggcctgggcaatacgggcccacgtgggcgtcgtgccctctggcccagcagtgtcttgcccacactcagttcctgagggccctgggcagcccctgggggagagacta

SEQ ID NO: 140648 - DNA, 686 bp, Homo sapiens
  Payload ID: 7582
  Gene Symbol: HEXDC
  Gene Name: hexosaminidase (glycosyl hydrolase family 20, catalytic domain) containing
  ENST ID: ENST00000583354
  CDS Start-End: 1-241
gggaacggctccacctttgctgcacacacgtcctgcccacctggccgagcaggtgtggggctcaggcgcccggccctggaaggccccgcaccctggacccagcactcacacttccaggtctcctgagggagcagcgggacccatgggcaggggcaggcaccggggaaccccttggggtcggcagggggcttggccagaggagctgtgtgtgtggaaactcgcaggccacacgggaaattagcgactgcgtggtgctgatgcagaaagaaaaatggccgagacgcgcggagagcgggacccgcaggcgcggcggcccagggacggggacgcggccgtgtcccttgcccacggccccatccgccacccgtgactggggcacttccctcctgccctctggccgtcagcctcttgcagcaagcatttccatgaacaccaagtcggagattcgtccacgctggtgcctgcaggcctcatgggaggatttgatgaagatgttaaagcgaaagtggagaaccttctcgggatttccagcctggaaaaaacggaccctgttagggagggggccggctccttccctggcagcaacatccttgcccttgtcacacaagtcagcctccatctgcgcagctctgtggatgcgctgctggagggcaacaggtatgtcactggctggttcagcccctacc

SEQ ID NO: 140649 - DNA, 5252 bp, Homo sapiens
  Payload ID: 7583
  Gene Symbol: HEXA
  Gene Name: hexosaminidase A (alpha polypeptide)
  Uniprot ID: P06865
  ENST ID: ENST00000268097
  CDS Start-End: 505-2094
atttcacatcacaacgacttgtggttttaatcctccgtttttctgcttctgaagttacttcagcctggcaagtcctttacctccccgtaggcctggcgagctgcatcacaacattcaagattcaccctagagccatctgggaaactttcttctccaggtcgccctgcgtcctcgcctccccaccccgttcttctcgagtcgggtgagctgtctagttccatcacggccggcacggccgcaggggtggccggttatttactgctctactgggcccgtgaacagtctggcgagccgagcagttgccgacgcccggcacaatccgctgcacgtagcaggagcctcaggtccaggccggaagtgaaagggcagggtgtgggtcctcctggggtcgcaggcgcagagccgcctctggtcacgtgattcgccgataagtcacgggggcgccgctcacctgaccagggtctcacgtggccagccccctccgagaggggagaccagcgggccatgacaagctccaggctttggttttcgctgctgctggcggcagcgttcgcaggacgggcgacggccctctggccctggcctcagaacttccaaacctccgaccagcgctacgtcctttacccgaacaactttcaattccagtacgatgtcagctcggccgcgcagcccggctgctcagtcctcgacgaggccttccagcgctatcgtgacctgcttttcggttccgggtcttggccccgtccttacctcacagggaaacggcatacactggagaagaatgtgttggttgtctctgtagtcacacctggatgtaaccagcttcctactttggagtcagtggagaattataccctgaccataaatgatgaccagtgtttactcctctctgagactgtctggggagctctccgaggtctggagacttttagccagcttgtttggaaatctgctgagggcacattctttatcaacaagactgagattgaggactttccccgctttcctcaccggggcttgctgttggatacatctcgccattacctgccactctctagcatcctggacactctggatgtcatggcgtacaataaattgaacgtgttccactggcatctggtagatgatccttccttcccatatgagagcttcacttttccagagctcatgagaaaggggtcctacaaccctgtcacccacatctacacagcacaggatgtgaaggaggtcattgaatacgcacggctccggggtatccgtgtgcttgcagagtttgacactcctggccacactttgtcctggggaccaggtatccctggattactgactccttgctactctgggtctgagccctctggcacctttggaccagtgaatcccagtctcaataatacctatgagttcatgagcacattcttcttagaagtcagctctgtcttcccagatttttatcttcatcttggaggagatgaggttgatttcacctgctggaagtccaacccagagatccaggactttatgaggaagaaaggcttcggtgaggacttcaagcagctggagtccttctacatccagacgctgctggacatcgtctcttcttatggcaagggctatgtggtgtggcaggaggtgtttgataataaagtaaagattcagccagacacaatcatacaggtgtggcgagaggatattccagtgaactatatgaaggagctggaactggtcaccaaggccggcttccgggcccttctctctgccccctggtacctgaaccgtatatcctatggccctgactggaaggatttctacatagtggaacccctggcatttgaaggtacccctgagcagaaggctctggtgattggtggagaggcttgtatgtggggagaatatgtggacaacacaaacctggtccccaggctctggcccagagcaggggctgttgccgaaaggctgtggagcaacaagttgacatctgacctgacatttgcctatgaacgtttgtcacacttccgctgtgaattgctgaggcgaggtgtccaggcccaacccctcaatgtaggcttctgtgagcaggagtttgaacagacctgagccccaggcaccgaggagggtgctggctgtaggtgaatggtagtggagccaggcttccactgcatcctggccaggggacggagccccttgccttcgtgccccttgcctgcgtgcccctgtgcttggagagaaaggggccggtgctggcgctcgcattcaataaagagtaatgtggcatttttctataataaacatggattacctgtgtttaaaaaaaaaagtgtgaatggcgttagggtaagggcacagccaggctggagtcagtgtctgcccctgaggtcttttaagttgagggctgggaatgaaacctatagcctttgtgctgttctgccttgcctgtgagctatgtcactcccctcccactcctgaccatattccagacacctgccctaatcctcagcctgctcacttcacttctgcattatatctccaaggcgttggtatatggaaaaagatgtaggggcttggaggtgttctggacagtggggagggctccagacccaacctggtcacagaagagcctctcccccatgcatactcatccacctccctcccctagagctattctcctttgggtttcttgctgcttcaattttatacaaccattatttaaatattattaaacacatattgttctctaggcactgtggtagtgggtttttttgttgtttttgtttttgagactgtctcaaaaactctgtcgcccaggctgacagtgcagtggcacaatcttggctcactgcagcctctgcctcctgggttcaagcgattctcgtgcatcagcctcctgagtaactggaattaataggcacgtgccaccatgtccatctaattcatatatatatattttttttttctgagacggagtctcactgtcacacaggctggagtgcagtggcacgatctcgactcactgcaagctccacctcctgggttcacgccattctcctgcctcagcctccccagtagctgggactacaggcgcccgccaccacgcccggctaattttttgtatttttagtagagatggggtttctccgtgttagccaggatggtctcgatctcctgacctcgtgatccgcccgccttggcctcccaaagtgctgggattacaggcgtgagccaccgcgcccggccgaattcatctatttttagtagagatggggtttcactatattggccaggctggtcttgaactcatgacctcagatgttcacttgtcttggcctcccaaagtgctgggattagaggcgtgagccaccgcacgcgggcctgtggtaaattgttgaatttgaaggactcagaggccctggtcaattccaaaataacgtaggcgacttccatccccctcctcccaaccattttcagcccaaagcatcttcgcagggaatggatggctgcgcggaggtgggcggtggctctggagagggtctttgcaggtgtgattttctctagaaggaaatgtctcgtcgtggacccagactgccccctcctggtttcagatgcagaagtgatactgtaagccagaggcgggggcagtaatgcatcgcagccattttaggtgaggatttccttggcggttatttgttaagttctttggctgggccctgggctggggtaacaatggacaggttccaggcatttttttcagaaagcttccagtgtagtggatacagaaacttcaggaaggcagggctgagaaggatctgagtaaaactcggtccttcaacaccatccttcagcccctgggtcatgttccttcgaggtcctggtgggaggtagacaagcctagccttgtgctgttcctgtaaggacagggtgggcattttctaccaacagaattcttggaattttcacacagcccagcctagccaagtccagggctatagcccagatacacaagttaaggtcccagcactggcacccaccacaggagcccccttacctctattacccagaagcttgtaggaggggtggtccgcagacaaggaccctgcacaggtgcgaccctgcttccctcctggtcataactttcatgttactattgcttgggataatgttaagtaaaaatagcagacactgagttttaagtctcaagtggatgaaggcagagatcgtgatacacttgagttaaagcagtagggttctgtcattttctattcctgttgtaaacattttctttaatgttattatttttaccactaaactaacgtggcctggtcacgactttcattggtaaagtgtgctgttcctcaccctccaccgttgctcctttggtccactgatcataagagcatttacctgaaggtcgtcagacctcgaatgccaacaggtcaactgcagtggcctgcagttaccacccagtctgttccaatgaacagaatcgctgttgccccaactcatctcccttcacctaggctgtaaattgaaagtcccacccctgagcggaacacaggccatcttgtgtgctgtgcaccaccagggggtggggaagtttccagactgacttcctggctccagtcatcctaggaaaagagttctccagtcgctccccacccccaccccttcccattccaggagtctattaaggaggcaaagcaggcctaacgggtatcaaagcaaaggagtgaatggagactgggagagtcttcaacctctcctctccttggtaggagctgaggctgcatgccaggtaccttcccttcgaggaatctaataaagctaggtcactggtgttttcaggtgcttctcaaaggattgccgtaggggtaggatatcaggatgtgggagcacaggtgccaccacagcactagtgatggagagtcattgcccctagacttctgggacagtgagactgtgaggaaagctgaaatgatactgggaaagggtgaaagaaaggatgtaggtggaatttatttagtattaatgtaggtacacataccttatggcaacattcctagcactctaaattctagatttgtatagtttctgtcaatatcttttgtaagcttaatcaatacagggcatgacaagtatgtgtcacatacttttttttccacgaagaaaaaaaataagtaggaattgggtgctttgtttatcaaaatttgtatttcctttataaataaactttgaaataaaggttgaaaattagtatcttt

SEQ ID NO: 140650 - DNA, 1795 bp, Homo sapiens
  Payload ID: 7583
  Gene Symbol: HEXA
  Gene Name: hexosaminidase A (alpha polypeptide)
  ENST ID: ENST00000566304
  CDS Start-End: 22-1644
gagaggggagaccagcgggccatgacaagctccaggctttggttttcgctgctgctggcggcagcgttcgcaggacgggcgacggccctctggccctggcctcagaacttccaaacctccgaccagcgctacgtcctttacccgaacaactttcaattccagtacgatgtcagctcggccgcgcagcccggctgctcagtcctcgacgaggccttccagcgctatcgtgacctgcttttcggttccgggtcttggccccgtccttacctcacaggttggccgcaccaagcttaccctgtcttcctagggaaacggcatacactggagaagaatgtgttggttgtctctgtagtcacacctggatgtaaccagcttcctactttggagtcagtggagaattataccctgaccataaatgatgaccagtgtttactcctctctgagactgtctggggagctctccgaggtctggagacttttagccagcttgtttggaaatctgctgagggcacattctttatcaacaagactgagattgaggactttccccgctttcctcaccggggcttgctgttggatacatctcgccattacctgccactctctagcatcctggacactctggatgtcatggcgtacaataaattgaacgtgttccactggcatctggtagatgatccttccttcccatatgagagcttcacttttccagagctcatgagaaaggggtcctacaaccctgtcacccacatctacacagcacaggatgtgaaggaggtcattgaatacgcacggctccggggtatccgtgtgcttgcagagtttgacactcctggccacactttgtcctggggaccaggtatccctggattactgactccttgctactctgggtctgagccctctggcacctttggaccagtgaatcccagtctcaataatacctatgagttcatgagcacattcttcttagaagtcagctctgtcttcccagatttttatcttcatcttggaggagatgaggttgatttcacctgctggaagtccaacccagagatccaggactttatgaggaagaaaggcttcggtgaggacttcaagcagctggagtccttctacatccagacgctgctggacatcgtctcttcttatggcaagggctatgtggtgtggcaggaggtgtttgataataaagtaaagattcagccagacacaatcatacaggtgtggcgagaggatattccagtgaactatatgaaggagctggaactggtcaccaaggccggcttccgggcccttctctctgccccctggtacctgaaccgtatatcctatggccctgactggaaggatttctacatagtggaacccctggcatttgaaggtacccctgagcagaaggctctggtgattggtggagaggcttgtatgtggggagaatatgtggacaacacaaacctggtccccaggctctggcccagagcaggggctgttgccgaaaggctgtggagcaacaagttgacatctgacctgacatttgcctatgaacgtttgtcacacttccgctgtgaattgctgaggcgaggtgtccaggcccaacccctcaatgtaggcttctgtgagcaggagtttgaacagacctgagccccaggcaccgaggagggtgctggctgtaggtgaatggtagtggagccaggcttccactgcatcctggccaggggacggagccccttgccttcgtgccccttgcctgcgtgcccctgtgcttggagagaaaggggccggtgctggcgct

SEQ ID NO: 140651 - DNA, 1743 bp, Homo sapiens
  Payload ID: 7583
  Gene Symbol: HEXA
  Gene Name: hexosaminidase A (alpha polypeptide)
  ENST ID: ENST00000567411
  CDS Start-End: 32-463
agccccctccgagaggggagaccagcgggccatgacaagctccaggctttggttttcgctgctgctggcggcagcgttcgcaggacgggcgacggccctctggccctggcctcagaacttccaaacctccgaccagcgctacgtcctttacccgaacaactttcaattccagtacgatgtcagctcggccgcgcagcccggctgctcagtcctcgacgaggccttccagcgctatcgtgacctgcttttcggttccgggtcttggccccgtccttacctcacagggaaacggcatacactggagaagaatgtgttggttgtctctgtagtcacacctggatgtaaccagcttcctactttggagtcagtggagaattataccctgaccataaatgatgaccagtgtttactcctctctgagactgtctggggagctctccgagttctttatcaacaagactgagattgaggactttccccgctttcctcaccggggcttgctgttggatacatctcgccattacctgccactctctagcatcctggacactctggatgtcatggcgtacaataaattgaacgtgttccactggcatctggtagatgatccttccttcccatatgagagcttcacttttccagagctcatgagaaaggggtcctacaaccctgtcacccacatctacacagcacaggatgtgaaggaggtcattgaatacgcacggctccggggtatccgtgtgcttgcagagtttgacactcctggccacactttgtcctggggaccaggtatccctggattactgactccttgctactctgggtctgagccctctggcacctttggaccagtgaatcccagtctcaataatacctatgagttcatgagcacattcttcttagaagtcagctctgtcttcccagatttttatcttcatcttggaggagatgaggttgatttcacctgctggaagtccaacccagagatccaggactttatgaggaagaaaggcttcggtgaggacttcaagcagctggagtccttctacatccagacgctgctggacatcgtctcttcttatggcaagggctatgtggtgtggcaggaggtgtttgataataaagtaaagattcagccagacacaatcatacaggtgtggcgagaggatattccagtgaactatatgaaggagctggaactggtcaccaaggccggcttccgggcccttctctctgccccctggtacctgaaccgtatatcctatggccctgactggaaggatttctacatagtggaacccctggcatttgaaggtacccctgagcagaaggctctggtgattggtggagaggcttgtatgtggggagaatatgtggacaacacaaacctggtccccaggctctggcccagagcaggggctgttgccgaaaggctgtggagcaacaagttgacatctgacctgacatttgcctatgaacgtttgtcacacttccgctgtgaattgctgaggcgaggtgtccaggcccaacccctcaatgtaggcttctgtgagcaggagtttgaacagacctgagccccaggcaccgaggagggtgctggctgtaggtgaatggtagtggagccaggcttccactgcatcctggccaggggacggagccccttgccttcgtgccccttgcctgcgtgcccctgtgcttggagagaaaggggccggtgctggcgctcgcattcaataaagagta

SEQ ID NO: 140652 - DNA, 1174 bp, Homo sapiens
  Payload ID: 7583
  Gene Symbol: HEXA
  Gene Name: hexosaminidase A (alpha polypeptide)
  ENST ID: ENST00000563762
  CDS Start-End: 1-267
atgacaagctccaggctttggttttcgctgctgctggcggcagcgttcgcaggacgggcgacggccctctggccctggcctcagaacttccaaacctccgaccagcgctacgtcctttacccgaacaactttcaattccagtacgatgtcagctcggccgcgcagcccggctgctcagtcctcgacgaggccttccagcgctatcgtgacctgcttttcggttccgggtcttggccccgtccttacctcacagcaaacatgtactgaatgactgctgtgtgtcaggcactgggaatacaaagacactgagattggtccctcctgttgaggaactcacaacctagggaaacggcatacactggagaagaatgtgttggttgtctctgtagtcacacctggatgtaaccagcttcctactttggagtcagtggagaattataccctgaccataaatgatgaccagtgtttactcctctctgagactgtctggggagctctccgaggatgtcatggcgtacaataaattgaacgtgttccactggcatctggtagatgatccttccttcccatatgagagcttcacttttccagagctcatgagaaaggggtcctacaaccctgtcacccacatctacacagcacaggatgtgaaggaggtcattgaatacgcacggctccggggtatccgtgtgcttgcagagtttgacactcctggccacactttgtcctggggaccaggaagtccaacccagagatccaggactttatgaggaagaaaggcttcggtgaggacttcaagcagctggagtccttctacatccagacgtacccctgagcagaaggctctggtgattggtggagaggcttgtatgtggggagaatatgtggacaacacaaacctggtccccaggctctggtaagggttttcgggggggaggtggagggttgggcctgagagcaggagttctcccttagagacccaatcccatctagccacctctggactagtacccttctttcaggcctgagagagagcaggccgtgcaacgagccttctgaagatttgtgtgcaatattcactctccacatgacttccgtctatatccctccagctgccctttggtatgtgggatagggattgttaaccttacttcccagagagataatgaggcct

SEQ ID NO: 140653 - DNA, 1582 bp, Homo sapiens
  Payload ID: 7583
  Gene Symbol: HEXA
  Gene Name: hexosaminidase A (alpha polypeptide)
  ENST ID: ENST00000567159
  CDS Start-End: 22-1551
gagaggggagaccagcgggccatgacaagctccaggctttggttttcgctgctgctggcggcagcgttcgcaggacgggcgacggccctctggccctggcctcagaacttccaaacctccgaccagcgctacgtcctttacccgaacaactttcaattccagtacgatgtcagctcggccgcgcagcccggctgctcagtcctcgacgaggccttccagcgctatcgtgacctgcttttcggttccgggtcttggccccgtccttacctcacagggaaacggcatacactggagaagaatgtgttggttgtctctgtagtcacacctggatgtaaccagcttcctactttggagtcagtggagaattataccctgaccataaatgatgaccagtgtttactcctctctgagactgtctggggagctctccgaggtctggagacttttagccagcttgtttggaaatctgctgagggcacattctttatcaacaagactgagattgaggactttccccgctttcctcaccggggcttgctgttggatacatctcgccattacctgccactctctagcatcctggacactctggatgtcatggcgtacaataaattgaacgtgttccactggcatctggtagatgatccttccttcccatatgagagcttcacttttccagagctcatgagaaaggggtcctacaaccctgtcacccacatctacacagcacaggatgtgaaggaggtcattgaatacgcacggctccggggtatccgtgtgcttgcagagtttgacactcctggccacactttgtcctggggaccaggtatccctggattactgactccttgctactctgggtctgagccctctggcacctttggaccagtgaatcccagtctcaataatacctatgagttcatgagcacattcttcttagaagtcagctctgtcttcccagatttttatcttcatcttggaggagatgaggttgatttcacctgctggaagtccaacccagagatccaggactttatgaggaagaaaggcttcggtgaggacttcaagcagctggagtccttctacatccagacgctgctggacatcgtctcttcttatggcaagggctatgtggtgtggcaggaggtgtttgataataaagtaaagattcagccagacacaatcatacaggtgtggcgagaggatattccagtgaactatatgaaggagctggaactggtcaccaaggccggcttccgggcccttctctctgccccctggtacctgaaccgtatatcctatggccctgactggaaggatttctacatagtggaacccctggcatttgaaggtacccctgagcagaaggctctggtgattggtggagaggcttgtatgtggggagaatatgtggacaacacaaacctggtccccaggctctggcccagagcaggggctgttgccgaaaggctgtggagcaacaagttgacatctgacctgacatttgcctatgaacgtttgtcacacttccgctgtgaattgctgaggtaagcaagctgtggggccttcgcaaggcggagca

SEQ ID NO: 140654 - DNA, 1397 bp, Homo sapiens
  Payload ID: 7583
  Gene Symbol: HEXA
  Gene Name: hexosaminidase A (alpha polypeptide)
  ENST ID: ENST00000566672
  CDS Start-End: 32-463
agccccctccgagaggggagaccagcgggccatgacaagctccaggctttggttttcgctgctgctggcggcagcgttcgcaggacgggcgacggccctctggccctggcctcagaacttccaaacctccgaccagcgctacgtcctttacccgaacaactttcaattccagtacgatgtcagctcggccgcgcagcccggctgctcagtcctcgacgaggccttccagcgctatcgtgacctgcttttcggttccgggtcttggccccgtccttacctcacagggaaacggcatacactggagaagaatgtgttggttgtctctgtagtcacacctggatgtaaccagcttcctactttggagtcagtggagaattataccctgaccataaatgatgaccagtgtttactcctctctgagactgtctggggagctctccgaggatgtcatggcgtacaataaattgaacgtgttccactggcatctggtagatgatccttccttcccatatgagagcttcacttttccagagctcatgagaaaggggtcctacaaccctgtcacccacatctacacagcacaggatgtgaaggaggtcattgaatacgcacggctccggggtatccgtgtgcttgcagagtttgacactcctggccacactttgtcctggggaccaggtatccctggattactgactccttgctactctgggtctgagccctctggcacctttggaccagtgaatcccagtctcaataatacctatgagttcatgagcacattcttcttagaagtcagctctgtcttcccagatttttatcttcatcttggaggagatgaggttgatttcacctgctggaagtccaacccagagatccaggactttatgaggaagaaaggcttcggtgaggacttcaagcagctggagtccttctacatccagacgctgctggacatcgtctcttcttatggcaagggctatgtggtgtggcaggaggtgtttgataataaagtaaagattcagccagacacaatcatacaggtgtggcgagaggatattccagtgaactatatgaaggagctggaactggtcaccaaggccggcttccgggcccttctctctgccccctggtacctgaaccgtatatcctatggccctgactggaaggatttctacatagtggaacccctggcatttgaaggtacccctgagcagaaggctctggtgattggtggagaggcttgtatgtggggagaatatgtggacaacacaaacctggtccccaggctctggtaagggttttcgggggggaggtggagggttgggcctgagagcaggagttctcccttagagacccaatcccatctagccacctctggactagtacccttcttt

SEQ ID NO: 140655 - DNA, 1351 bp, Homo sapiens
  Payload ID: 7583
  Gene Symbol: HEXA
  Gene Name: hexosaminidase A (alpha polypeptide)
  ENST ID: ENST00000569410
  CDS Start-End: 4-1125
gccatgacaagctccaggctttggttttcgctgctgctggcggcagcgttcgcaggacgggcgacggccctctggccctggcctcagaacttccaaacctccgaccagcgctacgtcctttacccgaacaactttcaattccagtacgatgtcagctcggccgcgcagcccggctgctcagtcctcgacgaggccttccagcgctatcgtgacctgcttttcggttccgggtcttggccccgtccttacctcacagggaaacggcatacactggagaagaatgtgttggttgtctctgtagtcacacctggatgtaaccagcttcctactttggagtcagtggagaattataccctgaccataaatgatgaccagtgtttactcctctctgagactgtctggggagctctccgaggtctggagacttttagccagcttgtttggaaatctgctgagggcacattctttatcaacaagactgagattgaggactttccccgctttcctcaccggggcttgctgttggatacatctcgccattacctgccactctctagcatcctggacactctggatgtcatggcgtacaataaattgaacgtgttccactggcatctggtagatgatccttccttcccatatgagagcttcacttttccagagctcatgagaaaggggtcctacaaccctgtcacccacatctacacagcacaggatgtgaaggaggtcattgaatacgcacggctccggggtatccgtgtgcttgcagagtttgacactcctggccacactttgtcctggggaccaggtatccctggattactgactccttgctactctgggtctgagccctctggcacctttggaccagtgaatcccagtctcaataatacctatgagttcatgagcacattcttcttagaagtcagctctgtcttcccagatttttatcttcatcttggaggagatgaggttgatttcacctgctggaagtccaacccagagatccaggactttatgaggaagaaaggcttcggtgaggacttcaagcagctggagtccttctacatccagacattcagccagacacaatcatacaggtgtggcgagaggatattccagtgaactatatgaaggagctggaactggtcaccaaggccggcttccgggcccttctctctgccccctggtacctgaaccgtatatcctatggccctgactggaaggatttctacatagtggaacccctggcatttgaaggtacccctgagcagaaggctctggtgattggtggagaggcttgtatgtggggagaatatgtggacaacacaaacctggtccccaggctctg

SEQ ID NO: 140656 - DNA, 1353 bp, Homo sapiens
  Payload ID: 7583
  Gene Symbol: HEXA
  Gene Name: hexosaminidase A (alpha polypeptide)
  ENST ID: ENST00000567027
  CDS Start-End: 1-955
ctttcaattccagtacgatgtcagctcggccgcgcagcccggctgctcagtcctcgacgaggccttccagcgctatcgtgacctgcttttcggttccgggtcttggccccgtccttacctcacagggaaacggcatacactggagaagaatgtgttggttgtctctgtagtcacacctggatgtaaccagcttcctactttggagtcagtggagaattataccctgaccataaatgatgaccagtgtttactcctctctgagactgtctggggagctctccgaggtctggagacttttagccagcttgtttggaaatctgctgagggcacattctttatcaacaagactgagattgaggactttccccgctttcctcaccggggcttgctgttggatacatctcgccattacctgccactctctagcatcctggacactctggatgtcatggcgtacaataaattgaacgtgttccactggcatctggtagatgatccttccttcccatatgagagcttcacttttccagagctcatgagaaaggggtcctacaaccctgtcacccacatctacacagcacaggatgtgaaggaggtcattgaatacgcacggctccggggtatccgtgtgcttgcagagtttgacactcctggccacactttgtcctggggaccaggtatccctggattactgactccttgctactctgggtctgagccctctggcacctttggaccagtgaatcccagtctcaataatacctatgagttcatgagcacattcttcttagaagtcagctctgtcttcccagatttttatcttcatcttggaggagatgaggttgatttcacctgctggaagtccaacccagagatccaggactttatgaggaagaaaggcttcggtgaggacttcaagcagctggagtccttctacatccagacgtacccctgagcagaaggctctggtgattggtggagaggcttgtatgtggggagaatatgtggacaacacaaacctggtccccaggctctggcccagagcaggggctgttgccgaaaggctgtggagcaacaagttgacatctgacctgacatttgcctatgaacgtttgtcacacttccgctgtgaattgctgaggtaagcaagctgtggggccttcgcaaggcggagcaggccagatccagggctggggaaccccttagagagaggaagacaataattaacaatagctaacacttacagaggcttatagtcagccctcatccacggattcaaccaactgcgataaaaagtattcaggaaaaaaaaaatacaacaaaaaatggtacaaataaaaaatactgtataac

SEQ ID NO: 140657 - DNA, 674 bp, Homo sapiens
  Payload ID: 7583
  Gene Symbol: HEXA
  Gene Name: hexosaminidase A (alpha polypeptide)
  ENST ID: ENST00000568260
  CDS Start-End: 1-386
ggttttcgctgctgctggcggcagcgttcgcaggacgggcgacggccctctggccctggcctcagaacttccaaacctccgaccagcgctacgtcctttacccgaacaactttcaattccagtacgatgtcagctcggccgcgcagcccggctgctcagtcctcgacgaggccttccagcgctatcgtgacctgcttttcggttccgggtcttggccccgtccttacctcacagggaaacggcatacactggagaagaatgtgttggttgtctctgtagtcacacctggatgtaaccagcttcctactttggagtcagtggagaattgcatccctgttccctttgccaggagaagacttctttcatctttctgctgtggaaactgacccatgagataccctgaccataaatgatgaccagtgtttactcctctctgagactgtctggggagctctccgagttctttatcaacaagactgagattgaggactttccccgctttcctcaccggggcttgctgttggatacatctcgccattacctgccactctctagcatcctggacactctggatgtcatggcgtacaataaattgaacgtgttccactggcatctggtagatgatccttccttcccatatgagagcttcacttttccagagctcatgagaaagg

SEQ ID NO: 140658 - DNA, 1000 bp, Homo sapiens
  Payload ID: 7583
  Gene Symbol: HEXA
  Gene Name: hexosaminidase A (alpha polypeptide)
  ENST ID: ENST00000567213
  CDS Start-End: 18-377
ggggagaccagcgggccatgacaagctccaggctttggttttcgctgctgctggcggcagcgttcgcaggacgggcgacggccctctggccctggcctcagaacttccaaacctccgaccagcgctacgtcctttacccgaacaactttcaattccagtacgatgtcagctcggccgcgcagcccggctgctcagtcctcgacgaggccttccagcgctatcgtgacctgcttttcggttccgggtcttggccccgtccttacctcacaggtctttctctgtcattcagactggagtgcagtggtgtgatcacggcttacagcaacctcgaactccaggactcaagcagtcttcccgcctcactgatgagtagctaggactacagacgcatgccaccgcacccagctaatttttttattttttgcattttgtagagatgggggtcttactgtgttgcccaggctggtcttgaacccctggcttcaagcgatcctcttgtctcggcctccccgagtgctgagattacaggtgtgagccaccatttattacctaaagcatgatacttttctagtatccctgtatagtactgagtccaagaagctaaacttgatcaaggtgtatgtgggtagcctgggcctggtttatgaaaaatttgagttttatttctgtgagctgtaggtgttcccctgctttggatattctgtttgaacacagtatacattggaggactcaggatgtggaacatgattcattcaggagtcagctgagaaagtgtttattaaccccttaactctgtgccttcagactaattgcctaatttccaagctgttgctgctacttccttttttttttttttttttttaactctgcctgccttccagacatttccgaggataacaagaaaatagttatgaatgttttttcagtctttaagggagggtataatagtgggaagaacttggtgattttaaaaataaaacaataaaaattaaaagtccaa

SEQ ID NO: 140659 - DNA, 1901 bp, Homo sapiens
  Payload ID: 7584
  Gene Symbol: HEXB
  Gene Name: hexosaminidase B (beta polypeptide)
  Uniprot ID: P07686
  ENST ID: ENST00000261416
  CDS Start-End: 118-1788
gcagtcatctgactcggtgactcacccgcggccgcgcttcctctgatccgggccgggcgggaagtcgggtcccgaggctccggctcggcagaccgggcggaaagcagccgagcggccatggagctgtgcgggctggggctgccccggccgcccatgctgctggcgctgctgttggcgacactgctggcggcgatgttggcgctgctgactcaggtggcgctggtggtgcaggtggcggaggcggctcgggccccgagcgtctcggccaagccggggccggcgctgtggcccctgccgctcttggtgaagatgaccccgaacctgctgcatctcgccccggagaacttctacatcagccacagccccaattccacggcgggcccctcctgcaccctgctggaggaagcgtttcgacgatatcatggctatatttttggtttctacaagtggcatcatgaacctgctgaattccaggctaaaacccaggttcagcaacttcttgtctcaatcacccttcagtcagagtgtgatgctttccccaacatatcttcagatgagtcttatactttacttgtgaaagaaccagtggctgtccttaaggccaacagagtttggggagcattacgaggtttagagacctttagccagttagtttatcaagattcttatggaactttcaccatcaatgaatccaccattattgattctccaaggttttctcacagaggaattttgattgatacatccagacattatctgccagttaagattattcttaaaactctggatgccatggcttttaataagtttaatgttcttcactggcacatagttgatgaccagtctttcccatatcagagcatcacttttcctgagttaagcaataaaggaagctattctttgtctcatgtttatacaccaaatgatgtccgtatggtgattgaatatgccagattacgaggaattcgagtcctgccagaatttgatacccctgggcatacactatcttggggaaaaggtcagaaagacctcctgactccatgttacagtagacaaaacaagttggactcttttggacctataaaccctactctgaatacaacatacagcttccttactacatttttcaaagaaattagtgaggtgtttccagatcaattcattcatttgggaggagatgaagtggaatttaaatgttgggaatcaaatccaaaaattcaagatttcatgaggcaaaaaggctttggcacagattttaagaaactagaatctttctacattcaaaaggttttggatattattgcaaccataaacaagggatccattgtctggcaggaggtttttgatgataaagcaaagcttgcgccgggcacaatagttgaagtatggaaagacagcgcatatcctgaggaactcagtagagtcacagcatctggcttccctgtaatcctttctgctccttggtacttagatttgattagctatggacaagattggaggaaatactataaagtggaacctcttgattttggcggtactcagaaacagaaacaacttttcattggtggagaagcttgtctatggggagaatatgtggatgcaactaacctcactccaagattatggcctcgggcaagtgctgttggtgagagactctggagttccaaagatgtcagagatatggatgacgcctatgacagactgacaaggcaccgctgcaggatggtcgaacgtggaatagctgcacaacctctttatgctggatattgtaaccatgagaacatgtaaaaaatggaggggaaaaaggccacagcaatctgtactacaatcaactttattttgaaatcatgtaaaataagatattagactgttttttgaataaaatatttttattgattgaa

SEQ ID NO: 140660 - DNA, 720 bp, Homo sapiens
  Payload ID: 7584
  Gene Symbol: HEXB
  Gene Name: hexosaminidase B (beta polypeptide)
  ENST ID: ENST00000513336
  CDS Start-End: 1-607
gaatacaacatacagcttccttactacatttttcaaagaaattagtgaggtgtttccagatcaattcattcatttgggaggagatgaagtggaatttaaatgttgggttttggatattattgcaaccataaacaagggatccattgtctggcaggaggtttttgatgataaagcaaagcttgcgccgggcacaatagttgaagtatggaaagacagcgcatatcctgaggaactcagtagagtcacagcatctggcttccctgtaatcctttctgctccttggtacttagatttgattagctatggacaagattggaggaaatactataaagtggaacctcttgattttggcggtactcagaaacagaaacaacttttcattggtggagaagcttgtctatggggagaatatgtggatgcaactaacctcactccaagattatggcctcgggcaagtgctgttggtgagagactctggagttccaaagatgtcagagatatggatgacgcctatgacagactgacaaggcaccgctgcaggatggtcgaacgtggaatagctgcacaacctctttatgctggatattgtaaccatgagaacatgtaaaaaatggaggggaaaaaggccacagcaatctgtactacaatcaactttattttgaaatcatgtaaaataagatattagactgttttttgaataaaatatttttattgattgaa

SEQ ID NO: 140661 - DNA, 604 bp, Homo sapiens
  Payload ID: 7584
  Gene Symbol: HEXB
  Gene Name: hexosaminidase B (beta polypeptide)
  ENST ID: ENST00000505859
  CDS Start-End: 1-158
tggatgcaactaacctcactccaagattatggcctcgggcaagtgctgttggtgagagactctggagttccaaagatgtcagagatatggatgacgcctatgacagactgacaaggcaccgctgcaggatggtcgaaggcctggcatctttcttgtgagacaagcttaaggacacaaaagaaacacaactttgtgataccactcttctgaaggctacttatagtaataacttcatagatgaacagcatgattcaggttactgattgtctattcattggcatataatatcccctgaattaagaagaatatgtacttttcagttacaaagtacctaccataatttctgctaagggaacaaatccaataacaactttgttgtcctggcgagtctgaatttcctgaatgtttcctcttctttgtgccagatctgccaggacagggctgagataatctctagctactgtaacctcaagattcatcagaggctccaaaacttgcttatcagctttcttcagagcctaaagaaattaaagaatgttaacttatctttcataaataaaaacttaaaataaatacagcctagagctcatacaaaaagacataa

SEQ ID NO: 140662 - DNA, 806 bp, Homo sapiens
  Payload ID: 7584
  Gene Symbol: HEXB
  Gene Name: hexosaminidase B (beta polypeptide)
  ENST ID: ENST00000509579
  CDS Start-End: 586-693
tgccaagaggtagaaattaaaggtaggcatggtggtcacagtccactaaaaaactagtattccaacttctattccctggcacactactaaataggcaaccagggatttaaaaaatggtttctggtgtccaggtaagtttgcataaaaccaaaataaaactgtttaatactggcccactacattaatctatggtgctaacacgtgctgtgaaccgtgggtcagggctggggataaagtttgcaaccatttttttggggggtgggggaagaggaggggccatcttttttgtgccacaaccattagcatctcccaaggtcctgctaaccacgggcaagaaatgttgccctaggataaagatggaggaaacaaatcttgatgaaatattgcctctgtgtataagctttgaacttctgaacttaattcaatgattttaatttaggtactcagaaacagaaacaacttttcattggtggagaagcttgtctatggggagaatatgtggatgcaactaacctcactccaagattatggcctcgggcaagtgctgttggtgagagactctggagttccaaagatgtcagagatatggatgacgcctatgacagactgacaaggcaccgctgcaggatggtcgaacgtggaatagctgcacaacctctttatgctggatattgtaaccatgagaacatgtaaaaaatggaggggaaaaaggccacagcaatctgtactacaatcaactttattttgaaatcatgtaaaataagatattagactgttttttgaataaaatatttttattgattgaa

SEQ ID NO: 140663 - DNA, 2021 bp, Homo sapiens
  Payload ID: 7584
  Gene Symbol: HEXB
  Gene Name: hexosaminidase B (beta polypeptide)
  ENST ID: ENST00000511181
  CDS Start-End: 913-1908
gtatccttagctcggctcctcgcttccccagcggctcgccccagacattgcaccgcggaggggaggccggtcgacctctccggcgatgcccggcttctgcctgctgtgggagggcagcggcgggcaccgtgatctccgcaccgagaagagctccccttgccctctagtcgaagctcccgagtgctcggagcacgctcacccctcgcgaacacacccctgcagccgaagcagcccctgaagcccgcagcgcctgcaacaggtccggggcagtgggggaaacttacagcagtggcgactggccgcaacgcacaactgagttctagcgacggtcacgggcaaggaggcgacgaaccggtcgtctcagcccagggaagcggtggcgaatgccccggagaaaggagggccagccggggagaggactgcgccccgaacgatggctcgcggaccggctaccgatggcgttcgcctccgtctgtcgtccccacgccgcggacccggtgtccaggacccgcagagcgtctccggagcgcgtcacgatatcatggctatatttttggtttctacaagtggcatcatgaacctgctgaattccaggctaaaacccaggttcagcaacttcttgtctcaatcacccttcagtcagagtgtgatgctttccccaacatatcttcagatgagtcttatactttacttgtgaaagaaccagtggctgtccttaaggccaacagagtttggggagcattacgaggtttagagacctttagccagttagtttatcaagattcttatggaactttcaccatcaatgaatccaccattattgattctccaaggttttctcacagaggaattttgattgatacatccagacattatctgccagttaagattattcttaaaactctggatgccatggcttttaataagtttaatgttcttcactggcacatagttgatgaccagtctttcccatatcagagcatcacttttcctgagttaagcaataaaggaagctattctttgtctcatgtttatacaccaaatgatgtccgtatggtgattgaatatgccagattacgaggaattcgagtcctgccagaatttgatacccctgggcatacactatcttggggaaaaggtcagaaagacctcctgactccatgttacagtagacaaaacaagttggactcttttggacctataaaccctactctgaatacaacatacagcttccttactacatttttcaaagaaattagtgaggtgtttccagatcaattcattcatttgggaggagatgaagtggaatttaaatgttgggaatcaaatccaaaaattcaagatttcatgaggcaaaaaggctttggcacagattttaagaaactagaatctttctacattcaaaaggttttggatattattgcaaccataaacaagggatccattgtctggcaggaggtttttgatgataaagcaaagcttgcgccgggcacaatagttgaagtatggaaagacagcgcatatcctgaggaactcagtagagtcacagcatctggcttccctgtaatcctttctgctccttggtacttagatttgattagctatggacaagattggaggaaatactataaagtggaacctcttgattttggcggtactcagaaacagaaacaacttttcattggtggagaagcttgtctatggggagaatatgtggatgcaactaacctcactccaagattatggcctcgggcaagtgctgttggtgagagactctggagttccaaagatgtcagagatatggatgacgcctatgacagactgacaaggcaccgctgcaggatggtcgaacgtggaatagctgcacaacctctttatgctggatattgtaaccatgagaacatgtaaaaaatggaggggaaaaaggccacagcaatctgtactacaatcaactttattttgaaatcatgtaaaataagatattagactgttttttgaataaaatatttttattgattgaa

SEQ ID NO: 140664 - DNA, 756 bp, Homo sapiens
  Payload ID: 7584
  Gene Symbol: HEXB
  Gene Name: hexosaminidase B (beta polypeptide)
  ENST ID: ENST00000503312
  CDS Start-End: 1-511
ctttggcacagattttaagaaactagaatctttctacattcaaaaggttttggatattattgcaaccataaacaagggatccattgtctggcaggaggtttttgatgataaagcaaagcttgcgccgggcacaatagttgaagtatggaaagacagcgcatatcctgaggaactcagtagagtcacagcatctggcttccctgtaatcctttctgctccttggtacttagatttgattagctatggacaagattggaggaaatactataaagtggaacctcttgattttggcggtactcagaaacagaaacaacttttcattggtggagaagcttgtctatggggagaatatgtggatgcaactaacctcactccaagattatggcctcgggcaagtgctgttggtgagagactctggagttccaaagatgtcagagatatggatgacgcctatgacagactgacaaggcaccgctgcaggatggtcgaaggcctggcatctttcttgtgagacaagcttaaggacacaaaagaaacacaactttgtgataccactcttctgaaggctacttatagtaataacttcatagatgaacagcatgattcagatctgccaggacagggctgagataatctctagctactgtaacctcaagattcatcagaggctccaaaacttgcttatcagctttcttcagagcctaaagaaattaaagaatgttaacttatctttcataaataaaaacttaaaataaa

SEQ ID NO: 140665 - DNA, 9146 bp, Homo sapiens
  Payload ID: 7585
  Gene Symbol: H6PD
  Gene Name: hexose-6-phosphate dehydrogenase (glucose 1-dehydrogenase)
  Uniprot ID: O95479
  ENST ID: ENST00000377403
  CDS Start-End: 303-2678
gtcttgctgagcgcaaggcggtggaggcctgaggcctgaggcctggggcggggtggcggccgggctggccttggcctcgcgccttcccctgcggccgccgcgggctccgcgggcggtatcggagtgtcgtgcggcgcgtggccgcgtgacacgcgcacttgtcggagtgacgggccctgcggaagaggaggtgcggcccagggcgcaggggagccctcgggagcgggcccggccctcagcgccgccccggccgtgtcccggaggagcggcctgcgccgccgcgcgagaggaagcacccaggcatgtggaatatgctcatagtggcgatgtgcttggcccttctgggctgcctgcaagcccaggagctccagggacatgtctccataatcctgctgggagcaactggggacctggctaagaagtacttatggcagggactgttccagctgtacctggatgaagcggggaggggtcacagttttagcttccatggagctgctctgacagcccccaagcagggtcaagagctcatggccaaggccctggaatccctctcctgccccaaggacatggcacccagtcactgtgcagagcacaaggatcagttcctgcagctgagccagtaccgccaactgaagacggccgaggactatcaggccctgaacaaggacatcgaggcacagctccagcacgcaggcctccgggaggctggcaggatcttctacttctcagtgccacccttcgcctatgaagacattgcccgcaacatcaacagtagctgccggccaggcccgggcgcctggctgcgggttgtccttgagaaaccctttggccatgaccacttctcagcccagcagctggccacagaactcgggacctttttccaggaggaggagatgtaccgggtggaccattacttaggcaagcaggctgtggcgcagatcctgcctttccgagaccagaaccgcaaggctttggacggcctctggaaccggcaccatgtggagcgggtggagatcatcatgaaagagaccgtggatgctgaaggccgcaccagcttctatgaggagtacggtgtcattcgcgacgtcctccagaaccatctgacggaggtcctcaccctcgtggccatggagctgccccacaatgtcagcagtgcggaggctgtgctgcggcacaagcttcaggtcttccaggcgctgcggggcctgcagaggggcagtgccgtcgtgggccagtaccagtcttacagtgagcaggtgcgcagagagctgcagaagccagacagcttccacagcctgacgccgaccttcgcagccgtcctagtgcacattgacaaccttcgctgggagggcgtgcctttcatcctgatgtctggcaaagccttggacgagagagtgggctacgctcggatcttgttcaagaaccaggcctgctgtgtgcagagcgaaaagcactgggccgcggcgcagagccagtgcctgccccggcagctcgtcttccacatcggccatggcgacctgggcagccctgccgtgctggtcagcaggaacctgttcaggccctccctgccctccagctggaaggaaatggagggaccacctgggctccgccttttcggcagccctctgtccgattactacgcctacagccctgtgcgggagcgggacgcccactccgtcctcttatcccatatcttccatggccggaagaatttcttcatcaccacagagaacttgctggcctcctggaacttctggacccctctgctggagagcctggcccataaggccccacgcctctaccctggaggagctgagaatggccgtctgttggactttgagttcagtagcggccggttgttcttttcccagcagcagccggagcagctggtgccagggccagggccggccccaatgcccagtgacttccaggtcctcagggccaagtaccgagagagcccgctggtctccgcctggtccgaggagctgatctctaagctggctaatgacatcgaggccaccgctgtgcgagccgtgcggcgctttggccagttccacctggcactgtcggggggctcgagccccgtggccctgttccagcagctggccacggcgcactatggcttcccctgggcccacacgcacctgtggctggttgacgagcgctgcgtcccactctcagacccggagtccaacttccagggcctgcaggcccacctgctgcagcacgtccggatcccctactacaacatccaccccatgcctgtgcacctgcagcagcggctctgcgccgaggaggaccagggcgcccagatctatgccagggagatctcagccctggtggccaacagcagcttcgacctggtgctgctgggcatgggtgccgacgggcacacagcctccctcttcccacagtcacccactggcctggatggcgagcagctggtcgtgctgaccacgagcccctcccagccacaccgccgcatgagccttagcctgcctctcatcaaccgcgccaagaaggtggcagtcctggtcatgggcaggatgaagcgtgagatcaccacgctggtgagccgggtgggccatgagcccaagaagtggcccatctcgggtgtcctgccgcactccggccagctggtgtggtacatggactacgacgccttcctgggatgagggcgcctgtgccccttgcccgcttcgctcctgtgctttccttcgcccgtgtcttccctcccttctcggccccgccacctgcccagcgtgccctggctctccagaaccttctatcccacagtcaggccccagagagggcaggacaagccttgtcccgatgcctttgaccggcagctctgtgtattggtggatagatgcagaaacaaggaagaaatggagtctgctcctgagaagcttcaaattcaggccaggagagaagtcttaagaaaagacctccagcagttacacattcatatcaaccagcacaacacgggatggcgcccaaactccggcgttcacaagaggagacgtgacgtggtgggctgaggttaatcagggaaggtttcctgggggaggtgatccttgaactggctcccggggaacattcagagcatgattggtagacagaagggtgcagaggcgcccaggggagtacattgccccgtgcaaagcaggggcattggggactgtcttgagaccctgagggggtcaagcccctccttccccagctgcccctccttctagaacctctgcacatctagcctctggccctcctcttcactgcctccacctgctcccgcttgccatccctgtctcctccatcctggctgtgcagtaggaattccaggctcctccctgtgtctttgctgttcttcagactccatttatagagaatgagggctgataacaggaatacagtggcaaagactagactgtggaaagggttccagaaatcttttttcttttttaattaaaaaaaatatttgcagagatgagctcttgctatgttgcccaggctggtctcaaactcctgggctcaagcgatcctcccatctcagcctcccagagtgctgggattacaggtgtgagctactgcgcccagccccagaaatctcagtgctgtttggagctccatttctcatttgatgacttgctctgcgtggggaggtggggtctcattcccccaacttcctcagggaggacccctgccctccgctgctcctctgtcctgctagccttcctccaggaagcacactgggtgcagataatcaggacattccagagatccccaatttaagagggtcatttccatctcaggggactcccggatgggtgtttccgctctcaatagcccctcttgttttaccaggaaagatccagttaaatcacccactgaggtgacagctcattagcggggagagagatggagcatcgagtgacactgggccatccaggcggctctgctcccaccagacaggagctaggcctcactggcaggggggctgcccacagccttttcaggggctcgcttggcgggtgacggggccgcagccaggccttctctccctgccccttggtgaccccgtggcttcctgtctgctggcctctcctgctacttatcacttcaccacgaactctctgcctgagactggggaagtaagcgggtatcttctcagtgagcataggttggggactgtgatcttgagaagccatgggccagcaatacctgcttttctgaagcccccaaggagggctctgacattctttttaaaaacaccacaaagcaaaattcccaggacatgtgtagttttgtttgttcagtatcccacaacttaaggctgggagatggaactcttggttaaggtcgatttttctgtctggcttctccgcaccttccacttgctctctggatcaggcagatataaactttctagcgcattttgagagagggctttcttgggtgagggagcatggcaaagtcggtttctctctggactgtttacacttcaaggcggtggatttagaggaatcctggctttcattttcaatgccagtctgagacatgttcccaagccggggctcttgttcacaccacttactctggccaccaacaacaacccaggccagacagagcatctcttttttttttttttgagacagagtctctgtcgcccaggctggagcccagtggcgagatcttggctcactacaacctccacctcccgggttcaggcaattctcgtgcctaagcctcccgagtagctgcgactacaggcgccggccagcatgcctgtctaatttttgtattttagtagagacagggtttcaccatgttgcccaggctggtctcgaactcctgagctcaggcagtctacccacctcagcctcccaaagtgctgggattacaggcgtgagccaccgcgcccagccagaacatctgtttttacacccagagagcgcccctcgttaggacagaaccacggtgcccagagccaggaagccgccctcctggcgcccagcatctgagcttctacacgtgatgggcgggctcaggagaggacagggagtcgtggtggaagttccacagctggccgcgtgggggggcccttgcaccgcactgccgcctcctgactgcccctatccccgcagcccctgtgccggatttcatttccctcctctctcccagggtacctggccccagcactctcccatctgttcttcaggaaccgactcctctccagttgcaacaccagggagaaaggggcctccacatgcccaagtacccctgcaggatgaagggcaggccggcccttgatgtgccatttctgaataatagtcactgccgccgagtctaggatgtcctgttctaactcagccctgcctcggatgcaccaccgatctgtgcagagtgggtgtgggagtgtgggtgagggtcgaaatgccaaaggtctactttccagaatcaagtgccttctgcaaatcatgttggaaaagtccaaacctggagatgtccctgtgcctccgcccctacccaccccttttccttcagctgtgttaggaaggagaagttttcagaaccctctaggctggtggctttcaaacttcagaccatgatctgcagcaagaaacgtgccttccatcataaatcagtccatttgtttacaactgtgttccaagcaggtttcataaagaaattcttaaccttagaacctcggatatcctctatgttttagttttcatttttttaaaatgcttcttaaaattcactaaattgggctaggtgtggctcatgcctgtaatcccagcactatgggaggctgaggtgagaggatcacttgagcccagaaggttgaaaccagcctgggcaacatagtgagaccccatctctacaaaaagttttaaaaccaggtatggtggtgccctcctgtggtcccagctactcgggagtctgaggtgggaggatcacctgagcccaggagactgaggctgcagtaaggtgtgattgcactattgctctctagcctggaaaacagagtgagaccctatctcaaaaaaaaaaaaaaaaaaaaaggaaagagtgatgacaacagcccagggagcagccccgctcagaacccaagtcccaagttccagcactgtgttcccaggcaggctgtttgcctcttcctggtctggaagcccttgggtcctatggtggcggcagctcccacagtccaggttccctggtggggaccaatgattccatccgcatggaagcccacgtgtgcacttaggggcccataaatggcagaagggcccctcctttgggagaccttgtcagtcagcatctctagggcaaccgtgattgccatttgtagaggggaaggaatcaagggactttaagctagatcaaaatctggggacaaattctcctgctaactgcaagttaaaataggcccttcttactgaatttccctgtttgtttctctgcagacaatgctttagccctactcttgggcccccaagttagcagagtaatcaaagcttcctaccgtttggcctactattccagactagtccctcgaggggttcccttccaaaatatgcagggctcaggctcccaattccgggcctgtctgctttgcttgtgtttctcctgtccctgttctcccggagggcccaggtggaactcacgacagggagggagacgcttcccaaaaacctgcagggctatttcccagaatttggttttcaagtacaaaactttttgtcctgtaagatatatgcagcctcacagaagcagcctctgcctccactttaccagctacgtttttatcttaagcacatggggctcccttagaacttactccactgatttaaaaaaaaaaaactgcctggcagcatctcagtgtcagagtgagcacggcacaggaaaggcccgtggtgacgagggtgaggtggccacagtgaccggacgacaaatgagactctgcaaatgagactccagagggtgaagatctgcggtctccagacatcataggccatgtgacccactaggggccgcttacccctggccgtccgctggctgaactgaacgcattccctctctccgcaactctcccgtgaggctgcacccgtgtgggtagcactggaagcggcactgtttgcattgtacataggaaggaaggaagttcttccagcctcaccagcacctggcagcgagtcagagcctgtgagggcatccgaagcagtgatgcagtgtcaacctcccagctggtgccactctgccctcgggggctccaagcattgtaactcagtcatgggagctgcctctttggaagtgcagatttattcctgtaataatcctgcctgcttttacctctcgtccactgaccagcaagtgtgagtcccggtgtcagtcggcacagtccagtgtccatctgcatttgctcatgcagagggggtgagttgggcactccctgttgttggttttccttttgcagcacactgggcagtctccctataaaacaaaaaccccaccttctgtgccttctgctttagagcagagctccccctcccatttcctcagtcttccctgcaaaatctgtccaccggggaaggcagcaggaaccctgggcagcgggtgttctgggaaggctagtgacagcagatgtcatccaggaacagccacacacggttctccaggccgccgtcagcagctcaaggtggggtatgagtgagaagctgaggatctcgcagcttgttgctgagcaaggtgcaaccgggctcatgctgtcatcagcacaagacgggatggcaagggctttcagacgcatttccaagagtccagcaagccagggggaagatgatccctttgccgaagtgtaccctctagccaacttttgggagcgcttctgtttgcaaagcgctggggatgtgcctgtctctgtgtgacccacgaacgggaagggagagcactggagtaatgacacttctgctgctgctttgattctcaaggctgatctttaaaaccctcgccttgctgacaggtgctttaaaggcagtctgcatcttttcttcccttggtgtgggagaggtaaacactttgatttgctgaaagctgtatggagtatatttgaacagctagtagttagctttgaaagtggaagtgtgaacagacactacttgtgtcgctttgggtccttcactttacccccacagaagtctagaggcgtctgttataaagcgttacggggcgcctgcatgcaggaggaaggacctgtattagctggaaatcatcaggaacccagcttgcctccatctctctgagatgtgctgggtacagcctgcccctcctagttctgtccaccgggaagagccggctggcggcagatccccaggggcagagcccctgctggatcctgggagctcatctttacctgtgccggagtgggaactgtgattccagccgggcaggtcagagtggagcagtgctaagaggctgttgcaggagaactagacgggcggggcctgctgcatctggatcatgtttctgtgctctgccccgcgctagggactcagggtctgggcttctgccaggtgaggagcagagagactgttcccttgggtggagaggtgtgggcatgagagccacccattgccaagcagcaagaatgttcgtgcttttttccagagaggggaaccccactggtttttgtggaaacaatggaaacttacagatgcctgcctgggatgatgaggcacattcagaacaaatgcttttttttttttgagacagagtctcgctctgacgcccaggctggagtgcagtggcgcgatctcggctcactgcaaactttgcctcccaggttcaagtgattctcctacctcagcctcccgagtagctgggattacaccaccatgcccagcaaatttttgtgtttttagtagagacggagtttcaccatgttggccaggctggtctcgaactcctgacctcaggtgatccatccgccttggcctcccaaagtgctgggattacaggcgggagccaccatgcctggccagaacaaatgcctttttaaaccttttaagaacatttttaaaatgtctttttctatgtcaaatgtaacgtttatttttttaaacaataaaattgatttgccaaaa

SEQ ID NO: 140666 - DNA, 5590 bp, Homo sapiens
  Payload ID: 7585
  Gene Symbol: H6PD
  Gene Name: hexose-6-phosphate dehydrogenase (glucose 1-dehydrogenase)
  ENST ID: ENST00000602477
  CDS Start-End: 153-2561
accagaaaacgctctgcggctagagcttcagcacaggctgggtctgctgtgccgggtctgtatggggacagctgcacgcctcttccgcttgtgtgagaacaaaggccggaacctggattctgatccaaaccccctggcccccaccttctgggatgttagcagagccttttaactggcacccaggcatgtggaatatgctcatagtggcgatgtgcttggcccttctgggctgcctgcaagcccaggagctccagggacatgtctccataatcctgctgggagcaactggggacctggctaagaagtacttatggcagggactgttccagctgtacctggatgaagcggggaggggtcacagttttagcttccatggagctgctctgacagcccccaagcagggtcaagagctcatggccaaggccctggaatccctctcctgccccaaggacatggcacccagtcactgtgcagagcacaaggatcagttcctgcagctgagccagtaccgccaactgaagacggccgaggactatcaggccctgaacaaggacatcgaggcacagctccagcacgcaggcctccgggaggctggcaggatcttctacttctcagtgccacccttcgcctatgaagacattgcccgcaacatcaacagtagctgccggccaggcccgggcgcctggctgcgggttgtccttgagaaaccctttggccatgaccacttctcagcccagcagctggccacagaactcgggacctttttccaggaggaggagatgtaccgggtggaccattacttaggcaagcaggctgtggcgcagatcctgcctttccgagaccagaaccgcaaggctttggacggcctctggaaccggcaccatgtggagcgggtggagatcatcatgaaagagaccgtggatgctgaaggccgcaccagcttctatgaggagtacggtgtcattcgcgacgtcctccagaaccatctgacggaggtcctcaccctcgtggccatggagctgccccacaatgtcagcagtgcggaggctgtgctgcggcacaagcttcaggtcttccaggcgctgcggggcctgcagaggggcagtgccgtcgtgggccagtaccagtcttacagtgagcaggtgcgcagagagctgcagaagccagacagcttccacagcctgacgccgaccttcgcagccgtcctagtgcacattgacaaccttcgctgggagggcgtgcctttcatcctgatgtctggcaaagccttggacgagagagtgggctacgctcggatcttgttcaagaaccaggcctgctgtgtgcagagcgaaaagcactgggccgcggcgcagagccagtgcctgccccggcagctcgtcttccacatcggccatggcgacctgggcagccctgccgtgctggtcagcaggaacctgttcaggccctccctgccctccagctggaaggaaatggagggaccacctgggctccgccttttcggcagccctctgtccgattactacgcctacagccctgtgcgggagcgggacgcccactccgtcctcttatcccatatcttccatggccggaagaatttcttcatcaccacagagaacttgctggcctcctggaacttctggacccctctgctggagagcctggcccataaggccccacgcctctaccctggaggagctgagaatggccgtctgttggactttgagttcagtagcggccggttgttcttttcccagcagcagccggagcagctggtgccagggccagggccggccccaatgcccagtgacttccaggtcctcagggccaagtaccgagagagcccgctggtctccgcctggtccgaggagctgatctctaagctggctaatgacatcgaggccaccgctgtgcgagccgtgcggcgctttggccagttccacctggcactgtcggggggctcgagccccgtggccctgttccagcagctggccacggcgcactatggcttcccctgggcccacacgcacctgtggctggttgacgagcgctgcgtcccactctcagacccggagtccaacttccagggcctgcaggcccacctgctgcagcacgtccggatcccctactacaacatccaccccatgcctgtgcacctgcagcagcggctctgcgccgaggaggaccagggcgcccagatctatgccagggagatctcagccctggtggccaacagcagcttcgacctggtgctgctgggcatgggtgccgacgggcacacagcctccctcttcccacagtcacccactggcctggatggcgagcagctggtcgtgctgaccacgagcccctcccagccacaccgccgcatgagccttagcctgcctctcatcaaccgcgccaagaaggtggcagtcctggtcatgggcaggatgaagcgtgagatcaccacgctggtgagccgggtgggccatgagcccaagaagtggcccatctcgggtgtcctgccgcactccggccagctggtgtggtacatggactacgacgccttcctgggatgagggcgcctgtgccccttgcccgcttcgctcctgtgctttccttcgcccgtgtcttccctcccttctcggccccgccacctgcccagcgtgccctggctctccagaaccttctatcccacagtcaggccccagagagggcaggacaagccttgtcccgatgcctttgaccggcagctctgtgtattggtggatagatgcagaaacaaggaagaaatggagtctgctcctgagaagcttcaaattcaggccaggagagaagtcttaagaaaagacctccagcagttacacattcatatcaaccagcacaacacgggatggcgcccaaactccggcgttcacaagaggagacgtgacgtggtgggctgaggttaatcagggaaggtttcctgggggaggtgatccttgaactggctcccggggaacattcagagcatgattggtagacagaagggtgcagaggcgcccaggggagtacattgccccgtgcaaagcaggggcattggggactgtcttgagaccctgagggggtcaagcccctccttccccagctgcccctccttctagaacctctgcacatctagcctctggccctcctcttcactgcctccacctgctcccgcttgccatccctgtctcctccatcctggctgtgcagtaggaattccaggctcctccctgtgtctttgctgttcttcagactccatttatagagaatgagggctgataacaggaatacagtggcaaagactagactgtggaaagggttccagaaatcttttttcttttttaattaaaaaaaatatttgcagagatgagctcttgctatgttgcccaggctggtctcaaactcctgggctcaagcgatcctcccatctcagcctcccagagtgctgggattacaggtgtgagctactgcgcccagccccagaaatctcagtgctgtttggagctccatttctcatttgatgacttgctctgcgtggggaggtggggtctcattcccccaacttcctcagggaggacccctgccctccgctgctcctctgtcctgctagccttcctccaggaagcacactgggtgcagataatcaggacattccagagatccccaatttaagagggtcatttccatctcaggggactcccggatgggtgtttccgctctcaatagcccctcttgttttaccaggaaagatccagttaaatcacccactgaggtgacagctcattagcggggagagagatggagcatcgagtgacactgggccatccaggcggctctgctcccaccagacaggagctaggcctcactggcaggggggctgcccacagccttttcaggggctcgcttggcgggtgacggggccgcagccaggccttctctccctgccccttggtgaccccgtggcttcctgtctgctggcctctcctgctacttatcacttcaccacgaactctctgcctgagactggggaagtaagcgggtatcttctcagtgagcataggttggggactgtgatcttgagaagccatgggccagcaatacctgcttttctgaagcccccaaggagggctctgacattctttttaaaaacaccacaaagcaaaattcccaggacatgtgtagttttgtttgttcagtatcccacaacttaaggctgggagatggaactcttggttaaggtcgatttttctgtctggcttctccgcaccttccacttgctctctggatcaggcagatataaactttctagcgcattttgagagagggctttcttgggtgagggagcatggcaaagtcggtttctctctggactgtttacacttcaaggcggtggatttagaggaatcctggctttcattttcaatgccagtctgagacatgttcccaagccggggctcttgttcacaccacttactctggccaccaacaacaacccaggccagacagagcatctcttttttttttttttgagacagagtctctgtcgcccaggctggagcccagtggcgagatcttggctcactacaacctccacctcccgggttcaggcaattctcgtgcctaagcctcccgagtagctgcgactacaggcgccggccagcatgcctgtctaatttttgtattttagtagagacagggtttcaccatgttgcccaggctggtctcgaactcctgagctcaggcagtctacccacctcagcctcccaaagtgctgggattacaggcgtgagccaccgcgcccagccagaacatctgtttttacacccagagagcgcccctcgttaggacagaaccacggtgcccagagccaggaagccgccctcctggcgcccagcatctgagcttctacacgtgatgggcgggctcaggagaggacagggagtcgtggtggaagttccacagctggccgcgtgggggggcccttgcaccgcactgccgcctcctgactgcccctatccccgcagcccctgtgccggatttcatttccctcctctctcccagggtacctggccccagcactctcccatctgttcttcaggaaccgactcctctccagttgcaacaccagggagaaaggggcctccacatgcccaagtacccctgcaggatgaagggcaggccggcccttgatgtgccatttctgaataatagtcactgccgccgagtctaggatgtcctgttctaactcagccctgcctcggatgcaccaccgatctgtgcagagtgggtgtgggagtgtgggtgagggtcgaaatgccaaaggtctactttccagaatcaagtgccttctgcaaatcatgttggaaaagtccaaacctggagatgtccctgtgcctccgcccctacccaccccttttccttcagctgtgttaggaaggagaagttttcagaaccctctaggctggtggctttcaaacttcagaccatgatctgcagcaagaaacgtgccttccatcataaatcagtccatttgtttacaactgtgttccaagcaggtttcataaagaaattcttaaccttagaa

SEQ ID NO: 140667 - DNA, 4931 bp, Homo sapiens
  Payload ID: 7586
  Gene Symbol: HFM1
  Gene Name: HFM1, ATP-dependent DNA helicase homolog
  Uniprot ID: A2PYH4
  ENST ID: ENST00000370425
  CDS Start-End: 100-4407
agccaggcttggcggtcctcagaggggctgataaatcggcgctcgactggcctaggagctgtccgcagggagatttatgacaaagtccagttttcaacaatgctgaaatcaaatgattgcctgttttctttggaaaatttgttttttgaaaaaccagatgaagttgaaaaccatccagacaatgaaaagtcattggattggtttctccctcctgctccattgatttcagaaattccagatactcaggagttagaggaagaattagaaagtcataaactgttaggtcaggaaaagaggccaaaaatgttaacatcaaatttaaagataactaatgaagatacaaattatatttcactaacacaaaaattccagtttgcctttccttctgataaatatgaacaggatgatctaaatttagaaggggtaggtaataatgacttatcacatattgctggcaagctgacatatgcttctcagaaatataaaaatcacattggcactgagatagcacctgagaagagtgttcctgatgatacaaaattagttaattttgcagaagataaaggagagagcacatcagtattccggaaaagattatttaaaatatctgacaatatacatgggagtgcttattctaatgacaatgaattggactctcacattggctcagtgaaaattgtacaaacagaaatgaacaaagggaaatcaaggaactatagcaatagtaagcaaaaatttcagtattctgcaaatgtgtttacagcaaataatgctttttctgcttctgaaatcggagaaggcatgttcaaagcaccatctttttcagttgctttccaacctcatgatattcaagaggtaacagaaaatggtttaggttccttgaaggctgtcacagaaattccggcaaaatttagaagtattttcaaagaatttccatatttcaactatatacagtccaaggcctttgatgatcttctttacacagataggaattttgtgatttgtgctccaactggttctggaaaaactgtagtgtttgaactagctataacaagattgttaatggaagtaccattgccatggttgaatattaaaattgtttacatggcaccaataaaagccttgtgcagtcagcgttttgatgactggaaagaaaaatttggaccaataggattgaattgtaaagaacttactggagatacagtaatggatgatctatttgagattcagcatgcccatattattatgacaactccagaaaaatgggatagcatgactaggaaatggagagacaactctttggttcagctggttcgactgtttctcattgatgaggtacatattgtaaaagatgaaaatcgtggtccaactcttgaagttgtagttagcagaatgaaaactgtacagtctgtttctcagactttaaaaaataccagcactgctattccaatgcgatttgtagctgtatctgcaacaattccaaatgctgaggatattgcagaatggctttcagatggtgaaagaccagctgtgtgtctgaaaatggatgagagccatagaccagtgaaacttcagaaagtggtccttggatttccctgcagtagtaaccaaactgagtttaagtttgatttaaccctcaactacaaaattgccagtgttatacaaatgtactctgatcagaaacccacacttgtgttttgtgcaacaaggaagggtgtgcaacaggctgcttctgttcttgtgaaagatgctaaatttattatgactgtggaacagaaacagaggttacagaagtatgcatattccgtaagagattcaaaactgagagatatcttaaaagatggtgctgcttatcatcatgctggtatggagctgtcagatagaaaagtagttgagggagcttttactgttggagatttaccagttctttttactaccagtactttagctatgggagtaaatttgcctgctcacctagtagttataaaatctacaatgcattatgctggaggactgtttgaagagtacagtgaaacagatattctacagatgattggtagagctggtcgacctcaatttgacactacagctactgcagttatcatgactcgattaagcacaagggacaagtacattcagatgttagcttgtagagacactgtagaaagcagtttgcacagacatcttattgaacatttaaatgcagagatagtactgcataccatcacggatgtgaatattgctgtggaatggatacgatcaactctgctttatatcagagccttgaaaaatccatctcattatggttttgcatctggattgaacaaagatggaattgaagcaaaattacaagaattatgtttgaagaatctgaatgatttatcatccctggacttaataaagatggatgaaggtgttaatttcaaaccaactgaagcaggaagattgatggcttggtattatattacatttgagacagtgaagaaattttatacaatcagtggaaaagaaaccttatcagatctggttacattgatagctggctgcaaggaatttctagatatacagttaaggataaatgaaaagaaaacactgaatactttgaacaaagatccaaatcggataactatcagatttccaatggaaggaagaattaaaacaagagaaatgaaagtaaattgtcttattcaggctcaactaggatgcattcccatacaagattttgctttgacacaagataccgcaaagattttcagacatggctcccgaattacaagatggttgtcagattttgtagctgctcaagaaaagaagtttgctgtactattgaatagtttgattttagctaaatgttttaggtgtaaactttgggaaaactctctgcatgtatccaaacaactggaaaaaattggtataacattgtcaaatgcaatcgtaaatgctggtttgacttcctttaaaaaaatagaagagacagatgcaagggaacttgaattgattttaaacagacatcccccctttggaacccagataaaagaaactgtgatgtatctaccaaaatatgaacttaaagtggaacagattacaagatatagtgatacgacggcagaaatattagtgactgttatattaagaaattttgaacagctacaaactaaaagaacagcatcggattctcactatgttaccttaatcataggtgacgcagataatcaagtagtttatctgcacaagattacggattctgttttgctaaaagctggaagttgggctaaaaagattgctgtgaaaagagctcttaaatctgaagatcttagcataaatctaataagttctgaatttgttgggcttgatattcagcagaaacttacagtcttttacttagaacccaagaggtttggaaatcaaatcactatgcaaagaaaatctgaaacacagatttcccattctaaacattcagacatatctacaatagcaggacctaataaaggaacgactgccagcaaaaaacctgggaaccgagaatgcaatcatctttgtaaaagtaaacatacatgtggacatgactgctgtaaaattggagttgcacagaagtcagaaattaaagagtcaacaatttcttcatatttatctgatttaagaaacaggaatgctgtttcatctgttcctccagttaaacgtctgaagatacagatgaataaatctcaaagtgtggaccttaaagagtttggttttactccaaaaccttcccttcctagtatatcaaggtcagaatatttaaacatatctgaattgcctataatggagcagtgggatcagcctgaaatctatggaaaagttagacaagaaccatctgaatatcaagacaaagaagttttgaatgtgaactttgaattgggaaatgaagtttgggatgattttgatgatgaaaacttagaagttactagcttttcaactgatactgagaagacaaaaatatcaggatttggaaacactttgagttcaagtaccaggggaagtaagctaccccttcaagagtcaaagagcaaattccaaagagaaatgtcaaacagttttgtttcatcacatgagatgtcggatatttctttatcaaattctgctatgcccaagttcagtgcatcctccatgacaaaattacctcaacaagccggaaatgcagttattgtccattttcaagaaagaaaaccacaaaatctgtcaccagagattgagaagcaatgctttactttctctgaaaaaaacccaaattcttcaaattataaaaaagtggatttttttattagaaacagtgaatgtaaaaaggaagttgatttcagtatgtatcatcctgatgatgaagctgatgaaatgaagtctttattgggaatatttgatggtattttctaaaacaaacaaatactttttatattgataagagaaagaataaagacacctaatcacaaagcatgctttttatttttaaaaagtagttcataattgttcggatttttttctcctgtatttgattagctttgttcactttttgcaacaaaatgtatgggccgatttattttcccattatattgtaacttcttgaaaagctcttttacagtggctttgtttcaataagcccttaagttaagggctgattgcacttagaaataagttgcacttagaaataattatttggctattaattggattttgacaagaaccaatgtaaaatttcatttttatattttcttaacaagaagaaaaatattctatgaaagcaaagtaatgctaacttaatgaatctgcttattgtatggattaatcactaatattattcccatgtattttgttttactaaagatttttaagaatccagtggctatttgaacctactgttatctaactttgagcaacaataaatgaaacattaatcagta

SEQ ID NO: 140668 - DNA, 1928 bp, Homo sapiens
  Payload ID: 7586
  Gene Symbol: HFM1
  Gene Name: HFM1, ATP-dependent DNA helicase homolog
  ENST ID: ENST00000430465
  CDS Start-End: 1-1877
gaattgaagcaaaattacaagaattatgtttgaagaatctgaatgatttatcatccctggacttaataaagatggatgaaggtgttaatttcaaaccaactgaagcaggaagattgatggcttggtattatattacatttgagacagtgaagaaattttatacaatcagtggaaaagaaaccttatcagatctggttacattgatagctggctgcaaggaatttctagatatacagttaaggataaatgaaaagaaaacactgaatactttgaacaaagatccaaatcggataactatcagatttccaatggaaggaagaattaaaacaagagaaatgaaagtaaattgtcttattcaggctcaactaggatgcattcccatacaagattttgctttgacacaagataccgcaaagattttcagacatggctcccgaattacaagatgtataacattgtcaaatgcaatcgtaaatgctggtttgacttcctttaaaaaaatagaagagacagatgcaagggaacttgaattgattttaaacagacatcccccctttggaacccagataaaagaaactgtgatgtatctaccaaaatatgaacttaaagtggaacagattacaagatatagtgatacgacggcagaaatattagtgactgttatattaagaaattttgaacagctacaaactaaaagaacagcatcggattctcactatgttaccttaatcataggtgacgcagataatcaagtagtttatctgcacaagattacggattctgttttgctaaaagctggaagttgggctaaaaagattgctgtgaaaagagctcttaaatctgaagatcttagcataaatctaataagttctgaatttgttgggcttgatattcagcagaaacttacagtcttttacttagaacccaagaggtttggaaatcaaatcactatgcaaagaaaatctgaaacacagatttcccattctaaacattcagacatatctacaatagcaggacctaataaaggaacgactgccagcaaaaaacctgggaaccgagaatgcaatcatctttgtaaaagtaaacatacatgtggacatgactgctgtaaaattggagttgcacagaagtcagaaattaaagagtcaacaatttcttcatatttatctgatttaagaaacaggaatgctgtttcatctgttcctccagttaaacgtctgaagatacagatgaataaatctcaaagtgtggaccttaaagagtttggttttactccaaaaccttcccttcctagtatatcaaggtcagaatatttaaacatatctgaattgcctataatggagcagtgggatcagcctgaaatctatggaaaagttagacaagaaccatctgaatatcaagacaaagaagttttgaatgtgaactttgaattgggaaatgaagtttgggatgattttgatgatgaaaacttagaagttactagcttttcaactgatactgagaagacaaaaatatcaggatttggaaacactttgagttcaagtaccaggggaagtaagctaccccttcaagagtcaaagagcaaattccaaagagaaatgtcaaacagttttgtttcatcacatgagatgtcggatatttctttatcaaattctgctatgcccaagttcagtgcatcctccatgacaaaattacctcaacaagccggaaatgcagttattgtccattttcaagaaagaaaaccacaaaatctgtcaccagagattgagaagcaatgctttactttctctgaaaaaaacccaaattcttcaaattataaaaaagtggatttttttattagaaacagtgaatgtaaaaaggaagttgatttcaggtaagaactctttaaagacactttaagattatatcaataaaaaacttttcacaaa

SEQ ID NO: 140669 - DNA, 672 bp, Homo sapiens
  Payload ID: 7586
  Gene Symbol: HFM1
  Gene Name: HFM1, ATP-dependent DNA helicase homolog
  ENST ID: ENST00000427444
  CDS Start-End: 84-672
gataaatcggcgctcgactggcctaggagctgtccgcagggagatttatgacaaagtccagttttcaacaatgctgaaatcaaatgattgcctgttttctttggaaaatttgttttttgaaaaaccagatgaagttgaaaagtcaggaaaagaggccaaaaatgttaacatcaaatttaaagataactaatgaagatacaaattatatttcactaacacaaaaattccagtttgcctttccttctgataaatatgaacaggatgatctaaatttagaaggggtaggtaataatgacttatcacatattgctggcaagctgacatatgcttctcagaaatataaaaatcacattggcactgagatagcacctgagaagagtgttcctgatgatacaaaattagttaattttgcagaagataaaggagagagcacatcagtattccggaaaagattatttaaaatatctgacaatatacatgggagtgcttattctaatgacaatgaattggactctcacattggctcagtgaaaattgtacaaacagaaatgaacaaagggaaatcaaggaactatagcaatagtaagcaaaaatttcagtattctgcaaatgtgtttacagcaaataatgctttttctgcttctgaaatcggagaaggcatgttcaaagcac

SEQ ID NO: 140670 - DNA, 540 bp, Homo sapiens
  Payload ID: 7586
  Gene Symbol: HFM1
  Gene Name: HFM1, ATP-dependent DNA helicase homolog
  ENST ID: ENST00000448819
  CDS Start-End: 87-540
ggtcctcagaggggctgataaatcggcgctcgactggcctaggagctgtccgcagggagatttatgacaaagtccagttttcaacaatgctgaaatcaaatgattgcctgttttctttggaaaatttgttttttgaaaaaccagatgaagttgaaaaattatttaaaatatctgacaatatacatgggagtgcttattctaatgacaatgaattggactctcacattggctcagtgaaaattgtacaaacagaaatgaacaaagggaaatcaaggaactatagcaatagtaagcaaaaatttcagtattctgcaaatgtgtttacagcaaataatgctttttctgcttctgaaatcggagaaggcatgttcaaagcaccatctttttcagttgctttccaacctcatgatattcaagaggtaacagaaaatggtttaggttccttgaaggctgtcacagaaattccggcaaaatttagaagtattttcaaagaatttccatatttcaactatatacagtccaaggcctttgatgatcttc

SEQ ID NO: 140671 - DNA, 596 bp, Homo sapiens
  Payload ID: 7586
  Gene Symbol: HFM1
  Gene Name: HFM1, ATP-dependent DNA helicase homolog
  ENST ID: ENST00000455133
  CDS Start-End: 183-596
aagtggggacccagccgagccgtccgggcagcggtcgatctctagagccgtctgccgggcaggcagcggacgggcgcggcgagttgttggtcaccaggcgtctccaggccgccggcccgcgccagcgcctcagccgcatttccagtcagaaagcgatttatgacaaagtccagttttcaacaatgctgaaatcaaatgattgcctgttttctttggaaaatttgttttttgaaaaaccagatgaagttgaaaaccatccagacaatgaaaagtcattggattggtttctccctcctgctccattgatttcagaaattccagatactcaggagttagaggaagaattagaaagtcataaactgttaggtcaggaaaagaggccaaaaatgttaacatcaaatttaaagataactaatgaagatacaaattatatttcactaacacaaaaattccagtttgcctttccttctgataaatatgaacaggatgatctaaatttagaaggggtaggtaataatgacttatcacatattgctggcaagctgacatatgcttctcagaaatataaaaatcacattggcactgagatagcacct

SEQ ID NO: 140672 - DNA, 2159 bp, Homo sapiens
  Payload ID: 7587
  Gene Symbol: HGFAC
  Gene Name: HGF activator
  Uniprot ID: Q04756
  ENST ID: ENST00000382774
  CDS Start-End: 116-2083
ggcccgcctgacgtgggaggcagccagggttaatcatttccacgaagccttgaccccacctgccttggccgctctgctcccgcctcccactgcccctcaggccagctcaggagccatggggcgctgggcctgggtccccagcccctggcccccaccggggctgggccccttcctcctcctcctcctgctgctgctgctgctgccacgggggttccagccccagcctggcgggaaccgtacggagtccccagaacctaatgccacagcgacccctgcgatccccactatcctggtgacctctgtgacctctgagaccccagcaacaagtgctccagaggcagagggaccccaaagtggggggctcccgcccccgcccagggcagttccctcgagcagtagcccccaggcccaagcactcaccgaggacgggaggccctgcaggttccccttccgctacgggggccgcatgctgcatgcctgcacttcggagggcagtgcacacaggaagtggtgtgccacaactcacaactacgaccgggacagggcctggggctactgtgtggaggccaccccgcctccagggggcccagctgccctggatccctgtgcctccggcccctgcctcaatggaggctcctgctccaatacccaggacccccagtcctatcactgcagctgcccccgggccttcaccggcaaggactgcggcacagagaaatgctttgatgagacccgctacgagtacctggaggggggcgaccgctgggcccgcgtgcgccagggccacgtggaacagtgcgagtgcttcgggggccggacctggtgcgaaggcacccgacatacagcttgtctgagcagcccttgcctgaacgggggcacctgccacctgatcgtggccaccgggaccaccgtgtgtgcctgcccaccaggcttcgctggacggctctgcaacatcgagcctgatgagcgctgcttcttggggaacggcactgggtaccgtggcgtggccagcacctcagcctcgggcctcagctgcctggcctggaactccgatctgctctaccaggagctgcacgtggactccgtgggcgccgcggccctgctgggcctgggcccccatgcctactgccggaatccggacaatgacgagaggccctggtgctacgtggtgaaggacagcgcgctctcctgggagtactgccgcctggaggcctgcgaatccctcaccagagtccaactgtcaccggatctcctggcgaccctgcctgagccagcctccccggggcgccaggcctgcggcaggaggcacaagaagaggacgttcctgcggccacgtatcatcggcggctcctcctcgctgcccggctcgcacccctggctggccgccatctacatcggggacagcttctgcgccgggagcctggtccacacctgctgggtggtgtcggccgcccactgcttctcccacagcccccccagggacagcgtctccgtggtgctgggccagcacttcttcaaccgcacgacggacgtgacgcagaccttcggcatcgagaagtacatcccgtacaccctgtactcggtgttcaaccccagcgaccacgacctcgtcctgatccggctgaagaagaaaggggaccgctgtgccacacgctcgcagttcgtgcagcccatctgcctgcccgagcccggcagcaccttccccgcaggacacaagtgccagattgcgggctggggccacttggatgagaacgtgagcggctactccagctccctgcgggaggccctggtccccctggtcgccgaccacaagtgcagcagccctgaggtctacggcgccgacatcagccccaacatgctctgtgccggctacttcgactgcaagtccgacgcctgccagggggactcaggggggcccctggcctgcgagaagaacggcgtggcttacctctacggcatcatcagctggggtgacggctgcgggcggctccacaagccgggggtctacacccgcgtggccaactatgtggactggatcaacgaccggatacggcctcccaggcggcttgtggctccctcctgaccctccagcgggacaccctggttcccaccattccctgccttgctgacaataaagatatttccaagaacccggccca

SEQ ID NO: 140673 - DNA, 2016 bp, Homo sapiens
  Payload ID: 7587
  Gene Symbol: HGFAC
  Gene Name: HGF activator
  ENST ID: ENST00000511533
  CDS Start-End: 28-2016
actgcccctcaggccagctcaggagccatggggcgctgggcctgggtccccagcccctggcccccaccggggctgggccccttcctcctcctcctcctgctgctgctgctgctgccacgggggttccagccccagcctggcgggaaccgtacggagtccccagaacctaatgccacagcgacccctgcgatccccactatcctggtgacctctgtgacctctgagaccccagcaacaagtgctccagaggcagagggaccccaaagtggggggctcccgcccccgcccagggcagttccctcgagcagtagcccccaggcccaagcactcaccgaggacgggaggccctgcaggttccccttccgctacgggggccgcatgctgcatgcctgcacttcggagggcagtgcacacaggaagtggtgtgccacaactcacaactacgaccgggacagggcctggggctactgtgtggaggccaccccgcctccagggggcccagctgccctggatccctgtgcctccggcccctgcctcaatggaggctcctgctccaatacccaggacccccagtcctatcactgcagctgcccccgggccttcaccggcaaggactgcggcacagagaaatgctttgatgagacccgctacgagtacctggaggggggcgaccgctgggcccgcgtgcgccagggccacgtggaacagtgcgagtgcttcgggggccggacctggtgcgaaggcacccgacatacagcttgtctgagcagcccttgcctgaacgggggcacctgccacctgatcgtggccaccgggaccaccgtgtgtgcctgcccaccaggcttcgctggacggctctgcaacatcgagcctgatgagcgctgcttcttggggaacggcactgggtaccgtggcgtggccagcacctcagcctcgggcctcagctgcctggcctggaactccgatctgctctaccaggagctgcacgtggactccgtgggcgccgcggccctgctgggcctgggcccccatgcctactgccggaatccggacaatgacgagaggccctggtgctacgtggtgaaggacagcgcgctctcctgggagtactgccgcctggaggcctgcgatttggaaactgagggcagagaatccctcaccagagtccaactgtcaccggatctcctggcgaccctgcctgagccagcctccccggggcgccaggcctgcggcaggaggcacaagaagaggacgttcctgcggccacgtatcatcggcggctcctcctcgctgcccggctcgcacccctggctggccgccatctacatcggggacagcttctgcgccgggagcctggtccacacctgctgggtggtgtcggccgcccactgcttctcccacagcccccccagggacagcgtctccgtggtgctgggccagcacttcttcaaccgcacgacggacgtgacgcagaccttcggcatcgagaagtacatcccgtacaccctgtactcggtgttcaaccccagcgaccacgacctcgtcctgatccggctgaagaagaaaggggaccgctgtgccacacgctcgcagttcgtgcagcccatctgcctgcccgagcccggcagcaccttccccgcaggacacaagtgccagattgcgggctggggccacttggatgagaacgtgagcggctactccagctccctgcgggaggccctggtccccctggtcgccgaccacaagtgcagcagccctgaggtctacggcgccgacatcagccccaacatgctctgtgccggctacttcgactgcaagtccgacgcctgccagggggactcaggggggcccctggcctgcgagaagaacggcgtggcttacctctacggcatcatcagctggggtgacggctgcgggcggctccacaagccgggggtctacacccgcgtggccaactatgtggactggatcaacgaccggatacggcctcccaggcggcttgtggctccctcctga

SEQ ID NO: 140674 - DNA, 2531 bp, Homo sapiens
  Payload ID: 7588
  Gene Symbol: HGH1
  Gene Name: HGH1 homolog
  Uniprot ID: Q9BTY7
  ENST ID: ENST00000347708
  CDS Start-End: 68-1240
gggccacacagcggacccctaagcggaccgctggcaccggtcgggtggcagcagagtgtcgctcgacatgggggaggccggggctggcgctggcgcctcgggagggccggaggcaagcccggaggcagaggtggtgaagctgctgcccttcctggcgccgggcgcgcgggcggacctgcaggcggcggcggtgcggcacgtgctggcgctgactggctgcggacccggccgcgcgctgttggcggggcaggcggcgctgctgcaggcgctgatggagctggcgccggcctctgccccggcccgggacgccgcccgcgcgctcgtgaacttggccgccgaccccggcctgcacgagacattgctggcggccgaccccgggctgccagcgcgcctgatgggccgcgcgttggacccgcagtggccctgggccgaggaggcggccgccgcgctagccaacctcagtcgcgagccggcgccgtgtgcagcgctcatggcggcgctggcggccgcggagccggcagactcgggcctggagcggctggtgcgcgcgctgtgcacgcccggctacaacgcccgcgcgcccctgcactacctagcgccgctgctctccaacctcagccaacgccctgcggcgcgggccttcctactggaccccgacaggtgcgtggtccagcggctgctgccccttacccagtaccccgactcctctgtacgcaggggcggggtggtggggacgctgcggaattgctgcttcgagcaccgacatcacgagtggttgcttggacctgaggtggacattctcccctttttgctcctgcccttggctgggcctgaggatttctccgaggaagagatggaacggctgcctgtcgacttgcagtacctgccaccagacaagcagcgagaacctgatgcagacatccgcaagatgcttgttgaagccatcatgctgctgacagccacagcaccaggtcggcagcaggtgcgggaccagggagcctacctgatccttcgagagctgcacagctgggagccggagcccgacgtgcggacggcttgtgagaagctcatccaggtgcttattggggacgagcctgaacgtggcatggaaaacctgctggaggtgcaggtgcctgaggatgtggagcagcagctgcagcagctggattgcagggagcaggagcagttggagcgggagctggccccagagccatgggtggagagggccacacccacctgaggcccctgcagccggacaccagctccagggtcccctttgccaggctttctcagaccaggccttcctgcagctgtctgcaggccccctgggtccccttgttcagagactgtgctcttctgagaagcagagctacgcttaggctccagtaaggattggaggcactttccagccctgtgcagtgttgctaccagcaagaatgaaggttgtgcagagcagtactgtgaggtaggcaccgtgactcggctgcctgtgcagaaggtggaggtggcaggcggatggccagggagccatgagaagactcttcctgggcacggcgtggggactggacagaaaaccactgcaagccccaaggagccagctgaagcctcccaatccccagggcactgcagagtctgggcagaggtgggcgcataggtacaagtgctgctttgtcagcctcactccctgcagctctcagctccctgttccctgagacctggcctcaaagggctgacccagccatacgtagatcctggggtctttctaggactgtgcctccctgcttgacctatgctccaggaccctgccctcaacccttgtcagctccctaagtcttcctgtttcccagtctcagattgagtgggtgctctcattggcctctctagctaggccgtctccctggtcagcttccttgagcctgggccactcctccctggccttcttacctctgccaagagcctccagatgtgcctgcagcctagtccctgcccaagcttctcccccagccaccctctgcccctgtggtagagcccactataggcccaggcgccttacgtgcttctcccctggacctatgtgcatccctcacctgccagttatgtggctgccaagccccacaggctgtcatggtggctcttgccacacttcccttcctgagctgacctgacctcactgccacctcttgcattgggatcctgagggctggcccctgctcactgatgggccctcccaggcccgtcaagccctggtgaaggagcttagcttgtcttcttggcaattcacaatgcctcactccacaccctaaaactggagcgtcccctatggtctcctgctgtggcttgggtgccgggcgtctcccgcctccaggatctcctctcacctgcccccattaaagctctgccactcatgcaggcatgtgtggaccatgttttcccctggccagagcccccacctgccactggaggccagttgccctcttagcactcagacatcagcactgtcttcacagaataaatgctttatctggccttgc

SEQ ID NO: 140675 - DNA, 2106 bp, Homo sapiens
  Payload ID: 7588
  Gene Symbol: HGH1
  Gene Name: HGH1 homolog
  ENST ID: ENST00000533266
  CDS Start-End: 33-290
accggtcgggtggcagcagagtgtcgctcgacatgggggaggccggggctggcgctggcgcctcgggagggccggaggcaagcccggaggcagaggtggtgaagctgctgcccttcctggcgccgggcgcgcgggcggacctgcaggcggcggcggtgcggcacgtgctggcgctgactggctgcggacccggccgcgcgctgttggcggggcagactcgggcctggagcggctggtgcgcgcgctgtgcacgcccggctacaacgcccgcgcgcccctgcactacctagcgccgctgctctccaacctcagccaacgccctgcggcgcgggccttcctactggaccccgacaggtgcgtggtccagcggctgctgccccttacccagtaccccgactcctctgtacgcaggggcggggtggtggggacgctgcggaattgctgcttcgagcaccgacatcacgagtggttgcttggacctgaggtggacattctcccctttttgctcctgcccttggctgggcctgaggatttctccgaggaagagatggaacggctgcctgtcgacttgcagtacctgccaccagacaagcagcgagaacctgatgcagacatccgcaagatgcttgttgaagccatcatgctgctgacagccacagcaccaggtcggcagcaggtgcgggaccagggagcctacctgatccttcgagagctgcacagctgggagccggagcccgacgtgcggacggcttgtgagaagctcatccaggtgcttattggggacgagcctgaacgtggcatggaaaacctgctggaggtgcaggtgcctgaggatgtggagcagcagctgcagcagctggattgcagggagcaggagcagttggagcgggagctggccccagagccatgggtggagagggccacacccacctgaggcccctgcagccggacaccagctccagggtcccctttgccaggctttctcagaccaggccttcctgcagctgtctgcaggccccctgggtccccttgttcagagactgtgctcttctgagaagcagagctacgcttaggctccagtaaggattggaggcactttccagccctgtgcagtgttgctaccagcaagaatgaaggttgtgcagagcagtactgtgaggtaggcaccgtgactcggctgcctgtgcagaaggtggaggtggcaggcggatggccagggagccatgagaagactcttcctgggcacggcgtggggactggacagaaaaccactgcaagccccaaggagccagctgaagcctcccaatccccagggcactgcagagtctgggcagaggtgggcgcataggtacaagtgctgctttgtcagcctcactccctgcagctctcagctccctgttccctgagacctggcctcaaagggctgacccagccatacgtagatcctggggtctttctaggactgtgcctccctgcttgacctatgctccaggaccctgccctcaacccttgtcagctccctaagtcttcctgtttcccagtctcagattgagtgggtgctctcattggcctctctagctaggccgtctccctggtcagcttccttgagcctgggccactcctccctggccttcttacctctgccaagagcctccagatgtgcctgcagcctagtccctgcccaagcttctcccccagccaccctctgcccctgtggtagagcccactataggcccaggcgccttacgtgcttctcccctggacctatgtgcatccctcacctgccagttatgtggctgccaagccccacaggctgtcatggtggctcttgccacacttcccttcctgagctgacctgacctcactgccacctcttgcattgggatcctgagggctggcccctgctcactgatgggccctcccaggcccgtcaagccctggtgaaggagcttagcttgtcttcttggcaattcacaatgcctcactccacaccctaaaactggagcgtcccctatggtctcctgctgtggcttgggtgccgggcgtctcccgcctccaggatctcctctcacctgcccccattaaagctctgccactcatgcaggc

SEQ ID NO: 140676 - DNA, 258 bp, Homo sapiens
  Payload ID: 7588
  Gene Symbol: HGH1
  Gene Name: HGH1 homolog
  ENST ID: ENST00000628266
  CDS Start-End: 1-258
atgggggaggccggggctggcgctggcgcctcgggagggccggaggcaagcccggaggcagaggtggtgaagctgctgcccttcctggcgccgggcgcgcgggcggacctgcaggcggcggcggtgcggcacgtgctggcgctgactggctgcggacccggccgcgcgctgttggcggggcagactcgggcctggagcggctggtgcgcgcgctgtgcacgcccggctacaacgcccgcgcgcccctgcactacctag

SEQ ID NO: 140677 - DNA, 7390 bp, Homo sapiens
  Payload ID: 7589
  Gene Symbol: HHIPL1
  Gene Name: HHIP-like 1
  Uniprot ID: Q96JK4
  ENST ID: ENST00000330710
  CDS Start-End: 99-2447
agggaaggggagcgcccgccccttccctgccgccgcgagcgccccgggaggggaccggggctgccgtccctccgcctcttcccccgcggggcgtagcgatggcccgggccagggccggggcgctgctggcgctttgggtgctcggggccgccgcgcatccgcagtgcctggacttcaggccgcccttccggccgacgcagccgctgcgcctctgcgcgcagtactcggacttcggctgctgcgatgaggggcgcgacgccgagctgacccgccgcttctgggccctggcgagccgcgtggacgccgccgagtgggccgcgtgcgccggctacgcgagggacctgctgtgccaggaatgctcgccgtatgcagcccacctctatgacgccgaggacccattcacgcccctgcgcacggtgcccgggctctgccaggattactgcctggacatgtggcataagtgccgggggctgttccgtcacctgtcaactgaccaggagctctgggcgctggagggcaaccttgccaggttctgccgctacctgtccctggatgacacggactactgcttcccttacctgctggtcaacaagaacctcaactcaaacctgggccacgtggtagccgatgccaagggctgcctgcagctgtgcctggaggaggtggccaacgggctgcgcaaccccgtggccatggtccatgccagggatggcacccaccgcttcttcgtggccgagcaggtggggctggtgtgggcctacctgcccgaccgctcgaggctggggaagcctttcctgaacatcagccgggtggtgctcacctcgccctgggagggtgacgagcgtggcttcctgggcattgccttccaccccagcttccagcacaaccgcaggctctacgtctactactcagtgggtatccgcagcagtgagtggatccgcatcagcgagttcagagtctccgaggatgacgagaacgccgtggaccacagctctgagaggataatcctggaggtcaaagaaccagcctcaaaccacaacgggggccagctgcttttcggggatgacgggtacctctacatcttcactggagatggcgggatggccggagacccctttgggacatttggaaatgcccaaaacaagtcggcgctgctgggcaaggtgctgcgcatcgacgtggaccgtaaggagcgcggcctgccctacggcatcccgcccgacaacccgttcgtgggcgaccccgcggcgcagcccgaggtctacgccctgggcgtgcgcaacatgtggcgctgctccttcgaccgtggcgacccctcctcgggcactggccgcgggcgcctcttctgcggcgacgtgggccagaacaagttcgaggaggtggacgtggtggagcgcggcggcaactatggctggcgcgcgcgcgaagggttcgagtgctacgaccgcagcctgtgcgccaacacctctctcaatgacttgctgccgattttcgcctacccgcacacggttggcaagtcggtcacagggggctacgtgtaccggggctgcgagtaccccaacctgaacggcctctacatttttggggatttcatgagcgggcgtctgatgtccctccaagagaacccagggacaggccagtggcagtacagtgagatctgcatgggccacggccagacctgtgagttcccaggcctcatcaacaactactacccgtacatcatctccttcggggaggacgaggccggggagctgtacttcatgtcgacaggggagccgagtgccacagctccacgcggagttgtctacaaaataattgacgcatccaggcgggcaccacctggcaaatgtcagatccagcctgctcaggtgaagatcagaagccgtctcatcccctttgtgcccaaagaaaagttcatcccgaagacacggagcaccccgcggcctacagcgcgggcgcccacgcgggcgccccgccgagggcgccccacggccgctccccccgcgccaaccccgcggccagcgcggcccacccagcagccagggagccggaggggcggcgggcggcggcgggggcggctgaactcggcgagccgggcgttccgggatggcgaggtgcgcctggtgcggcccgcgggcctgagctctggcagcgggcgcgtggaggtgttcgtgggcggacgctggggcaccgtgtgcgacgactcctggaacatcagcggcgccgccgtcgtgtgtcgccagctggggtttgcctacgccgtgcgcgccgtcaagagagccgagttcggccagggcggctcgctgcccattctgctggacgatgtgcgctgcgcgggctgggagcggaacctgctggagtgccagcacaacggcgtgggcacccacaactgcgagcacgacgaggatgcgggcgtcgtgtgcagccaccagaaccccgacctgtaggcaacacgccgctgccccaggccatcccgccggcgggggagcctggcaggggccgctccgccctgtgtgcgcccagcgggtgcacacgtgttctagagtgaagggggtgcgggtgtgtgctgtcctggggacatgtgtgaggcgctgcagtgcatgtgtgtcctctgcagacccaaggcaggagtgtgtgttgggggcggtgtgggctctggaagtgcatggtccatcatgggcgggaggagttcctttcttacctccaagcgtttcagacaccagcaggaacagcagccgggctgtgggaccctgaggagggagggcagccaggcttcgaggacggacatggcccctggctgtgctaacagaggcacagcttgcagactgagggcggtggggagaaccaggcttgtcctgcccacagctggaatggaaggtgcaagaacagccggagggtggcctgaggaatgtggcccggacagcatggcctggtgcccgcatcccccccaccccctggcagtcagaggcgctggagagaaccggaaggcatccagtggggaagggaaagccttctggaaggtgggagcagggtgagctgcaggcctggggccccactggaggggcaggctgcgtggaggagccagcacctgctcagggaggatggctgtgaggactggatgacctccaaggccgtatgctggagaagccactcagcagcatactcagtccttgtgggtgctcctgggatgggaccagcctcctccaaccctgaggcctgattctctcttgctcttggggcagaagccacccacactagctgggcagagctttcaccctggccctccagtgagtcggtgggcctccactactttcaaagctgtgtttgggccctggggccacctctgtcctttccatccccatccctgctcagtgtaaacccaggagacctgattcctccagccctacctcggggctgaccaggctgggggtccagtgaaactactgacactttttcacccagggctatgccaataatgtggctgtttacacaccactttcctgcctcctctctgacctgcacctgtgtgggagccggggtgggaaccaggagaaaggggtgaggcctcccgcttcccacctgcatcacaggtggaagctccttcactccagggatgctcggccctggctctgtgccaggccgcagaggggcacttagtatgactgcgctcagcctcggatgggagcacgggtggggggtgggtaagcagatgagtcaccaggcagtgaagacaggatgtggcccatgtcgggggttggaagaggtctgggtggggcacccaaacccaacctatgggggggctttgggagggggtgatgctgtgccaagttctgggagctggcaccaggggtggctgggcaggccttggggcaggcatgagtctggcagggtctcctagctgctagtatagggtctcctagccactagtataggatcctgggctgcagcagaaagctttaggtcactgtcttggactcctcatactctgtgctttacagaatgggaaactgaggcacacagaggttagatatcttagggcaccaagccagggaagggagaagtcaagtttgaatacagcagcttagtttagagtccccgcaccctaaccactgccctccccagctacactatgcctgcagagagcggtgtgctggggctcctgcctggtgtgggagtgccagcctggctgggaagcagctgatggagatccctgggggctcctcttgcctggcaggtgcccccgctgctggcctcatgctcctctcgggcctccagtggcccaggggaggttgagtgggcatcttcctgggatgcaggggagttctgagctctgacgccgggcgtgttaggagatagcaggccgttaatgaccatcccagccgaattcctcactgtgcagatgaggaagtgagctcagggaggctgagtgtcccaggcctgttgccagatgaggccacgctgagactggagccagggaaggtgcagcaagccttgaggccctcaagaatgcagccgagccagggccctgcttgcctggccccagaagctgttttgctcagagctggattaggagggttggcaaagggagctctgggtgcggcctcaggccctccagtacttctctgggcagttcgggctttggccttcagtcttccaggccaggcgctcttcctccccagcctccaactcatcacctctcaggccccaaaccaggcctgggctaggctgcagcctgcctcctggggactcactccacagtccccaggtcagtggtccccaacctttttggcatcatggactggtttcatgtaagacaatttttccatggatgggggttggggggatggttttgggatgaaatgtcccacctcagatcatcaggcattagattctcataaggagttcacagcctagatccctcgcatgcacagttcatagtaggtttcatgttcctatgcggatctaatgccactgctgatctggcaggaggcagagctcaggtgggaatgcttgctccccacactaccctgccccactgccactcacctcctgctgtgtggcccggttcctaacaggccacccatcagtactggtccgtggcccagggtttggagacctctgccctaggtagtaataagagtggacagctgttatatgtaaatacttgttccccgatgctggaaagaaatagcactaaaacataaatttaattctttcagcaaggcaattttactttctgcagaaagggtgctcatcgcagatggaacaatagtgagaggacacctgaacaaaggagggaagcaattgttagcccttatgcagtttgtccctgctactgtgtcctatgtccattggcagaagccagaccgcacaatctaaactaaaacccgattggctgtttaaaatttttctaaataggtaaaagtaatggaaggataaaggaaaagaggaagttgcttacgaaaggacttagaaaagtaataatattcccaaataaggaaggggtataggctgtgagctgggacatgcctgtgagcacgtccagcacagatatcttggttaaagtataaggacatagaacgtactatgtgcctgtgagcacgtctaacagttacatagaatagggcttgacaaagagttattagcataaagcaaggaggtttgaaggaagttcgtctttaaaagaaaccattatttctaacacttacgatttattctttaacaagaagggaaactttcaagaggaacttttactttctacaacagctgacctctgctgagcgcttactacatgccaagcactgctctgaaagtttaacataccattcactcatgtaatcctcatattaatgcacatttactcacgtggaagccgagttccagggcatttgtcacttaccaaatgtcacatagccaaaatttgaatttgagcccaggtagtccagctctgggaccctgctgtgggccttcctgctgggccacctcaagggcattgaaagccagccccaccccactgggacacaagttcagagaagggcagagctggctgcctgtccagtgcttctttcactccaccacctacagctggccgctgagggagcattcacatgtgactctgtccccagggactccgatcttgccttaaagtcctccagggcctctgaggatgggggcacagccttcaccctcaccccctctaatccaacctctagtcaatagccaggatcagattctcagagaggggctgccctgcccagtgccacacagcttagtgctggagcctcagggtcaatgctgcaggggtggcccagtgtccaggactgtgttcaagacatcagtcagaggtcacaacatcccaggccctagactgagcctaggggtcaccatgttgataccttagaaatgtttgggaggttcaaggaagctggaaactgggttccagtcctggctctgtgcctctctgagtctcattgcaaaatagaggtcaccagaaggattactggatgaaaaatgaggtagcattgcagacgtgcatggcacgtacactctaggttgcttcctagacagaaagctcagttcgaggctggtggcatccatgctggcagcagccaactgtctgcgacagagtgaggaggggcatgccacgtgaaggaccagcatcagaatgacatgggaagaaactctcacaatagcagaagaaagagctccttcagcctaacatgtagaactcaagtcttcttgtcgcgcttctgtcccctcgcccctcctcccccactgagaactagcttttactgagcagttattacatgccagctacctcgggtgtgtcagctcatttaatcttgacaacagctccacgagacaccctcaatatcactgtccctgttttccagatgaggggacagattcctagggtgttatgtaagtggtccccggggctttagaggcaggtttgcaccaaggcccattctcccagagccggatccttctccttccctgggatacagcacctccaccctgccaggccacccatgtaaaggcagccaattcagagccacctcttatgcctgcatctccccaacaattcctgctgggaaaccactcctcgtatggtgtcatctacaccagtgggtttcaagcttgagaagaatcaagttctacagggctgcttaaaacacaggttgctgggtcctgtctctcagagtttttgactcagtcttggttgagaattttcagttctagaagctcctgggtaatgctaatcctcctgttctaggggccatagtcattgtccatactggtgctatccaatagaaacataatgtgagccaaataggtaatttaaaatctgcttgtagccatgttaaaaaagtaaaacaggtaaaattaa

SEQ ID NO: 140678 - DNA, 2241 bp, Homo sapiens
  Payload ID: 7589
  Gene Symbol: HHIPL1
  Gene Name: HHIP-like 1
  Uniprot ID: Q96JK4
  ENST ID: ENST00000357223
  CDS Start-End: 66-1892
cgcgagcgccccgggaggggaccggggctgccgtccctccgcctcttcccccgcggggcgtagcgatggcccgggccagggccggggcgctgctggcgctttgggtgctcggggccgccgcgcatccgcagtgcctggacttcaggccgcccttccggccgacgcagccgctgcgcctctgcgcgcagtactcggacttcggctgctgcgatgaggggcgcgacgccgagctgacccgccgcttctgggccctggcgagccgcgtggacgccgccgagtgggccgcgtgcgccggctacgcgagggacctgctgtgccaggaatgctcgccgtatgcagcccacctctatgacgccgaggacccattcacgcccctgcgcacggtgcccgggctctgccaggattactgcctggacatgtggcataagtgccgggggctgttccgtcacctgtcaactgaccaggagctctgggcgctggagggcaaccttgccaggttctgccgctacctgtccctggatgacacggactactgcttcccttacctgctggtcaacaagaacctcaactcaaacctgggccacgtggtagccgatgccaagggctgcctgcagctgtgcctggaggaggtggccaacgggctgcgcaaccccgtggccatggtccatgccagggatggcacccaccgcttcttcgtggccgagcaggtggggctggtgtgggcctacctgcccgaccgctcgaggctggggaagcctttcctgaacatcagccgggtggtgctcacctcgccctgggagggtgacgagcgtggcttcctgggcattgccttccaccccagcttccagcacaaccgcaggctctacgtctactactcagtgggtatccgcagcagtgagtggatccgcatcagcgagttcagagtctccgaggatgacgagaacgccgtggaccacagctctgagaggataatcctggaggtcaaagaaccagcctcaaaccacaacgggggccagctgcttttcggggatgacgggtacctctacatcttcactggagatggcgggatggccggagacccctttgggacatttggaaatgcccaaaacaagtcggcgctgctgggcaaggtgctgcgcatcgacgtggaccgtaaggagcgcggcctgccctacggcatcccgcccgacaacccgttcgtgggcgaccccgcggcgcagcccgaggtctacgccctgggcgtgcgcaacatgtggcgctgctccttcgaccgtggcgacccctcctcgggcactggccgcgggcgcctcttctgcggcgacgtgggccagaacaagttcgaggaggtggacgtggtggagcgcggcggcaactatggctggcgcgcgcgcgaagggttcgagtgctacgaccgcagcctgtgcgccaacacctctctcaatgacttgctgccgattttcgcctacccgcacacggttggcaagtcggtcacagggggctacgtgtaccggggctgcgagtaccccaacctgaacggcctctacatttttggggatttcatgagcgggcgtctgatgtccctccaagagaacccagggacaggccagtggcagtacagtgagatctgcatgggccacggccagacctgtgagttcccaggcctcatcaacaactactacccgtacatcatctccttcggggaggacgaggccggggagctgtacttcatgtcgacaggggagccgagtgccacagctccacgcggagttgtctacaaaataattgacgcatccagctgtaaggccagaagcgccatgcccggctatgtcccagctccttccgtgtgcagctcattgacgtctcagccgttcattttacagtggtggaaatgagcacaaagacacgaagtcatgggcctggggcccagggccagggtggggcccaggccactggctccagagccctgccctaaccccttggctgtgtgccttcacctcaccctcttcaagcaccttccccaacccacgttgccctccaggcctctgtccagcccttcctcagctctcatcactcagacttggtaatccctgggctacacgactgactctctcccagctgctctgggagtctcagggccaagcctgtatctcttcactctgcagaggccgcccaggtgctgggaatggcacggagcagagactcaggaacacttgatgaataaatgagtgatcagctttctaa

SEQ ID NO: 140679 - DNA, 2575 bp, Homo sapiens
  Payload ID: 7590
  Gene Symbol: HHIPL2
  Gene Name: HHIP-like 2
  Uniprot ID: Q6UWX4
  ENST ID: ENST00000343410
  CDS Start-End: 60-2234
ggcagagcagggaagccaacctgagcaaacacagcagcccgagtgttcccaaggccaaaatgctgagaacgtccactcctaatctgtgtggtggtctgcattgccgggccccctggctctcttctggcattctctgcctctgcctcatattcttgttgggccaggtgggcttgctgcagggacacccccagtgcctggattacgggccccctttccagccccctctgcaccttgagttttgctctgactatgagtccttcggctgctgtgatcagcacaaggaccgccgcatcgctgcccggtactgggacatcatggaatattttgatctgaagagacatgagctgtgtggagattacattaaagacatcctttgccaggagtgctcgccctacgcagcccacctctacgacgccgaaaacacccagacgcctctccggaatctcccgggcctctgctctgattactgctctgccttccattctaactgtcactcagccatttccctgctgaccaatgaccgcggcctccaggagtctcatggaagggacggtacccgcttctgccacctcctggaccttcctgacaaggactattgcttccctaatgtcctgaggaacgactatctcaaccgccacctgggcatggtggcccaagatcctcagggctgcctgcagctctgcctgagcgaggtggccaacgggctgaggaaccccgtctccatggtccatgctggggacggcacccatcgcttctttgttgccgagcaggtaggagtggtgtgggtctacctccctgatgggagtcgcctggagcaacccttcctggacctcaagaacatcgtgttgaccaccccatggatcggggatgagagaggcttcttggggttggcttttcaccccaaattccgccacaatcgcaagttctatatttattattcgtgcctggacaagaagaaggtagaaaagatccgaattagtgagatgaaggtttctcgggctgatcctaacaaagctgacctgaaatcagagagggtcatcttggagattgaagaaccagcctcaaaccataatggcggacaacttctttttggcctggatggctatatgtacatattcactggggacgggggacaggctggagatccctttggcctgtttggaaatgctcagaacaaaagttccctgctgggaaaagttttaaggatcgatgtgaacagggcaggctcacatggcaagcggtaccgagtcccctcggacaatccatttgtttctgagccaggggcccaccccgccatctatgcctatgggatcaggaacatgtggcgttgtgctgtggaccgaggggaccccatcacgcgccagggccgaggccggatattctgtggggacgtgggccagaacaggtttgaagaggttgacctcattttgaaaggtggaaactatggctggagagcaaaggaagggtttgcatgttatgacaaaaaactttgtcacaatgcctctttggatgatgttctgccaatctatgcttatggccatgcagtggggaagtcagtcactggaggttatgtctatcgtggttgtgaatccccaaatctcaatggcctgtatatctttggagacttcatgagtggtcgacttatggctttgcaggaagatagaaaaaacaagaaatggaagaagcaggatctttgcctgggcagcaccacgtcctgtgccttcccagggctgatcagcacccatagcaagttcatcatctcctttgctgaagatgaagcaggggagctgtatttcctggcgacctcttacccaagtgcctatgcaccacgtggatctatttacaagtttgttgacccctcaaggcgagcacccccaggcaagtgcaaatacaagccagtgcccgtgagaaccaagagtaagcggatcccgttcagaccactcgccaagacagtcttggacttgctaaaggaacaatcagagaaagctgctagaaaatcttccagtgcaaccttagcttctggcccagcccagggtttgtctgagaaaggctcctccaagaagctggcttctcctacaagcagcaagaatacattgcgagggcctggtacaaagaagaaagccagagtggggccccacgtccgccagggcaagaggaggaagagcctgaaaagccacagtggcaggatgaggccatcagcagagcagaagcgagctggcagaagtctcccttgacctattggtcaaggtggccgacagggtgacgtgagagaggagagccacctcatcaaatgaaagtcactgctgaataaagaccttagaagtctgggaagccagggtagaggtggggcagggcggttttcctctccctgggaaatcttgctgtctactgaataaataaatgcaccttctctgtatgcagtgcttctgtgggagaccatatcccagattgctggtgcacctgggttatggtaagcactagtccatgagcctgcttggaatcacactggatgtctccgttttgtcttgtaaatgcctacaacctgaggtaataaatcaacatttgctcaaactgg

SEQ ID NO: 140680 - DNA, 762 bp, Homo sapiens
  Payload ID: 7591
  Gene Symbol: HID1
  Gene Name: HID1 domain containing
  ENST ID: ENST00000318565
  CDS Start-End: 1-748
cgacagtgccagcagtgccagccccactgtggacggcaccaccactggcaccgccatggatgatgccgatcctccaggccctgagaacctgtttgtgaactacctgtcccgcatccatcgtgaggaggacttccagttcatcctcaagggtatagcccggctgctgtccaaccccctgctccagacctacctgcctaactccaccaagaagatccagttccaccaggagctgctagttctcttctggaagctctgcgacttcaacaagaaattcctcttcttcgtgctgaagagcagcgacgtcctagacatccttgtccccatcctcttcttcctcaacgatgcccgggccgatcagtctcgggtgggcctgatgcacattggtgtcttcatcttgctgcttctgagcggggagcggaacttcggggtgcggctgaacaaaccctactcaatccgcgtgcccatggacatcccagtcttcacagggacccacgccgacctgctcattgtggtgttccacaagatcatcaccagcgggcaccagcggttgcagcccctcttcgactgcctgctcaccatcgtggtcaacggtaggggcccggagcttgcactccccgcgctcaccaccaggtggtgtcaggccacaggccaacctgccacttgctccaggtttcaagcccctccagcccacagaaagaacgcaagcttgtgtacccttcatagtagccacattaaaaaaaaagggtgacaacaattgaataa

SEQ ID NO: 140681 - DNA, 3271 bp, Homo sapiens
  Payload ID: 7591
  Gene Symbol: HID1
  Gene Name: HID1 domain containing
  Uniprot ID: Q8IV36
  ENST ID: ENST00000425042
  CDS Start-End: 79-2445
gcggagctggagccggagctgaagccggagccgggttggagtctgggcgggggccgggccggagcgggctccagagacatggggtcgaccgactccaagctgaacttccggaaggcggtgatccagctcaccaccaagacgcagcccgtggaagccaccgatgatgccttttgggaccagttctgggcagacacagccacctcggtgcaggatgtgtttgcactggtgccggcagcagagatccgggccgtgcgggaagagtcaccctccaacttggccaccctgtgctacaaggccgttgagaagctggtgcagggagctgagagtggctgccactcggagaaggagaagcagatcgtcctgaactgcagccggctgctcacccgcgtgctgccctacatctttgaggaccccgactggaggggcttcttctggtccacagtgcccggggcagggcgaggagggcagggagaagaggatgatgagcatgccaggcccctggccgagtccctgctcctggccattgctgacctgctcttctgcccggacttcacggttcagagccaccggaggagcactgtggactcggcagaggacgtccactccctggacagctgtgaatacatctgggaggctggtgtgggcttcgctcactccccccagcctaactacatccacgatatgaaccggatggagctgctgaaactgctgctgacatgcttctccgaggccatgtacctgcccccagctccggaaagtggcagcaccaacccatgggttcagttcttttgttccacggagaacagacatgccctgcccctcttcacctccctcctcaacaccgtgtgtgcctatgaccctgtgggctacgggatcccctacaaccacctgctcttctctgactaccgggaacccctggtggaggaggctgcccaggtgctcattgtcactttggaccacgacagtgccagcagtgccagccccactgtggacggcaccaccactggcaccgccatggatgatgccgatcctccaggccctgagaacctgtttgtgaactacctgtcccgcatccatcgtgaggaggacttccagttcatcctcaagggtatagcccggctgctgtccaaccccctgctccagacctacctgcctaactccaccaagaagatccagttccaccaggagctgctagttctcttctggaagctctgcgacttcaacaagaaattcctcttcttcgtgctgaagagcagcgacgtcctagacatccttgtccccatcctcttcttcctcaacgatgcccgggccgatcagtctcgggtgggcctgatgcacattggtgtcttcatcttgctgcttctgagcggggagcggaacttcggggtgcggctgaacaaaccctactcaatccgcgtgcccatggacatcccagtcttcacagggacccacgccgacctgctcattgtggtgttccacaagatcatcaccagcgggcaccagcggttgcagcccctcttcgactgcctgctcaccatcgtggtcaacgtgtccccctacctcaagagcctgtccatggtgactgccaacaagttgctgcacctgctggaggccttctccaccacctggttcctcttctctgccgcccagaaccaccacctggtcttcttcctcctggaggtcttcaacaacatcatccagtaccagtttgatggcaactccaacctggtctacgccatcatccgcaagcgcagcatcttccaccagctggccaacctgcccacggacccgcccaccattcacaaggccctgcagcggcgccggcggacacctgagcccttgtctcgcaccggctcccaggagggcacctccatggagggctcccgccccgctgcccctgcagagccaggcaccctcaagaccagtctggtggctactccaggcattgacaagctgaccgagaagtcccaggtgtcagaggatggcaccttgcggtccctggaacctgagccccagcagagcttggaggatggcagcccggctaagggggagcccagccaggcatggagggagcagcggcgaccgtccacctcatcagccagtgggcagtggagcccaacgccagagtgggtcctctcctggaagtcgaagctgccgctgcagaccatcatgaggctgctgcaggtgctggttccgcaggtggagaagatctgcattgacaagggcctgacggatgagtctgagatcctgcggttcctgcagcatggcaccctggtggggctgctgcccgtgccccaccccatcctcatccgcaagtaccaggccaactcgggcactgccatgtggttccgcacctacatgtggggcgtcatctatctgaggaatgtggacccccctgtctggtacgacaccgacgtgaagctgtttgagatacagcgggtgtgaggatgaagccgacgaggggctcagtctaggggaaggcagggccttggtccctgaggcttcccccatccaccattctgagctttaaattaccacgatcagggcctggaacaggcagagtggccctgagtgtcatgccctagagacccctgtggccaggacaatgtgaactggctcagatccccctcaacccctaggctggactcacaggagccccatctctggggctatgcccccaccagagaccactgcccccaacactcggactccctctttaagacctggctcagtgctggcccctcagtgcccacccactcctgtgctacccagccccagaggcagaagccaatgggtcactgtgccctaaggggtttgaccagggaaccacgggctgtcccttgaggtgcctggacagggtaagggggtgcttccagcctcctaacccaaagccagctgttccaggctccaggggaaaaaggtgtggccaggctgctcctcgaggaggctgggagctggccgactgcaaaagccagactggggcacctcccgtatccttggggcatggtgtggggtggtgagggtctcctgctatattctcctggatccatggaaatagcctggctccctcttacccagtaatgaggggcagggaagggaactgggaggcagccgtttagtcctccctgccctgcccactgcctggatggggcgatgccacccctcatccttcacccagctctggcctctgggtcccaccacccagccccccgtgtcagaacaatctttgctctgtacaatcggcctctttacaataaaacctcctgctcca

SEQ ID NO: 140682 - DNA, 820 bp, Homo sapiens
  Payload ID: 7591
  Gene Symbol: HID1
  Gene Name: HID1 domain containing
  ENST ID: ENST00000530857
  CDS Start-End: 61-820
ctgaagccggagccgggttggagtctgggcgggggccgggccggagcgggctccagagacatggggtcgaccgactccaagctgaacttccggaaggcggtgatccagctcaccaccaagacgcagggagaagaggatgatgagcatgccaggcccctggccgagtccctgctcctggccattgctgacctgctcttctgcccggacttcacggttcagagccaccggaggagcactgtggactcggcagaggacgtccactccctggacagctgtgaatacatctgggaggctggtgtgggcttcgctcactccccccagcctaactacatccacgatatgaaccggatggagctgctgaaactgctgctgacatgcttctccgaggccatgtacctgcccccagctccggaaagtggcagcaccaacccatgggttcagttcttttgttccacggagaacagacatgccctgcccctcttcacctccctcctcaacaccgtgtgtgcctatgaccctgtgggctacgggatcccctacaaccacctgctcttctctgactaccgggaacccctggtggaggaggctgcccaggtgctcattgtcactttggaccacgacagtgccagcagtgccagccccactgtggacggcaccaccactggcaccgccatggatgatgccgatcctccaggccctgagaacctgtttgtgaactacctgtcccgcatccatcgtgaggaggacttccagttcatcctcaagggtatagcccggctgctgtccaaccccctgctccagacctacctgcctaactcca

SEQ ID NO: 140683 - DNA, 2514 bp, Homo sapiens
  Payload ID: 7591
  Gene Symbol: HID1
  Gene Name: HID1 domain containing
  ENST ID: ENST00000534480
  CDS Start-End: 65-640
ggagctgaagccggagccgggttggagtctgggcgggggccgggccggagcgggctccagagacatggggtcgaccgactccaagctgaacttccggaaggcggtgatccagctcaccaccaagacgcagcccgtggaagccaccgatgatgccttttgggaccagttctgggcagacacagccacctcggtgcaggatgtgtttgcactggtgccggcagcagagatccgggccgtgcgggaagagtcaccctccaacttggccaccctgtgctacaaggccgttgagaagctggtgcagggagctgagagtggctgccactcggagaaggagaagcagatcgtcctgaactgcagccggctgctcacccgcgtgctgccctacatctttgaggaccccgactggaggggcttcttctgcagggagaagaggatgatgagcatgccaggcccctggccgagtccctgctcctggccattgctgacctgctcttctgcccggacttcacggttcagagccaccggaggagcactgtggactcggcagaggacgtccactccctggacagctgtgaatacatctgggaggctggtgtgggcttcgctcactccccccagcctaactacatccacgatatgaaccggatggagctgctgaaactgctgctgacatgcttctccgaggccatgtacctgcccccagctccggaaagtggcagcaccaacccatgggttcagttcttttgttccacggagaacagacatgccctgcccctcttcacctccctcctcaacaccgtgtgtgcctatgaccctgtgggctacgggatcccctacaaccacctgctcttctctgactaccgggaacccctggtggaggaggctgcccaggtgctcattgtcactttggaccacgacagtgccagcagtgccagccccactgtggacggcaccaccactggcaccgccatggatgatgccgatcctccaggccctgagaacctgtttgtgaactacctgtcccgcatccatcgtgaggaggacttccagttcatcctcaagggtatagcccggctgctgtccaaccccctgctccagacctacctgcctaactccaccaagaagatccagttccaccaggagctgctagttctcttctggaagctctgcgacttcaacaagaaattcctcttcttcgtgctgaagagcagcgacgtcctagacatccttgtccccatcctcttcttcctcaacgatgcccgggccgatcagtctcgggtgggcctgatgcacattggtgtcttcatcttgctgcttctgagcggggagcggaacttcggggtgcggctgaacaaaccctactcaatccgcgtgcccatggacatcccagtcttcacagggacccacgccgacctgctcattgtggtgttccacaagatcatcaccagcgggcaccagcggttgcagcccctcttcgactgcctgctcaccatcgtggtcaacgtgtccccctacctcaagagcctgtccatggtgactgccaacaagttgctgcacctgctggaggccttctccaccacctggttcctcttctctgccgcccagaaccaccacctggtcttcttcctcctggaggtcttcaacaacatcatccagtaccagtttgatggcaactccaacctggtctacgccatcatccgcaagcgcagcatcttccaccagctggccaacctgcccacggacccgcccaccattcacaaggccctgcagcggcgccggcggacacctgagcccttgtctcgcaccggctcccaggagggcacctccatggagggctcccgccccgctgcccctgcagagccaggcaccctcaagaccagtctggtggctactccaggcattgacaagctgaccgagaagtcccaggtgtcagaggatggcaccttgcggtccctggaacctgagccccagcagagcttggaggatggcagcccggctaagggggagcccagccaggcatggagggagcagcggcgaccgtccacctcatcagccagtgggcagtggagcccaacgccagagtgggtcctctcctggaagtcgaagctgccgctgcagaccatcatgaggctgctgcaggtgctggttccgcaggtggagaagatctgcattgacaagggcctgacggatgagtctgagatcctgcggttcctgcagcatggcaccctggtggggctgctgcccgtgccccaccccatcctcatccgcaagtaccaggccaactcgggcactgccatgtggttccgcacctacatgtggggcgtcatctatctgaggaatgtggacccccctgtctggtacgacaccgacgtgaagctgtttgagatacagcgggtgtgaggatgaagccgacgaggggctcagtctaggggaaggcagggccttggtccctgaggcttcccccatccaccattctgagctttaaattaccacgatcagggcctggaacaggca

SEQ ID NO: 140684 - DNA, 458 bp, Homo sapiens
  Payload ID: 7591
  Gene Symbol: HID1
  Gene Name: HID1 domain containing
  ENST ID: ENST00000581676
  CDS Start-End: 116-458
ggcgcgccgcttgtctcctgcgagagccgcgggggccgcggagctggagccggagctgaagccggagccgggttggagtctgggcgggggccgggccggagcgggctccagagacatggggtcgaccgactccaagctgaacttccggaaggcggtgatccagctcaccaccaagacgcaggccgttgagaagctggtgcagggagctgagagtggctgccactcggagaaggagaagcagatcgtcctgaactgcagccggctgctcacccgcgtgctgccctacatctttgaggaccccgactggaggggcttcttctggtccacagtgcccggggcagggcgaggagggggagaagaggatgatgagcatgccaggcccctggccgagtccctgctcctggccattgctgacctgctcttctgcccggacttcacggttcagagccaccggagga

SEQ ID NO: 140685 - DNA, 1373 bp, Homo sapiens
  Payload ID: 7592
  Gene Symbol: HIGD1A
  Gene Name: HIG1 hypoxia inducible domain family, member 1A
  Uniprot ID: Q9Y241
  ENST ID: ENST00000321331
  CDS Start-End: 119-400
ggctgggacggctgtgggtggggagaagccgggaggactgggtgcgcctgcagggatcggaagccggttggggtgtgagaggttttctcgctctagggagattcttcaagcaatcactatgtcaacagacacaggtgtttcccttccttcatatgaggaagatcagggatcaaaactcattcgaaaagctaaagaggcaccattcgtacccgttggaatagcgggttttgcagcaattgttgcatatggattatataaactgaagagcaggggaaatactaaaatgtccattcatctgatccacatgcgtgtggcagcccaaggctttgttgtaggagcaatgactgttggtatgggctattccatgtatcgggaattctgggcaaaacctaagccttagaagaagagatgctgtcttggtcttgttggaggagcttgctttagttagatgtcttattattaaagttacctattattgttggaaataaactaatttgtatgggtttagatggtaacatggcattttgaatattggcttcctttcttgcaggcttgatttgcttggtgaccgaattactagtgactagtttactaactaggtcattcaaggaagtcaagttaacttaaacatgtcacctaaatgcacttgatggtgttgaaatgtccaccttcttaaatttttaagatgaacttagttctaaagaagataacaggccaatcctgaaggtactccctgtttgctgcagaatgtcagatattttggatgttgcataagagtcctatttgccccagttaattcaacttttgtctgcctgttttgtggactggctggctctgttagaactctgtccaaaaagtgcatggaatataacttgtaaagcttcccacaattgacaatatatatgcatgtgtttaaaccaaatccagaaagcttaaacaatagagctgcataatagtatttattaaagaatcacaactgtaaacatgagaataatttaaggattctagtttagttttttgtaattgcaaattatatttttgctgctgatatattagaataatttttaaatgtcatcttgaaatagaaatatgtattttaagcactcacgcaaaggtaaatgaacacgttttaaatgtgtgtgttgctaattttttccataagaattgtaaacattgaactgaacaaattacctataatggatttggttaatgacttatgagcaagctggtttggccagacagtatacccaaacttttatataatatacagaaggctatcacacttgtgaaattctcttgtctaatctgaatttgcattccatggtgttaacatggtatatgtattgttattaaagtaagtgacccatgtcaaa

SEQ ID NO: 140686 - DNA, 585 bp, Homo sapiens
  Payload ID: 7592
  Gene Symbol: HIGD1A
  Gene Name: HIG1 hypoxia inducible domain family, member 1A
  Uniprot ID: Q9Y241
  ENST ID: ENST00000452906
  CDS Start-End: 243-566
aagcgaaacaagccgggggactgcgagccagggactcgggccgcggggcgggaagaagtggggcagcgcttggccaggccgaaaggactttgggggtgggggctgggagtccgtgtctcgaatgagggaggagaggtggagttgccggggctcaggcccggcctcgagcatgggcggatgagaggagtcgggagccgaggcctagggtccttcgggtgaggggagacggagccagcgaggagatggagcagaagcttgtggaggagattcttcaagcaatcactatgtcaacagacacaggtgtttcccttccttcatatgaggaagatcagggatcaaaactcattcgaaaagctaaagaggcaccattcgtacccgttggaatagcgggttttgcagcaattgttgcatatggattatataaactgaagagcaggggaaatactaaaatgtccattcatctgatccacatgcgtgtggcagcccaaggctttgttgtaggagcaatgactgttggtatgggctattccatgtatcgggaattctgggcaaaacctaagccttagaagaagagatgctgtcttg

SEQ ID NO: 140687 - DNA, 1322 bp, Homo sapiens
  Payload ID: 7592
  Gene Symbol: HIGD1A
  Gene Name: HIG1 hypoxia inducible domain family, member 1A
  Uniprot ID: Q9Y241
  ENST ID: ENST00000418900
  CDS Start-End: 100-381
gcgcctgcagggatcggaagccggttggggtgtgagaggttttctcgctctagaacctcatagaaattctttctcagggagattcttcaagcaatcactatgtcaacagacacaggtgtttcccttccttcatatgaggaagatcagggatcaaaactcattcgaaaagctaaagaggcaccattcgtacccgttggaatagcgggttttgcagcaattgttgcatatggattatataaactgaagagcaggggaaatactaaaatgtccattcatctgatccacatgcgtgtggcagcccaaggctttgttgtaggagcaatgactgttggtatgggctattccatgtatcgggaattctgggcaaaacctaagccttagaagaagagatgctgtcttggtcttgttggaggagcttgctttagttagatgtcttattattaaagttacctattattgttggaaataaactaatttgtatgggtttagatggtaacatggcattttgaatattggcttcctttcttgcaggcttgatttgcttggtgaccgaattactagtgactagtttactaactaggtcattcaaggaagtcaagttaacttaaacatgtcacctaaatgcacttgatggtgttgaaatgtccaccttcttaaatttttaagatgaacttagttctaaagaagataacaggccaatcctgaaggtactccctgtttgctgcagaatgtcagatattttggatgttgcataagagtcctatttgccccagttaattcaacttttgtctgcctgttttgtggactggctggctctgttagaactctgtccaaaaagtgcatggaatataacttgtaaagcttcccacaattgacaatatatatgcatgtgtttaaaccaaatccagaaagcttaaacaatagagctgcataatagtatttattaaagaatcacaactgtaaacatgagaataatttaaggattctagtttagttttttgtaattgcaaattatatttttgctgctgatatattagaataatttttaaatgtcatcttgaaatagaaatatgtattttaagcactcacgcaaaggtaaatgaacacgttttaaatgtgtgtgttgctaattttttccataagaattgtaaacattgaactgaacaaattacctataatggatttggttaatgacttatgagcaagctggtttggccagacagtatacccaaacttttatataatatacagaaggctatcacacttgtgaaattctcttgtctaatctgaatttgcattccatggtgttaacatggtatatg

SEQ ID NO: 140688 - DNA, 741 bp, Homo sapiens
  Payload ID: 7592
  Gene Symbol: HIGD1A
  Gene Name: HIG1 hypoxia inducible domain family, member 1A
  ENST ID: ENST00000430190
  CDS Start-End: 78-368
gtgcgcctgcagggatcggaagccggttggggtgtgagaggttttctcgctctagggagattcttcaagcaatcactatgtcaacagacacaggtgtttcccttccttcatatgaggaagatcagggatcaaaactcattcgaaaagctaaagaggcaccattcgtacccgttggaatagcgggttttgcagcaattgttgcatatggattatataaactgaagagcaggggaaatactaaaatgtccattcatctgatccacatgcgtgtggcagcccaaggctttgttgtaggagcaatgactgttgcattctttttctttaggtatgggctattccatgtatcgggaattctgggcaaaacctaagccttagaagaagagatgctgtcttggtcttgttggaggagcttgctttagttagatgtcttattattaaagttacctattattgttggaaataaactaatttgtatgggtttagatggtaacatggcattttgaatattggcttcctttcttgcaggcttgatttgcttggtgaccgaattactagtgactagtttactaactaggtcattcaaggaagtcaagttaacttaaacatgtcacctaaatgcacttgatggtgttgaaatgtccaccttcttaaatttttaagatgaacttagttctaaagaagataacaggccaatcctgaaggtactccctgtttgctgcagaatgtcagatattttggatg

SEQ ID NO: 140689 - DNA, 635 bp, Homo sapiens
  Payload ID: 7593
  Gene Symbol: HIGD1B
  Gene Name: HIG1 hypoxia inducible domain family, member 1B
  Uniprot ID: Q9P298
  ENST ID: ENST00000253410
  CDS Start-End: 252-551
ggggaagaggcagatggtaggaaatggagacggagaaatggcactaatggcccagccacctgagatgggatacctgggagggacatcttttcaagtagaggctgtgttggggcatggtgagagagggtcttagcaggtaaccttcctttcctctccagactgaggaatcagagttctgattgtggagtgcctctctctaggacggggctgcagcataggagtctcagctgcttacatccaggtccaggattatgtctgctaacagacgctggtgggtaccacctgacgacgaagactgtgtgtctgagaagctcctgaggaagactcgggaatctccactggtgcctataggcttaggaggctgcttggtggtagcagcatacaggatttaccggctgaggtctcgtggttccaccaagatgtccatacacctgattcacacccgagtggcagcgcaggcctgtgcagtgggtgcaatcatgctaggtgctgtgtacacaatgtacagcgattacgtcaagaggatggcacaggatgctggagagaagtaggactcctataggagccggggctgtccaactcccctaactcaatccctggtacattcctaataaagcagttttgaggaaaatcaa

SEQ ID NO: 140690 - DNA, 457 bp, Homo sapiens
  Payload ID: 7593
  Gene Symbol: HIGD1B
  Gene Name: HIG1 hypoxia inducible domain family, member 1B
  ENST ID: ENST00000587021
  CDS Start-End: 213-377
ggcactaatggcccagccacctgagatgggatacctgggagggacatcttttcaagtagaggctgtgttggggcatggtgagagagggtcttagcaggtaaccttcctttcctctccagactgaggaatcagagttctgattgtggagtgcctctctctaggacggggctgcagcataggagtctcagctgcttacatccaggtccaggattatgtctgctaacagacgctggtgggtaccacctgacgacgaagactgtgtgtctgagaagctcctgaggaagactcgggaatctccactggtgcctataggtgctgtgtacacaatgtacagcgattacgtcaagaggatggcacaggatgctggagagaagtaggactcctataggagccggggctgtccaactcccctaactcaatccctggtacattcctaataaagcagttttgaggaaaa

SEQ ID NO: 140691 - DNA, 470 bp, Homo sapiens
  Payload ID: 7593
  Gene Symbol: HIGD1B
  Gene Name: HIG1 hypoxia inducible domain family, member 1B
  ENST ID: ENST00000586911
  CDS Start-End: 1-122
agctcctgaggaagactcgggaatctccactggtgcctataggtcccccgcaacgcccaccccccgccaccagatgctgcataaaaccagctgtttatccagatgcccagcctgcctggtaaggtatctctcatcaggggagtgctgtgcattgtggctgtggcccaggggctgtgttctctgcccacaggcttaggaggctgcttggtggtagcagcatacaggatttaccggctgaggtctcgtggttccaccaagatgtccatacacctgattcacacccgagtggcagcgcaggcctgtgcagtgggtgcaatcatgctaggtgctgtgtacacaatgtacagcgattacgtcaagaggatggcacaggatgctggagagaagtaggactcctataggagccggggctgtccaactcccctaactcaatccctggtacattcctaataaagcagttttgaggaaaa

SEQ ID NO: 140692 - DNA, 547 bp, Homo sapiens
  Payload ID: 7593
  Gene Symbol: HIGD1B
  Gene Name: HIG1 hypoxia inducible domain family, member 1B
  Uniprot ID: Q9P298
  ENST ID: ENST00000591513
  CDS Start-End: 168-467
ttggtcggttcaaaacagcagacgctgagccctggcctggccgcccgttctcctcgttctagccatctcttaggactgaggaatcagagttctgattgtggagtgcctctctctaggacggggctgcagcataggagtctcagctgcttacatccaggtccaggattatgtctgctaacagacgctggtgggtaccacctgacgacgaagactgtgtgtctgagaagctcctgaggaagactcgggaatctccactggtgcctataggcttaggaggctgcttggtggtagcagcatacaggatttaccggctgaggtctcgtggttccaccaagatgtccatacacctgattcacacccgagtggcagcgcaggcctgtgcagtgggtgcaatcatgctaggtgctgtgtacacaatgtacagcgattacgtcaagaggatggcacaggatgctggagagaagtaggactcctataggagccggggctgtccaactcccctaactcaatccctggtacattcctaataaagcagttttgaggaaaa

SEQ ID NO: 140693 - DNA, 371 bp, Homo sapiens
  Payload ID: 7594
  Gene Symbol: HIGD1C
  Gene Name: HIG1 hypoxia inducible domain family, member 1C
  Uniprot ID: A8MV81
  ENST ID: ENST00000398455
  CDS Start-End: 78-371
gatgggagaggaaaaacaaattatttttaatgattcacggcaaccacatttatatcctattgttactagagaaaaaaatgtcttcagataaccagtggtcagcagatgaggatgaaggccaattatcccgactaatcaggaaatctagagactccccctttgtccctataggtatagcaggctttgtgactgtggtgtcctgtggtctttacaagctaaagtacagaagagatcagaaaatgtcaattcatcttattcacatgagagttgctgcccaaggatttgttgttggagctgtgactctaggtgttctctattctatgtataaggattacattagaccacgattcttcagtgagtccaaaaaatga

SEQ ID NO: 140694 - DNA, 668 bp, Homo sapiens
  Payload ID: 7595
  Gene Symbol: HIGD2A
  Gene Name: HIG1 hypoxia inducible domain family, member 2A
  Uniprot ID: Q9BW72
  ENST ID: ENST00000274787
  CDS Start-End: 74-394
ccgcccctttcatgaccttcaccgggaggctgaggtcggagtcccgattttctcctgctgctgtggcccggacatggcgactcccggccctgtgattccggaggtcccctttgaaccatcgaagcctccagtcattgaggggctgagccccactgtttacaggaatccagagagtttcaaggaaaagttcgttcgcaagacccgcgagaacccggtggtacccataggttgcctggccacggcggccgccctcacctacggcctctactccttccaccggggcaacagccagcgctctcagctcatgatgcgcacccggatcgccgcccagggtttcacggtcgcagccatcttgctgggtctggctgtcactgctatgaagtctcgaccctaagcccagggtctggccttgaaagctccgcagaaatgattccaaaacccagggagcaaccactggccctaccgtgggacttactccctcctctcctttgagaggcccatgtgtcgctggggaggaagtgaccctttgtgtaactgtaaccgaaagttttttcaaaaatcctagatgctgttgtttgaatgttacatacttctatttgtgccacatctcccctccactcccctgcttaataaactctaaaaatccacttgtatttaattcagtatca

SEQ ID NO: 140695 - DNA, 1116 bp, Homo sapiens
  Payload ID: 7596
  Gene Symbol: HIGD2B
  Gene Name: HIG1 hypoxia inducible domain family, member 2B
  Uniprot ID: Q4VC39
  ENST ID: ENST00000311755
  CDS Start-End: 525-845
ggaggactgtgaggaagcgggggaaggaagtaaatcgccgagtgacctaaggaatcagggggaggattagggtctgctccacagaaggcttacctctgaaagagtcggggagggaatgcgcagccactcgctgcctttatcccgagaagcccctaacacccctcgccgtggtctgtacatggtctgtacctccggccgcgctggctggtaggccagccacctgggatggcagcctagttctcccgccaccttaccctgccctgactctaatctgcatttaattcagtccttcttccgggagatttcggcggagaatttctttctcgccttagctactgaggtcaaacctgaaataggctgtagactccaccagctgggtaagaatgggaagaagatcagaaaacctaaactttggttgatggactattttgcccaggcaaaagcagggaatctatgaggaatatgaagacattcgtcgggagaactctgttggcactttccactgttccatctgtggcctaggcatggcgactctcggctttgtgactccggaggccccctttgaatcatcgaagccccccatctttgaggggcttagccccactgtttacagcaatccagagggtttcaaggaaaagttccttcgcaagacccgcgagaatccggtggtacccataggtttcctgtgcacggcggccgtcctcaccaacggcctctactgcttccaccagggcaacagccaatgttcacggcttatgatgcacacccagatcgccgcccagggcttcaccattgcagccatcttgctgggtctagctgccaccgctatgaagtctccaccctgagcccagggtcttgaaaactctgcagaaatcattccaaaacccaggagcaaccactggccctaccatgggacttactctctcctctcctttgagaggtccctgtgtcgttgggggaggaagtgacccttcctgtaaccataactgaaagattttttcaaaaatcccagattctgttgtttgaatgttacatatttctatttgtgccacatcttccctccactcccctgcttaataaactctaaaaataagaaaaaagtaaaaaattacacac

SEQ ID NO: 140696 - DNA, 4571 bp, Homo sapiens
  Payload ID: 7597
  Gene Symbol: HDLBP
  Gene Name: high density lipoprotein binding protein
  ENST ID: ENST00000310931
  CDS Start-End: 376-4182
tttgccaactgcttcctggctcagtgcgacctggccttcttcccctcccccatgcggccggcttccgagtgcgcaagcccagagtcgtccgcgttgtccgcctctgcgcaagcgccgtgctcctcccacggcagttggccatatagaggctgggggtggggggggaggtcaagcgtagcctcttctcctttaccaagatggcggcttgtccctgtttcgccacagttcctaccttatgagctcggttttcttatgcttataagagtggaacagcaaaagctggcaggctgacagaggcggcctcaggacggaccttctggctactgaccgttttgctgtggttttcccggattgtgtgtaggtgtgagatcaaccatgagttccgttgcagttttgacccaagagagttttgctgaacaccgaagtgggctggttccgcaacaaatcaaagttgccactctaaattcagaagaggagagcgaccctccaacctacaaggatgccttccctccacttcctgagaaagctgcttgcctggaaagtgcccaggaacccgctggagcctgggggaacaagatccgacccatcaaggcttctgtcatcactcaggtgttccatgtacccctggaggagagaaaatacaaggatatgaaccagtttggagaaggtgaacaagcaaaaatctgccttgagatcatgcagagaactggtgctcacttggagctgtctttggccaaagaccaaggcctctccatcatggtgtcaggaaagctggatgctgtcatgaaagctcggaaggacattgttgctagactgcagactcaggcctcagcaactgttgccattcccaaagaacaccatcgctttgttattggcaaaaatggagagaaactgcaagacttggagctaaaaactgcaaccaaaatccagatcccacgcccagatgaccccagcaatcagatcaagatcactggcaccaaagagggcatcgagaaagctcgccatgaagtcttactcatctctgccgagcaggacaaacgtgctgtggagaggctagaagtagaaaaggcattccaccccttcatcgctgggccgtataatagactggttggcgagatcatgcaggagacaggcacgcgcatcaacatccccccacccagcgtgaaccggacagagattgtcttcactggagagaaggaacagttggctcaggctgtggctcgcatcaagaagatttatgaggagaagaaaaagaagactacaaccattgcagtggaagtgaagaaatcccaacacaagtatgtcattgggcccaagggcaattcattgcaggagatccttgagagaactggagtttccgttgagatcccaccctcagacagcatctctgagactgtaatacttcgaggcgaacctgaaaagttaggtcaggcgttgactgaagtctatgccaaggccaatagcttcaccgtctcctctgtcgccgccccttcctggcttcaccgtttcatcattggcaagaaagggcagaacctggccaaaatcactcagcagatgccaaaggttcacatcgagttcacagagggcgaagacaagatcaccctggagggccctacagaggatgtcaatgtggcccaggaacagatagaaggcatggtcaaagatttgattaaccggatggactatgtggagatcaacatcgaccacaagttccacaggcacctcattgggaagagcggtgccaacataaacagaatcaaagaccagtacaaggtgtccgtgcgcatccctcctgacagtgagaagagcaatttgatccgcatcgagggggacccacagggcgtgcagcaggccaagcgagagctgctggagcttgcatctcgcatggaaaatgagcgtaccaaggatctaatcattgagcaaagatttcatcgcacaatcattgggcagaagggtgaacggatccgtgaaattcgtgacaaattcccagaggtcatcattaactttccagacccagcacaaaaaagtgacattgtccagctcagaggacctaagaatgaggtggaaaaatgcacaaaatacatgcagaagatggtggcagatctggtggaaaatagctattcaatttctgttccgatcttcaaacagtttcacaagaatatcattgggaaaggaggcgcaaacattaaaaagattcgtgaagaaagcaacaccaaaatcgaccttccagcagagaatagcaattcagagaccattatcatcacaggcaagcgagccaactgcgaagctgcccggagcaggattctgtctattcagaaagacctggccaacatagccgaggtagaggtctccatccctgccaagctgcacaactccctcattggcaccaagggccgtctgatccgctccatcatggaggagtgcggcggggtccacattcactttcccgtggaaggttcaggaagcgacaccgttgttatcaggggcccttcctcggatgtggagaaggccaagaagcagctcctgcatctggcggaggagaagcaaaccaagagtttcactgttgacatccgcgccaagccagaataccacaaattcctcatcggcaaggggggcggcaaaattcgcaaggtgcgcgacagcactggagcacgtgtcatcttccctgcggctgaggacaaggaccaggacctgatcaccatcattggaaaggaggacgccgtccgagaggcacagaaggagctggaggccttgatccaaaacctggataatgtggtggaagactccatgctggtggaccccaagcaccaccgccacttcgtcatccgcagaggccaggtcttgcgggagattgctgaagagtatggcggggtgatggtcagcttcccacgctctggcacacagagcgacaaagtcaccctcaagggcgccaaggactgtgtggaggcagccaagaaacgcattcaggagatcattgaggacctggaagctcaggtgacattagaatgtgctataccccagaaattccatcgatctgtcatgggccccaaaggttccagaatccagcagattactcgggatttcagtgttcaaattaaattcccagacagagaggagaacgcagttcacagtacagagccagttgtccaggagaatggggacgaagctggggaggggagagaggctaaagattgtgaccccggctctccaaggaggtgtgacatcatcatcatctctggccggaaagaaaagtgtgaggctgccaaggaagctctggaggcattggttcctgtcaccattgaagtagaggtgccctttgaccttcaccgttacgttattgggcagaaaggaagtgggatccgcaagatgatggatgagtttgaggtgaacatacatgtcccggcacctgagctgcagtctgacatcatcgccatcacgggcctcgctgcaaatttggaccgggccaaggctggactgctggagcgtgtgaaggagctacaggccgagcaggaggaccgggctttaaggagttttaagctgagtgtcactgtagaccccaaataccatcccaagattatcgggagaaagggggcagtaattacccaaatccggttggagcatgacgtgaacatccagtttcctgataaggacgatgggaaccagccccaggaccaaattaccatcacagggtacgaaaagaacacagaagctgccagggatgctatactgagaattgtgggtgaacttgagcagatggtttctgaggacgtcccgctggaccaccgcgttcacgcccgcatcattggtgcccgcggcaaagccattcgcaaaatcatggacgaattcaaggtggacattcgcttcccacagagcggagccccagaccccaactgcgtcactgtgacggggctcccagagaatgtggaggaagccatcgaccacatcctcaatctggaggaggaatacctagctgacgtggtggacagtgaggcgctgcaggtatacatgaaacccccagcacacgaagaggccaaggcaccttccagaggctttgtggtgcgggacgcaccctggaccgccagcagcagtgagaaggctcctgacatgagcagctctgaggaatttcccagctttggggctcaggtggctcccaagaccctcccttggggccccaaacgataatgatcaaaaagaacagaaccctctccagcctgctgacccaaacccaaccacacaatggtttgtctcaatctgacccagcggctggaccctccgtaaattgttgacgctcttcccccttcccgaggtcccgcagggagcctagcgcctggctgtgtgtgcggccgctcctccaggcctggccgtgcccgctcaggacctgctccactgtttaacactaaaccaaggtcatgagcattcgtgctaagataacagactccagctcctggtccacccggcatgtcagtcagcactctggccttcatcacgagagctccgcagccgtggctaggattccacttcctgtgtcatgacctcaggaaataaacgtccttgactttataaaagccaaa

SEQ ID NO: 140697 - DNA, 3297 bp, Homo sapiens
  Payload ID: 7597
  Gene Symbol: HDLBP
  Gene Name: high density lipoprotein binding protein
  ENST ID: ENST00000373292
  CDS Start-End: 1-2920
aggcctctccatcatggtgtcaggaaagctggatgctgtcatgaaagctcggaaggacattgttgctagactgcagactcaggcctcagcaactgttgccattcccaaagaacaccatcgctttgttattggcaaaaatggagagaaactgcaagacttggagctaaaaactgcaaccaaaatccagatcccacgcccagatgaccccagcaatcagatcaagatcactggcaccaaagagggcatcgagaaagctcgccatgaagtcttactcatctctgccgagcaggacaaacgtgctgtggagaggctagaagtagaaaaggcattccaccccttcatcgctgggccgtataatagactggttggcgagatcatgcaggagacaggcacgcgcatcaacatccccccacccagcgtgaaccggacagagattgtcttcactggagagaaggaacagttggctcaggctgtggctcgcatcaagaagatttatgaggagaaggccaatagcttcaccgtctcctctgtcgccgccccttcctggcttcaccgtttcatcattggcaagaaagggcagaacctggccaaaatcactcagcagatgccaaaggttcacatcgagttcacagagggcgaagacaagatcaccctggagggccctacagaggatgtcaatgtggcccaggaacagatagaaggcatggtcaaagatttgattaaccggatggactatgtggagatcaacatcgaccacaagttccacaggcacctcattgggaagagcggtgccaacataaacagaatcaaagaccagtacaaggtgtccgtgcgcatccctcctgacagtgagaagagcaatttgatccgcatcgagggggacccacagggcgtgcagcaggccaagcgagagctgctggagcttgcatctcgcatggaaaatgagcgtaccaaggatctaatcattgagcaaagatttcatcgcacaatcattgggcagaagggtgaacggatccgtgaaattcgtgacaaattcccagaggtcatcattaactttccagacccagcacaaaaaagtgacattgtccagctcagaggacctaagaatgaggtggaaaaatgcacaaaatacatgcagaagatggtggcagatctggtggaaaatagctattcaatttctgttccgatcttcaaacagtttcacaagaatatcattgggaaaggaggcgcaaacattaaaaagattcgtgaagaaagcaacaccaaaatcgaccttccagcagagaatagcaattcagagaccattatcatcacaggcaagcgagccaactgcgaagctgcccggagcaggattctgtctattcagaaagacctggccaacatagccgaggtagaggtctccatccctgccaagctgcacaactccctcattggcaccaagggccgtctgatccgctccatcatggaggagtgcggcggggtccacattcactttcccgtggaaggttcaggaagcgacaccgttgttatcaggggcccttcctcggatgtggagaaggccaagaagcagctcctgcatctggcggaggagaagcaaaccaagagtttcactgttgacatccgcgccaagccagaataccacaaattcctcatcggcaaggggggcggcaaaattcgcaaggtgcgcgacagcactggagcacgtgtcatcttccctgcggctgaggacaaggaccaggacctgatcaccatcattggaaaggaggacgccgtccgagaggcacagaaggagctggaggccttgatccaaaacctggataatgtggtggaagactccatgctggtggaccccaagcaccaccgccacttcgtcatccgcagaggccaggtcttgcgggagattgctgaagagtatggcggggtgatggtcagcttcccacgctctggcacacagagcgacaaagtcaccctcaagggcgccaaggactgtgtggaggcagccaagaaacgcattcaggagatcattgaggacctggaagctcaggtgacattagaatgtgctataccccagaaattccatcgatctgtcatgggccccaaaggttccagaatccagcagattactcgggatttcagtgttcaaattaaattcccagacagagaggagaacgcagttcacagtacagagccagttgtccaggagaatggggacgaagctggggaggggagagaggctaaagattgtgaccccggctctccaaggaggtgtgacatcatcatcatctctggccggaaagaaaagtgtgaggctgccaaggaagctctggaggcattggttcctgtcaccattgaagtagaggtgccctttgaccttcaccgttacgttattgggcagaaaggaagtgggatccgcaagatgatggatgagtttgaggtgaacatacatgtcccggcacctgagctgcagtctgacatcatcgccatcacgggcctcgctgcaaatttggaccgggccaaggctggactgctggagcgtgtgaaggagctacaggccgagcaggaggaccgggctttaaggagttttaagctgagtgtcactgtagaccccaaataccatcccaagattatcgggagaaagggggcagtaattacccaaatccggttggagcatgacgtgaacatcctcaatctggaggaggaatacctagctgacgtggtggacagtgaggcgctgcaggtatacatgaaacccccagcacacgaagaggccaaggcaccttccagaggctttgtggtgcgggacgcaccctggaccgccagcagcagtgagaaggctcctgacatgagcagctctgaggaatttcccagctttggggctcaggtggctcccaagaccctcccttggggccccaaacgataatgatcaaaaagaacagaaccctctccagcctgctgacccaaacccaaccacacaatggtttgtctcaatctgacccagcggctggaccctccgtaaattgttgacgctcttcccccttcccgaggtcccgcagggagcctagcgcctggctgtgtgtgcggccgctcctccaggcctggccgtgcccgctcaggacctgctccactgtttaacactaaaccaaggtcatgagcattcgtgctaagataacagactccagctcctggtccacccggcatgtcagtcagcactctggccttcatcacgagagctccgcagccgtggctaggattccacttcctgtgtcatgacctcaggaaataaacgtccttgacttt

SEQ ID NO: 140698 - DNA, 6372 bp, Homo sapiens
  Payload ID: 7597
  Gene Symbol: HDLBP
  Gene Name: high density lipoprotein binding protein
  ENST ID: ENST00000391975
  CDS Start-End: 229-4035
aggcgggattgggccgccgccctatatagcagccggggcccgggcgccgcgcctcggagcgtcccggcttctcccgcgcggggggcgagtaagccagcggcaggaccagcgggcgggggcccacgacaaaagctggcaggctgacagaggcggcctcaggacggaccttctggctactgaccgttttgctgtggttttcccggattgtgtgtaggtgtgagatcaaccatgagttccgttgcagttttgacccaagagagttttgctgaacaccgaagtgggctggttccgcaacaaatcaaagttgccactctaaattcagaagaggagagcgaccctccaacctacaaggatgccttccctccacttcctgagaaagctgcttgcctggaaagtgcccaggaacccgctggagcctgggggaacaagatccgacccatcaaggcttctgtcatcactcaggtgttccatgtacccctggaggagagaaaatacaaggatatgaaccagtttggagaaggtgaacaagcaaaaatctgccttgagatcatgcagagaactggtgctcacttggagctgtctttggccaaagaccaaggcctctccatcatggtgtcaggaaagctggatgctgtcatgaaagctcggaaggacattgttgctagactgcagactcaggcctcagcaactgttgccattcccaaagaacaccatcgctttgttattggcaaaaatggagagaaactgcaagacttggagctaaaaactgcaaccaaaatccagatcccacgcccagatgaccccagcaatcagatcaagatcactggcaccaaagagggcatcgagaaagctcgccatgaagtcttactcatctctgccgagcaggacaaacgtgctgtggagaggctagaagtagaaaaggcattccaccccttcatcgctgggccgtataatagactggttggcgagatcatgcaggagacaggcacgcgcatcaacatccccccacccagcgtgaaccggacagagattgtcttcactggagagaaggaacagttggctcaggctgtggctcgcatcaagaagatttatgaggagaagaaaaagaagactacaaccattgcagtggaagtgaagaaatcccaacacaagtatgtcattgggcccaagggcaattcattgcaggagatccttgagagaactggagtttccgttgagatcccaccctcagacagcatctctgagactgtaatacttcgaggcgaacctgaaaagttaggtcaggcgttgactgaagtctatgccaaggccaatagcttcaccgtctcctctgtcgccgccccttcctggcttcaccgtttcatcattggcaagaaagggcagaacctggccaaaatcactcagcagatgccaaaggttcacatcgagttcacagagggcgaagacaagatcaccctggagggccctacagaggatgtcaatgtggcccaggaacagatagaaggcatggtcaaagatttgattaaccggatggactatgtggagatcaacatcgaccacaagttccacaggcacctcattgggaagagcggtgccaacataaacagaatcaaagaccagtacaaggtgtccgtgcgcatccctcctgacagtgagaagagcaatttgatccgcatcgagggggacccacagggcgtgcagcaggccaagcgagagctgctggagcttgcatctcgcatggaaaatgagcgtaccaaggatctaatcattgagcaaagatttcatcgcacaatcattgggcagaagggtgaacggatccgtgaaattcgtgacaaattcccagaggtcatcattaactttccagacccagcacaaaaaagtgacattgtccagctcagaggacctaagaatgaggtggaaaaatgcacaaaatacatgcagaagatggtggcagatctggtggaaaatagctattcaatttctgttccgatcttcaaacagtttcacaagaatatcattgggaaaggaggcgcaaacattaaaaagattcgtgaagaaagcaacaccaaaatcgaccttccagcagagaatagcaattcagagaccattatcatcacaggcaagcgagccaactgcgaagctgcccggagcaggattctgtctattcagaaagacctggccaacatagccgaggtagaggtctccatccctgccaagctgcacaactccctcattggcaccaagggccgtctgatccgctccatcatggaggagtgcggcggggtccacattcactttcccgtggaaggttcaggaagcgacaccgttgttatcaggggcccttcctcggatgtggagaaggccaagaagcagctcctgcatctggcggaggagaagcaaaccaagagtttcactgttgacatccgcgccaagccagaataccacaaattcctcatcggcaaggggggcggcaaaattcgcaaggtgcgcgacagcactggagcacgtgtcatcttccctgcggctgaggacaaggaccaggacctgatcaccatcattggaaaggaggacgccgtccgagaggcacagaaggagctggaggccttgatccaaaacctggataatgtggtggaagactccatgctggtggaccccaagcaccaccgccacttcgtcatccgcagaggccaggtcttgcgggagattgctgaagagtatggcggggtgatggtcagcttcccacgctctggcacacagagcgacaaagtcaccctcaagggcgccaaggactgtgtggaggcagccaagaaacgcattcaggagatcattgaggacctggaagctcaggtgacattagaatgtgctataccccagaaattccatcgatctgtcatgggccccaaaggttccagaatccagcagattactcgggatttcagtgttcaaattaaattcccagacagagaggagaacgcagttcacagtacagagccagttgtccaggagaatggggacgaagctggggaggggagagaggctaaagattgtgaccccggctctccaaggaggtgtgacatcatcatcatctctggccggaaagaaaagtgtgaggctgccaaggaagctctggaggcattggttcctgtcaccattgaagtagaggtgccctttgaccttcaccgttacgttattgggcagaaaggaagtgggatccgcaagatgatggatgagtttgaggtgaacatacatgtcccggcacctgagctgcagtctgacatcatcgccatcacgggcctcgctgcaaatttggaccgggccaaggctggactgctggagcgtgtgaaggagctacaggccgagcaggaggaccgggctttaaggagttttaagctgagtgtcactgtagaccccaaataccatcccaagattatcgggagaaagggggcagtaattacccaaatccggttggagcatgacgtgaacatccagtttcctgataaggacgatgggaaccagccccaggaccaaattaccatcacagggtacgaaaagaacacagaagctgccagggatgctatactgagaattgtgggtgaacttgagcagatggtttctgaggacgtcccgctggaccaccgcgttcacgcccgcatcattggtgcccgcggcaaagccattcgcaaaatcatggacgaattcaaggtggacattcgcttcccacagagcggagccccagaccccaactgcgtcactgtgacggggctcccagagaatgtggaggaagccatcgaccacatcctcaatctggaggaggaatacctagctgacgtggtggacagtgaggcgctgcaggtatacatgaaacccccagcacacgaagaggccaaggcaccttccagaggctttgtggtgcgggacgcaccctggaccgccagcagcagtgagaaggctcctgacatgagcagctctgaggaatttcccagctttggggctcaggtggctcccaagaccctcccttggggccccaaacgataatgatcaaaaagaacagaaccctctccagcctgctgacccaaacccaaccacacaatggtttgtctcaatctgacccagcggctggaccctccgtaaattgttgacgctcttcccccttcccgaggtcccgcagggagcctagcgcctggctgtgtgtgcggccgctcctccaggcctggccgtgcccgctcaggacctgctccactgtttaacactaaaccaaggtcatgagcattcgtgctaagataacagactccagctcctggtccacccggcatgtcagtcagcactctggccttcatcacgagagctccgcagccgtggctaggattccacttcctgtgtcatgacctcaggaaataaacgtccttgactttataaaagccaaacgtttgccctcttcctttcccacctccctcctgccagtttcccttggtccagacagtcctgtttgtggagtgcaatcagcctcctccagctgccagagcgcctcagcacaggtgtcagggtgcaaggaagacctggcaatggacagcaggaggcaggttcctggagctggggggtgacctgagaggcagagggtgacgggttctcaggcagtcctgattttacctgccgtggggtctgaaagcaccaagggtccctgcccctacctccactgccagaccctcagcctgaggtctggtgagtggagcctggaggcaaggtggtaggcaccatctgggtcccctgtggccgtcacagtgtctgctgtgattgagatgcgcacaggttgggggaggtagggccttacgcttgtcctcagtgggggcagtttgccttagatgacagctgggctcttcttcacaccacctgcagcccctccctgcccctgccctagctgctgtgtgttcagttgccttctttctacctcagccggcgtggagtggtctctgtgcagttagtgccaccccacacacccgtctcttgattgagatgtttctggtggttatgggtttcccgtggagctgggggtgggcgccgtgtacctaagctggaggctggcgctctccctcagcacaggtgggtcagtggccagcaggcccatctggagtgggagtgggcacttccaccccgcccacaggccatccggctgtgcaggccagcccctaggagcaggtcccgggtgactggcagttttcacggtctagggccgagacgatggcatggggcctagagcatgaggtagagcagaatgcagaccacgccgctggatgccgagagaccctgctctccgagggaggcatctgtgtcatgctgtgagggctgaggacggggccctagtctctggttttctggtcttaacatccttatctgtgtccgccacggaggtgactgagctgctagcgagttgtcctgtcccaggtacttgagttttggaaaagctgactcacgcccatccatctcacagcccttccctggggacagtcgcttccgccttgacacctcactctcagttgaataactcaagcttggtcatcttcagactcgaattcttgagtagacccagacggcttagcccaagtctagttgcagctgcctcggcaagtccccatttgctcaggcagccctgaatgggcctgtttacaggaatggtaaattgggattggaaggaatatagcttccagcttcataggctagggtgaccacggcttaggaaacagggaaagaaagcaaggcccttttcctgcctttcccgggatctgtctactccacctccacgggggaggccagtggggaagggctgtcacctcttccccatctgcatgagttctggaactctgtcctgttggctgcttgcttccagctccccccaatctccatcgcagcgggttcctcctgtcttttctacagtgtcataaaacatcctgcccctaccctctcccaaaggtcaattttaattctcaccaagttttgcacatctctgtatgtcgcttgatgtcttagacgcgagccctttcctaaactgttcagcgctctcttttcctttgggtggttgttgcaagggtgatgacatgactgtccccaggcctgtctccctgaagcgtctgtgctgtcaggacagccctgggcagagatgaggcaggggtgaggcgtgcgtgtgcttttcctccttgttggatgtcttccatatcatctgtttccatagctacaatccatcccttggccttaactttggaatttggagattatatgcaaacatgtgtaaaggctcatgaatatggatgacactggaattttataaattctaaaataaaacccgaaaccagatgtagcatgctgggactcattttgtca

SEQ ID NO: 140699 - DNA, 4489 bp, Homo sapiens
  Payload ID: 7597
  Gene Symbol: HDLBP
  Gene Name: high density lipoprotein binding protein
  ENST ID: ENST00000391976
  CDS Start-End: 294-4100
gatcggggggcctctctgggattggctgcgcgcacgtcacgtggggccgacgggccctgcgcagaccatcgagtcgggcgtccctccccggggacgtggccttcctgtgcccgggctggggcccgccgccccgcgggggagggcggagctggcgcggcccctagctttctccttctggtgtggggcccgagcaaaagctggcaggctgacagaggcggcctcaggacggaccttctggctactgaccgttttgctgtggttttcccggattgtgtgtaggtgtgagatcaaccatgagttccgttgcagttttgacccaagagagttttgctgaacaccgaagtgggctggttccgcaacaaatcaaagttgccactctaaattcagaagaggagagcgaccctccaacctacaaggatgccttccctccacttcctgagaaagctgcttgcctggaaagtgcccaggaacccgctggagcctgggggaacaagatccgacccatcaaggcttctgtcatcactcaggtgttccatgtacccctggaggagagaaaatacaaggatatgaaccagtttggagaaggtgaacaagcaaaaatctgccttgagatcatgcagagaactggtgctcacttggagctgtctttggccaaagaccaaggcctctccatcatggtgtcaggaaagctggatgctgtcatgaaagctcggaaggacattgttgctagactgcagactcaggcctcagcaactgttgccattcccaaagaacaccatcgctttgttattggcaaaaatggagagaaactgcaagacttggagctaaaaactgcaaccaaaatccagatcccacgcccagatgaccccagcaatcagatcaagatcactggcaccaaagagggcatcgagaaagctcgccatgaagtcttactcatctctgccgagcaggacaaacgtgctgtggagaggctagaagtagaaaaggcattccaccccttcatcgctgggccgtataatagactggttggcgagatcatgcaggagacaggcacgcgcatcaacatccccccacccagcgtgaaccggacagagattgtcttcactggagagaaggaacagttggctcaggctgtggctcgcatcaagaagatttatgaggagaagaaaaagaagactacaaccattgcagtggaagtgaagaaatcccaacacaagtatgtcattgggcccaagggcaattcattgcaggagatccttgagagaactggagtttccgttgagatcccaccctcagacagcatctctgagactgtaatacttcgaggcgaacctgaaaagttaggtcaggcgttgactgaagtctatgccaaggccaatagcttcaccgtctcctctgtcgccgccccttcctggcttcaccgtttcatcattggcaagaaagggcagaacctggccaaaatcactcagcagatgccaaaggttcacatcgagttcacagagggcgaagacaagatcaccctggagggccctacagaggatgtcaatgtggcccaggaacagatagaaggcatggtcaaagatttgattaaccggatggactatgtggagatcaacatcgaccacaagttccacaggcacctcattgggaagagcggtgccaacataaacagaatcaaagaccagtacaaggtgtccgtgcgcatccctcctgacagtgagaagagcaatttgatccgcatcgagggggacccacagggcgtgcagcaggccaagcgagagctgctggagcttgcatctcgcatggaaaatgagcgtaccaaggatctaatcattgagcaaagatttcatcgcacaatcattgggcagaagggtgaacggatccgtgaaattcgtgacaaattcccagaggtcatcattaactttccagacccagcacaaaaaagtgacattgtccagctcagaggacctaagaatgaggtggaaaaatgcacaaaatacatgcagaagatggtggcagatctggtggaaaatagctattcaatttctgttccgatcttcaaacagtttcacaagaatatcattgggaaaggaggcgcaaacattaaaaagattcgtgaagaaagcaacaccaaaatcgaccttccagcagagaatagcaattcagagaccattatcatcacaggcaagcgagccaactgcgaagctgcccggagcaggattctgtctattcagaaagacctggccaacatagccgaggtagaggtctccatccctgccaagctgcacaactccctcattggcaccaagggccgtctgatccgctccatcatggaggagtgcggcggggtccacattcactttcccgtggaaggttcaggaagcgacaccgttgttatcaggggcccttcctcggatgtggagaaggccaagaagcagctcctgcatctggcggaggagaagcaaaccaagagtttcactgttgacatccgcgccaagccagaataccacaaattcctcatcggcaaggggggcggcaaaattcgcaaggtgcgcgacagcactggagcacgtgtcatcttccctgcggctgaggacaaggaccaggacctgatcaccatcattggaaaggaggacgccgtccgagaggcacagaaggagctggaggccttgatccaaaacctggataatgtggtggaagactccatgctggtggaccccaagcaccaccgccacttcgtcatccgcagaggccaggtcttgcgggagattgctgaagagtatggcggggtgatggtcagcttcccacgctctggcacacagagcgacaaagtcaccctcaagggcgccaaggactgtgtggaggcagccaagaaacgcattcaggagatcattgaggacctggaagctcaggtgacattagaatgtgctataccccagaaattccatcgatctgtcatgggccccaaaggttccagaatccagcagattactcgggatttcagtgttcaaattaaattcccagacagagaggagaacgcagttcacagtacagagccagttgtccaggagaatggggacgaagctggggaggggagagaggctaaagattgtgaccccggctctccaaggaggtgtgacatcatcatcatctctggccggaaagaaaagtgtgaggctgccaaggaagctctggaggcattggttcctgtcaccattgaagtagaggtgccctttgaccttcaccgttacgttattgggcagaaaggaagtgggatccgcaagatgatggatgagtttgaggtgaacatacatgtcccggcacctgagctgcagtctgacatcatcgccatcacgggcctcgctgcaaatttggaccgggccaaggctggactgctggagcgtgtgaaggagctacaggccgagcaggaggaccgggctttaaggagttttaagctgagtgtcactgtagaccccaaataccatcccaagattatcgggagaaagggggcagtaattacccaaatccggttggagcatgacgtgaacatccagtttcctgataaggacgatgggaaccagccccaggaccaaattaccatcacagggtacgaaaagaacacagaagctgccagggatgctatactgagaattgtgggtgaacttgagcagatggtttctgaggacgtcccgctggaccaccgcgttcacgcccgcatcattggtgcccgcggcaaagccattcgcaaaatcatggacgaattcaaggtggacattcgcttcccacagagcggagccccagaccccaactgcgtcactgtgacggggctcccagagaatgtggaggaagccatcgaccacatcctcaatctggaggaggaatacctagctgacgtggtggacagtgaggcgctgcaggtatacatgaaacccccagcacacgaagaggccaaggcaccttccagaggctttgtggtgcgggacgcaccctggaccgccagcagcagtgagaaggctcctgacatgagcagctctgaggaatttcccagctttggggctcaggtggctcccaagaccctcccttggggccccaaacgataatgatcaaaaagaacagaaccctctccagcctgctgacccaaacccaaccacacaatggtttgtctcaatctgacccagcggctggaccctccgtaaattgttgacgctcttcccccttcccgaggtcccgcagggagcctagcgcctggctgtgtgtgcggccgctcctccaggcctggccgtgcccgctcaggacctgctccactgtttaacactaaaccaaggtcatgagcattcgtgctaagataacagactccagctcctggtccacccggcatgtcagtcagcactctggccttcatcacgagagctccgcagccgtggctaggattccacttcctgtgtcatgacctcaggaaataaacgtccttgactttataaaagccaaa

SEQ ID NO: 140700 - DNA, 996 bp, Homo sapiens
  Payload ID: 7597
  Gene Symbol: HDLBP
  Gene Name: high density lipoprotein binding protein
  ENST ID: ENST00000452065
  CDS Start-End: 505-996
gcttctcccgcgcggggggcgagtaagccagcggcaggaccagcgggcgggggcccacgaacacatgcctcactcctgtcagcagttccaccttttcatggttgaggagcacatgtggtcgccagcctcccatctccagagtcccctaaggcaaggtgactcaccctcctacttcacagagttcttggtcctccccagacagcctttgaaggttcctttcaatcctgcgatttcatgacctggtttctagatccccagtggattagaaaggactgaaggacttttacaggctaacagcaagaagaacaaagtaactgcaaaatagacggagaattcttgaagacggtagctcttggtcaccataagcgctgcagagaccccgaggtccacattctgttgtagcaaaagctggcaggctgacagaggcggcctcaggacggaccttctggctactgaccgttttgctgtggttttcccggattgtgtgtaggtgtgagatcaaccatgagttccgttgcagttttgacccaagagagttttgctgaacaccgaagtgggctggttccgcaacaaatcaaagttgccactctaaattcagaagaggagagcgaccctccaacctacaaggatgccttccctccacttcctgagaaagctgcttgcctggaaagtgcccaggaacccgctggagcctgggggaacaagatccgacccatcaaggcttctgtcatcactcaggtgttccatgtacccctggaggagagaaaatacaaggatatgaaccagtttggagaaggtgaacaagcaaaaatctgccttgagatcatgcagagaactggtgctcacttggagctgtctttggccaaagaccaaggcctctccatcatggtgtcaggaaagctggatgctgtcatgaaagctcggaaggacattgttgctagactgcagactcaggcctcagcaactgttgccattcccaaagaacaccatcgcttt

SEQ ID NO: 140701 - DNA, 801 bp, Homo sapiens
  Payload ID: 7597
  Gene Symbol: HDLBP
  Gene Name: high density lipoprotein binding protein
  ENST ID: ENST00000452931
  CDS Start-End: 1-801
catacatgcttatgccaagctgtgagcacccttgcttctgaaaatgagcgtaccaaggatctaatcattgagcaaagatttcatcgcacaatcattgggcagaagggtgaacggatccgtgaaattcgtgacaaattcccagaggtcatcattaactttccagacccagcacaaaaaagtgacattgtccagctcagaggacctaagaatgaggtggaaaaatgcacaaaatacatgcagaagatggtggcagatctggtggaaaatagctattcaatttctgttccgatcttcaaacagtttcacaagaatatcattgggaaaggaggcgcaaacattaaaaagattcgtgaagaaagcaacaccaaaatcgaccttccagcagagaatagcaattcagagaccattatcatcacaggcaagcgagccaactgcgaagctgcccggagcaggattctgtctattcagaaagacctggccaacatagccgaggtagaggtctccatccctgccaagctgcacaactccctcattggcaccaagggccgtctgatccgctccatcatggaggagtgcggcggggtccacattcactttcccgtggaaggttcaggaagcgacaccgttgttatcaggggcccttcctcggatgtggagaaggccaagaagcagctcctgcatctggcggaggagaagcaaaccaagagtttcactgttgacatccgcgccaagccagaataccacaaattcctcatcggcaaggggggcggcaaaattcgcaaggtgcgcgacagcactgga

SEQ ID NO: 140702 - DNA, 581 bp, Homo sapiens
  Payload ID: 7597
  Gene Symbol: HDLBP
  Gene Name: high density lipoprotein binding protein
  ENST ID: ENST00000413241
  CDS Start-End: 337-581
aagcgtagcctcttctcctttaccaagatggcggcttgtccctgtttcgccacagttcctaccttatgagctcggttttcttatgcttataagagtggaacagcaaaagctggcaggctgacagaggcggcctcaggacggaccttctggctactgaccgttttgctgctaccacttataaccacctggttaagtcgagatttggaggtggtttagtttggggcctggatgcaccttgcagagagagaccgctggctttttgtagcaactgtcatgatgcattttgtaagcattaagagtggttttcccggattgtgtgtaggtgtgagatcaaccatgagttccgttgcagttttgacccaagagagttttgctgaacaccgaagtgggctggttccgcaacaaatcaaagttgccactctaaattcagaagaggagagcgaccctccaacctacaaggatgccttccctccacttcctgagaaagctgcttgcctggaaagtgcccaggaacccgctggagcctgggggaacaagatccgacccatcaaggcttctgtcatcactcaggtgttccatgt

SEQ ID NO: 140703 - DNA, 530 bp, Homo sapiens
  Payload ID: 7597
  Gene Symbol: HDLBP
  Gene Name: high density lipoprotein binding protein
  ENST ID: ENST00000425989
  CDS Start-End: 294-530
gattcaaaaagtatttgagaacctactaggtgctagacaccaaccgaggcaatgagtatgggtgacaacatgtgccctgccctcacagcaccaatagtccactggacaaataccatctggaacatcaggtaaacacctaagcctgtctggaggaaatctaatttgggcggaatcccacaagcacagactagcaaaagctggcaggctgacagaggcggcctcaggacggaccttctggctactgaccgttttgctgtggttttcccggattgtgtgtaggtgtgagatcaaccatgagttccgttgcagttttgacccaagagagttttgctgaacaccgaagtgggctggttccgcaacaaatcaaagttgccactctaaattcagaagaggagagcgaccctccaacctacaaggatgccttccctccacttcctgagaaagctgcttgcctggaaagtgcccaggaacccgctggagcctgggggaacaagatccgacccatcaaggcttctgtcatcactcaggtg

SEQ ID NO: 140704 - DNA, 525 bp, Homo sapiens
  Payload ID: 7597
  Gene Symbol: HDLBP
  Gene Name: high density lipoprotein binding protein
  ENST ID: ENST00000417540
  CDS Start-End: 483-525
atatagaggctgggggtggggggggaggtcaagcgtagcctcttctcctttaccaagatggcggcttgtccctgtttcgccacagttcctaccttatgagctcggttttcttatgcttataagagtggaacagacacatgcctcactcctgtcagcagttccaccttttcatggttgaggagcacatgtggtcgccagcctcccatctccagagtcccctaaggcaagatccccagtggattagaaaggactgaaggacttttacaggctaacagcaagaagaacaaagtaactgcaaaatagacggagaattcttgaagacggtagctcttggtcaccataagcgctgcagagaccccgaggtccacattctgttgtagcaaaagctggcaggctgacagaggcggcctcaggacggaccttctggctactgaccgttttgctgtggttttcccggattgtgtgtaggtgtgagatcaaccatgagttccgttgcagttttgacccaagagagttttgctgaac

SEQ ID NO: 140705 - DNA, 997 bp, Homo sapiens
  Payload ID: 7597
  Gene Symbol: HDLBP
  Gene Name: high density lipoprotein binding protein
  ENST ID: ENST00000453141
  CDS Start-End: 1-997
aagcaaaaatctgccttgagatcatgcagagaactggtgctcacttggagctgtctttggccaaagaccaaggcctctccatcatggtgtcaggaaagctggatgctgtcatgaaagctcggaaggacattgttgctagactgcagactcaggcctcagcaactgttgccattcccaaagaacaccatcgctttgttattggcaaaaatggagagaaactgcaagacttggagctaaaaactgcaaccaaaatccagatcccacgcccagatgaccccagcaatcagatcaagatcactggcaccaaagagggcatcgagaaagctcgccatgaagtcttactcatctctgccgagcaggacaaacgtgctgtggagaggctagaagtagaaaaggcattccaccccttcatcgctgggccgtataatagactggttggcgagatcatgcaggagacaggcacgcgcatcaacatccccccacccagcgtgaaccggacagagattgtcttcactggagagaaggaacagttggctcaggctgtggctcgcatcaagaagatttatgaggagaagggcaattcattgcaggagatccttgagagaactggagtttccgttgagatcccaccctcagacagcatctctgagactgtaatacttcgaggcgaacctgaaaagttaggtcaggcgttgactgaagtctatgccaaggccaatagcttcaccgtctcctctgtcgccgccccttcctggcttcaccgtttcatcattggcaagaaagggcagaacctggccaaaatcactcagcagatgccaaaggttcacatcgagttcacagagggcgaagacaagatcaccctggagggccctacagaggatgtcaatgtggcccaggaacagatagaaggcatggtcaaagatttgattaaccggatggactatgtggagatcaacatcgaccacaagttccacaggcacctcattgggaagagcgg

SEQ ID NO: 140706 - DNA, 594 bp, Homo sapiens
  Payload ID: 7597
  Gene Symbol: HDLBP
  Gene Name: high density lipoprotein binding protein
  ENST ID: ENST00000426343
  CDS Start-End: 305-594
ggagcgtcccggcttctcccgcgcggggggcgagtaagccagcggcaggaccagcgggcgggggcccacgacaaaagctggcaggctgacagaggcggcctcaggacggaccttctggctactgaccgttttgctgctaccacttataaccacctggttaagtcgagatttggaggtggtttagtttggggcctggatgcaccttgcagagagagaccgctggctttttgtagcaactgtcatgatgcattttgtaagcattaagagtggttttcccggattgtgtgtaggtgtgagatcaaccatgagttccgttgcagttttgacccaagagagttttgctgaacaccgaagtgggctggttccgcaacaaatcaaagttgccactctaaattcagaagaggagagcgaccctccaacctacaaggatgccttccctccacttcctgagaaagctgcttgcctggaaagtgcccaggaacccgctggagcctgggggaacaagatccgacccatcaaggcttctgtcatcactcaggtgttccatgtacccctggaggagagaaaatacaaggatatgaaccagtttggaga

SEQ ID NO: 140707 - DNA, 529 bp, Homo sapiens
  Payload ID: 7597
  Gene Symbol: HDLBP
  Gene Name: high density lipoprotein binding protein
  ENST ID: ENST00000449864
  CDS Start-End: 421-529
atatagcagccggggcccgggcgccgcgcctcggagcgtcccggcttctcccgcgcggggggcgagtaagccagcggcaggaccagcgggcgggggcccacgacaaaagctggcaggctgacagaggcggcctcaggacggaccttctggctactgaccgttttgctgtggttttcccggattgtgtgtaggtgtgagatcaaccatgagttccgttgcagttttgacccaagagagttttgctgaacaccgaagtgggctggttccgcaacaaatcaaaggggcgactggccaggcatgaggaaatgaatcaagtacagtgagatttaacatgtgggcagctttctggaaagccagcgaatttgaccattgttgccactctaaattcagaagaggagagcgaccctccaacctacaaggatgccttccctccacttcctgagaaagctgcttgcctggaaagtgcccaggaacccgctggagcctgggggaacaagatccgacccatcaaggcttctgtcatcactca

SEQ ID NO: 140708 - DNA, 566 bp, Homo sapiens
  Payload ID: 7597
  Gene Symbol: HDLBP
  Gene Name: high density lipoprotein binding protein
  ENST ID: ENST00000449504
  CDS Start-End: 515-566
ctcggagcgtcccggcttctcccgcgcggggggcgagtaagccagcggcaggaccagcgggcgggggcccacgaacacatgcctcactcctgtcagcagttccaccttttcatggttgaggagcacatgtggtcgccagcctcccatctccagagtcccctaaggcaaggtgactcaccctcctacttcacagagttcttggtcctccccagacagcctttgaaggttcctttcaatcctgcgatttcatgacctggtttctagatccccagtggattagaaaggactgaaggacttttacaggctaacagcaagaagaacaaagtaactgcaaaatagacggagaattcttgaagacggtagctcttggtcaccataagcgctgcagagaccccgaggtccacattctgttcaaaagctggcaggctgacagaggcggcctcaggacggaccttctggctactgaccgttttgctgtggttttcccggattgtgtgtaggtgtgagatcaaccatgagttccgttgcagttttgacccaagagagttttgctgaacaccgaagtg

SEQ ID NO: 140709 - DNA, 708 bp, Homo sapiens
  Payload ID: 7597
  Gene Symbol: HDLBP
  Gene Name: high density lipoprotein binding protein
  ENST ID: ENST00000441124
  CDS Start-End: 330-708
ggggacgtggccttcctgtgcccgggctggggcccgccgccccgcgggggagggcggagctggcgcggcccctagctttctccttctggtgtggggcccgaggtcagagcccagcacaacaacccttcttctggttcagccgcccagcggttatgtggggtacgggaaagatgatccagccatgcaggagagcaccagtggttctgtgaggattttacttcaaaatacaaaagctggcaggctgacagaggcggcctcaggacggaccttctggctactgaccgttttgctgtggttttcccggattgtgtgtaggtgtgagatcaaccatgagttccgttgcagttttgacccaagagagttttgctgaacaccgaagtgggctggttccgcaacaaatcaaagttgccactctaaattcagaagaggagagcgaccctccaacctacaaggatgccttccctccacttcctgagaaagctgcttgcctggaaagtgcccaggaacccgctggagcctgggggaacaagatccgacccatcaaggcttctgtcatcactcaggtgttccatgtacccctggaggagagaaaatacaaggatatgaaccagtttggagaaggtgaacaagcaaaaatctgccttgagatcatgcagagaactggtgctcacttggagctgtctttggccaaagaccaaggcctctcca

SEQ ID NO: 140710 - DNA, 459 bp, Homo sapiens
  Payload ID: 7597
  Gene Symbol: HDLBP
  Gene Name: high density lipoprotein binding protein
  ENST ID: ENST00000427007
  CDS Start-End: 402-459
cgcgcggggggcgagtaagccagcggcaggaccagcgggcgggggcccacgaacacatgcctcactcctgtcagcagttccaccttttcatggttgaggagcacatgtggtcgccagcctcccatctccagagtcccctaaggcaagatccccagtggattagaaaggactgaaggacttttacaggctaacagcaagaagaacaaagtaactgcaaaatagacggagaattcttgaagacggtagctcttggtcaccataagcgctgcagagaccccgaggtccacattctgttgtagcaaaagctggcaggctgacagaggcggcctcaggacggaccttctggctactgaccgttttgctgtggttttcccggattgtgtgtaggtgtgagatcaaccatgagttccgttgcagttttgacccaagagagttttgctgaacaccgaagtgggctgg

SEQ ID NO: 140711 - DNA, 6238 bp, Homo sapiens
  Payload ID: 7597
  Gene Symbol: HDLBP
  Gene Name: high density lipoprotein binding protein
  Uniprot ID: Q00341
  ENST ID: ENST00000427183
  CDS Start-End: 197-3904
ggagcgtcccggcttctcccgcgcggggggcgagtaagccagcggcaggaccagcgggcgggggcccacgacaaaagctggcaggctgacagaggcggcctcaggacggaccttctggctactgaccgttttgctgctaccacttataaccacctggttaagtcgagatttggaggtggtttagtttggggcctggatgcaccttgcagagagagaccgctggctttttgtagcaactgtcatgatgcattttgtaagcattaagagtggttttcccggattgtgtgtaggtgtgagatcaaccatgagttccgttgcagttttgacccaagagagttttgctgaacaccgaagtgggctggttccgcaacaaatcaaagttgccactctaaattcagaagaggagagcgaccctccaacctacaaggatgccttccctccacttcctgagaaagctgcttgcctggaaagtgcccaggaacccgctggagcctgggggaacaagatccgacccatcaaggcttctgtcatcactcaggtgttccatgtacccctggaggagagaaaatacaaggatatgaaccagtttggagaaggtgaacaagcaaaaatctgccttgagatcatgcagagaactggtgctcacttggagctgtctttggccaaagaccaaggcctctccatcatggtgtcaggaaagctggatgctgtcatgaaagctcggaaggacattgttgctagactgcagactcaggcctcagcaactgttgccattcccaaagaacaccatcgctttgttattggcaaaaatggagagaaactgcaagacttggagctaaaaactgcaaccaaaatccagatcccacgcccagatgaccccagcaatcagatcaagatcactggcaccaaagagggcatcgagaaagctcgccatgaagtcttactcatctctgccgagcaggacaaacgtgctgtggagaggctagaagtagaaaaggcattccaccccttcatcgctgggccgtataatagactggttggcgagatcatgcaggagacaggcacgcgcatcaacatccccccacccagcgtgaaccggacagagattgtcttcactggagagaaggaacagttggctcaggctgtggctcgcatcaagaagatttatgaggagaaggccaatagcttcaccgtctcctctgtcgccgccccttcctggcttcaccgtttcatcattggcaagaaagggcagaacctggccaaaatcactcagcagatgccaaaggttcacatcgagttcacagagggcgaagacaagatcaccctggagggccctacagaggatgtcaatgtggcccaggaacagatagaaggcatggtcaaagatttgattaaccggatggactatgtggagatcaacatcgaccacaagttccacaggcacctcattgggaagagcggtgccaacataaacagaatcaaagaccagtacaaggtgtccgtgcgcatccctcctgacagtgagaagagcaatttgatccgcatcgagggggacccacagggcgtgcagcaggccaagcgagagctgctggagcttgcatctcgcatggaaaatgagcgtaccaaggatctaatcattgagcaaagatttcatcgcacaatcattgggcagaagggtgaacggatccgtgaaattcgtgacaaattcccagaggtcatcattaactttccagacccagcacaaaaaagtgacattgtccagctcagaggacctaagaatgaggtggaaaaatgcacaaaatacatgcagaagatggtggcagatctggtggaaaatagctattcaatttctgttccgatcttcaaacagtttcacaagaatatcattgggaaaggaggcgcaaacattaaaaagattcgtgaagaaagcaacaccaaaatcgaccttccagcagagaatagcaattcagagaccattatcatcacaggcaagcgagccaactgcgaagctgcccggagcaggattctgtctattcagaaagacctggccaacatagccgaggtagaggtctccatccctgccaagctgcacaactccctcattggcaccaagggccgtctgatccgctccatcatggaggagtgcggcggggtccacattcactttcccgtggaaggttcaggaagcgacaccgttgttatcaggggcccttcctcggatgtggagaaggccaagaagcagctcctgcatctggcggaggagaagcaaaccaagagtttcactgttgacatccgcgccaagccagaataccacaaattcctcatcggcaaggggggcggcaaaattcgcaaggtgcgcgacagcactggagcacgtgtcatcttccctgcggctgaggacaaggaccaggacctgatcaccatcattggaaaggaggacgccgtccgagaggcacagaaggagctggaggccttgatccaaaacctggataatgtggtggaagactccatgctggtggaccccaagcaccaccgccacttcgtcatccgcagaggccaggtcttgcgggagattgctgaagagtatggcggggtgatggtcagcttcccacgctctggcacacagagcgacaaagtcaccctcaagggcgccaaggactgtgtggaggcagccaagaaacgcattcaggagatcattgaggacctggaagctcaggtgacattagaatgtgctataccccagaaattccatcgatctgtcatgggccccaaaggttccagaatccagcagattactcgggatttcagtgttcaaattaaattcccagacagagaggagaacgcagttcacagtacagagccagttgtccaggagaatggggacgaagctggggaggggagagaggctaaagattgtgaccccggctctccaaggaggtgtgacatcatcatcatctctggccggaaagaaaagtgtgaggctgccaaggaagctctggaggcattggttcctgtcaccattgaagtagaggtgccctttgaccttcaccgttacgttattgggcagaaaggaagtgggatccgcaagatgatggatgagtttgaggtgaacatacatgtcccggcacctgagctgcagtctgacatcatcgccatcacgggcctcgctgcaaatttggaccgggccaaggctggactgctggagcgtgtgaaggagctacaggccgagcaggaggaccgggctttaaggagttttaagctgagtgtcactgtagaccccaaataccatcccaagattatcgggagaaagggggcagtaattacccaaatccggttggagcatgacgtgaacatccagtttcctgataaggacgatgggaaccagccccaggaccaaattaccatcacagggtacgaaaagaacacagaagctgccagggatgctatactgagaattgtgggtgaacttgagcagatggtttctgaggacgtcccgctggaccaccgcgttcacgcccgcatcattggtgcccgcggcaaagccattcgcaaaatcatggacgaattcaaggtggacattcgcttcccacagagcggagccccagaccccaactgcgtcactgtgacggggctcccagagaatgtggaggaagccatcgaccacatcctcaatctggaggaggaatacctagctgacgtggtggacagtgaggcgctgcaggtatacatgaaacccccagcacacgaagaggccaaggcaccttccagaggctttgtggtgcgggacgcaccctggaccgccagcagcagtgagaaggctcctgacatgagcagctctgaggaatttcccagctttggggctcaggtggctcccaagaccctcccttggggccccaaacgataatgatcaaaaagaacagaaccctctccagcctgctgacccaaacccaaccacacaatggtttgtctcaatctgacccagcggctggaccctccgtaaattgttgacgctcttcccccttcccgaggtcccgcagggagcctagcgcctggctgtgtgtgcggccgctcctccaggcctggccgtgcccgctcaggacctgctccactgtttaacactaaaccaaggtcatgagcattcgtgctaagataacagactccagctcctggtccacccggcatgtcagtcagcactctggccttcatcacgagagctccgcagccgtggctaggattccacttcctgtgtcatgacctcaggaaataaacgtccttgactttataaaagccaaacgtttgccctcttcctttcccacctccctcctgccagtttcccttggtccagacagtcctgtttgtggagtgcaatcagcctcctccagctgccagagcgcctcagcacaggtgtcagggtgcaaggaagacctggcaatggacagcaggaggcaggttcctggagctggggggtgacctgagaggcagagggtgacgggttctcaggcagtcctgattttacctgccgtggggtctgaaagcaccaagggtccctgcccctacctccactgccagaccctcagcctgaggtctggtgagtggagcctggaggcaaggtggtaggcaccatctgggtcccctgtggccgtcacagtgtctgctgtgattgagatgcgcacaggttgggggaggtagggccttacgcttgtcctcagtgggggcagtttgccttagatgacagctgggctcttcttcacaccacctgcagcccctccctgcccctgccctagctgctgtgtgttcagttgccttctttctacctcagccggcgtggagtggtctctgtgcagttagtgccaccccacacacccgtctcttgattgagatgtttctggtggttatgggtttcccgtggagctgggggtgggcgccgtgtacctaagctggaggctggcgctctccctcagcacaggtgggtcagtggccagcaggcccatctggagtgggagtgggcacttccaccccgcccacaggccatccggctgtgcaggccagcccctaggagcaggtcccgggtgactggcagttttcacggtctagggccgagacgatggcatggggcctagagcatgaggtagagcagaatgcagaccacgccgctggatgccgagagaccctgctctccgagggaggcatctgtgtcatgctgtgagggctgaggacggggccctagtctctggttttctggtcttaacatccttatctgtgtccgccacggaggtgactgagctgctagcgagttgtcctgtcccaggtacttgagttttggaaaagctgactcacgcccatccatctcacagcccttccctggggacagtcgcttccgccttgacacctcactctcagttgaataactcaagcttggtcatcttcagactcgaattcttgagtagacccagacggcttagcccaagtctagttgcagctgcctcggcaagtccccatttgctcaggcagccctgaatgggcctgtttacaggaatggtaaattgggattggaaggaatatagcttccagcttcataggctagggtgaccacggcttaggaaacagggaaagaaagcaaggcccttttcctgcctttcccgggatctgtctactccacctccacgggggaggccagtggggaagggctgtcacctcttccccatctgcatgagttctggaactctgtcctgttggctgcttgcttccagctccccccaatctccatcgcagcgggttcctcctgtcttttctacagtgtcataaaacatcctgcccctaccctctcccaaaggtcaattttaattctcaccaagttttgcacatctctgtatgtcgcttgatgtcttagacgcgagccctttcctaaactgttcagcgctctcttttcctttgggtggttgttgcaagggtgatgacatgactgtccccaggcctgtctccctgaagcgtctgtgctgtcaggacagccctgggcagagatgaggcaggggtgaggcgtgcgtgtgcttttcctccttgttggatgtcttccatatcatctgtttccatagctacaatccatcccttggccttaactttggaatttggagattatatgcaaacatgtgtaaaggctcatgaatatggatgacactggaattttataaattctaaaataaaacccgaaaccagatgtagcatgctgggactcattttg

SEQ ID NO: 140712 - DNA, 559 bp, Homo sapiens
  Payload ID: 7597
  Gene Symbol: HDLBP
  Gene Name: high density lipoprotein binding protein
  ENST ID: ENST00000420451
  CDS Start-End: 353-559
atatagaggctgggggtggggggggaggtcaagcgtagcctcttctcctttaccaagatggcggcttgtccctgtttcgccacagttcctaccttatgagctcggttttcttatgcttataagagtggaacagcaaaagctggcaggctgacagaggcggcctcaggacggaccttctggctactgaccgttttgctgctaccacttataaccacctggttaagtcgagatttggaggtggtttagtttggggcctggatgcaccttgcagagagagaccgctggctttttgtagcaactgtcatgatgcatttttggttttcccggattgtgtgtaggtgtgagatcaaccatgagttccgttgcagttttgacccaagagagttttgctgaacaccgaagtgggctggttccgcaacaaatcaaagttgccactctaaattcagaagaggagagcgaccctccaacctacaaggatgccttccctccacttcctgagaaagctgcttgcctggaaagtgcccaggaacccgctggagcctgggggaacaagatccga

SEQ ID NO: 140713 - DNA, 929 bp, Homo sapiens
  Payload ID: 7597
  Gene Symbol: HDLBP
  Gene Name: high density lipoprotein binding protein
  ENST ID: ENST00000422933
  CDS Start-End: 256-929
agaaacttgcctgagtattggtgttagtaaccaaagcataaatatcttgaccttttctgattttgaggtaaaaagatctgagttgtaaaatgtagataagtaacttttctctggtttcctctctctcctctcccacttcccatcccataccagcaaaagctggcaggctgacagaggcggcctcaggacggaccttctggctactgaccgttttgctgtggttttcccggattgtgtgtaggtgtgagatcaaccatgagttccgttgcagttttgacccaagagagttttgctgaacaccgaagtgggctggttccgcaacaaatcaaagttgccactctaaattcagaagaggagagcgaccctccaacctacaaggatgccttccctccacttcctgagaaagctgcttgcctggaaagtgcccaggaacccgctggagcctgggggaacaagatccgacccatcaaggcttctgtcatcactcaggtgttccatgtacccctggaggagagaaaatacaaggatatgaaccagtttggagaaggtgaacaagcaaaaatctgccttgagatcatgcagagaactggtgctcacttggagctgtctttggccaaagaccaaggcctctccatcatggtgtcaggaaagctggatgctgtcatgaaagctcggaaggacattgttgctagactgcagactcaggcctcagcaactgttgccattcccaaagaacaccatcgctttgttattggcaaaaatggagagaaactgcaagacttggagctaaaaactgcaaccaaaatccagatcccacgcccagatgaccccagcaatcagatcaagatcactggcaccaaagagggcatcgagaaagctcgccatgaagtcttactcatctctgccgagcaggacaaacgtgctgtgga

SEQ ID NO: 140714 - DNA, 612 bp, Homo sapiens
  Payload ID: 7597
  Gene Symbol: HDLBP
  Gene Name: high density lipoprotein binding protein
  ENST ID: ENST00000430918
  CDS Start-End: 188-612
acaacagacagccttaggggaaatggggaaactggagaaaagggctcttatcccaaaaggaccagatccattggaacagatagagcaaaagctggcaggctgacagaggcggcctcaggacggaccttctggctactgaccgttttgctgtggttttcccggattgtgtgtaggtgtgagatcaaccatgagttccgttgcagttttgacccaagagagttttgctgaacaccgaagtgggctggttccgcaacaaatcaaagttgccactctaaattcagaagaggagagcgaccctccaacctacaaggatgccttccctccacttcctgagaaagctgcttgcctggaaagtgcccaggaacccgctggagcctgggggaacaagatccgacccatcaaggcttctgtcatcactcaggtgttccatgtacccctggaggagagaaaatacaaggatatgaaccagtttggagaaggtgaacaagcaaaaatctgccttgagatcatgcagagaactggtgctcacttggagctgtctttggccaaagaccaaggcctctccatcatggtgtcaggaaagctggatgctgtcatgaaagctcggaagga

SEQ ID NO: 140715 - DNA, 1096 bp, Homo sapiens
  Payload ID: 7597
  Gene Symbol: HDLBP
  Gene Name: high density lipoprotein binding protein
  ENST ID: ENST00000428482
  CDS Start-End: 434-1096
gtcaagcgtagcctcttctcctttaccaagatggcggcttgtccctgtttcgccacagttcctaccttatgagctcggttttcttatgcttataagagtggaacagcagttccaccttttcatggttgaggagcacatgtggtcgccagcctcccatctccagagtcccctaaggcaagatccccagtggattagaaaggactgaaggacttttacaggctaacagcaagaagaacaaagtaactgcaaaatagacggagaattcttgaagacggtagctcttggtcaccataagcgctgcagagaccccgaggtccacattctgttgtagcaaaagctggcaggctgacagaggcggcctcaggacggaccttctggctactgaccgttttgctgtggttttcccggattgtgtgtaggtgtgagatcaaccatgagttccgttgcagttttgacccaagagagttttgctgaacaccgaagtgggctggttccgcaacaaatcaaagttgccactctaaattcagaagaggagagcgaccctccaacctacaaggatgccttccctccacttcctgagaaagctgcttgcctggaaagtgcccaggaacccgctggagcctgggggaacaagatccgacccatcaaggcttctgtcatcactcaggtgttccatgtacccctggaggagagaaaatacaaggatatgaaccagtttggagaaggtgaacaagcaaaaatctgccttgagatcatgcagagaactggtgctcacttggagctgtctttggccaaagaccaaggcctctccatcatggtgtcaggaaagctggatgctgtcatgaaagctcggaaggacattgttgctagactgcagactcaggcctcagcaactgttgccattcccaaagaacaccatcgctttgttattggcaaaaatggagagaaactgcaagacttggagctaaaaactgcaaccaaaatccagatcccacgcccagatgaccccagcaatcagatcaagatcactggcaccaaagagggcatcgagaaagctcgccatgaagtcttactcatctctgccgagcaggacaaa

SEQ ID NO: 140716 - DNA, 924 bp, Homo sapiens
  Payload ID: 7597
  Gene Symbol: HDLBP
  Gene Name: high density lipoprotein binding protein
  ENST ID: ENST00000427487
  CDS Start-End: 1-924
ccaaaatcgaccttccagcagagaatagcaattcagagaccattatcatcacaggcaagcgagccaactgcgaagctgcccggagcaggattctgtctattcagaaagacctggccaacatagccgaggtagaggtctccatccctgccaagctgcacaactccctcattggcaccaagggccgtctgatccgctccatcatggaggagtgcggcggggtccacattcactttcccgtggaaggttcaggaagcgacaccgttgttatcaggggcccttcctcggatgtggagaaggccaagaagcagctcctgcatctggcggaggagaaggcacgtggtgtcaggctaacacagtgggattggtttctgcagcaaaccaagagtttcactgttgacatccgcgccaagccagaataccacaaattcctcatcggcaaggggggcggcaaaattcgcaaggtgcgcgacagcactggagcacgtgtcatcttccctgcggctgaggacaaggaccaggacctgatcaccatcattggaaaggaggacgccgtccgagaggcacagaaggagctggaggccttgatccaaaacctggataatgtggtggaagactccatgctggtggaccccaagcaccaccgccacttcgtcatccgcagaggccaggtcttgcgggagattgctgaagagtatggcggggtgatggtcagcttcccacgctctggcacacagagcgacaaagtcaccctcaagggcgccaaggactgtgtggaggcagccaagaaacgcattcaggagatcattgaggacctggaagctcaggtgacattagaatgtgctataccccagaaattccatcgatctgtcatgggccccaaaggttccagaatccagcagattactcgggatttcagtgttcaaa

SEQ ID NO: 140717 - DNA, 420 bp, Homo sapiens
  Payload ID: 7597
  Gene Symbol: HDLBP
  Gene Name: high density lipoprotein binding protein
  ENST ID: ENST00000458564
  CDS Start-End: 281-420
ccgcgcggggggcgagtaagccagcggcaggaccagcgggcgggggcccacgagtcagagcccagcacaacaacccttcttctggttcagccgcccagcggttatgtggggtacgggaaagatgatccagccatgcaggagagcaccagtggttctgtgaggattttacttcaaaatacaaaagctggcaggctgacagaggcggcctcaggacggaccttctggctactgaccgttttgctgtggttttcccggattgtgtgtaggtgtgagatcaaccatgagttccgttgcagttttgacccaagagagttttgctgaacaccgaagtgggctggttccgcaacaaatcaaagttgccactctaaattcagaagaggagagcgaccctccaacctacaaggatgccttccctccact

SEQ ID NO: 140718 - DNA, 578 bp, Homo sapiens
  Payload ID: 7597
  Gene Symbol: HDLBP
  Gene Name: high density lipoprotein binding protein
  ENST ID: ENST00000422080
  CDS Start-End: 418-578
tcggagcgtcccggcttctcccgcgcggggggcgagtaagccagcggcaggaccagcgggcgggggcccacgaacacatgcctcactcctgtcagcagttccaccttttcatggttgaggagcacatgtggtcgccagcctcccatctccagagtcccctaagatccccagtggattagaaaggactgaaggacttttacaggctaacagcaagaagaacaaagtaactgcaaaatagacggagaattcttgaagacggtagctcttggtcaccataagcgctgcagagaccccgaggtccacattctgttgtagcaaaagctggcaggctgacagaggcggcctcaggacggaccttctggctactgaccgttttgctgtggttttcccggattgtgtgtaggtgtgagatcaaccatgagttccgttgcagttttgacccaagagagttttgctgaacaccgaagtgggctggttccgcaacaaatcaaagttgccactctaaattcagaagaggagagcgaccctccaacctacaaggatgccttccctccacttcctgagaaagctgcttgcct

SEQ ID NO: 140719 - DNA, 683 bp, Homo sapiens
  Payload ID: 7597
  Gene Symbol: HDLBP
  Gene Name: high density lipoprotein binding protein
  ENST ID: ENST00000442730
  CDS Start-End: 1-381
cgcgttcacgcccgcatcattggtgcccgcggcaaagccattcgcaaaatcatggacgaattcaaggtggacattcgcttcccacagagcggagccccagaccccaactgcgtcactgtgacggggctcccagagaatgtggaggaagccatcgaccacatcctcaatctggaggaggaatacctagctgacgtggtggacagtgaggcgctgcaggtatacatgaaacccccagcacacgaagaggccaaggcaccttccagaggctttgtggtgcgggacgcaccctggaccgccagcagcagtgagaaggtcagatgcgggcttctgccctcctgggtcccagggagggtgggcgggcaggcgggcttggtgtcctgagggtggcaactgcgtcggaagctgcttgcgagttggggagcatcccctcctgaagccgtgtcctctctctgcacaggctcctgacatgagcagctctgaggaatttcccagctttggggctcaggtggctcccaagaccctcccttggggccccaaacgataatgatcaaaaagaacagaaccctctccagcctgctgacccaaacccaaccacacaatggtttgtctcaatctgacccagcggctggaccctccgtaaattgttgacgctcttcccccttcccgaggtcccgcagggagcc

SEQ ID NO: 140720 - DNA, 544 bp, Homo sapiens
  Payload ID: 7597
  Gene Symbol: HDLBP
  Gene Name: high density lipoprotein binding protein
  ENST ID: ENST00000423693
  CDS Start-End: 301-544
aagcgtagcctcttctcctttaccaagatggcggcttgtccctgtttcgccacagttcctaccttatgagctcggttttcttatgcttataagagtggaacagacacatgcctcactcctgtcagcagttccaccttttcatggttgaggagcacatgtggtcgccagcctcccatctccagagtcccctaaggcaagcaaaagctggcaggctgacagaggcggcctcaggacggaccttctggctactgaccgttttgctgtggttttcccggattgtgtgtaggtgtgagatcaaccatgagttccgttgcagttttgacccaagagagttttgctgaacaccgaagtgggctggttccgcaacaaatcaaagttgccactctaaattcagaagaggagagcgaccctccaacctacaaggatgccttccctccacttcctgagaaagctgcttgcctggaaagtgcccaggaacccgctggagcctgggggaacaagatccgacccatcaaggcttctgtcatcactcaggtgttccatg

SEQ ID NO: 140721 - DNA, 569 bp, Homo sapiens
  Payload ID: 7597
  Gene Symbol: HDLBP
  Gene Name: high density lipoprotein binding protein
  ENST ID: ENST00000442714
  CDS Start-End: 185-569
agccgtccttcctgctccctttctggtcttcggttgtttccactcgggttcttgcggggcgcgctccctctgctttctggagcaaaagctggcaggctgacagaggcggcctcaggacggaccttctggctactgaccgttttgctgtggttttcccggattgtgtgtaggtgtgagatcaaccatgagttccgttgcagttttgacccaagagagttttgctgaacaccgaagtgggctggttccgcaacaaatcaaagttgccactctaaattcagaagaggagagcgaccctccaacctacaaggatgccttccctccacttcctgagaaagctgcttgcctggaaagtgcccaggaacccgctggagcctgggggaacaagatccgacccatcaaggcttctgtcatcactcaggtgttccatgtacccctggaggagagaaaatacaaggatatgaaccagtttggagaaggcctcagcaactgttgccattcccaaagaacaccatcgctttgttattggcaaaaatggagagaaactgcaagacttggagctaaaaactgca

SEQ ID NO: 140722 - DNA, 598 bp, Homo sapiens
  Payload ID: 7597
  Gene Symbol: HDLBP
  Gene Name: high density lipoprotein binding protein
  ENST ID: ENST00000444092
  CDS Start-End: 158-598
ggtggcatctgcgaaagttcctccatgcaggatgggtgccgacttccagaacttgcaaaagctggcaggctgacagaggcggcctcaggacggaccttctggctactgaccgttttgctgtggttttcccggattgtgtgtaggtgtgagatcaaccatgagttccgttgcagttttgacccaagagagttttgctgaacaccgaagtgggctggttccgcaacaaatcaaagttgccactctaaattcagaagaggagagcgaccctccaacctacaaggatgccttccctccacttcctgagaaagctgcttgcctggaaagtgcccaggaacccgctggagcctgggggaacaagatccgacccatcaaggcttctgtcatcactcaggtgttccatgtacccctggaggagagaaaatacaaggatatgaaccagtttggagaaggtgaacaagcaaaaatctgccttgagatcatgcagagaactggtgctcacttggagctgtctttggccaaagaccaaggcctctccatcatggtgtcaggaaagctggatgctgtcatgaaagctcggaaggacattgttgctagactg

SEQ ID NO: 140723 - DNA, 4046 bp, Homo sapiens
  Payload ID: 7598
  Gene Symbol: HMG20A
  Gene Name: high mobility group 20A
  Uniprot ID: Q9NP66
  ENST ID: ENST00000336216
  CDS Start-End: 359-1402
aaacctccacgaaaataaggctcaccttgcgtaaccacgtagtccttcgccgcattggggcaaaataatcccttcatttttgtgaaggtaccgtggaaaatatttcatttttcttctcaccggagcaattgtaaatgctatgcggtaagaggagttacctgtggaaaggtggttaagagattaggtaaagaaaaggaaaggacaccaaaataaagtgctgcggaagaatttttgtccagctgtgagacgacgagtgcgtgaagtgaaggcgattgagaggggctgagggaattgtcctctgtggaagggactttcttttggccctaggccccttcctgcccctgtcgtcagcagagagatggaaaacttgatgactagctccaccctaccgcccctttttgcagatgaagacggttccaaggagagtaatgatctggctaccactgggttaaatcacccagaggttccatacagtagtggcgccacatcatccaccaacaatccagaatttgtggaggatctctctcaaggtcagttgcttcagagtgagtcttcaaatgcagcagaaggcaatgaacagaggcatgaagatgagcaacgaagtaaacgaggaggttggtccaaaggaagaaagaggaagaaacctcttcgagacagcaatgcacccaaatccccccttacaggatatgttcggttcatgaatgagcgtcgagaacaacttcgagcaaagagaccagaagtcccatttccagaaatcacaaggatgttaggcaatgaatggagtaaactgcctcctgaggaaaaacagcgctaccttgatgaagcagacagagataaggagcgttacatgaaggaactggaacagtatcagaaaacagaggcctacaaggtcttcagtaggaaaacccaggaccgtcagaaaggcaaatctcataggcaagatgcagcccggcaggccactcatgatcatgagaaagaaacagaggtaaaggaacggtctgtttttgacatccctatatttacagaggaattcttgaaccatagcaaagctcgggaagcagagctccgccagcttcgcaaatccaacatggagtttgaggagaggaatgcagccctgcaaaagcacgtggagagcatgcgcacagcagtggagaagctggaggtggatgtgatccaggagcggagccgcaacacagtcttacagcagcacctggagaccctgcggcaggtgctgaccagcagctttgccagcatgcccttgcctggaagtggagagacacctacagtggacaccattgactcatatatgaacagactgcacagtattattttagctaatccccaagacaatgaaaacttcatagctacagttcgagaagttgtgaacagactcgatcgttagggaatggtcttagaactccaagatgttccataagtgtttttacttgtgaggaatgagaagccatccatggaaatttgaactgagtgggggcagagaaagagtgcagatccctttgcttgtgaaagaattatcagtgagtgaaaggccatcaccccaggaagccaaatgagggagcagcaacatgtatatgagcttcctatggaattgtccttatgtgaagctttgaaggtgtacagccactctcccgggtcttcaggttcctaccatttccatttctgttaaagtggatctgcatatcttcagcttactaggtgacccggatgctgacatctgctgctgcagaaaggaagacttttcattgtaatttcgcttagacccttttatcagtggagctccagttttcttacctagctgtcacttttttaaatgcctctgggggttatttttgctttccttggcccccaccaatttatacatctccattttctgacctctggactaactggttgctcagcaaggttctgaaggagagtttcttgcattggacaggcccagtcttctcccatcattgccctgctgtgactccaaagaaaggagcttcttgctgacagtgccctgtggagcaaggctgtgtttcctaccccacacggtgctcagtgggtgccagccctcagtgtggctttgtgattgctgccctaaaggagaatgctctttccttcctcactggtactgcctgctgttttctaagcattgctcctgcacagacatggagtcccagccccagcaaggctcttctgttcccatctgttgacaatgtcttgtggagcatttttgctgaggaaaaggtcacttgtaaacagaggagaaagggaaagagtacaaagccctaagtttattgtaagtgaaaactgagggaattcctgtcttctttaggagtaatgattcatagatctagataggtggaaatatcattcaaaatagtcacttgagctcacaaaaaaagcaaggaagaattctcatgtcctttgtcttccttctgtagccattaactgctgaatccatgtgaggaagacaggcttcccttccttccccctccttagtgattttttctttaacagcataagtaaagaggactttctggttcatttttgtttgttttgttttgttttgttttgtttacagatgaggtcttcctgtgttgcccaggctggagtgcggtggctattcacagatgctatcatagcacactacagcctacaactcttgggctcaagcatcacgcctagcagtttctggttcctttaacagcaaaaggaaagagaggttctgattcttacctcagggttttttggttgttcattgtttttgtttttgtttttgttttgacactgcagagcacaaggctaaaggttacagctgagatctttggaaccaaaggcagagcaagcagagcccgttgtctgggccccacaccactgcaggcaggtggatagaagtgcggcccctctcatagtatgcccataagtcagggcatagggcagaactacctgtcatgttgctacaccatcctgtcttctcagcatctccttgcctgttttctttattagtccaaaggaaaacaacagcaacaaaatctgtttttaaaatgtcttatatgaacatatatcaaatatccatgcgctgaaacccacataccatcacttggcaattttttagaataagaccccattattatctattgctataaacctagccagttctcttgctcttctgtattttcctatttccctgccatcatctgctatttctgccacttctcttagactccttgtctgcaaagcccaagctagaactcactgtctatggcagaaggacatccagagcccattctggagttttgttttttccttctgccagatgctttgtgtcctgtcttccttcctcctcatatttctgtttctcatttgtgttcagttttgtgcagcattgctagcactgcttttgtgaccagaaaaggccataacatggtccaggatcatcattcttctgactctagatgggacacttgacagtgacttgaaacatttgcatattcaggaatgcatgagatttcaagagagcctacagtatgaaatcattttcacaaaataagcagcttgcttctgaaatgctgtctttcccagtagctactcacctgcctctggtggctgggattcagatgccacaaaactgtcagtatctatagaccaggtctgtgccacctcctctctcctctgtgctcagtgaggaggcagtaaatgaagttacaggctagcacaatacctaactcatgtttcccagtacacctgtagatattactgtacttttatgttctcaagaaataagttgttgcctattcagtgttacagatttctttgtttctttttaattaaaatacaagaagcagctgaggaaagggagacaaggtattttatttctgactgattttagaaaaaacttgtgtacatgtgtttggaactgttgaaatgccaagttttctgtataagtgtttttgtaattaaactttcagattttctttgttttttaagaagttgatgtgcttgtttgacatttgtctcattaaaacttttctacgttgaattca

SEQ ID NO: 140724 - DNA, 4112 bp, Homo sapiens
  Payload ID: 7598
  Gene Symbol: HMG20A
  Gene Name: high mobility group 20A
  Uniprot ID: Q9NP66
  ENST ID: ENST00000381714
  CDS Start-End: 429-1472
accttgcgtaaccacgtagtccttcgccgcattggggcaaaataatcccttcatttttgtgaaggtaccgtggaaaatatttcatttttcttctcaccggagcaattgtaaatgctatgcggtaagaggagttacctgtggaaaggtggttaagagattaggtaaagaaaaggaaaggacaccaaaataaagtgctgcggaagaatttttgtccagctgtgagacgacgagtgcgtgaagtgaaggcgattgagaggggctgagggaattgtcctctgtggaagggactttcttttggccctaggccccttcctgcccctgtcgtcagcagagtctctacaaggaagataacggactgtaaaattctataaagcaaagctacacatcacttgacaccatacaccatcttggttacataatgaagagagatggaaaacttgatgactagctccaccctaccgcccctttttgcagatgaagacggttccaaggagagtaatgatctggctaccactgggttaaatcacccagaggttccatacagtagtggcgccacatcatccaccaacaatccagaatttgtggaggatctctctcaaggtcagttgcttcagagtgagtcttcaaatgcagcagaaggcaatgaacagaggcatgaagatgagcaacgaagtaaacgaggaggttggtccaaaggaagaaagaggaagaaacctcttcgagacagcaatgcacccaaatccccccttacaggatatgttcggttcatgaatgagcgtcgagaacaacttcgagcaaagagaccagaagtcccatttccagaaatcacaaggatgttaggcaatgaatggagtaaactgcctcctgaggaaaaacagcgctaccttgatgaagcagacagagataaggagcgttacatgaaggaactggaacagtatcagaaaacagaggcctacaaggtcttcagtaggaaaacccaggaccgtcagaaaggcaaatctcataggcaagatgcagcccggcaggccactcatgatcatgagaaagaaacagaggtaaaggaacggtctgtttttgacatccctatatttacagaggaattcttgaaccatagcaaagctcgggaagcagagctccgccagcttcgcaaatccaacatggagtttgaggagaggaatgcagccctgcaaaagcacgtggagagcatgcgcacagcagtggagaagctggaggtggatgtgatccaggagcggagccgcaacacagtcttacagcagcacctggagaccctgcggcaggtgctgaccagcagctttgccagcatgcccttgcctggaagtggagagacacctacagtggacaccattgactcatatatgaacagactgcacagtattattttagctaatccccaagacaatgaaaacttcatagctacagttcgagaagttgtgaacagactcgatcgttagggaatggtcttagaactccaagatgttccataagtgtttttacttgtgaggaatgagaagccatccatggaaatttgaactgagtgggggcagagaaagagtgcagatccctttgcttgtgaaagaattatcagtgagtgaaaggccatcaccccaggaagccaaatgagggagcagcaacatgtatatgagcttcctatggaattgtccttatgtgaagctttgaaggtgtacagccactctcccgggtcttcaggttcctaccatttccatttctgttaaagtggatctgcatatcttcagcttactaggtgacccggatgctgacatctgctgctgcagaaaggaagacttttcattgtaatttcgcttagacccttttatcagtggagctccagttttcttacctagctgtcacttttttaaatgcctctgggggttatttttgctttccttggcccccaccaatttatacatctccattttctgacctctggactaactggttgctcagcaaggttctgaaggagagtttcttgcattggacaggcccagtcttctcccatcattgccctgctgtgactccaaagaaaggagcttcttgctgacagtgccctgtggagcaaggctgtgtttcctaccccacacggtgctcagtgggtgccagccctcagtgtggctttgtgattgctgccctaaaggagaatgctctttccttcctcactggtactgcctgctgttttctaagcattgctcctgcacagacatggagtcccagccccagcaaggctcttctgttcccatctgttgacaatgtcttgtggagcatttttgctgaggaaaaggtcacttgtaaacagaggagaaagggaaagagtacaaagccctaagtttattgtaagtgaaaactgagggaattcctgtcttctttaggagtaatgattcatagatctagataggtggaaatatcattcaaaatagtcacttgagctcacaaaaaaagcaaggaagaattctcatgtcctttgtcttccttctgtagccattaactgctgaatccatgtgaggaagacaggcttcccttccttccccctccttagtgattttttctttaacagcataagtaaagaggactttctggttcatttttgtttgttttgttttgttttgttttgtttacagatgaggtcttcctgtgttgcccaggctggagtgcggtggctattcacagatgctatcatagcacactacagcctacaactcttgggctcaagcatcacgcctagcagtttctggttcctttaacagcaaaaggaaagagaggttctgattcttacctcagggttttttggttgttcattgtttttgtttttgtttttgttttgacactgcagagcacaaggctaaaggttacagctgagatctttggaaccaaaggcagagcaagcagagcccgttgtctgggccccacaccactgcaggcaggtggatagaagtgcggcccctctcatagtatgcccataagtcagggcatagggcagaactacctgtcatgttgctacaccatcctgtcttctcagcatctccttgcctgttttctttattagtccaaaggaaaacaacagcaacaaaatctgtttttaaaatgtcttatatgaacatatatcaaatatccatgcgctgaaacccacataccatcacttggcaattttttagaataagaccccattattatctattgctataaacctagccagttctcttgctcttctgtattttcctatttccctgccatcatctgctatttctgccacttctcttagactccttgtctgcaaagcccaagctagaactcactgtctatggcagaaggacatccagagcccattctggagttttgttttttccttctgccagatgctttgtgtcctgtcttccttcctcctcatatttctgtttctcatttgtgttcagttttgtgcagcattgctagcactgcttttgtgaccagaaaaggccataacatggtccaggatcatcattcttctgactctagatgggacacttgacagtgacttgaaacatttgcatattcaggaatgcatgagatttcaagagagcctacagtatgaaatcattttcacaaaataagcagcttgcttctgaaatgctgtctttcccagtagctactcacctgcctctggtggctgggattcagatgccacaaaactgtcagtatctatagaccaggtctgtgccacctcctctctcctctgtgctcagtgaggaggcagtaaatgaagttacaggctagcacaatacctaactcatgtttcccagtacacctgtagatattactgtacttttatgttctcaagaaataagttgttgcctattcagtgttacagatttctttgtttctttttaattaaaatacaagaagcagctgaggaaagggagacaaggtattttatttctgactgattttagaaaaaacttgtgtacatgtgtttggaactgttgaaatgccaagttttctgtataagtgtttttgtaattaaactttcagattttctttgttttttaagaagttgatgtgcttgtttgacatttgtctcattaaaacttttctacgttgaa

SEQ ID NO: 140725 - DNA, 479 bp, Homo sapiens
  Payload ID: 7598
  Gene Symbol: HMG20A
  Gene Name: high mobility group 20A
  ENST ID: ENST00000558176
  CDS Start-End: 402-479
gattgagaggggctgagggaattgtcctctgtggaagggactttcttttggccctaggccccttcctgcccctgtcgtcagcagagagatggaaaacttgatgactagctccaccctaccgcccctttttgcagatgaagacggttccaaggagagtaatgatctggctaccactgggtaagcagctgctttaggacactggacttctccataggcctcaaaacaaagcttctagcaaagttaaatcacccagaggttccatacagtagtggcgccacatcatccaccaacaatccagaatttgtggaggatctctctcaaggtcagttgcttcagagtgagtcttcaaatgcagcagaaggcaatgaacagaggcatgaagatgaggatatgttcggttcatgaatgagcgtcgagaacaacttcgagcaaagagaccagaagtcccatttccagaaatcacaaggatgttaggcaat

SEQ ID NO: 140726 - DNA, 644 bp, Homo sapiens
  Payload ID: 7598
  Gene Symbol: HMG20A
  Gene Name: high mobility group 20A
  ENST ID: ENST00000558845
  CDS Start-End: 1-355
agctcgggaagcagagctccgccagcttcgcaaatccaacatggagtttgaggagaggaatgcagccctgcaaaagcacgtggagagcatgcgcacagcagtggagaagctggaggtggatgtgatccaggagcggagccgcaacacagtcttacagcagcacctggagaccctgcggcaggtgctgaccagcagctttgccagcatgcccttgcctggaagtggagagacacctacagtggacaccattgactcatatatgaacagactgcacagtattattttagctaatccccaagacaatgaaaacttcatagctacagttcgagaagttgtgaacagactcgatcgttagggaatggtgagtgctcactgataaatatttatatgccagcacatcatcaaaaataagatgtcatcagactttatcaatactactaaaaccctgggattacattggatgaacaagttggagacttggttaagattcctgttgcatggttgttaaatgtagtaaataatattagaaaagagaatcactgtagtcccagctacttgggaggctgaggtgggaggattgcttgagcccagcagttcaagtccagagagatcctgtctctaaaaataaaagaaaacagactcaa

SEQ ID NO: 140727 - DNA, 559 bp, Homo sapiens
  Payload ID: 7598
  Gene Symbol: HMG20A
  Gene Name: high mobility group 20A
  ENST ID: ENST00000560867
  CDS Start-End: 73-559
aaggttaaaaggcccatttaccatacagtttaaattgatgtgtccaagtcaagaaaataaatatttagagagatggaaaacttgatgactagctccaccctaccgcccctttttgcagatgaagacggttccaaggagagtaatgatctggctaccactgggttaaatcacccagaggttccatacagtagtggcgccacatcatccaccaacaatccagaatttgtggaggatctctctcaaggtcagttgcttcagagtgagtcttcaaatgcagcagaaggcaatgaacagaggcatgaagatgagcaacgaagtaaacgaggaggttggtccaaaggaagaaagaggaagaaacctcttcgagacagcaatgcacccaaatccccccttacaggatatgttcggttcatgaatgagcgtcgagaacaacttcgagcaaagagaccagaagtcccatttccagaaatcacaaggatgttaggcaatgaatggagtaaactgcctcctgaggaaaaacagcgctaccttgatgaagcagacagagataaggagcgtt

SEQ ID NO: 140728 - DNA, 631 bp, Homo sapiens
  Payload ID: 7598
  Gene Symbol: HMG20A
  Gene Name: high mobility group 20A
  ENST ID: ENST00000560498
  CDS Start-End: 331-631
gacaaggggcggggctgccgagaccttgggcccgcgtgagggaaaatttgggttcgattaagccgcagaggaaaagaccaggggagtctgggcccatttgggcgtcggggcccgctaggtcagccgtcatcgaatacagaatatgttttcgaggacgctaatatgtagtcatgaccaatttcagttcttctactttctgcgggccttcgcaataaaaaaaaaaaaactacatctcccagaaacctccacgaaaataaggctcaccttgcgtaaccacgtagtccttcgccgcattggggcaaaataatcccttcatttttgtgaagagagatggaaaacttgatgactagctccaccctaccgcccctttttgcagatgaagacggttccaaggagagtaatgatctggctaccactgggttaaatcacccagaggttccatacagtagtggcgccacatcatccaccaacaatccagaatttgtggaggatctctctcaaggtcagttgcttcagagtgagtcttcaaatgcagcagaaggcaatgaacagaggcatgaagatgagcaacgaagtaaacgaggaggttggtccaaaggaagaaagaggaagaaacctcttcgagacagca

SEQ ID NO: 140729 - DNA, 563 bp, Homo sapiens
  Payload ID: 7598
  Gene Symbol: HMG20A
  Gene Name: high mobility group 20A
  ENST ID: ENST00000559035
  CDS Start-End: 108-362
gagtgcgtgaagtgaaggcgattgagaggggctgagggaattgtcctctgtggaagggactttcttttggccctaggccccttcctgcccctgtcgtcagcagagagatggaaaacttgatgactagctccaccctaccgcccctttttgcagatgaagacggttccaaggagagtaatgatctggctaccactgggttaaatcacccagaggttccatacagtagtggcgccacatcatccaccaacaatccagaatttgtggaggatctctctcaaggtcagttgcttcagagtgagtcttcaaatgcagcagaaggcaatgaacagaggcatgaagatgaggatatgttcggttcatgaatgagcgtcgagaacaacttcgagcaaagagaccagaagtcccatttccagaaatcacaaggatgttaggcaatgaatggagtaaactgcctcctgaggaaaaacagcgctaccttgatgaagcagacagagataaggagcgttacatgaaggaactggaacagtatcagaaaacagaggcctacaaggtcttcagtagga

SEQ ID NO: 140730 - DNA, 494 bp, Homo sapiens
  Payload ID: 7598
  Gene Symbol: HMG20A
  Gene Name: high mobility group 20A
  ENST ID: ENST00000558651
  CDS Start-End: 407-494
cttcatttttgtgaaggtaccgtggaaaatatttcatttttcttctcaccggagcaattgtaaatgctatgcggtaagaggagttacctgtggaaaggtggttaagagattagatgaagacggttccaaggagagtaatgatctggctaccactgggttaaatcacccagaggttccatacagtagtggcgccacatcatccaccaacaatccagaatttgtggaggatctctctcaaggtcagttgcttcagagtgagtcttcaaatgcagcagaaggcaatgaacagaggcatgaagatgagcaacgaagtaaacgaggaggttggtccaaaggaagaaagaggaagaaacctcttcgagacagcaatgcacccaaatccccccttacaggatatgttcggttcatgaatgagcgtcgagaacaacttcgagcaaagagaccagaagtcccatttccagaaatcacaaggatgttaggcaatgaatggagta

SEQ ID NO: 140731 - DNA, 558 bp, Homo sapiens
  Payload ID: 7598
  Gene Symbol: HMG20A
  Gene Name: high mobility group 20A
  ENST ID: ENST00000559099
  CDS Start-End: 89-558
aagcaaggcgagcttgggggtggccccagtcgagatgcccttcaccccttgaagatcacccctcttttggtggtggtggtactgagagatggaaaacttgatgactagctccaccctaccgcccctttttgcagatgaagacggttccaaggagagtaatgatctggctaccactgggttaaatcacccagaggttccatacagtagtggcgccacatcatccaccaacaatccagaatttgtggaggatctctctcaaggtcagttgcttcagagtgagtcttcaaatgcagcagaaggcaatgaacagaggcatgaagatgagcaacgaagtaaacgaggaggttggtccaaaggaagaaagaggaagaaacctcttcgagacagcaatgcacccaaatccccccttacaggatatgttcggttcatgaatgagcgtcgagaacaacttcgagcaaagagaccagaagtcccatttccagaaatcacaaggatgttaggcaatgaatggagtaaactgcctcctgaggaaaaacagcgctaccttgatgaagcaga

SEQ ID NO: 140732 - DNA, 886 bp, Homo sapiens
  Payload ID: 7599
  Gene Symbol: HMG20B
  Gene Name: high mobility group 20B
  ENST ID: ENST00000262949
  CDS Start-End: 28-886
tctttggaggtccggcccggagcggccatgtcccacggccccaagcagcccggcgcggccgccgcgccggcgggcggcaaggctccgggccagcatgggggcttcgtggtgactgtcaagcaagagcgcggcgagggtccacgcgcgggcgagaaggggtcccacgaggaggagcccggttctgcagccggtgaagaaacgcggctggcccaagggcaagaagcggaagaagattctgccgaatgggcccaaggcaccggtcacgggctacgtgcgcttcctgaacgagcggcgcgagcagatccgcacgcgccacccggatctgccctttcccgagatcaccaagatgctgggcgccgagtggagcaagctgcagccaacggaaaagcaggcttcccctgcttcaagccttctggtgctgccccccagcggtacctggatgaggccgagagagagaagcagcagtacatgaaggagctgcgggcgtaccagcagtctgaagcctataagatgtgcacggagaagatccaggagaagaagatcaagaaagaagactcgagctctgggctcatgaacactctcctgaatggacacaagggtggggactgcgatggcttctccaccttcgatgttcccatcttcactgaagagttcttggaccaaaacaaagcgcgtgaggcggagcttcggcgcttgcggaagatgaatgtggccttcgaggagcagaacgcggtactgcagaggcacacgcagagcatgagcagcgcgcgcgagcgtctggagcaggagctggcgctggaggagcggaggacgctggcgctgcagcagcagctccaggccgtgcgccaggcgctcaccgccagcttcgcctcactgccggtgccgg

SEQ ID NO: 140733 - DNA, 1596 bp, Homo sapiens
  Payload ID: 7599
  Gene Symbol: HMG20B
  Gene Name: high mobility group 20B
  Uniprot ID: Q9P0W2
  ENST ID: ENST00000333651
  CDS Start-End: 76-1029
gcgggcggttggttggagcgtcgcgcagtcgggaggtccgggaaagtttctttggaggtccggcccggagcggccatgtcccacggccccaagcagcccggcgcggccgccgcgccggcgggcggcaaggctccgggccagcatgggggcttcgtggtgactgtcaagcaagagcgcggcgagggtccacgcgcgggcgagaaggggtcccacgaggaggagccggtgaagaaacgcggctggcccaagggcaagaagcggaagaagattctgccgaatgggcccaaggcaccggtcacgggctacgtgcgcttcctgaacgagcggcgcgagcagatccgcacgcgccacccggatctgccctttcccgagatcaccaagatgctgggcgccgagtggagcaagctgcagccaacggaaaagcagcggtacctggatgaggccgagagagagaagcagcagtacatgaaggagctgcgggcgtaccagcagtctgaagcctataagatgtgcacggagaagatccaggagaagaagatcaagaaagaagactcgagctctgggctcatgaacactctcctgaatggacacaagggtggggactgcgatggcttctccaccttcgatgttcccatcttcactgaagagttcttggaccaaaacaaagcgcgtgaggcggagcttcggcgcttgcggaagatgaatgtggccttcgaggagcagaacgcggtactgcagaggcacacgcagagcatgagcagcgcgcgcgagcgtctggagcaggagctggcgctggaggagcggaggacgctggcgctgcagcagcagctccaggccgtgcgccaggcgctcaccgccagcttcgcctcactgccggtgccgggcacgggcgaaacgcccacgctgggcactctggacttctacatggcccggcttcacggagccatcgagcgcgaccccgcccagcacgagaagctcatcgtccgcatcaaggaaatcctggcccaggtcgccagcgagcacctgtgaggagtgggcgggcccacgatgcagaggagaagctgtgggcgcggccctgccacaccccaccccgtggacgagaggctgggggtccaccctttggggcctggtcccatcctgcaccttgggggctccagcccccctaaaattaaatttctgcagcatccctttagctttcaatctccccagccccctgaacccggaaaaagcactcgctgcgcgatacacccagaagaacctcacagccgagggtgcccctcctcggaggacagccacgcgctacactggctctccgggccacccccaggacacagggcagacgaaacccacccccagcacacggcaggaccccccaaattactcactacggggggctgtgccataggccacacaggaagctgccttgtggggacttacctggggtgtcccccgcatgcctgtaccccagatgggtgggggccggctttgcccatcctgctctcctccagccgagggaccctggtgggggtggctccttctcactgctggatccggactttttaaataaaaacaagtaaaatttgtgttttaagcttg

SEQ ID NO: 140734 - DNA, 616 bp, Homo sapiens
  Payload ID: 7599
  Gene Symbol: HMG20B
  Gene Name: high mobility group 20B
  ENST ID: ENST00000435022
  CDS Start-End: 35-412
gaaagtttctttggaggtccggcccggagcggccatgtcccacggccccaagcagcccggcgcggccgccgcgccggcgggcggcaaggctccgggccagcatgggggcttcgtggtgactgtcaagcaagagcgcggcgagggtccacgcgcgggcgagaaggggtcccacgaggaggagcccggttctgcagccggtgaagaaacgcggctggcccaagggcaagaagcggaagaagattctgccgaatgggcccaaggcaccggtcacgggctacgtgcgcttcctgaacgagcggcgcgagcagatccgcacgcgccacccggatctgccctttcccgagatcaccaagatgctgggcgccgagtggagcaagctgcagccaacggaaaagcagcggtacctggatgaggccgagagagagaagcagcagtacatgaaggagctgcgggcgtaccagcagtctgaagcctataagatgtgcacggagaagatccaggagaagaagatcaagaaagaagactcgagctctgggctcatgaacactctcctgaatggacacaagggtggggactgcgatggcttctccaccttcgatgttcccatcttcactga

SEQ ID NO: 140735 - DNA, 561 bp, Homo sapiens
  Payload ID: 7599
  Gene Symbol: HMG20B
  Gene Name: high mobility group 20B
  ENST ID: ENST00000417382
  CDS Start-End: 66-561
ggttggagcgtcgcgcagtcgggaggtccgggaaagtttctttggaggtccggcccggagcggccatgtcccacggccccaagcagcccggcgcggccgccgcgccggcgggcggcaaggctccgggccagcatgggggcttcgtggtgactgtcaagcaagagcgcggcgagggtccacgcgcgggcgagaaggggtcccacgaggaggagtacgccaggcccccctcccaacgacgcagcccggttctgcagccggtgaagaaacgcggctggcccaagggcaagaagcggaagaagattctgccgaatgggcccaaggcaccggtcacgggctacgtgcgcttcctgaacgagcggcgcgagcagatccgcacgcgccacccggatctgccctttcccgagatcaccaagatgctgggcgccgagtggagcaagctgcagccaacggaaaagcagcggtacctggatgaggccgagagagagaagcagcagtacatgaaggagctgcgggcgtaccagcagtctgaagcctataagatgtgcacggagaagatccagg

SEQ ID NO: 140736 - DNA, 759 bp, Homo sapiens
  Payload ID: 7599
  Gene Symbol: HMG20B
  Gene Name: high mobility group 20B
  ENST ID: ENST00000453933
  CDS Start-End: 334-759
gggaaagtttctttggaggtgaaaacagccgcggaactccgggccctgagagggggcgggggtgcaggggtcccagggccgggccggggtctttcctggcccgggggaaaccggcccaggcctcccggggggggcaatcgcccaacaaaggattcttggggcgcccgccctcgaggacttccctgcccctggatccggcccccccagcgctccgggcccggcatcccggggctctccatcgcggggtaccccagttcgcggtctgccatcgggcagcccgggcgctactcacctccgcccgcgtccgtgttccaggtccggcccggagcggccatgtcccacggccccaagcagcccggcgcggccgccgcgccggcgggcggcaaggctccgggccagcatgggggcttcgtggtgactgtcaagcaagagcgcggcgagggtccacgcgcgggcgagaaggggtcccacgaggaggagccggtgaagaaacgcggctggcccaagggcaagaagcggaagaagattctgccgaatgggcccaaggcaccggtcacgggctacgtgcgcttcctgaacgagcggcgcgagcagatccgcacgcgccacccggatctgccctttcccgagatcaccaagatgctgggcgccgagtggagcaagctgcagccaacggaaaagcagcggtacctggatgaggccgagagagagaagcagcagtacatgaaggagctgcgggcgtaccagcagtctgaagcc

SEQ ID NO: 140737 - DNA, 711 bp, Homo sapiens
  Payload ID: 7599
  Gene Symbol: HMG20B
  Gene Name: high mobility group 20B
  ENST ID: ENST00000416526
  CDS Start-End: 67-711
cgcgactcagcaacctccccaaccaatcgccggccggcgcgccgatcggtccggcccggagcggccatgtcccacggccccaagcagcccggcgcggccgccgcgccggcgggcggcaaggctccgggccagcatgggggcttcgtggtgactgtcaagcaagagcgcggcgagggtccacgcgcgggcgagaaggggtcccacgaggaggagccggtgaagaaacgcggctggcccaagggcaagaagcggaagaagattctgccgaatgggcccaaggcaccggtcacgggctacgtgcgcttcctgaacgagcggcgcgagcagatccgcacgcgccacccggatctgccctttcccgagatcaccaagatgctgggcgccgagtggagcaagctgcagccaacggaaaagcagcggtacctggatgaggccgagagagagaagcagcagtacatgaaggagctgcgggcgtaccagcagtctgaagcctataagatgtgcacggagaagatccaggagaagaagatcaagaaagaagactcgagctctgggctcatgaacactctcctgaatggacacaagggtggggactgcgatggcttctccaccttcgatgttcccatcttcactgaagagttcttggaccaaaacaaagcgcgtgaggcggagcttcggcgcttgcggaagatgaatgtggccttcgaggag

SEQ ID NO: 140738 - DNA, 741 bp, Homo sapiens
  Payload ID: 7599
  Gene Symbol: HMG20B
  Gene Name: high mobility group 20B
  ENST ID: ENST00000585900
  CDS Start-End: 1-555
caaaacaaagcgcgtgaggcggagcttcggcgcttgcggaagatgaatgtggccttcgaggagcagaacgcggtactgcagaggcacacgcagagcatgagcagcgcgcgcgagcgtctggagcaggagctggcgctggaggagcggaggacgctggcgctgcagcagcagctccaggccgtgcgccaggcgctcaccgccagcttcgcctcactgccggtgccgggcacgggcgaaacgcccacgctgggcactctggacttctacatggcccggcttcacggagccatcgagcgcgaccccgcccagcacgagaagctcatcgtccgcatcaaggaaatcctggcccaggtcgccagccccctgaacccggaaaaagcactcgctgcgcgatacacccagaagaacctcacagccgagggtgcccctcctcggaggacagccacgcgctacactggctctccgggccacccccaggacacagggcagacgaaacccacccccagcacacggcaggaccccccaaattactcactacggggggctgtgccataggccacacaggaagctgccttgtggggacttacctggggtgtcccccgcatgcctgtaccccagatgggtgggggccggctttgcccatcctgctctcctccagccgagggaccctggtgggggtggctccttctcactgctggatccggactttttaaataaaaacaagtaaaatttgtgttttaa

SEQ ID NO: 140739 - DNA, 1773 bp, Homo sapiens
  Payload ID: 7600
  Gene Symbol: HMGA1
  Gene Name: high mobility group AT-hook 1
  Uniprot ID: P17096
  ENST ID: ENST00000347617
  CDS Start-End: 136-426
ctttttaagctcccctgagccggtgctgcgctcctctaattgggactccgagccggggctatttctggcgctggcgcggctccaagaaggccatcccagccatcactcttccacctgctccttagagaagggaagatgagtgagtcgagctcgaagtccagccagcccttggcctccaagcaggaaaaggacggcactgagaagcggggccggggcaggccgcgcaagcagcctccgaaggagcccagcgaagtgccaacacctaagagacctcggggccgaccaaagggaagcaaaaacaagggtgctgccaagacccggaaaaccaccacaactccaggaaggaaaccaaggggcagacccaaaaaactggagaaggaggaagaggagggcatctcgcaggagtcctcggaggaggagcagtgacccatgcgtgccgcctgctcctcactggaggagcagcttccttctgggactggacagctttgctccgctcccaccgcccccaccccttccccaggcccaccatcaccaccgcctctggccgccacccccatcttccacctgtgccctcaccaccacactacacagcacaccagccgctgcagggctcccatgggctgagtggggagcagttttcccctggcctcagttcccagctccccccgcccacccacgcatacacacatgccctcctggacaaggctaacatcccacttagccgcaccctgcacctgctgcgtccccactcccttggtggtggggacattgctctctgggcttttggtttgggggcgccctctctgctccttcactgttccctctggcttcccatagtggggcctgggagggttcccctggccttaaaaggggcccaagccccatctcatcctggcacgccctactccactgccctggcagcagcaggtgtggccaatggaggggggtgctggcccccaggattcccccagccaaactgtctttgtcaccacgtggggctcacttttcatccttccccaacttccctagtccccgtactaggttggacagcccccttcggttacaggaaggcaggaggggtgagtcccctactccctcttcactgtggccacagcccccttgccctccgcctgggatctgagtacatattgtggtgatggagatgcagtcacttattgtccaggtgaggcccaagagccctgtggccgccacctgaggtgggctggggctgctcccctaaccctactttgcttccgccactcagccatttccccctcctcagatggggcaccaataacaaggagctcaccctgcccgctcccaacccccctcctgctcctccctgccccccaaggttctggttccatttttcctctgttcacaaactacctctggacagttgtgttgttttttgttcaatgttccattcttcgacatccgtcattgctgctgctaccagcgccaaatgttcatcctcattgcctcctgttctgcccacgatcccctcccccaagatactctttgtggggaagaggggctggggcatggcaggctgggtgaccgactaccccagtcccagggaaggtggggccctgcccctaggatgctgcagcagagtgagcaagggggcccaaatcgaccataaagggtgtaggggccacctcctccccctgttctgttggggaggggtagccatgatttgtcccagcctggggctccctctctggtttcctatttgcagttacttgaataaaaaaaatatccttttctgga

SEQ ID NO: 140740 - DNA, 1920 bp, Homo sapiens
  Payload ID: 7600
  Gene Symbol: HMGA1
  Gene Name: high mobility group AT-hook 1
  Uniprot ID: P17096
  ENST ID: ENST00000311487
  CDS Start-End: 250-573
ctttttaagctcccctgagccggtgctgcgctcctctaattgggactccgagccggggctatttctggcgctggcgcggctccaagaaggcatccgcatttgctaccagcggcggccgcggcggagccaggccggtcctcagcgcccagcaccgccgctcccggcaacccggagcgcgcaccgcaggccggcggccgagctcgcgcatcccagccatcactcttccacctgctccttagagaagggaagatgagtgagtcgagctcgaagtccagccagcccttggcctccaagcaggaaaaggacggcactgagaagcggggccggggcaggccgcgcaagcagcctccggtgagtcccgggacagcgctggtagggagtcagaaggagcccagcgaagtgccaacacctaagagacctcggggccgaccaaagggaagcaaaaacaagggtgctgccaagacccggaaaaccaccacaactccaggaaggaaaccaaggggcagacccaaaaaactggagaaggaggaagaggagggcatctcgcaggagtcctcggaggaggagcagtgacccatgcgtgccgcctgctcctcactggaggagcagcttccttctgggactggacagctttgctccgctcccaccgcccccaccccttccccaggcccaccatcaccaccgcctctggccgccacccccatcttccacctgtgccctcaccaccacactacacagcacaccagccgctgcagggctcccatgggctgagtggggagcagttttcccctggcctcagttcccagctccccccgcccacccacgcatacacacatgccctcctggacaaggctaacatcccacttagccgcaccctgcacctgctgcgtccccactcccttggtggtggggacattgctctctgggcttttggtttgggggcgccctctctgctccttcactgttccctctggcttcccatagtggggcctgggagggttcccctggccttaaaaggggcccaagccccatctcatcctggcacgccctactccactgccctggcagcagcaggtgtggccaatggaggggggtgctggcccccaggattcccccagccaaactgtctttgtcaccacgtggggctcacttttcatccttccccaacttccctagtccccgtactaggttggacagcccccttcggttacaggaaggcaggaggggtgagtcccctactccctcttcactgtggccacagcccccttgccctccgcctgggatctgagtacatattgtggtgatggagatgcagtcacttattgtccaggtgaggcccaagagccctgtggccgccacctgaggtgggctggggctgctcccctaaccctactttgcttccgccactcagccatttccccctcctcagatggggcaccaataacaaggagctcaccctgcccgctcccaacccccctcctgctcctccctgccccccaaggttctggttccatttttcctctgttcacaaactacctctggacagttgtgttgttttttgttcaatgttccattcttcgacatccgtcattgctgctgctaccagcgccaaatgttcatcctcattgcctcctgttctgcccacgatcccctcccccaagatactctttgtggggaagaggggctggggcatggcaggctgggtgaccgactaccccagtcccagggaaggtggggccctgcccctaggatgctgcagcagagtgagcaagggggcccaaatcgaccataaagggtgtaggggccacctcctccccctgttctgttggggaggggtagccatgatttgtcccagcctggggctccctctctggtttcctatttgcagttacttgaataaaaaaaatatccttttctgga

SEQ ID NO: 140741 - DNA, 1848 bp, Homo sapiens
  Payload ID: 7600
  Gene Symbol: HMGA1
  Gene Name: high mobility group AT-hook 1
  Uniprot ID: P17096
  ENST ID: ENST00000374116
  CDS Start-End: 212-502
ggtccccagcagcaagaggtggggggaggcaccagatggtatgagagcttccagggagacccgccaagatctccaggcaggccgggccaggctctctgggattccggactggcttcgcccaactggaaccccctcgatgagggggccccaggcagaccttatatgagcatcccagccatcactcttccacctgctccttagagaagggaagatgagtgagtcgagctcgaagtccagccagcccttggcctccaagcaggaaaaggacggcactgagaagcggggccggggcaggccgcgcaagcagcctccgaaggagcccagcgaagtgccaacacctaagagacctcggggccgaccaaagggaagcaaaaacaagggtgctgccaagacccggaaaaccaccacaactccaggaaggaaaccaaggggcagacccaaaaaactggagaaggaggaagaggagggcatctcgcaggagtcctcggaggaggagcagtgacccatgcgtgccgcctgctcctcactggaggagcagcttccttctgggactggacagctttgctccgctcccaccgcccccaccccttccccaggcccaccatcaccaccgcctctggccgccacccccatcttccacctgtgccctcaccaccacactacacagcacaccagccgctgcagggctcccatgggctgagtggggagcagttttcccctggcctcagttcccagctccccccgcccacccacgcatacacacatgccctcctggacaaggctaacatcccacttagccgcaccctgcacctgctgcgtccccactcccttggtggtggggacattgctctctgggcttttggtttgggggcgccctctctgctccttcactgttccctctggcttcccatagtggggcctgggagggttcccctggccttaaaaggggcccaagccccatctcatcctggcacgccctactccactgccctggcagcagcaggtgtggccaatggaggggggtgctggcccccaggattcccccagccaaactgtctttgtcaccacgtggggctcacttttcatccttccccaacttccctagtccccgtactaggttggacagcccccttcggttacaggaaggcaggaggggtgagtcccctactccctcttcactgtggccacagcccccttgccctccgcctgggatctgagtacatattgtggtgatggagatgcagtcacttattgtccaggtgaggcccaagagccctgtggccgccacctgaggtgggctggggctgctcccctaaccctactttgcttccgccactcagccatttccccctcctcagatggggcaccaataacaaggagctcaccctgcccgctcccaacccccctcctgctcctccctgccccccaaggttctggttccatttttcctctgttcacaaactacctctggacagttgtgttgttttttgttcaatgttccattcttcgacatccgtcattgctgctgctaccagcgccaaatgttcatcctcattgcctcctgttctgcccacgatcccctcccccaagatactctttgtggggaagaggggctggggcatggcaggctgggtgaccgactaccccagtcccagggaaggtggggccctgcccctaggatgctgcagcagagtgagcaagggggcccaaatcgaccataaagggtgtaggggccacctcctccccctgttctgttggggaggggtagccatgatttgtcccagcctggggctccctctctggtttcctatttgcagttacttgaataaaaaaaatatccttttctgg

SEQ ID NO: 140742 - DNA, 1887 bp, Homo sapiens
  Payload ID: 7600
  Gene Symbol: HMGA1
  Gene Name: high mobility group AT-hook 1
  Uniprot ID: P17096
  ENST ID: ENST00000401473
  CDS Start-End: 250-540
ctttttaagctcccctgagccggtgctgcgctcctctaattgggactccgagccggggctatttctggcgctggcgcggctccaagaaggcatccgcatttgctaccagcggcggccgcggcggagccaggccggtcctcagcgcccagcaccgccgctcccggcaacccggagcgcgcaccgcaggccggcggccgagctcgcgcatcccagccatcactcttccacctgctccttagagaagggaagatgagtgagtcgagctcgaagtccagccagcccttggcctccaagcaggaaaaggacggcactgagaagcggggccggggcaggccgcgcaagcagcctccgaaggagcccagcgaagtgccaacacctaagagacctcggggccgaccaaagggaagcaaaaacaagggtgctgccaagacccggaaaaccaccacaactccaggaaggaaaccaaggggcagacccaaaaaactggagaaggaggaagaggagggcatctcgcaggagtcctcggaggaggagcagtgacccatgcgtgccgcctgctcctcactggaggagcagcttccttctgggactggacagctttgctccgctcccaccgcccccaccccttccccaggcccaccatcaccaccgcctctggccgccacccccatcttccacctgtgccctcaccaccacactacacagcacaccagccgctgcagggctcccatgggctgagtggggagcagttttcccctggcctcagttcccagctccccccgcccacccacgcatacacacatgccctcctggacaaggctaacatcccacttagccgcaccctgcacctgctgcgtccccactcccttggtggtggggacattgctctctgggcttttggtttgggggcgccctctctgctccttcactgttccctctggcttcccatagtggggcctgggagggttcccctggccttaaaaggggcccaagccccatctcatcctggcacgccctactccactgccctggcagcagcaggtgtggccaatggaggggggtgctggcccccaggattcccccagccaaactgtctttgtcaccacgtggggctcacttttcatccttccccaacttccctagtccccgtactaggttggacagcccccttcggttacaggaaggcaggaggggtgagtcccctactccctcttcactgtggccacagcccccttgccctccgcctgggatctgagtacatattgtggtgatggagatgcagtcacttattgtccaggtgaggcccaagagccctgtggccgccacctgaggtgggctggggctgctcccctaaccctactttgcttccgccactcagccatttccccctcctcagatggggcaccaataacaaggagctcaccctgcccgctcccaacccccctcctgctcctccctgccccccaaggttctggttccatttttcctctgttcacaaactacctctggacagttgtgttgttttttgttcaatgttccattcttcgacatccgtcattgctgctgctaccagcgccaaatgttcatcctcattgcctcctgttctgcccacgatcccctcccccaagatactctttgtggggaagaggggctggggcatggcaggctgggtgaccgactaccccagtcccagggaaggtggggccctgcccctaggatgctgcagcagagtgagcaagggggcccaaatcgaccataaagggtgtaggggccacctcctccccctgttctgttggggaggggtagccatgatttgtcccagcctggggctccctctctggtttcctatttgcagttacttgaataaaaaaaatatccttttctgga

SEQ ID NO: 140743 - DNA, 2159 bp, Homo sapiens
  Payload ID: 7600
  Gene Symbol: HMGA1
  Gene Name: high mobility group AT-hook 1
  Uniprot ID: P17096
  ENST ID: ENST00000447654
  CDS Start-End: 490-813
ctttttaagctcccctgagccggtgctgcgctcctctaattgggactccgagccggggctatttctggcgctggcgcggctccaagaaggcgtgagttcgcggccgctccggtggcttcttttttttatatctataatttaattaaattatttatttattgaggccgcgcacgggccgtgcccagcttcctgcccctcgccatccttcgggggagggggaatatttttgtccccccgcctggctgtgacacataaataccccgcgggggcctgggcggcgagcacgcggcggcggcggtctctgagcgcctctgctctctcccggtttcagatccgcatttgctaccagcggcggccgcggcggagccaggccggtcctcagcgcccagcaccgccgctcccggcaacccggagcgcgcaccgcaggccggcggccgagctcgcgcatcccagccatcactcttccacctgctccttagagaagggaagatgagtgagtcgagctcgaagtccagccagcccttggcctccaagcaggaaaaggacggcactgagaagcggggccggggcaggccgcgcaagcagcctccggtgagtcccgggacagcgctggtagggagtcagaaggagcccagcgaagtgccaacacctaagagacctcggggccgaccaaagggaagcaaaaacaagggtgctgccaagacccggaaaaccaccacaactccaggaaggaaaccaaggggcagacccaaaaaactggagaaggaggaagaggagggcatctcgcaggagtcctcggaggaggagcagtgacccatgcgtgccgcctgctcctcactggaggagcagcttccttctgggactggacagctttgctccgctcccaccgcccccaccccttccccaggcccaccatcaccaccgcctctggccgccacccccatcttccacctgtgccctcaccaccacactacacagcacaccagccgctgcagggctcccatgggctgagtggggagcagttttcccctggcctcagttcccagctccccccgcccacccacgcatacacacatgccctcctggacaaggctaacatcccacttagccgcaccctgcacctgctgcgtccccactcccttggtggtggggacattgctctctgggcttttggtttgggggcgccctctctgctccttcactgttccctctggcttcccatagtggggcctgggagggttcccctggccttaaaaggggcccaagccccatctcatcctggcacgccctactccactgccctggcagcagcaggtgtggccaatggaggggggtgctggcccccaggattcccccagccaaactgtctttgtcaccacgtggggctcacttttcatccttccccaacttccctagtccccgtactaggttggacagcccccttcggttacaggaaggcaggaggggtgagtcccctactccctcttcactgtggccacagcccccttgccctccgcctgggatctgagtacatattgtggtgatggagatgcagtcacttattgtccaggtgaggcccaagagccctgtggccgccacctgaggtgggctggggctgctcccctaaccctactttgcttccgccactcagccatttccccctcctcagatggggcaccaataacaaggagctcaccctgcccgctcccaacccccctcctgctcctccctgccccccaaggttctggttccatttttcctctgttcacaaactacctctggacagttgtgttgttttttgttcaatgttccattcttcgacatccgtcattgctgctgctaccagcgccaaatgttcatcctcattgcctcctgttctgcccacgatcccctcccccaagatactctttgtggggaagaggggctggggcatggcaggctgggtgaccgactaccccagtcccagggaaggtggggccctgcccctaggatgctgcagcagagtgagcaagggggcccaaatcgaccataaagggtgtaggggccacctcctccccctgttctgttggggaggggtagccatgatttgtcccagcctggggctccctctctggtttcctatttgcagttacttgaataaaaaaaatatccttttctgg

SEQ ID NO: 140744 - DNA, 1529 bp, Homo sapiens
  Payload ID: 7601
  Gene Symbol: HMGA2
  Gene Name: high mobility group AT-hook 2
  Uniprot ID: P52926
  ENST ID: ENST00000354636
  CDS Start-End: 812-1132
cttgaatcttggggcaggaactcagaaaacttccagcccgggcagcgcgcgcttggtgcaagactcaggagctagcagcccgtccccctccgactctccggtgccgccgctgcctgctcccgccaccctaggaggcgcggtgccacccactactctgtcctctgcctgtgctccgtgcccgaccctatcccggcggagtctccccatcctcctttgctttccgactgcccaaggcactttcaatctcaatctcttctctctctctctctctctctctctctctctctctctctctctctctctctctctcgcagggtggggggaagaggaggaggaattctttccccgcctaacatttcaagggacacaattcactccaagtctcttccctttccaagccgcttccgaagtgctcccggtgcccgcaactcctgatcccaacccgcgagaggagcctctgcgacctcaaagcctctcttccttctccctcgcttccctcctcctcttgctacctccacctccaccgccacctccacctccggcacccacccaccgccgccgccgccaccggcagcgcctcctcctctcctcctcctcctcccctcttctctttttggcagccgctggacgtccggtgttgatggtggcagcggcggcagcctaagcaacagcagccctcgcagcccgccagctcgcgctcgccccgccggcgtccccagccctatcacctcatctcccgaaaggtgctgggcagctccggggcggtcgaggcgaagcggctgcagcggcggtagcggcggcgggaggcaggatgagcgcacgcggtgagggcgcggggcagccgtccacttcagcccagggacaacctgccgccccagcgcctcagaagagaggacgcggccgccccaggaagcagcagcaagaaccaaccggtgagccctctcctaagagacccaggggaagacccaaaggcagcaaaaacaagagtccctctaaagcagctcaaaagaaagcagaagccactggagaaaaacggccaagaggcagacctaggaaatgggacaatctactaccaagaaccagctccaagaagaaaacatctctgggaaacagtaccaaaaggagtcactgaattgtcattggaggagtccaggatagctcttcatgttattttcaccttgaggaattgtccattacatctatgagccttatgtgtggctttctccgatatagaaacctatcaggtgtcttttagatcatttcaaaacactggcttattctttcttatgtttccaactgaagtctgcatcccaagatgtagtttcactgctaccccatatggcacccttgtacgaatttgaaaaaagtactcactctaggcacatgcagagccatgcctgcggggacagcttagagagtagagggtgggctgaactccagttactctcgtacagggatccacctttttgcagaaatcacagtgtggctatggtgtggtttgatttcataaaacagatgcttaaaaagta

SEQ ID NO: 140745 - DNA, 611 bp, Homo sapiens
  Payload ID: 7601
  Gene Symbol: HMGA2
  Gene Name: high mobility group AT-hook 2
  ENST ID: ENST00000393577
  CDS Start-End: 149-505
agcaacagcagccctcgcagcccgccagctcgcgctcgccccgccggcgtccccagccctatcacctcatctcccgaaaggtgctgggcagctccggggcggtcgaggcgaagcggctgcagcggcggtagcggcggcgggaggcaggatgagcgcacgcggtgagggcgcggggcagccgtccacttcagcccagggacaacctgccgccccagcgcctcagaagagaggacgcggccgccccaggaagcagcagcaagaaccaaccggtgagccctctcctaagagacccaggggaagacccaaaggcagcaaaaacaagagtccctctaaagcagctcaaaagaaagcagaagccactggagaaaaacggccaagaggcagacctaggaaatggccacaacaagttgttcagaagaagcctgctcaggtcaatgttgccttgcctgggaaggaccacccgggcaatcttatatatctactgttctctaaaaatgccacttagaagagaattgaaacttccaaacacatgaaaggatccaaggaaagtgtcttcaaacaattacatatgagctttaagtggaataaaaacagagttaccatgaaaaaaa

SEQ ID NO: 140746 - DNA, 1993 bp, Homo sapiens
  Payload ID: 7601
  Gene Symbol: HMGA2
  Gene Name: high mobility group AT-hook 2
  Uniprot ID: P52926
  ENST ID: ENST00000393578
  CDS Start-End: 812-1084
cttgaatcttggggcaggaactcagaaaacttccagcccgggcagcgcgcgcttggtgcaagactcaggagctagcagcccgtccccctccgactctccggtgccgccgctgcctgctcccgccaccctaggaggcgcggtgccacccactactctgtcctctgcctgtgctccgtgcccgaccctatcccggcggagtctccccatcctcctttgctttccgactgcccaaggcactttcaatctcaatctcttctctctctctctctctctctctctctctctctctctctctctctctctctctctcgcagggtggggggaagaggaggaggaattctttccccgcctaacatttcaagggacacaattcactccaagtctcttccctttccaagccgcttccgaagtgctcccggtgcccgcaactcctgatcccaacccgcgagaggagcctctgcgacctcaaagcctctcttccttctccctcgcttccctcctcctcttgctacctccacctccaccgccacctccacctccggcacccacccaccgccgccgccgccaccggcagcgcctcctcctctcctcctcctcctcccctcttctctttttggcagccgctggacgtccggtgttgatggtggcagcggcggcagcctaagcaacagcagccctcgcagcccgccagctcgcgctcgccccgccggcgtccccagccctatcacctcatctcccgaaaggtgctgggcagctccggggcggtcgaggcgaagcggctgcagcggcggtagcggcggcgggaggcaggatgagcgcacgcggtgagggcgcggggcagccgtccacttcagcccagggacaacctgccgccccagcgcctcagaagagaggacgcggccgccccaggaagcagcagcaagaaccaaccggtgagccctctcctaagagacccaggggaagacccaaaggcagcaaaaacaagagtccctctaaagcagctcaaaagaaagcagaagccactggagaaaaacggccaagaggcagacctaggaaatgggaggagttttacattgcagcttagaagcctttcttccaatagcagagatttggtgtcatgtggtgttcatcagtttgaaaagaagtatttctgctgtttgcctcaagatgtacatacagagatgtgctgattctcagaacttctatagaattccattagccagtcctgccaattgaaatttggcatttaattatttgcatttttctattcttgcctaggaaaggagctcgtcacatacctagtttagtgatggaaagtatttggagaaagttttagagagtggggctcaggctcaagaatacaatgaagtaataaagttgttaacctcatgtataaaatcctccatccagatgttgcttagtgatgcagctagtgcttctggaggaaaagaagcaagaaccaaataatgaagactacatcaatgggaacaagtgatacttttaggtgttttgttctcagaatattttaaaagaaaggaaattaacaacagaagaaaaatatttccctatatgaattaatggtttttataagaaaaatatctttctggagatactaagattgacctagaaattgatccaaggaccagatgcttaaagttcacttcaattggtcactagaaagatcccagcaatccccagctggtttctcaggctgctgattccctttatttggtaatggggtgtgtgcagtacgttgattaaaaaatatgcatttccattccattgcttttgaaggggggcagttgtctttctcttattaaagagcttgtgatacacaggaaagtgatgtaattttatatattagtcaaacgtgaggattttagataagacagcaagggtttttttcccctagtttgtagaaatctagaaatttaagtgatgatttgaggatcgagaagggagaactgaatcaaaataaaatctactacacaca

SEQ ID NO: 140747 - DNA, 4473 bp, Homo sapiens
  Payload ID: 7601
  Gene Symbol: HMGA2
  Gene Name: high mobility group AT-hook 2
  Uniprot ID: P52926
  ENST ID: ENST00000403681
  CDS Start-End: 1141-1470
cagcccgggatccccggcctgtccctttaaccccgccgccgggcgggagcacgtgagcggggctccgggtggcacccgggcgccgccgccgccgaggcagttgtatttcgaacgctgcctctggctagcagccaggcgccttggctcggcggtccgcctggcctccctcctcctcatacttttcttcctgcgcaaccccctcccctttatccgcccacgattagaggtgggcactccccccaccaccaccccctccccaagcgcaagcgcgtgcacgcacacacaccacacacactcacactcacacacactcacacacactcatcccacttgaatcttggggcaggaactcagaaaacttccagcccgggcagcgcgcgcttggtgcaagactcaggagctagcagcccgtccccctccgactctccggtgccgccgctgcctgctcccgccaccctaggaggcgcggtgccacccactactctgtcctctgcctgtgctccgtgcccgaccctatcccggcggagtctccccatcctcctttgctttccgactgcccaaggcactttcaatctcaatctcttctctctctctctctctctctctctctctctctctctctctctctctctctctctcgcagggtggggggaagaggaggaggaattctttccccgcctaacatttcaagggacacaattcactccaagtctcttccctttccaagccgcttccgaagtgctcccggtgcccgcaactcctgatcccaacccgcgagaggagcctctgcgacctcaaagcctctcttccttctccctcgcttccctcctcctcttgctacctccacctccaccgccacctccacctccggcacccacccaccgccgccgccgccaccggcagcgcctcctcctctcctcctcctcctcccctcttctctttttggcagccgctggacgtccggtgttgatggtggcagcggcggcagcctaagcaacagcagccctcgcagcccgccagctcgcgctcgccccgccggcgtccccagccctatcacctcatctcccgaaaggtgctgggcagctccggggcggtcgaggcgaagcggctgcagcggcggtagcggcggcgggaggcaggatgagcgcacgcggtgagggcgcggggcagccgtccacttcagcccagggacaacctgccgccccagcgcctcagaagagaggacgcggccgccccaggaagcagcagcaagaaccaaccggtgagccctctcctaagagacccaggggaagacccaaaggcagcaaaaacaagagtccctctaaagcagctcaaaagaaagcagaagccactggagaaaaacggccaagaggcagacctaggaaatggccacaacaagttgttcagaagaagcctgctcaggaggaaactgaagagacatcctcacaagagtctgccgaagaggactagggggcgccaacgttcgatttctacctcagcagcagttggatcttttgaagggagaagacactgcagtgaccacttattctgtattgccatggtctttccactttcatctggggtggggtggggtggggtgggggaggggggggtggggtggggagaaatcacataaccttaaaaaggactatattaatcaccttctttgtaatcccttcacagtcccaggtttagtgaaaaactgctgtaaacacaggggacacagcttaacaatgcaacttttaattactgttttcttttttcttaacctactaatagtttgttgatctgataagcaagagtgggcgggtgagaaaaaccgaattgggtttagtcaatcactgcactgcatgcaaacaagaaacgtgtcacacttgtgacgtcgggcattcatataggaagaacgcggtgtgtaacactgtgtacacctcaaataccaccccaacccactccctgtagtgaatcctctgtttagaacaccaaagataaggactagatactactttctctttttcgtataatcttgtagacacttacttgatgatttttaactttttatttctaaatgagacgaaatgctgatgtatcctttcattcagctaacaaactagaaaaggttatgttcatttttcaaaaagggaagtaagcaaacaaatattgccaactcttctatttatggatatcacacatatcagcaggagtaataaatttactcacagcacttgttttcaggacaacacttcattttcaggaaatctacttcctacagagccaaaatgccatttagcaataaataacacttgtcagcctcagagcatttaaggaaactagacaagtaaaattatcctctttgtaatttaatgaaaaggtacaacagaataatgcatgatgaactcacctaattatgaggtgggaggagcgaaatctaaatttcttttgctatagttatacatcaatttaaaaagcaaaaaaaaaaaaggggggggcaatctctctctgtgtctttctctctctctcttcctctccctctctcttttcattgtgtatcagtttccatgaaagacctgaataccacttacctcaaattaagcatatgtgttacttcaagtaatacgttttgacataagatggttgaccaaggtgcttttcttcggcttgagttcaccatctcttcattcaaactgcacttttagccagagatgcaatatatccccactactcaatactacctctgaatgttacaacgaatttacagtctagtacttattacatgctgctatacacaagcaatgcaagaaaaaaacttactgggtaggtgattctaatcatctgcagttctttttgtacacttaattacagttaaagaagcaatctccttactgtgtttcagcatgactatgtatttttctatgtttttttaattaaaaatttttaaaatacttgtttcagcttctctgctagatttctacattaacttgaaaattttttaaccaagtcgctcctaggttcttaaggataattttcctcaatcacactacacatcacacaagatttgactgtaatatttaaatattaccctccaagtctgtacctcaaatgaattctttaaggagatggactaattgacttgcaaagacctacctccagacttcaaaaggaatgaacttgttacttgcagcattcatttgttttttcaatgtttgaaatagttcaaactgcagctaaccctagtcaaaactatttttgtaaaagacatttgatagaaaggaacacgtttttacatacttttgcaaaataagtaaataataaataaaataaaagccaaccttcaaagaaacttgaagctttgtaggtgagatgcaacaagccctgcttttgcataatgcaatcaaaaatatgtgtttttaagattagttgaatataagaaaatgcttgacaaatattttcatgtattttacacaaatgtgatttttgtaatatgtctcaaccagatttattttaaacgcttcttatgtagagtttttatgcctttctctcctagtgagtgtgctgactttttaacatggtattatcaactgggccaggaggtagtttctcatgacggcttttgtcagtatggcttttagtactgaagccaaatgaaactcaaaaccatctctcttccagctgcttcagggaggtagtttcaaaggccacatacctctctgagactggcagatcgctcactgttgtgaatcaccaaaggagctatggagagaattaaaactcaacattactgttaactgtgcgttaaataagcaaataaacagtggctcataaaaataaaagtcgcattccatatctttggatgggccttttagaaacctcattggccagctcataaaatggaagcaattgctcatgttggccaaacatggtgcaccgagtgatttccatctctggtaaagttacacttttatttcctgtatgttgtacaatcaaaacacactactacctcttaagtcccagtatacctcatttttcatactgaaaaaaaaagcttgtggccaatggaacagtaagaacatcataaaatttttatatatatagtttatttttgtgggagataaattttataggactgttctttgctgttgttggtcgcagctacataagactggacatttaacttttctaccatttctgcaagttaggtatgtttgcaggagaaaagtatcaagacgtttaactgcagttgactttctccctgttcctttgagtgtcttctaactttattctttgttctttatgtagaattgctgtctatgattgtactttgaatcgcttgcttgttgaaaatatttctctagtgtattatcactgtctgttctgcacaataaacataacagcctctgtgatccccatgtgttttgattcctgctctttgttacagttccattaaatgagtaataaagtttggtcaaaacagatcaa

SEQ ID NO: 140748 - DNA, 1444 bp, Homo sapiens
  Payload ID: 7601
  Gene Symbol: HMGA2
  Gene Name: high mobility group AT-hook 2
  Uniprot ID: P52926
  ENST ID: ENST00000425208
  CDS Start-End: 812-1090
cttgaatcttggggcaggaactcagaaaacttccagcccgggcagcgcgcgcttggtgcaagactcaggagctagcagcccgtccccctccgactctccggtgccgccgctgcctgctcccgccaccctaggaggcgcggtgccacccactactctgtcctctgcctgtgctccgtgcccgaccctatcccggcggagtctccccatcctcctttgctttccgactgcccaaggcactttcaatctcaatctcttctctctctctctctctctctctctctctctctctctctctctctctctctctctcgcagggtggggggaagaggaggaggaattctttccccgcctaacatttcaagggacacaattcactccaagtctcttccctttccaagccgcttccgaagtgctcccggtgcccgcaactcctgatcccaacccgcgagaggagcctctgcgacctcaaagcctctcttccttctccctcgcttccctcctcctcttgctacctccacctccaccgccacctccacctccggcacccacccaccgccgccgccgccaccggcagcgcctcctcctctcctcctcctcctcccctcttctctttttggcagccgctggacgtccggtgttgatggtggcagcggcggcagcctaagcaacagcagccctcgcagcccgccagctcgcgctcgccccgccggcgtccccagccctatcacctcatctcccgaaaggtgctgggcagctccggggcggtcgaggcgaagcggctgcagcggcggtagcggcggcgggaggcaggatgagcgcacgcggtgagggcgcggggcagccgtccacttcagcccagggacaacctgccgccccagcgcctcagaagagaggacgcggccgccccaggaagcagcagcaagaaccaaccggtgagccctctcctaagagacccaggggaagacccaaaggcagcaaaaacaagagtccctctaaagcagctcaaaagaaagcagaagccactggagaaaaacggccaagaggcagacctaggaaatggtggttgctaatgaagagcccgtgctggtgaaggaagcctgctgatcccggaactggccttgcgcgcaagtggtgggatgacagacacattcccttccttgaactgcactcttttcccttgcactcagaggtggcccgagagagccccggtaggtcccggagtatgtttccatgctgcagaaggcatggagagattccaattgcgggggttcctccgtagcctttgcagctgaacgtctccatctcctgtccctgggcggtcagtcgctggcatggctctgtggagttttacctcccagttgtctatcaccaaagctgtccaccttgtccggaggggaatgagcgtggaaacccctggcggctgtactgacaaaagcaaccttag

SEQ ID NO: 140749 - DNA, 1788 bp, Homo sapiens
  Payload ID: 7601
  Gene Symbol: HMGA2
  Gene Name: high mobility group AT-hook 2
  ENST ID: ENST00000536545
  CDS Start-End: 812-1255
cttgaatcttggggcaggaactcagaaaacttccagcccgggcagcgcgcgcttggtgcaagactcaggagctagcagcccgtccccctccgactctccggtgccgccgctgcctgctcccgccaccctaggaggcgcggtgccacccactactctgtcctctgcctgtgctccgtgcccgaccctatcccggcggagtctccccatcctcctttgctttccgactgcccaaggcactttcaatctcaatctcttctctctctctctctctctctctctctctctctctctctctctctctctctctctcgcagggtggggggaagaggaggaggaattctttccccgcctaacatttcaagggacacaattcactccaagtctcttccctttccaagccgcttccgaagtgctcccggtgcccgcaactcctgatcccaacccgcgagaggagcctctgcgacctcaaagcctctcttccttctccctcgcttccctcctcctcttgctacctccacctccaccgccacctccacctccggcacccacccaccgccgccgccgccaccggcagcgcctcctcctctcctcctcctcctcccctcttctctttttggcagccgctggacgtccggtgttgatggtggcagcggcggcagcctaagcaacagcagccctcgcagcccgccagctcgcgctcgccccgccggcgtccccagccctatcacctcatctcccgaaaggtgctgggcagctccggggcggtcgaggcgaagcggctgcagcggcggtagcggcggcgggaggcaggatgagcgcacgcggtgagggcgcggggcagccgtccacttcagcccagggacaacctgccgccccagcgcctcagaagagaggacgcggccgccccaggaagcagcagcaagaaccaaccggtgagccctctcctaagagacccaggggaagacccaaaggcagcaaaaacaagagtccctctaaagcagctcaaaagaaagcagaagccactggagaaaaacggccaagaggcagacctaggaaatgggctggagtgcagtggtacaatctcggctcattgcaacctccacctcccaggttcaagcaattctcctgcctcaggctcctgagtagttgggattacaggcacccaccaccacacccagctaatttttgtatttttagtagagacagggtttcaccatgttggccaggctggtctcgaactcctgacctcaggtgagccacccaccttggcctctcaaagtgctgggaatacaggcgtgagccatcgtgcctggtctaaaaaatgtctattagtgttccatcactagatctcttctgaggtattcatgccatatgccccatcctgatgtcatatccacaggacaatctactaccaagaaccagctccaagaagaaaacatctctgggaaacagtaccaaaaggagtcactgaattgtcattggaggagtccaggatagctcttcatgttattttcaccttgaggaattgtccattacatctatgagccttatgtgtggctttctccgatatagaaacctatcaggtgtcttttagatcatttcaaaacactggcttattctttcttatgtttccaactgaagtctgcatcccaagatgtagtttcactgctaccccatatggcacccttgtacgaatttgaaaaaagtactcactctaggcacatgcagagccatgcctgcggggacagcttagagagtagagggtgggctgaactccagttactctcg

SEQ ID NO: 140750 - DNA, 1508 bp, Homo sapiens
  Payload ID: 7601
  Gene Symbol: HMGA2
  Gene Name: high mobility group AT-hook 2
  Uniprot ID: P52926
  ENST ID: ENST00000537275
  CDS Start-End: 812-1123
cttgaatcttggggcaggaactcagaaaacttccagcccgggcagcgcgcgcttggtgcaagactcaggagctagcagcccgtccccctccgactctccggtgccgccgctgcctgctcccgccaccctaggaggcgcggtgccacccactactctgtcctctgcctgtgctccgtgcccgaccctatcccggcggagtctccccatcctcctttgctttccgactgcccaaggcactttcaatctcaatctcttctctctctctctctctctctctctctctctctctctctctctctctctctctctcgcagggtggggggaagaggaggaggaattctttccccgcctaacatttcaagggacacaattcactccaagtctcttccctttccaagccgcttccgaagtgctcccggtgcccgcaactcctgatcccaacccgcgagaggagcctctgcgacctcaaagcctctcttccttctccctcgcttccctcctcctcttgctacctccacctccaccgccacctccacctccggcacccacccaccgccgccgccgccaccggcagcgcctcctcctctcctcctcctcctcccctcttctctttttggcagccgctggacgtccggtgttgatggtggcagcggcggcagcctaagcaacagcagccctcgcagcccgccagctcgcgctcgccccgccggcgtccccagccctatcacctcatctcccgaaaggtgctgggcagctccggggcggtcgaggcgaagcggctgcagcggcggtagcggcggcgggaggcaggatgagcgcacgcggtgagggcgcggggcagccgtccacttcagcccagggacaacctgccgccccagcgcctcagaagagaggacgcggccgccccaggaagcagcagcaagaaccaaccggtgagccctctcctaagagacccaggggaagacccaaaggcagcaaaaacaagagtccctctaaagcagctcaaaagaaagcagaagccactggagaaaaacggccaagaggcagacctaggaaatggttaagagctcaggctctggattcagatggcttgggttcaaattctggtccgtcacttagctaactggagtcttaagaaaatcacatgacctttaaaggtccagtttcctcatctgcaaaaggaggagttttacattgcagcttagaagcctttcttccaatagcagagatttggtgtcatgtggtgttcatcagtttgaaaagaagtatttctgctgtttgcctcaagatgtacatacagagatgtgctgattctcagaacttctatagaattccattagccagtcctgccaattgaaatttggcatttaattatttgcatttttctattcttgcctaggaaaggagctcgtcacatacctagtttagtgatggaaagtatttggagaaagttttagagagtggggctcaggctcaagaatacaatgaagtaataaagttgttaacct

SEQ ID NO: 140751 - DNA, 8094 bp, Homo sapiens
  Payload ID: 7601
  Gene Symbol: HMGA2
  Gene Name: high mobility group AT-hook 2
  ENST ID: ENST00000541363
  CDS Start-End: 374-673
caacccgcgagaggagcctctgcgacctcaaagcctctcttccttctccctcgcttccctcctcctcttgctacctccacctccaccgccacctccacctccggcacccacccaccgccgccgccgccaccggcagcgcctcctcctctcctcctcctcctcccctcttctctttttggcagccgctggacgtccggtgttgatggtggcagcggcggcagcctaagcaacagcagccctcgcagcccgccagctcgcgctcgccccgccggcgtccccagccctatcacctcatctcccgaaaggtgctgggcagctccggggcggtcgaggcgaagcggctgcagcggcggtagcggcggcgggaggcaggatgagcgcacgcggtgagggcgcggggcagccgtccacttcagcccagggacaacctgccgccccagcgcctcagaagagaggacgcggccgccccaggaagcagcagcaagaaccaaccggtgagccctctcctaagagacccaggggaagacccaaaggcagcaaaaacaagagtccctctaaagcagctcaaaagaaagcagaagccactggagaaaaacggccaagaggcagacctaggaaatggccacaacaagttgttcagaagaagcctgctcaggtaagacatagtcattaatttttttctcccaattaatataaaaagtgaaatatgtactgaaaaatgtccccaaactaaaccttatttcgcattttcttacttttggttatcgtcctgcagtattcctgaaaatgtgttgtagccttcaaagttaggaatatatagtctgcaatcgtaccatgaaaacctcccaaaatgtaaggtcttaagtgtacaaagcaaatataaattcttttaaaaataaaactattttattacattgcctcatatgtaaaacaaatatttaatcttatcctatattttaccaattcttaaacatcaaattttgtccttccaactgactgtctatattctgttgacaccagacttatatttaatgattcatgactggaaacatatttcttcattgaacaatttcataatatttgatgatcccaaaacactccaaagaatgctagaatacttggaaattaagttatactaacgtgcagactgatgcattcttagatcttatttaaataactgaatcacagtctctgaagtttttggcaacatcaaattggaaaatagctctacgtctcttgccccatattcctggagcaccttgtcctcactataatctgtacatagaaacattaaaaaaacatatttattgaggaagcatatcttgaagaaaacaaaactgaagtataaattaaccaggattgctaataatgtgagccagtattaaagtataagaacgtcctgctgttctcttcccttctgtatgtaaatagtcattggagatccaggtggtatcatgctgaacctgctaaaataagtagtaagcagtgtcatgagctatcaaattaagtagaactctttcatgtaattttaagtatccatgaaatttttttccctagaagtctttacaaatctaccttgcatcctgttttcttaggtcaatgttgccttgcctgggaaggaccacccgggcaatcttatatatctactgttctctaaaaatgccacttagaagagaattgaaacttccaaacacatgaaaggatccaaggaaagtgtcttcaaacaattacatatgagctttaagtggaataaaaacagagttaccatgaaaaaaatcattttcattgctgctcccatacctaaaagctaagagtgggagaggggtgctaaaaaaaacccagtgtttgtgcgtctttaagcaatatttaaaaatatatacatataaacaaaaacttgacattttcattaggagaacccaaatatatttagcctctcatcctttaactgtacaaaaatcaagagaaagtaaattgataattctgtgcatttgagtcaaaggatgaggcagagttcacatttgcatcacaggctgtgaactatagattaatcactttatgtggtttgttaatattgattcagcccttgtgcttagtgtcatagggaagatgagtcaaacaaagaaaaacagtcactgcatctgagaaatgtatttatatgtatatgcctgtgtcctatccagtggtatgctggaaccagcccttgtgagcaaatagtgaacatctcttctgaattctgtgttcagtgatgtcaagtaggtagcttgaaatccactatggtgggagtatttacaccatggaaagtgacaaatactacaaatcaggacttttttttttcctgaggagcaagtagttaaacatttacctccccagcatggccccacccttcagcgattctgtttatttggtctggagatccatcatattttttatgaactccctaagtgagtttaatatgcaactagagatgaagacactccatgaaaacacatgagaagatgtctgaacatttgttgagcaaatgaccacagaatgtcaatgtgtatgggacacacgggggatacagatgaatgagtggaatgcctcaggttatcaaggggatgataagactggaattttcttgttttgtttgattttgttgttgttgagttgcagaagggaaaactgaaacataaattaagggaaagaaattacagatgagatgaatggcatatagaaaggtagagaggcaagaacaaatacatcataggtggagattattaatatggctagaactgattgcaagttggacattaatacatcaagaaataatataagtgaaatcacagttgtttttcccaagagaattcagaatctcaaagaagccacaagtggattgagttgatcttcaaggatcaatctggctatcttacagaccctgttccagatttgccctttataggagagttcagactcagaattataaaaaagaacatgagctcattgggctacctaatttatattgtgtaatgacacagtgatgaattatataaacatgaaaactacgtgaaagttcgtggaggataatgtaaattttacactacattcaaaagaatctcttccttttccatctgtttctttcaaaataccctcccagatggctttcccatgaggcaatctggattaactcagcctcatatccttccttcaacagcactttgaggggttacattcagaatcgcttttgaggtggtaaaaattttagcacaactaaatattttacatctaaagaaaagggctcagcagtgtgtaaacagacctacgtttttctttctggccccatcactgggctaattaatttctctttgctctatttatccatctaggaaatgggataataataatgccttttcccttactcccaagaacattacaagagatgcataattatataaattccaggtagcattattacattctgacttatttttgactgttaagtttttcatttccagagatttatagtctcaaaaattctagaatcctgatttattccaaagtacttcctctttgacgtcaagtgttttcattgaatgttttttaaggcaggaattttttagctggaggaaattttctagtaattgctccatcctactgttagggctaaagcattcagaatcatcttcctagcatttatgtcacacgtatacagaattacaaaggctctgtggtgaagtatcctcatactgcccaatgctgaagtctcctcagaacttcaagaatggcccttgttgaacctggggtacaaagcagcagagtttattctgaggagacaaattcagaattatgataaatctcagcacctgcatacgcacttgtgtttgtgtatacaagtacatgcatctagagagaaatgaaaagtgaaggaccaccctgttgcaggggtttgtgtttgcgaaatccaccaggtgtcatcagctgcaaacatcaagtgtgtcccataatcctaatgggagagttaatagtctcttaaaaatctaaaggggaaaatctgtaatatgtacgttaacttttttctaaaattccaaaaccaatgaaaacagcttacaaaataactctactatatttccacttcaagtgataaacaataaattgaaatcagctaattacaaataaatagaaatgaggctgggtgcagtggctcacacctgtaatcccaacactttgggaggtcaggagttcgagaccagcctggccaacatggtgaagccccatctctactaaatacacaaaaattagccgggcgtggcggcggccatctataatcccagctactcgggaggctgaggcaggagaatcacttgaacctggttggcgggggagggttgccgtgagcagagattgtgccactgcaccccagcctgggtgacagcgagactccatctcaaaagaaagaaagaaagaaatagaaagcagctcgttttttagcaatttgagcagttgaattctcagtcatatgaattacattcttcagtaggaaatggtggtaggtttttctttttctttttttaaaaaaagaaacaccataaaagtaccagattattattattattagagggtgctttgttactcaagtttttactttgataaaaataagtgtctctccaactgagatgtctaaaaaagtttcgctagtttatcaggtatttgatcgtttattgctatttcccttttaaggctttaatctgagacttgaagggactccctaaatgtaattcagacatttttctctcacctttcttctacccaaagggaaaacaggtttttaaaatcctaacagctctccaccctttcaatccactttccccattgttgtacagccctggcaaacgatgcctctggcaattaggacaggtataaacctgctccttttcaatttcccaatgagagaattgcaaagttttcagtttctaaaagactggaaacaaagctttctgtttcaaaaaaagagtttttacttgcaagtaacatcttctgtgggtggtgtgcacccgggcaaagaaatctcagtaagccttgattatcacgggatttcttccccctcaaaataaaatgttgaatgtttttacagagacttcaagggcagttttaaggatgtttatatttcagacaacctaaacattgtttggagcaaaatgagagatttcattttgggacaagcaagttgatgaattgcagtcagcatctcgttctcaaagaaggcatttttactgggggcttttagtctagacatacaaagagggaaggaggaaaggggaaagcattctcactctaacactcgtcttttacatggtaccttggccagtgcagtaaatagttcataataaatcagacttacaaatactcactcgtctactcactcaaggagcataatgatttatactgcctaagtcacaaagattaccgatgtatttattttcttgcttatgcactttcaagctagtaaaacatcttgtgggccagtaaatgtttagtaccaactggcaaaacatgaagaatcatatcaaaggttgccctaagttgcacggttttgttgtataggaaatactttttgacttaacctctgacctctgacatcaccaaggtcaagggaaaaggagagagcaaagtagaaaccaaggtttaacccttaataaagtagctcaaggacatagaagcacagggaaattggagggcagaggaagcgtatcaaaatgattattaactgtaaacagatgaagtaattagcttagctaacagttgtaatacaggaatattggcaggatgaagtcagcggttcttggcaggaaatgttttatagagatgacaacttctaacagaagtgaaagaacatcaatcaatttagggcaacttataaaactccaaaaagcaaaatttagtgtttctggacttgacaaatttgctgtgagagttttttttttaagtatgactgtttctgtgtggggaagtctgtggattaggctcaaaacaaaatggcagtggctgcctgcatttcctcttcatattgcagaattttcctctacattttgatgtgtactggataaaaaccaattgtttactcaatatataatctttcttcttactctccaaacttgctgacccaaattaatgtggaacaaatagcaactggctttaaaacctggtctttctaagaaaatccttaatggttgcatagaaatatgttgcattgcctcagacacttacattcaggaaatgtttgctggacactcagatgtctacagagaaattgttaacttactgttattgatatttttataatcttactcaaaagtcataactcaggataatgaaaaatgtttggtgcaataatgattaaaatccacaaatattctgttccctggccgcaaatacaacacctatgcaaaattttacacatctacaaaacaaagggaaaaggtttttcctagtctatgccattaataagcacatctggaatataacccttaagcagtctttaatcataatttaaagctactttgcataaaaataagaacattccacaacagctgtggaaacattgaaataaattttcttcttctgggccgggcacggtggctcatgcctgttatcccagcactttgggaggcccaggcagaagtattccttgagcccaggagtttgagaccagcctgagcaacatagtgagaccccatctctatttaaaaaaaaaaaaaattaccttcttttgaatactttgtttatgcaaaaatccttttgctttctttagctatttttttaaatgcagtgttcctgcagtaagaattgaacctggcatggaaaactgatcaaaccggtagtcctcagaaatcatcactcctgaaacttgcaattagtttatacctaaaatgatttccctatttgaaaaatgtgcctaccatttccagattttaaaaaaatggccctttatcccagaaaggagaaattcattgtatcccagagaccagcattacttctgttgcagtattttcagtgatggaactctgttgaggctacagacaagaaaagcaggagagcattttaggaatctaagattttttattttactttcctctggggaccttctttaatagtttttttctttcttaagaacctatccttgaatcataggtaaagaaataatcacagaatgagtaactgacattaataatcacagcttcacactatagtcttactggatttttacgtttttcagggtttccccaagtggtggtcacatttcttacacaactctgcagtgtagatagacatgtatagtcattactgggctgacacggtgggactgagacctgctagtgccgtggttggcatctatgattagtgaggtccaagatcaaccttctttacattaaacatgccctagcaagaccttcaacccaactttattaagctgatgctaacgcacacaaagaagtcctaacaattctatgtttttatatacataatgcaaaaataaagacaagatcaggtacaattgctgtcaatatctcaacttattgtctccttttgaaaaacataattcccgcctagcatttccaccagaatcccttgctcttgccaggttatattgtttatatatgttccatttaacatgttttttaaaaatctgctgtagagttttcctagttggaggaaataatcactttccattaagttaaacagtcccgataaattttaaatgaaaatatctgacagagaaatagaaaaactcagccttgtggtcttgccggtcacttagctacagatggaacttgaaaaactggttcctggtcattgctgctgaagagagccctttatttctgttgtgacaggactgactcaagatactcatgaacgtggaaaactcctaaatgtgtcattctgagttcctgagaagttgaacatacacagatgacaaaaaagaatgccatttagccataactaccctttctagattaccaagtatttgtaggtttattggcaagatagcttaaattacgtatgtatttctggcctgcaacatcatgtaatagaagagttgcagaattctttgcagttaag

SEQ ID NO: 140752 - DNA, 485 bp, Homo sapiens
  Payload ID: 7601
  Gene Symbol: HMGA2
  Gene Name: high mobility group AT-hook 2
  ENST ID: ENST00000539662
  CDS Start-End: 1-168
gaaccaaccggtgagccctctcctaagagacccaggggaagacccaaaggcagcaaaaacaagagtccctctaaagcagctcaaaagaaagcagaagccactggagaaaaacggccaagaggcagacctaggaaatggtggttgctaatgaagagcccgtgctggtgaaggaagcctgctgatcccggaactggccttgcgcgcaagtggtgggatgacagacacattcccttccttgaactgcactcttttcccttgcactcagaggtggcccgagagagccccgccacaacaagttgttcagaagaagcctgctcaggaggaaactgaagagacatcctcacaagagtctgccgaagaggactagggggcgccaacgttcgatttctacctcagcagcagttggatcttttgaagggagaagacactgcagtgaccacttattctgtattgccatggtctttccactttcatctggggtgggg

SEQ ID NO: 140753 - DNA, 1527 bp, Homo sapiens
  Payload ID: 7601
  Gene Symbol: HMGA2
  Gene Name: high mobility group AT-hook 2
  Uniprot ID: P52926
  ENST ID: ENST00000537429
  CDS Start-End: 812-1072
cttgaatcttggggcaggaactcagaaaacttccagcccgggcagcgcgcgcttggtgcaagactcaggagctagcagcccgtccccctccgactctccggtgccgccgctgcctgctcccgccaccctaggaggcgcggtgccacccactactctgtcctctgcctgtgctccgtgcccgaccctatcccggcggagtctccccatcctcctttgctttccgactgcccaaggcactttcaatctcaatctcttctctctctctctctctctctctctctctctctctctctctctctctctctctctcgcagggtggggggaagaggaggaggaattctttccccgcctaacatttcaagggacacaattcactccaagtctcttccctttccaagccgcttccgaagtgctcccggtgcccgcaactcctgatcccaacccgcgagaggagcctctgcgacctcaaagcctctcttccttctccctcgcttccctcctcctcttgctacctccacctccaccgccacctccacctccggcacccacccaccgccgccgccgccaccggcagcgcctcctcctctcctcctcctcctcccctcttctctttttggcagccgctggacgtccggtgttgatggtggcagcggcggcagcctaagcaacagcagccctcgcagcccgccagctcgcgctcgccccgccggcgtccccagccctatcacctcatctcccgaaaggtgctgggcagctccggggcggtcgaggcgaagcggctgcagcggcggtagcggcggcgggaggcaggatgagcgcacgcggtgagggcgcggggcagccgtccacttcagcccagggacaacctgccgccccagcgcctcagaagagaggacgcggccgccccaggaagcagcagcaagaaccaaccggtgagccctctcctaagagacccaggggaagacccaaaggcagcaaaaacaagagtccctctaaagcagctcaaaagaaagcagaagccactggagaaaaacggccaagaggcagacctaggaaatggctacagaactaattactgtgaaaagacataaaggaatgagaagaccaaaaccgtatcctcatgatactgacaaatcagttggactgagcacacatgaatcaactgaagaacacttctgccaagttcaagttgtgtaaaagtggaggatatgagtcttgtggggacacagagttgaggcatgagctattagtcagagccgtaaggctgcctgcaggagaagaactttggatggagttttgaaggaagtgaggaaaagatctgaattaacgtattaacacataaagcttgtcatctgaacaggactataagcatctcgaggtggttgctaatgaagagcccgtgctggtgaaggaagcctgctgatcccggaactggccttgcgcgcaagtggtgggatgacagacacattcccttccttgaactgcactcttttcccttgcactcagaggtggcccgagagagccccg

SEQ ID NO: 140754 - DNA, 2319 bp, Homo sapiens
  Payload ID: 7602
  Gene Symbol: HMGB1
  Gene Name: high mobility group box 1
  Uniprot ID: P09429
  ENST ID: ENST00000339872
  CDS Start-End: 165-812
atctcagggccaaaccgataggaaacgaggctgcctcgcggtggcaccgccaccccccaaccgggttccgagcaccggagctggctgctgctccctctttggagcaaagttttatgcaaagagggtgttttttgaaactttcggtgcacgaaaaataactaaacatgggcaaaggagatcctaagaagccgagaggcaaaatgtcatcatatgcattttttgtgcaaacttgtcgggaggagcataagaagaagcacccagatgcttcagtcaacttctcagagttttctaagaagtgctcagagaggtggaagaccatgtctgctaaagagaaaggaaaatttgaagatatggcaaaagcggacaaggcccgttatgaaagagaaatgaaaacctatatccctcccaaaggggagacaaaaaagaagttcaaggatcccaatgcacccaagaggcctccttcggccttcttcctcttctgctctgagtatcgcccaaaaatcaaaggagaacatcctggcctgtccattggtgatgttgcgaagaaactgggagagatgtggaataacactgctgcagatgacaagcagccttatgaaaagaaggctgcgaagctgaaggaaaaatatgaaaaggatattgctgcatatcgagctaaaggaaagcctgatgcagcaaaaaagggagttgtcaaggctgaaaaaagcaagaaaaagaaggaagaggaggaagatgaggaagatgaagaggatgaggaggaggaggaagatgaagaagatgaagatgaagaagaagatgatgatgatgaataagttggttctagcgcagttttttttttcttgtctataaagcatttaacccccctgtacacaactcactccttttaaagaaaaaaattgaaatgtaaggctgtgtaagatttgtttttaaactgtacagtgtctttttttgtatagttaacacactaccgaatgtgtctttagatagccctgtcctggtggtattttcaatagccactaaccttgcctggtacagtatgggggttgtaaattggcatggaaatttaaagcaggttcttgttggtgcacagcacaaattagttatatatggggatggtagttttttcatcttcagttgtctctgatgcagcttatacgaaataattgttgttctgttaactgaataccactctgtaattgcaaaaaaaaaaaaaaagttgcagctgttttgttgacattctgaatgcttctaagtaaatacaattttttttattagtattgttgtccttttcataggtctgaaatttttcttcttgaggggaagctagtcttttgcttttgcccattttgaatcacatgaattattacagtgtttatcctttcatatagttagctaataaaaagcttttgtctacacaccctgcatatcataatgggggtaaagttaagttgagatagttttcatccataactgaacatccaaaatcttgatcagttaagaaatttcacatagcccacttacatttacaaactgaagagtaatcaatctactcaaagcatgggattattagaatcaaacattttgaaagtctgtccttgaaggactaatagaaaagtatgttctaacctttacatgaggactctattctttaactcccattaccatgtaatggcagttatattttgcagttcccacattaaagaagacctgagaatgtatccccaaaagcgtgagcttaaaatacaagactgccatattaaattttttgttgacattagtctcagtgaagactatgaaaatgctggctatagatgtcttttcccatttatctaaatatggactgctcaggaaacgagactttccattacaagtatttttaattaattgggccagcttttcaaacaaagatgccacattcaaaatagggtatattttcctatattacggtttgcccctttataaatccaagtagataggaagaaagaagacaaactttgcatctcagtatgaattattcaatttatttgaatgatttttctttacaaaacaaactcattcattagtcatgtttatctgcttaggagtttagggaacaatttggcaattttgtggttttcgagattatcgttttcttaaagtgccagtattttaaaatagcgttcttgtaattttacacgcttttgtgatggagtgctgttttgttatataatttagacttggattctttccatttgcatttgtttatgtaatttcaggaggaatactgaacatctgagtcctggatgatactaataaactaataattgcagaggttttaaa

SEQ ID NO: 140755 - DNA, 5485 bp, Homo sapiens
  Payload ID: 7602
  Gene Symbol: HMGB1
  Gene Name: high mobility group box 1
  Uniprot ID: P09429
  ENST ID: ENST00000341423
  CDS Start-End: 185-832
gccaataggagccgcgctggctggagagtaatgttacagagcggagagagtgaggaggctgcgtctggctcccgctctcacagccattgcagtacattgagctccatagagacagcaccggggcaagtgagagccggacgggcactgggcgactctgtgcctcgctgaggaaaaataactaaacatgggcaaaggagatcctaagaagccgagaggcaaaatgtcatcatatgcattttttgtgcaaacttgtcgggaggagcataagaagaagcacccagatgcttcagtcaacttctcagagttttctaagaagtgctcagagaggtggaagaccatgtctgctaaagagaaaggaaaatttgaagatatggcaaaagcggacaaggcccgttatgaaagagaaatgaaaacctatatccctcccaaaggggagacaaaaaagaagttcaaggatcccaatgcacccaagaggcctccttcggccttcttcctcttctgctctgagtatcgcccaaaaatcaaaggagaacatcctggcctgtccattggtgatgttgcgaagaaactgggagagatgtggaataacactgctgcagatgacaagcagccttatgaaaagaaggctgcgaagctgaaggaaaaatatgaaaaggatattgctgcatatcgagctaaaggaaagcctgatgcagcaaaaaagggagttgtcaaggctgaaaaaagcaagaaaaagaaggaagaggaggaagatgaggaagatgaagaggatgaggaggaggaggaagatgaagaagatgaagatgaagaagaagatgatgatgatgaataagttggttctagcgcagttttttttttcttgtctataaagcatttaacccccctgtacacaactcactccttttaaagaaaaaaattgaaatgtaaggctgtgtaagatttgtttttaaactgtacagtgtctttttttgtatagttaacacactaccgaatgtgtctttagatagccctgtcctggtggtattttcaatagccactaaccttgcctggtacagtatgggggttgtaaattggcatggaaatttaaagcaggttcttgttggtgcacagcacaaattagttatatatggggatggtagttttttcatcttcagttgtctctgatgcagcttatacgaaataattgttgttctgttaactgaataccactctgtaattgcaaaaaaaaaaaaaaagttgcagctgttttgttgacattctgaatgcttctaagtaaatacaattttttttattagtattgttgtccttttcataggtctgaaatttttcttcttgaggggaagctagtcttttgcttttgcccattttgaatcacatgaattattacagtgtttatcctttcatatagttagctaataaaaagcttttgtctacacaccctgcatatcataatgggggtaaagttaagttgagatagttttcatccataactgaacatccaaaatcttgatcagttaagaaatttcacatagcccacttacatttacaaactgaagagtaatcaatctactcaaagcatgggattattagaatcaaacattttgaaagtctgtccttgaaggactaatagaaaagtatgttctaacctttacatgaggactctattctttaactcccattaccatgtaatggcagttatattttgcagttcccacattaaagaagacctgagaatgtatccccaaaagcgtgagcttaaaatacaagactgccatattaaattttttgttgacattagtctcagtgaagactatgaaaatgctggctatagatgtcttttcccatttatctaaatatggactgctcaggaaacgagactttccattacaagtatttttaattaattgggccagcttttcaaacaaagatgccacattcaaaatagggtatattttcctatattacggtttgcccctttataaatccaagtagataggaagaaagaagacaaactttgcatctcagtatgaattattcaatttatttgaatgatttttctttacaaaacaaactcattcattagtcatgtttatctgcttaggagtttagggaacaatttggcaattttgtggttttcgagattatcgttttcttaaagtgccagtattttaaaatagcgttcttgtaattttacacgcttttgtgatggagtgctgttttgttatataatttagacttggattctttccatttgcatttgtttatgtaatttcaggaggaatactgaacatctgagtcctggatgatactaataaactaataattgcagaggttttaaatactagttaaatggctttcacttaagaacttaagattttgttacatatttttaaatcttgtttctaataatacctcttagcagtaccttttaaataagtataagggatggcaaagtttttccctttaaaaatactcactttatgcttataaataggttaatgggctgataaaaggttttgtcaaacattgcaagtattcggtgctatatataaaggaggaaaaactagttttactttcagaatgatttaaacaagatttttaaaaacaagatacatgcaagcgaacagcagggttagtgataggctgcaattgtgtcgaacatcagattttttgttaagaggagcaaatgactcaatctgatttagatggaagtttctactgtatagaaatcaccattaatcaccaacattaataattctgatccatttaaaatgaattctggctcaaggagaatttgtaactttagtaggtacgtcatgacaactaccatttttttaagatgttgagaatgggaacagtttttttagggtttattcttgaccacagatcttaagaaaatggacaaaacccctcttcaatctgaagattagtatggtttggtgttctaacagtatcccctagaagttggatgtctaaaactcaagtaaatggaagtgggaggcaatttagataagtgtaaagccttgtaactgaagatgattttttttagaaagtgtatagaaactattttaatgccaagatagttacagtgctgtggggtttaaagactttgttgacatcaagaaaagactaaatctataattaattgggccaacttttaaaatgaagatgctttttaaaactaatgaactaagatgtataaatcttagtttttttgtattttaaagataggcatatggcatattgattaacgagtcaaatttcctaactttgctgtgcaaaggttgagagctattgctgattagttaccacagttctgatgatcgtcccatcacagtgttgttaatgtttgctgtatttattaattttcttaaagtgaaatctgaaaaatgaaatttgtgtgtcctgtgtacccgaggggtaatgattaaatgataaagataagaaaagcgcccatgtaacacaaactgccattcaacaggtatttcccttactacctaaggaattgtaaccattgctcagacattgtaggatttaactatgttgaaaactacaggagaggccgggcgcagtggctcacgcctgtaatcccagcactttgggaggccaaggcgggcagatcacgaggtcaggagattgagaccatcctggctaacgtggtgaaaccccgcctctactaaaaatacaaaaaattagccaagcgtggtgctgggcgcctgtagtcccagtaactcaggaggctgaggcaggagaatggcgtgaacccgggaggcggaggttgcagtgagccgagattgtgccactgcactccagcctgggtgacagagcaagactccatctcaaaaaaaaaaaaaaaacacaggagagacaactggtttttgaatgaaatacatgggtactgccttgcttgacatcacatagtccttgatgaaagttcacatttaggtctgcttggtacaatacgcctcctaaaaaggtccttgatgaaagttcacatttaggtctgcttggtacaacacgcctcctgaaagggtctgatagctttcagtagcagtaagacacttgcatgtgatggtaaggtatctgcaaatttgcacacaccgtacacagcttaagtcttagaattaacttgctaaaatgtgagcctttggtaattaggctgttttattagggagtgtgataatatttgaatttcttttcatatttgtgctttgtgtcattttcaaatgacccttgaaatgtattttaaaagtagataaaagccagaaagtgatttgattgtctatccagcaaaagatggtggttcattttcttgtcctcttaataccaaggcagtgctaataacacttgccacaacttgggaaattccatgggtctatgccacattgctcccagagtaatgaggcaaaatagtgctctgttatagaattgcttgtttcacgatacatcatgacagataaccatacaacatggaatgacacaaacataatatgccacactccagaatatgtaatgctcgtcttccaggggggttcagtctaaggtaatctctaccaggaagaaatgctagatgactttagacatgtgcattggtttggaccttctaattagtggaatttttacttattttgacatgagagattacatagaatctctatgttgcccaggttggtctccaaatctgctcaaacaatcctcccgcctcagtttctcaagtagctgggattacagggacacaccactgtgcttagcttaaatagttgaatttattgggcatccactgaaaagaaggaagtaggaataaaatctgcaatagtatgactaaacctgtaagtgagcatgagcagtggtgggcaagggtatgcagactctggaatccagaaatagaaagtcagtggaaagccaggcacagtggctcacacttataatcccagcactttgggaggccgaggtgggaggatcacttgaggccaggagtttgacactagcctgggcaacatagtgaggccttgtctactagaaataaataattttgcagatatactaaataccattttaaaaataagtggaaaagggattagagagatccttgtaaattatgtactcatattcattgttctctttagtcacataattcagtcatgtacgtgacattccacagtatggtgctccataatacatattttttcttttttcgatctcacttgtatatgatccataatatttttcatcattcccttactgatggacatttagattgtttcctattttttgctgtttaacagtactgcgctgaacatctgtacatttctctcaggcatgtgtgggtcttcagatacctcaaaagtagaactgctgagtcaaaagacatttgcatttaacattttggaagatgttgataaattgcaccccaccaccccccccccccgcccacaaaagctgttatttatgctgtgaaacattttaacaatgattttgcaattaa

SEQ ID NO: 140756 - DNA, 821 bp, Homo sapiens
  Payload ID: 7602
  Gene Symbol: HMGB1
  Gene Name: high mobility group box 1
  ENST ID: ENST00000326004
  CDS Start-End: 158-634
gtaatgttacagagcggagagagtgaggaggctgcgtctggctcccgctctcacagccattgcagtacattgagctccatagagacagcaccggggcaagtgagagccggacgggcactgggcgactctgtgcctcgctgaggaaaaataactaaacatgggcaaaggagatcctaagaagccgagaggcaaaatgtcatcatatgcattttttgtgcaaacttgtcgggaggagcataagaagaagcacccagatgcttcagtcaacttctcagagttttctaagaagtgctcagagaggtggaagaccatgtctgctaaagagaaaggaaaatttgaagatatggcaaaagcggacaaggcccgttatgaaagagaaatgaaaacctatatccctcccaaaggggagacaaaaaagaagttcaaggatcccaatgcacccaagaggcctccttcggccttcttcctcttctgctctgagtatcgcccaaaaatcaaaggagaacatcctggcctgtccattggtgatgttgcgaagaaactgggagagatgtggaataacactgctgcagatgacaagcagccttatgaaaagaaggctgcgaagctgaaggaaaaatatgaaaagttctagttatttctggagttgctgtggatctacagatacgtgatattttggtataactagaatcttgatttctttcataaagttctgccatgttctatttctttccttaatgtttttttcttccctactgttttatcctccctttgctttggaaggatattgctgcatatcgagctaaaggaaagcctgatgc

SEQ ID NO: 140757 - DNA, 1727 bp, Homo sapiens
  Payload ID: 7602
  Gene Symbol: HMGB1
  Gene Name: high mobility group box 1
  ENST ID: ENST00000399489
  CDS Start-End: 568-1044
ggttccgagcaccggagctggctgctgctccctctttggagcaaagttttatgcaaagagggtgttttttgaaactttcggtgcacggtgattttttttttttaaggtcccataattaggaagagtcgactcgcttaggcccttgtttattccctatctagtgcaaagccacgaattggcagcatgttttctgacctttggtttggttggtttaaaatggtgttctagattttaaaatcgtttaagtgaccagttagatactcattcagagcagactcgggcggatagatagggaatactgtatgggtatatctttgtgtctagactttttgagatcgccctgaaggactgtttttgttttgttttgtttgcttggcatagccccttcaaggaatttaatctctcggccatattcttgtctgattttacggaggttgatgtcgctactgtgttaaataaccagtactttggttttcattcccttactaagtactttaaggtcttatatgtcataattttattgctaacatcaaatatttattttattttttagaaaaataactaaacatgggcaaaggagatcctaagaagccgagaggcaaaatgtcatcatatgcattttttgtgcaaacttgtcgggaggagcataagaagaagcacccagatgcttcagtcaacttctcagagttttctaagaagtgctcagagaggtggaagaccatgtctgctaaagagaaaggaaaatttgaagatatggcaaaagcggacaaggcccgttatgaaagagaaatgaaaacctatatccctcccaaaggggagacaaaaaagaagttcaaggatcccaatgcacccaagaggcctccttcggccttcttcctcttctgctctgagtatcgcccaaaaatcaaaggagaacatcctggcctgtccattggtgatgttgcgaagaaactgggagagatgtggaataacactgctgcagatgacaagcagccttatgaaaagaaggctgcgaagctgaaggaaaaatatgaaaagttctagttatttctggagttgctgtggatctacagatacgtgatattttggatattgctgcatatcgagctaaaggaaagcctgatgcagcaaaaaagggagttgtcaaggctgaaaaaagcaagaaaaagaaggaagaggaggaagatgaggaagatgaagaggatgaggaggaggaggaagatgaagaagatgaagatgaagaagaagatgatgatgatgaataagttggttctagcgcagttttttttttcttgtctataaagcatttaacccccctgtacacaactcactccttttaaagaaaaaaattgaaatgtaaggctgtgtaagatttgtttttaaactgtacagtgtctttttttgtatagttaacacactaccgaatgtgtctttagatagccctgtcctggtggtattttcaatagccactaaccttgcctggtacagtatgggggttgtaaattggcatggaaatttaaagcaggttcttgttggtgcacagcacaaattagttatatatggggatggtagttttttcatcttcagttgtctctgatgcagcttatacgaaataattgttgttctgttaactgaataccactctgtaattgcaaaaaaaaaaaaaaagttgcagctgttttgttgacattctgaatgcttctaagtaaatacaattttttttatta

SEQ ID NO: 140758 - DNA, 1282 bp, Homo sapiens
  Payload ID: 7602
  Gene Symbol: HMGB1
  Gene Name: high mobility group box 1
  Uniprot ID: P09429
  ENST ID: ENST00000399494
  CDS Start-End: 185-832
gcagtgcgggcccggccggcctcggcccggtcgcggcggcggcggcggccgggcggcggggggagcggcgccgctgcgctcgctggaacatggctgactcgggcccggcgctgctggctggagagaaaacaaggcgggcgggcgggggagctgggcgcagcagttccgagaaaaataactaaacatgggcaaaggagatcctaagaagccgagaggcaaaatgtcatcatatgcattttttgtgcaaacttgtcgggaggagcataagaagaagcacccagatgcttcagtcaacttctcagagttttctaagaagtgctcagagaggtggaagaccatgtctgctaaagagaaaggaaaatttgaagatatggcaaaagcggacaaggcccgttatgaaagagaaatgaaaacctatatccctcccaaaggggagacaaaaaagaagttcaaggatcccaatgcacccaagaggcctccttcggccttcttcctcttctgctctgagtatcgcccaaaaatcaaaggagaacatcctggcctgtccattggtgatgttgcgaagaaactgggagagatgtggaataacactgctgcagatgacaagcagccttatgaaaagaaggctgcgaagctgaaggaaaaatatgaaaaggatattgctgcatatcgagctaaaggaaagcctgatgcagcaaaaaagggagttgtcaaggctgaaaaaagcaagaaaaagaaggaagaggaggaagatgaggaagatgaagaggatgaggaggaggaggaagatgaagaagatgaagatgaagaagaagatgatgatgatgaataagttggttctagcgcagttttttttttcttgtctataaagcatttaacccccctgtacacaactcactccttttaaagaaaaaaattgaaatgtaaggctgtgtaagatttgtttttaaactgtacagtgtctttttttgtatagttaacacactaccgaatgtgtctttagatagccctgtcctggtggtattttcaatagccactaaccttgcctggtacagtatgggggttgtaaattggcatggaaatttaaagcaggttcttgttggtgcacagcacaaattagttatatatggggatggtagttttttcatcttcagttgtctctgatgcagcttatacgaaataattgttgttctgttaactgaataccactctgtaattgcaaaaaaaaaaaaaaagttgcagctgttttgttgacattctgaatgcttctaagtaaatacaa

SEQ ID NO: 140759 - DNA, 4199 bp, Homo sapiens
  Payload ID: 7602
  Gene Symbol: HMGB1
  Gene Name: high mobility group box 1
  Uniprot ID: P09429
  ENST ID: ENST00000405805
  CDS Start-End: 942-1589
tttctgcggagggattacgctgacgaaagagacctgcttgcgcgtcgctgttccgtggtccgcgcgagcgtggtcgggagccgctggttcctggggtgacccgcggaggtgggagagggaagggcttccgaagccggcgggggtgccatggaccctctccgccggcgcggccttcacagctgggccgcgccgggcatccgtagtccgctctcccaaagcctcggtggagctgaagctgccacagagtgcatgttcacaaagggtcatcacacacggagctgcccctccctgtctccctagagcccatcttcgaggccaggggcttttctaccaggattctggggtgtttctcctcctttcctccctcccagatcttctcacggtaaggggagcagcgaaagcgcagggactttgcattccacgacccgttctgactagtcaacagccgatctgtccctgctgctctaattccagctgccctgccttgttttaacttcagagaaagggggagttctcatttgataagtttaagcctttgctttcgtaggaaggtcatgtggcttaagggacatcgtgaccgcgtatgctatttctgcctgtgcattctaaatcttgggggcagcatattccagaagtccttttggtcgattggttctgtgtcctaggataacaatttgtagtttctgaccatttctttacagaaaaaccacaattggtattttggactgcggggttttttagtggtctcaaactaaatgattatattctggaataatgctgacaatttggatagggtggtgtggaggaaacaagtctcgtgtagaagaaattatttagtaaaaaggattttagtttttggtacttctgaatgcaaatggccaaggaatccagcagtttgttggggtttctccagacaaaaataggctgaaaaataactaaacatgggcaaaggagatcctaagaagccgagaggcaaaatgtcatcatatgcattttttgtgcaaacttgtcgggaggagcataagaagaagcacccagatgcttcagtcaacttctcagagttttctaagaagtgctcagagaggtggaagaccatgtctgctaaagagaaaggaaaatttgaagatatggcaaaagcggacaaggcccgttatgaaagagaaatgaaaacctatatccctcccaaaggggagacaaaaaagaagttcaaggatcccaatgcacccaagaggcctccttcggccttcttcctcttctgctctgagtatcgcccaaaaatcaaaggagaacatcctggcctgtccattggtgatgttgcgaagaaactgggagagatgtggaataacactgctgcagatgacaagcagccttatgaaaagaaggctgcgaagctgaaggaaaaatatgaaaaggatattgctgcatatcgagctaaaggaaagcctgatgcagcaaaaaagggagttgtcaaggctgaaaaaagcaagaaaaagaaggaagaggaggaagatgaggaagatgaagaggatgaggaggaggaggaagatgaagaagatgaagatgaagaagaagatgatgatgatgaataagttggttctagcgcagttttttttttcttgtctataaagcatttaacccccctgtacacaactcactccttttaaagaaaaaaattgaaatgtaaggctgtgtaagatttgtttttaaactgtacagtgtctttttttgtatagttaacacactaccgaatgtgtctttagatagccctgtcctggtggtattttcaatagccactaaccttgcctggtacagtatgggggttgtaaattggcatggaaatttaaagcaggttcttgttggtgcacagcacaaattagttatatatggggatggtagttttttcatcttcagttgtctctgatgcagcttatacgaaataattgttgttctgttaactgaataccactctgtaattgcaaaaaaaaaaaaaaagttgcagctgttttgttgacattctgaatgcttctaagtaaatacaattttttttattagtattgttgtccttttcataggtctgaaatttttcttcttgaggggaagctagtcttttgcttttgcccattttgaatcacatgaattattacagtgtttatcctttcatatagttagctaataaaaagcttttgtctacacaccctgcatatcataatgggggtaaagttaagttgagatagttttcatccataactgaacatccaaaatcttgatcagttaagaaatttcacatagcccacttacatttacaaactgaagagtaatcaatctactcaaagcatgggattattagaatcaaacattttgaaagtctgtccttgaaggactaatagaaaagtatgttctaacctttacatgaggactctattctttaactcccattaccatgtaatggcagttatattttgcagttcccacattaaagaagacctgagaatgtatccccaaaagcgtgagcttaaaatacaagactgccatattaaattttttgttgacattagtctcagtgaagactatgaaaatgctggctatagatgtcttttcccatttatctaaatatggactgctcaggaaacgagactttccattacaagtatttttaattaattgggccagcttttcaaacaaagatgccacattcaaaatagggtatattttcctatattacggtttgcccctttataaatccaagtagataggaagaaagaagacaaactttgcatctcagtatgaattattcaatttatttgaatgatttttctttacaaaacaaactcattcattagtcatgtttatctgcttaggagtttagggaacaatttggcaattttgtggttttcgagattatcgttttcttaaagtgccagtattttaaaatagcgttcttgtaattttacacgcttttgtgatggagtgctgttttgttatataatttagacttggattctttccatttgcatttgtttatgtaatttcaggaggaatactgaacatctgagtcctggatgatactaataaactaataattgcagaggttttaaatactagttaaatggctttcacttaagaacttaagattttgttacatatttttaaatcttgtttctaataatacctcttagcagtaccttttaaataagtataagggatggcaaagtttttccctttaaaaatactcactttatgcttataaataggttaatgggctgataaaaggttttgtcaaacattgcaagtattcggtgctatatataaaggaggaaaaactagttttactttcagaatgatttaaacaagatttttaaaaacaagatacatgcaagcgaacagcagggttagtgataggctgcaattgtgtcgaacatcagattttttgttaagaggagcaaatgactcaatctgatttagatggaagtttctactgtatagaaatcaccattaatcaccaacattaataattctgatccatttaaaatgaattctggctcaaggagaatttgtaactttagtaggtacgtcatgacaactaccatttttttaagatgttgagaatgggaacagtttttttagggtttattcttgaccacagatcttaagaaaatggacaaaacccctcttcaatctgaagattagtatggtttggtgttctaacagtatcccctagaagttggatgtctaaaactcaagtaaatggaagtgggaggcaatttagataagtgtaaagccttgtaactgaagatgattttttttagaaagtgtatagaaactattttaatgccaagatagttacagtgctgtggggtttaaagactttgttgacatcaagaaaagactaaatctataattaattgggccaacttttaaaatgaagatgctttttaaaactaatgaactaagatgtataaatcttagtttttttgtattttaaagataggcatatggcatattgattaacgagtcaaatttcctaactttgctgtgcaaaggttgagagctattgctgattagttaccacagttctgatgatcgtcccatcacagtgttgttaatgtttgctgtatttattaattttcttaaagtgaaatctgaaaaatgaaatttgtgtgtcctgtgtacccgaggggtaatgattaaatgataaagat

SEQ ID NO: 140760 - DNA, 1889 bp, Homo sapiens
  Payload ID: 7603
  Gene Symbol: HMGB2
  Gene Name: high mobility group box 2
  Uniprot ID: P26583
  ENST ID: ENST00000296503
  CDS Start-End: 875-1504
cgggacgcgggaacggttccctcccggccccccgcgccctttccgaggttccctgccttgacttccccgagttctacgacaacctcagcgacagcgggaggagctgggcaatcggttttgcagggcaaactccaggctctcctcatttattattctctgggcggcgcacgggagaccctgcagggcaacagagcagagcgactacagctcccaggagccaacgctgcagggctgagccgacgcgggggacagacaggacctaaatggtggtcggaggaagggcaaggcagacctcttctgttaccttagcgccagcaaaccgagccgccgccgtcgccaagccaggagaccaacccccagtctcccgactaagtatttttaaatctggcggggctttccttcccgagccaaccactcccaccgtttacagccccaaccagtcagcgtgaggcccgccatttttcaaaccctcttcccgccgccaatcaggatcgagcagtacattcctctcctgaccggttctaacgggtctgggagttaacgacctgggcgacccaccgaacctgctaggctggggcgtggagggcgggtctggtaagacactgaccaatcgttagcctccgtggcaagggggcggggactatctgggtttgaataatcgtcagaaccaatcagattagtggggatgtggcccgtggcctagctcgtcaagttgccgtggcgcggagaactctgcaaaacaagaggctgaggattgcgttagagataaaccagttcacgccggagccccgtgagggaagcgtctccgttgggtccggccgctctgcgggactctgaggaaaagctcgcaccaggtggacgcggatctgtcaacatgggtaaaggagaccccaacaagccgcggggcaaaatgtcctcgtacgccttcttcgtgcagacctgccgggaagagcacaagaagaaacacccggactcttccgtcaatttcgcggaattctccaagaagtgttcggagagatggaagaccatgtctgcaaaggagaagtcgaagtttgaagatatggcaaaaagtgacaaagctcgctatgacagggagatgaaaaattacgttcctcccaaaggtgataagaaggggaagaaaaaggaccccaatgctcctaaaaggccaccatctgccttcttcctgttttgctctgaacatcgcccaaagatcaaaagtgaacaccctggcctatccattggggatactgcaaagaaattgggtgaaatgtggtctgagcagtcagccaaagataaacaaccatatgaacagaaagcagctaagctaaaggagaaatatgaaaaggatattgctgcatatcgtgccaagggcaaaagtgaagcaggaaagaagggccctggcaggccaacaggctcaaagaagaagaacgaaccagaagatgaggaggaggaggaggaagaagaagatgaagatgaggaggaagaggatgaagatgaagaataaatggctatcctttaatgatgcgtgtggaatgtgtgtgtgtgctcaggcaattattttgctaagaatgtgaattcaagtgcagctcaatactagcttcagtataaaaactgtacagatttttgtatagctgataagattctctgtagagaaaatacttttaaaaaatgcaggttgtagctttttgatgggctactcatacagttagattttacagcttctgatgttgaatgttcctaaatatttaatggtttttttaatttcttgtgtatggtagcacagcaaacttgtaggaattagtatcaatagtaaattttgggttttttaggatgttgcatttcgtttttttaaaaaaaattttgtaataaaattatgtatattatttcta

SEQ ID NO: 140761 - DNA, 1175 bp, Homo sapiens
  Payload ID: 7603
  Gene Symbol: HMGB2
  Gene Name: high mobility group box 2
  Uniprot ID: P26583
  ENST ID: ENST00000446922
  CDS Start-End: 167-796
gcaaaacaagaggctgaggattgcgttagagataaaccagttcacgccggagccccgtgagggaagcgtctccgttgggtccggccgctctgcgggactctgaggaaaagctcgcaccaggcaagaataccctccaataccctcgggtggacgcggatctgtcaacatgggtaaaggagaccccaacaagccgcggggcaaaatgtcctcgtacgccttcttcgtgcagacctgccgggaagagcacaagaagaaacacccggactcttccgtcaatttcgcggaattctccaagaagtgttcggagagatggaagaccatgtctgcaaaggagaagtcgaagtttgaagatatggcaaaaagtgacaaagctcgctatgacagggagatgaaaaattacgttcctcccaaaggtgataagaaggggaagaaaaaggaccccaatgctcctaaaaggccaccatctgccttcttcctgttttgctctgaacatcgcccaaagatcaaaagtgaacaccctggcctatccattggggatactgcaaagaaattgggtgaaatgtggtctgagcagtcagccaaagataaacaaccatatgaacagaaagcagctaagctaaaggagaaatatgaaaaggatattgctgcatatcgtgccaagggcaaaagtgaagcaggaaagaagggccctggcaggccaacaggctcaaagaagaagaacgaaccagaagatgaggaggaggaggaggaagaagaagatgaagatgaggaggaagaggatgaagatgaagaataaatggctatcctttaatgatgcgtgtggaatgtgtgtgtgtgctcaggcaattattttgctaagaatgtgaattcaagtgcagctcaatactagcttcagtataaaaactgtacagatttttgtatagctgataagattctctgtagagaaaatacttttaaaaaatgcaggttgtagctttttgatgggctactcatacagttagattttacagcttctgatgttgaatgttcctaaatatttaatggtttttttaatttcttgtgtatggtagcacagcaaacttgtaggaattagtatcaatagtaaattttgggttttttaggatgttgcatttcgtttttttaaaaaaaattttgtaataaaattatgtatatta

SEQ ID NO: 140762 - DNA, 1032 bp, Homo sapiens
  Payload ID: 7603
  Gene Symbol: HMGB2
  Gene Name: high mobility group box 2
  Uniprot ID: P26583
  ENST ID: ENST00000438704
  CDS Start-End: 24-653
caggtggacgcggatctgtcaacatgggtaaaggagaccccaacaagccgcggggcaaaatgtcctcgtacgccttcttcgtgcagacctgccgggaagagcacaagaagaaacacccggactcttccgtcaatttcgcggaattctccaagaagtgttcggagagatggaagaccatgtctgcaaaggagaagtcgaagtttgaagatatggcaaaaagtgacaaagctcgctatgacagggagatgaaaaattacgttcctcccaaaggtgataagaaggggaagaaaaaggaccccaatgctcctaaaaggccaccatctgccttcttcctgttttgctctgaacatcgcccaaagatcaaaagtgaacaccctggcctatccattggggatactgcaaagaaattgggtgaaatgtggtctgagcagtcagccaaagataaacaaccatatgaacagaaagcagctaagctaaaggagaaatatgaaaaggatattgctgcatatcgtgccaagggcaaaagtgaagcaggaaagaagggccctggcaggccaacaggctcaaagaagaagaacgaaccagaagatgaggaggaggaggaggaagaagaagatgaagatgaggaggaagaggatgaagatgaagaataaatggctatcctttaatgatgcgtgtggaatgtgtgtgtgtgctcaggcaattattttgctaagaatgtgaattcaagtgcagctcaatactagcttcagtataaaaactgtacagatttttgtatagctgataagattctctgtagagaaaatacttttaaaaaatgcaggttgtagctttttgatgggctactcatacagttagattttacagcttctgatgttgaatgttcctaaatatttaatggtttttttaatttcttgtgtatggtagcacagcaaacttgtaggaattagtatcaatagtaaattttgggttttttaggatgttgcatttcgtttttttaaaaaaaattttgtaataaaattatgtatatta

SEQ ID NO: 140763 - DNA, 629 bp, Homo sapiens
  Payload ID: 7603
  Gene Symbol: HMGB2
  Gene Name: high mobility group box 2
  ENST ID: ENST00000506267
  CDS Start-End: 227-629
tcgggttcgtggacctgcctttccccattccctcagagcctctactcggtctcggcgcagtggctctcggggtctgacccggcgagcggcatttggggtgcgggccggcgagggctgggtctgtggagggccggcgggcagtcggaggaggcggaaactgcccctgaccgggcccggttctgggagttttcaatgtcggtcacgaggtggacgcggatctgtcaacatgggtaaaggagaccccaacaagccgcggggcaaaatgtcctcgtacgccttcttcgtgcagacctgccgggaagagcacaagaagaaacacccggactcttccgtcaatttcgcggaattctccaagaagtgttcggagagatggaagaccatgtctgcaaaggagaagtcgaagtttgaagatatggcaaaaagtgacaaagctcgctatgacagggagatgaaaaattacgttcctcccaaaggtgataagaaggggaagaaaaaggaccccaatgctcctaaaaggccaccatctgccttcttcctgttttgctctgaacatcgcccaaagatcaaaagtgaacaccctggcctatccattggggatactgcaaagaaattgggtgaaatgtggtctg

SEQ ID NO: 140764 - DNA, 3560 bp, Homo sapiens
  Payload ID: 7604
  Gene Symbol: HMGB3
  Gene Name: high mobility group box 3
  Uniprot ID: O15347
  ENST ID: ENST00000325307
  CDS Start-End: 97-699
aggcggctctcgtggaggcagctagcgcgaggctggggagcgctgagccgcgcgtcgtgccctgcgctgcccagactagcgaacaatacagtcaggatggctaaaggtgaccccaagaaaccaaagggcaagatgtccgcttatgccttctttgtgcagacatgcagagaagaacataagaagaaaaacccagaggtccctgtcaattttgcggaattttccaagaagtgctctgagaggtggaagacgatgtccgggaaagagaaatctaaatttgatgaaatggcaaaggcagataaagtgcgctatgatcgggaaatgaaggattatggaccagctaagggaggcaagaagaagaaggatcctaatgctcccaaaaggccaccgtctggattcttcctgttctgttcagaattccgccccaagatcaaatccacaaaccccggcatctctattggagacgtggcaaaaaagctgggtgagatgtggaataatttaaatgacagtgaaaagcagccttacatcactaaggcggcaaagctgaaggagaagtatgagaaggatgttgctgactataagtcgaaaggaaagtttgatggtgcaaagggtcctgctaaagttgcccggaaaaaggtggaagaggaagatgaagaagaggaggaggaagaagaggaggaggaggaggaggaggatgaataaagaaactgtttatctgtctccttgtgaatacttagagtaggggagcgccgtaattgacacatctcttatttgagaagtgtctgttgccctcattaggtttaattacaaaatttgatcacgatcatattgtagtctctcaaagtgctctagaaattgtcagtggtttacatgaagtggccatgggtgtctggagcaccctgaaactgtatcaaagttgtacatatttccaaacatttttaaaatgaaaaggcactctcgtgttctcctcactctgtgcactttgctgttggtgtgacaaggcatttaaagatgtttctggcattttctttttatttgtaaggtggtggtaactatggttattggctagaaatcctgagttttcaactgtatatatctatagtttgtaaaaagaacaaaacaaccgagacaaacccttgatgctccttgctcggcgttgaggctgtggggaagatgccttttgggagaggctgtagctcagggcgtgcactgtgaggctggacctgttgactctgcagggggcatccatttagcttcaggttgtcttgtttctgtatatagtgacatagcattctgctgccatcttagctgtggacaaaggggggtcagctggcatgagaatattttttttttttaagtgcggtagtttttaaactgtttgtttttaaacaaactatagaactcttcattgtcagcaaagcaaagagtcactgcatcaatgaaagttcaagaacctcctgtacttaaacacgattcgcaacgttctgttattttttttgtatgtttagaatgctgaaatgtttttgaagttaaataaacagtattacatttttaaaactcttctctattataacagtcaatttctgactcacagcagtgaacaaacccccactccattgtatttggagactggcctccctataaatgtggtagcttcttttattactcagtggccagctcacttagggctgagatgaaggagagggctacttgaagctactgtgtgattttgtttgtgtctgagtggcattcagatgaagtctggaggagttaggagaacgacataggcaaggttcagcagccttccaaggtataggaaggtgggtgattaggactgaggctatctaggtttaacttttgtcccacctccaccccctattttgtggggccaaatgcattgctaaacagcaatttcagagtgtatggtgtgtcaaaaattaaggccttattgtttttctctttcacccctaccccccgtgctcctggcacatatcacattatttgtggtgcccaacatttggggtcttgagcctgctgctggtctcctggatgccagtgagggtatgtgggatggggtggtggggtaggggacggtatcctttttttgctcctacttggaaacaccaaacaccccaaggaagatgataggctccatcttgggccacctgagctatagggcaggctaatggaatcaaccatttctgagcactaaatgtatcatgaaaagttgaatggcctgctcataagtttagctcattcactggaaatgtagattgatgttcaatgttaaactggaaggagcttggtttgtgtgtcagtggttatattagtgggtagtgtaacattttatccaggttggggtgaggggagatggccacagtagcaagtggtgacactaaataccattttgaaggctgatgtgtatatacatcattactgtccgtagcaatgaaggatacagtactgtgttgtgggtgagtgttgctattgcccagcattaatatttgggtgtgtatgtttgaggctatgaaacacgcaggagtgtttttgtgctattaattttaagagaaagcagctttttcttaaaattcactgttgagaaacttgcatgtctggaggcggtgtcctctccgccctgtcgggtcctggatgagtacgagttatggtcacggtcacagcctgatctcttatgtgttcatagccattcgctctcccatcagaactgtttgtcctgaatgtgttcctctagttctagaaaatgaccactaatttaaaaaactcggttgtgaggtttgcccagaggcacttgttccagaatttcccctcctgcttcagccatgtccttgtcacttggcattctaagctaaagctttagcttcccaattcgtgatgtgctaggccaagattcgggagctgttgccagcctcgtcaaatatggaagagaaacaacctgcggtcaaaagggagtgatttgttaagtggtgcgcgtctatctcataactagatgtaccaaccagggaagggccaaggatggaaaggggtaacttttgtgcttccaaagtagctaagcagaagtgggggagcagtttagccagatgatctttgattaggcaaacattgagttttaaagaggctgtcaagttgaggccacttggtccattagctggggcagcaagatcactactcaacgttttcacactgtggcaagattgctcttctagtggaataatgccctagtttctctgagatgatgtaagtggcatgatgttacctaaggcttaggcttagcttgatttctgggcccactgtctgtgttcttaagatgccaacctgttgctttttttttttttttcccccatttaaaaggatagtacctactccctctaaccacctcaccccattcttgaatgacattttatccttcggaaagaacaaggctgtgatgtagtgactattgtctgtgtctcctgtgtgtgtctgttcttgtcacaaatgtatttggggacgttggatgcattcattttctgtaataaagtttcttaatcactcttcccaaaaagtaa

SEQ ID NO: 140765 - DNA, 793 bp, Homo sapiens
  Payload ID: 7604
  Gene Symbol: HMGB3
  Gene Name: high mobility group box 3
  ENST ID: ENST00000455596
  CDS Start-End: 213-793
cgcaccgcccgctcccgccgccgccgccgccgccgccgccgccgccgccgccgccgccgccgccgccgcagcgcccgcacaactttccggcccgcgccgccgtgagcgcgccctgccgccgcctccccctgcctctactccccattcccttcccgccccctccgccttccctcctgctaggcggccgggaaggaagaagcaattcagtcaggatggctaaaggtgaccccaagaaaccaaagggcaagatgtccgcttatgccttctttgtgcagacatgcagagaagaacataagaagaaaaacccagaggtccctgtcaattttgcggaattttccaagaagtgctctgagaggtggaagacgatgtccgggaaagagaaatctaaatttgatgaaatggcaaaggcagataaagtgcgctatgatcgggaaatgaaggattatggaccagctaagggaggcaagaagaagaaggatcctaatgctcccaaaaggccaccgtctggattcttcctgttctgttcagaattccgccccaagatcaaatccacaaaccccggcatctctattggagacgtggcaaaaaagctgggtgagatgtggaataatttaaatgacagtgaaaagcagccttacatcactaaggcggcaaagctgaaggagaagtatgagaaggatgttgctgactataagtcgaaaggaaagtttgatggtgcaaagggtcctgctaaagttgcccggaaaaaggtggaagaggaagatgaagaagaggaggaggaagaagaggagga

SEQ ID NO: 140766 - DNA, 707 bp, Homo sapiens
  Payload ID: 7604
  Gene Symbol: HMGB3
  Gene Name: high mobility group box 3
  ENST ID: ENST00000419110
  CDS Start-End: 142-707
tttgtagttcagcttcaggccaagtgcttcagctccatataagaggtagctttcttgagagcagagatcgaaatatttcctatgcaaaggatggaaatacttcctgcgcgtaagcgcaatcctttcatcattcgaatcaggatggctaaaggtgaccccaagaaaccaaagggcaagatgtccgcttatgccttctttgtgcagacatgcagagaagaacataagaagaaaaacccagaggtccctgtcaattttgcggaattttccaagaagtgctctgagaggtggaagacgatgtccgggaaagagaaatctaaatttgatgaaatggcaaaggcagataaagtgcgctatgatcgggaaatgaaggattatggaccagctaagggaggcaagaagaagaaggatcctaatgctcccaaaaggccaccgtctggattcttcctgttctgttcagaattccgccccaagatcaaatccacaaaccccggcatctctattggagacgtggcaaaaaagctgggtgagatgtggaataatttaaatgacagtgaaaagcagccttacatcactaaggcggcaaagctgaaggagaagtatgagaaggatgttgctgactataagtcgaaaggaaagtttgatggtgcaaagggtcctgctaaagttgcccggaaaaaggtggaagaggaagatgaagaagaggagga

SEQ ID NO: 140767 - DNA, 529 bp, Homo sapiens
  Payload ID: 7604
  Gene Symbol: HMGB3
  Gene Name: high mobility group box 3
  ENST ID: ENST00000430118
  CDS Start-End: 70-529
gtacttcttgtcaattcctccttgcttttcctcattgtatttctttgtttctcttttatcacagtcaggatggctaaaggtgaccccaagaaaccaaagggcaagatgtccgcttatgccttctttgtgcagacatgcagagaagaacataagaagaaaaacccagaggtccctgtcaattttgcggaattttccaagaagtgctctgagaggtggaagacgatgtccgggaaagagaaatctaaatttgatgaaatggcaaaggcagataaagtgcgctatgatcgggaaatgaaggattatggaccagctaagggaggcaagaagaagaaggatcctaatgctcccaaaaggccaccgtctggattcttcctgttctgttcagaattccgccccaagatcaaatccacaaaccccggcatctctattggagacgtggcaaaaaagctgggtgagatgtggaataatttaaatgacagtgaaaagcagccttacatcactaaggcggcaaagctgaaggagaagtatg

SEQ ID NO: 140768 - DNA, 812 bp, Homo sapiens
  Payload ID: 7604
  Gene Symbol: HMGB3
  Gene Name: high mobility group box 3
  Uniprot ID: O15347
  ENST ID: ENST00000448905
  CDS Start-End: 192-794
cgccgccgccgccgccgccgccgccgccgccgccgccgccgccgccgcagcgcccgcacaactttccggcccgcgccgccgtgagcgcgccctgccgccgcctccccctgcctctactccccattcccttcccgccccctccgccttccctcctgctaggcggccgggaaggaagaagcaattcagtcaggatggctaaaggtgaccccaagaaaccaaagggcaagatgtccgcttatgccttctttgtgcagacatgcagagaagaacataagaagaaaaacccagaggtccctgtcaattttgcggaattttccaagaagtgctctgagaggtggaagacgatgtccgggaaagagaaatctaaatttgatgaaatggcaaaggcagataaagtgcgctatgatcgggaaatgaaggattatggaccagctaagggaggcaagaagaagaaggatcctaatgctcccaaaaggccaccgtctggattcttcctgttctgttcagaattccgccccaagatcaaatccacaaaccccggcatctctattggagacgtggcaaaaaagctgggtgagatgtggaataatttaaatgacagtgaaaagcagccttacatcactaaggcggcaaagctgaaggagaagtatgagaaggatgttgctgactataagtcgaaaggaaagtttgatggtgcaaagggtcctgctaaagttgcccggaaaaaggtggaagaggaagatgaagaagaggaggaggaagaagaggaggaggaggaggaggaggatgaataaagaaactgtttatctgtc

SEQ ID NO: 140769 - DNA, 2343 bp, Homo sapiens
  Payload ID: 7605
  Gene Symbol: HMGB4
  Gene Name: high mobility group box 4
  Uniprot ID: Q8WW32
  ENST ID: ENST00000519684
  CDS Start-End: 1744-2304
aagtggtgtctgccagatttccccgctgtaaagttactatttgtccctttccatgttctattcattagtagtgggtggctaagtccagcccacactggagagggggagtgccatctgtttttattcctatcatttcaatttgtttaatcctcatggctttattatcacctcactactttttagagatatggttgtaatgagctagacttgcccaaagttactcagctagtaaatggcaaagctagaatttgaacttatatgtgtctggcttaaaaggccatgttctttccacttcatgttactgccaccaagtaaagaggatctcacagtctccgaggcggaagctccctctcagcttgtctggacagtgtttttcaaatccattcttggagtgtgacccatcagtgggtcatgagaagatgaacactgaagtcttggaaccctgggaatgaacctggaaaaattcaaaatatggtctagtcttaggcaagtttccttgtccggctcagctgctgagaccacatatctggaccctcagtgccctggcaacagctctgtgcaggcaggatgaagcacaggcttaggtcaagcaatcagccgtcaaaatccacactctcacctgtgagtggctgttcaaccttgaacatgttactttttatgttaatgaaactcagttttctagtcctataaatttggggctatcatcaaccattaagtgatattaaacccagtgccacacaggcaagtacctagcagtgtccaaaggcccccagaatgacactttttcatcttttctcttccctccaattgaaagactagtggaatatctgcaattactttgaccaaaagccagaagccggccagtttgagtgtagctgttacagctttgtgttctaaacctaagaaatggggacccctcacatgagagtggggaggcttctggatgtgctacaaattccatttcattttcatgaactccagtgttaattaataaaatctcaaggttctcccccctctttcgcctcacatttcttcagagaaatgaagagttccaactcatagcccaagtgctcaggttttaaattagacaactttgtcctgacaggaaccaagtcacagctgtcatacctgattacttttagagttactactaaaccctttgtatggcatgagctgccactgttcaaggcaaacagaaacacttcacattttatcatgacagccctggatctatccacctccccatgttcattatgctcagcctgtctttggaagggatgatgaggcatcctgaaaatcgtatagtgaggaaggcagaccccatggcctgtcactacagcctagggattttaagcccctaaagtgcagcaaaacccactgcctccaggaagccaaggagaattatttctgggggacatagctgcctcatagcctactatgaatgaaccatcatctttcatgagaggcaaacattgaccctcaagtaaccaaccaatacgagcacctgtacacaaatgcccacaggtgttggctgggattggctggcttgtggatgatgtcacagtttccctcctctgactcaacaatgccatcagcactgaaaaggctgagccctgactacagctcttgcagacagaaaaattcgctgcaagtacagcactttctagattgctcctggagtgtgggaacaacagtctctcctgtccacgttactgaatccagaaaaaaggtgaacttacgaacatgggaaaagaaatccagctaaagcctaaggcaaatgtctcttcttacgttcactttttgctgaattacagaaacaaattcaaggagcagcagccaaatacctatgttggctttaaagagttctctagaaagtgttcggaaaaatggagatccatctcaaagcatgaaaaggccaaatatgaagccctggccaaactcgacaaagcccgataccaggaagaaatgatgaattatgttggcaagaggaagaaacggagaaagcgggatccccaggaacccagacggcctccatcatccttcctactcttctgccaagaccactatgctcagctgaagagggagaacccgaactggtcggtggtgcaggtggccaaggccacagggaagatgtggtcaacagcgacagacctggagaagcacccttatgagcaaagagtggctctcctgagagctaagtacttcgaggaacttgaactctaccgtaaacaatgtaatgccaggaagaagtaccgaatgtcagctagaaaccggtgcagagggaaaagagtcaggcagagctgatggatccagtttgaaaaaacaaaatgccattcaaccgta

SEQ ID NO: 140770 - DNA, 2505 bp, Homo sapiens
  Payload ID: 7605
  Gene Symbol: HMGB4
  Gene Name: high mobility group box 4
  Uniprot ID: Q8WW32
  ENST ID: ENST00000522796
  CDS Start-End: 1906-2466
ctgtaaagttactatttgtccctttccatgttctattcattagtagtgggtggctaagtccagcccacactggagagggggagtgccatctgtttttattcctatcatttcaatttgtttaatcctcatggctttattatcacctcactactttttagagatatggttgtaatgagctagacttgcccaaagttactcagctagtaaatggcaaagctagaatttgaacttatatgtgtctggcttaaaaggccatgttctttccacttcatgttactgccaccaagtaaagaggatctcacagtctccgaggcggaagctccctctcagcttgtctggacagtgtttttcaaatccattcttggagtgtgacccatcagtgggtcatgagactgcaatcaagatgtttgaaaatactgaactcacatctgtagacgaggagttggcagatttacgacccccagcttgcagcctattttttaaaaataaggttttattggaacatagccacactcattggtttagaaaggagctgtgtcccattcatctaggcagccctgctcatgtccaaaaaatgtaagatgaacactgaagtcttggaaccctgggaatgaacctggaaaaattcaaaatatggtctagtcttaggcaagtttccttgtccggctcagctgctgagaccacatatctggaccctcagtgccctggcaacagctctgtgcaggcaggatgaagcacaggcttaggtcaagcaatcagccgtcaaaatccacactctcacctgtgagtggctgttcaaccttgaacatgttactttttatgttaatgaaactcagttttctagtcctataaatttggggctatcatcaaccattaagtgatattaaacccagtgccacacaggcaagtacctagcagtgtccaaaggcccccagaatgacactttttcatcttttctcttccctccaattgaaagactagtggaatatctgcaattactttgaccaaaagccagaagccggccagtttgagtgtagctgttacagctttgtgttctaaacctaagaaatggggacccctcacatgagagtggggaggcttctggatgtgctacaaattccatttcattttcatgaactccagtgttaattaataaaatctcaaggttctcccccctctttcgcctcacatttcttcagagaaatgaagagttccaactcatagcccaagtgctcaggttttaaattagacaactttgtcctgacaggaaccaagtcacagctgtcatacctgattacttttagagttactactaaaccctttgtatggcatgagctgccactgttcaaggcaaacagaaacacttcacattttatcatgacagccctggatctatccacctccccatgttcattatgctcagcctgtctttggaagggatgatgaggcatcctgaaaatcgtatagtgaggaaggcagaccccatggcctgtcactacagcctagggattttaagcccctaaagtgcagcaaaacccactgcctccaggaagccaaggagaattatttctgggggacatagctgcctcatagcctactatgaatgaaccatcatctttcatgagaggcaaacattgaccctcaagtaaccaaccaatacgagcacctgtacacaaatgcccacaggtgttggctgggattggctggcttgtggatgatgtcacagtttccctcctctgactcaacaatgccatcagcactgaaaaggctgagccctgactacagctcttgcagacagaaaaattcgctgcaagtacagcactttctagattgctcctggagtgtgggaacaacagtctctcctgtccacgttactgaatccagaaaaaaggtgaacttacgaacatgggaaaagaaatccagctaaagcctaaggcaaatgtctcttcttacgttcactttttgctgaattacagaaacaaattcaaggagcagcagccaaatacctatgttggctttaaagagttctctagaaagtgttcggaaaaatggagatccatctcaaagcatgaaaaggccaaatatgaagccctggccaaactcgacaaagcccgataccaggaagaaatgatgaattatgttggcaagaggaagaaacggagaaagcgggatccccaggaacccagacggcctccatcatccttcctactcttctgccaagaccactatgctcagctgaagagggagaacccgaactggtcggtggtgcaggtggccaaggccacagggaagatgtggtcaacagcgacagacctggagaagcacccttatgagcaaagagtggctctcctgagagctaagtacttcgaggaacttgaactctaccgtaaacaatgtaatgccaggaagaagtaccgaatgtcagctagaaaccggtgcagagggaaaagagtcaggcagagctgatggatccagtttgaaaaaacaaaatgccattcaaccgta

SEQ ID NO: 140771 - DNA, 1191 bp, Homo sapiens
  Payload ID: 7606
  Gene Symbol: HMGN2
  Gene Name: high mobility group nucleosomal binding domain 2
  Uniprot ID: P05204
  ENST ID: ENST00000361427
  CDS Start-End: 95-367
aagaggcgagaacgacccccggaccgaccaaagcccgcgcgccgctgcatcccgcgtccagcacctacgtcccgctgccgtcgccgccgccaccatgcccaagagaaaggctgaaggggatgctaagggagataaagcaaaggtgaaggacgaaccacagagaagatccgcgaggttgtctgctaaacctgctcctccaaagccagagcccaagcctaaaaaggcccctgcaaagaagggagagaaggtacccaaagggaaaaagggaaaagctgatgctggcaaggaggggaataaccctgcagaaaatggagatgccaaaacagaccaggcacagaaagctgaaggtgctggagatgccaagtgaagtgtgtgcatttttgataactgtgtacttctggtgactgtacagtttgaaatactattttttatcaagttttataaaaatgcagaattttgttttactttttttttttttttaaaagctatgttgttagcacacagaacacttcattgttgtttttgggggaaggggcatatgtcactaatagaatgtctccaaagctggattgatgtggagaaaacacctttcccttctagttttgagagacttcctcttggctcccaggaggagggattccctgactttgacacacatggccaccttggcacaaaagccttgtggtatagaaaaacaaatttgtttttatgtcctcttctccctttccatcgttcagcatagacttaactcccttaagcccagacatctgttgagacctgacccctagtcattggttaccagtgtgtcaggcaatctggactttccagtgatgccactgagatggcacctgtcaaaagagcagtggttccatttctagattgtggatcttcagataaattctgccattttcatttcacttcctgaaagtcagggtcggcttgtgaaaagttgttaaacaacatgctaaatgtgaaatgtcaaccctcactctaaactttccctgttcagagcatcagatgaagacttcattgggttttatagtggctttctgatttttggtagtccattgaagaagggagtttgaaagttgttgtatactgttaacgattgtctgcccatgtcctgcctgaaataccatgattgtttatggaaagtatctttaataaagctggatacagtttggcttggaa

SEQ ID NO: 140772 - DNA, 1148 bp, Homo sapiens
  Payload ID: 7606
  Gene Symbol: HMGN2
  Gene Name: high mobility group nucleosomal binding domain 2
  Uniprot ID: P05204
  ENST ID: ENST00000619352
  CDS Start-End: 54-326
gaagaagaggcgagaacgacccccggaccgaccaaagcccgcgcgccgccaccatgcccaagagaaaggctgaaggggatgctaagggagataaagcaaaggtgaaggacgaaccacagagaagatccgcgaggttgtctgctaaacctgctcctccaaagccagagcccaagcctaaaaaggcccctgcaaagaagggagagaaggtacccaaagggaaaaagggaaaagctgatgctggcaaggaggggaataaccctgcagaaaatggagatgccaaaacagaccaggcacagaaagctgaaggtgctggagatgccaagtgaagtgtgtgcatttttgataactgtgtacttctggtgactgtacagtttgaaatactattttttatcaagttttataaaaatgcagaattttgttttactttttttttttttttaaaagctatgttgttagcacacagaacacttcattgttgtttttgggggaaggggcatatgtcactaatagaatgtctccaaagctggattgatgtggagaaaacacctttcccttctagttttgagagacttcctcttggctcccaggaggagggattccctgactttgacacacatggccaccttggcacaaaagccttgtggtatagaaaaacaaatttgtttttatgtcctcttctccctttccatcgttcagcatagacttaactcccttaagcccagacatctgttgagacctgacccctagtcattggttaccagtgtgtcaggcaatctggactttccagtgatgccactgagatggcacctgtcaaaagagcagtggttccatttctagattgtggatcttcagataaattctgccattttcatttcacttcctgaaagtcagggtcggcttgtgaaaagttgttaaacaacatgctaaatgtgaaatgtcaaccctcactctaaactttccctgttcagagcatcagatgaagacttcattgggttttatagtggctttctgatttttggtagtccattgaagaagggagtttgaaagttgttgtatactgttaacgattgtctgcccatgtcctgcctgaaataccatgattgtttatggaaagtatctttaataaagctggatacagtttggcttgg

SEQ ID NO: 140773 - DNA, 831 bp, Homo sapiens
  Payload ID: 7607
  Gene Symbol: HMGN3
  Gene Name: high mobility group nucleosomal binding domain 3
  Uniprot ID: Q15651
  ENST ID: ENST00000275036
  CDS Start-End: 130-363
gcaggtcgaagaggccgggctacgtcgtgccctgcgcgtgagcagctgcagaggcagaggcagcatccagcggcggcgccagcagttccagtccgttgctttactttttgcttcaccgacatagtcattatgccgaagagaaagtctccagagaatacagagggcaaagatggatccaaagtaactaaacaggagcccacaagacggtctgccagattgtcagcgaaacctgctccaccaaaacctgaacccaaaccaagaaaaacatctgctaagaaagaacctggagcaaagattagcagaggtgctaaagggaagaaggaggaaaagcaggaagctggaaaggaaggcacagaaaactgaatctgtagataacgagggagaatgaattgtcatgaaaaattggggttgattttatgtatctcttgggacaacttttaaaagctatttttaccaagtattttgtaaatgctaattttttaggactctactagttggcatacgaaaatatataaggatggacattttatcgtctcatagtcatgctttttggaaatttacatcatcctcaagtaaaataaatatcagttaaatattggaagctgtgtgtaagattgattcagcattccatgcacttgctttaaaatttagtcctgtgcatactgtggtgtttttactgtgcatatttgaatttttcatgcagtttttctagagcaataatcagtggtgcttttgtacctaggttttatgtgattttaatgaaacatggatagttgtggccacctgctgactatttgtggtttaaaataaaaggtttacttgtctgcagaa

SEQ ID NO: 140774 - DNA, 872 bp, Homo sapiens
  Payload ID: 7607
  Gene Symbol: HMGN3
  Gene Name: high mobility group nucleosomal binding domain 3
  Uniprot ID: Q15651
  ENST ID: ENST00000344726
  CDS Start-End: 130-429
gcaggtcgaagaggccgggctacgtcgtgccctgcgcgtgagcagctgcagaggcagaggcagcatccagcggcggcgccagcagttccagtccgttgctttactttttgcttcaccgacatagtcattatgccgaagagaaagtctccagagaatacagagggcaaagatggatccaaagtaactaaacaggagcccacaagacggtctgccagattgtcagcgaaacctgctccaccaaaacctgaacccaaaccaagaaaaacatctgctaagaaagaacctggagcaaagattagcagaggtgctaaagggaagaaggaggaaaagcaggaagctggaaaggaaggtactgcaccatctgaaaatggtgaaactaaagctgaagaggcacagaaaactgaatctgtagataacgagggagaatgaattgtcatgaaaaattggggttgattttatgtatctcttgggacaacttttaaaagctatttttaccaagtattttgtaaatgctaattttttaggactctactagttggcatacgaaaatatataaggatggacattttatcgtctcatagtcatgctttttggaaatttacatcatcctcaagtaaaataaatatcagttaaatattggaagctgtgtgtaagattgattcagcattccatgcacttgctttaaaatttagtcctgtgcatactgtggtgtttttactgtgcatatttgaatttttcatgcagtttttctagagcaataatcagtggtgcttttgtacctaggttttatgtgattttaatgaaacatggatagttgtggccacctgctgactatttgtggtttaaaataaaaggtttacttgtctgcagaa

SEQ ID NO: 140775 - DNA, 1010 bp, Homo sapiens
  Payload ID: 7607
  Gene Symbol: HMGN3
  Gene Name: high mobility group nucleosomal binding domain 3
  ENST ID: ENST00000620514
  CDS Start-End: 179-571
ggagcagcagggaggcgagcagagggcccccagagggagccgcggaggtgcaggtcgaagaggccgggctacgtcgtgccctgcgcgtgagcagctgcagaggcagaggcagcatccagcggcggcgccagcagttccagtccgttgctttactttttgcttcaccgacatagtcattatgccgaagagaaagtctccagagaatacagagggcaaagatggatccaaagtaactaaacaggagcccacaagacggtctgccagattgtcagcgaaacctgctccaccaaaacctgaacccaaaccaagaaaaacatctgctaagaaagaacctggagcaaagattagcagaggtgctaaagggaagaaggaggaaaagcaggaagctggaaaggaaggtactgcaccatctgaaaatggtgaaactaaagctgaagagatccacatctctcgctcaactgttaatgtctcaacctccagaggcaccccacccagcacactgtcagtaaaggggcagattgaaacagtgagagcacagaaaactgaatctgtagataacgagggagaatgaattgtcatgaaaaattggggttgattttatgtatctcttgggacaacttttaaaagctatttttaccaagtattttgtaaatgctaattttttaggactctactagttggcatacgaaaatatataaggatggacattttatcgtctcatagtcatgctttttggaaatttacatcatcctcaagtaaaataaatatcagttaaatattggaagctgtgtgtaagattgattcagcattccatgcacttgctttaaaatttagtcctgtgcatactgtggtgtttttactgtgcatatttgaatttttcatgcagtttttctagagcaataatcagtggtgcttttgtacctaggttttatgtgattttaatgaaacatggatagttgtggccacctgctgactatttgtggtttaaaataaaaggtttacttgtctgc

SEQ ID NO: 140776 - DNA, 1225 bp, Homo sapiens
  Payload ID: 7608
  Gene Symbol: HMGN4
  Gene Name: high mobility group nucleosomal binding domain 4
  Uniprot ID: O00479
  ENST ID: ENST00000377575
  CDS Start-End: 178-450
cttagggctggtgctggccctgcccacgcctagggctccggcgcgtcacgggcctcagctgggattcccgcgcccctcggacggccacgagactcggacatctttccaggaacagcgtgaggaggacagaagcacccaacaggactgctcaagccacctgcgaacactgctgctaccatgcccaagagaaaggcaaaaggagatgctaaaggtgataaagcaaaggtgaaggatgagccacagaggagatcagctcggttgtctgctaaaccagctcctccaaaaccagagcccaggcctaaaaaggcctctgcaaagaagggagagaagcttcccaaagggagaaaggggaaagcagatgctggaaaggatgggaacaaccctgcaaaaaaccgagatgcctctacactccagtcccagaaagcggaaggcactggggatgccaagtgaaatgtacatttttgagagctctgtacttatagtgactctactgtttgaaatactatttttttaaatcaagttttataaaagtgtagaattttggcttttttaagttatgttgttagcacacaggacacttccttgttgtcttttgtggaaagggcaagtaccactaatagggtgtatctcagaaactgaattgaaataagggaaaataggattttctgtcctggtttttgaagattgttcttgattcccttgattcccaggagagattctctgacattcacgtgtcagccactttggcacggaagccttacagtgtggggaaccaaaacttcgtgtctcccctttccccgatgccatcagcatagacttgacttccttaaaccgagagttttgatgtggccttggcaaccctaaaatcagctgtgttaggtaacaaaactcaggctttctgttgatgacatcgagatggtgtcacttaaaagagccaagattcctgttttcagtttgtggattcatcctgctggttttactttagtccctccatgtcaaagtgggcctgagaaaagctcatacatgcctcatgtgaagtgtccaccctctctgaaaatctttcttgttcaaaacagcaacgacatatcttgttaacttttacggtgacttttggaggaggggagtttggaaattgtaaaatgttatagattgttgcctatttcctgctgaaagtaaatgtttttaaaaagtatcatataaagctgaatacaaattggtttggggg

SEQ ID NO: 140777 - DNA, 1303 bp, Homo sapiens
  Payload ID: 7609
  Gene Symbol: HMGN1
  Gene Name: high mobility group nucleosome binding domain 1
  ENST ID: ENST00000288344
  CDS Start-End: 75-221
cgcgccgcggcccgcaggcacccggcacgcgccttccccgcaggcacccggcacgcgccttccccgccgccacgatgcccaagaggaaggtcagctccgccgaaggcgccgccaaggaagagcccaagaggagatcggcgcggttgtcagctaaacctcctgcaaaagtggaagcgaagccgaaaaaggcagcagcgaagattcttcaaacacctaaatgaaagtgataaattcaaaactgatccttttagttcctcattatatgatatgaagggattaactgtagcaggatagtcaacctgaccgtacggcatggtgctttttttcaggataaatcttcagacaaaaaagtgcaaacaaaagggaaaaggggagcaaagggaaaacaggccgaagtggctaaccaagaaactaaagaagacttacctgcggaaaacggggaaacgaagactgaggagagtccagcctctgatgaagcaggagagaaagaagccaagtctgattaataaccatataccatgtcttatcagtggtccctgtctcccttcttgtacaatccagaggaatatttttatcaactattttgtaaatgcaagttttttagtagctctagaaacatttttaagaaggagggaatcccacctcatcccattttttaagtgtaaatgcttttttttaagaggtgaaatcatttgctggttgtttattttttggtacaaccagaaaatagtgtgggatattgaattatgggaggctctgactgtctcgggtgtcagcttaacattccacagatggggggttagtttttatatcctataatacaaagcatattaaatggcaatatggagtcagtcctgcatttaatgtcttgaacattttaaattacttctattaccatgttgttttttagtagaattgtttcctaaagaaaaccactctttgatcatggctctctctgccagaattgtgtgcactctgtaacatctttgtggtagtcctgttttcctaataactttgttactgtgctgtgaaagattacagatttgaacatgtagtgtacgtgctgttgagttgtgaactggtgggccgtatgtaacagctgaccaacgtgaagatactggtacttgatagcctcttaaggaaaatttgcttccaaattttaagctggaaagtcactggaataactttaaaaaagaattacaatacatggctttttagaatttcgttacgtatgttaagatttgtgtacaaattgaaatgtctgtactgatcctcaaccaataaaatctcagttatgaaaata

SEQ ID NO: 140778 - DNA, 709 bp, Homo sapiens
  Payload ID: 7609
  Gene Symbol: HMGN1
  Gene Name: high mobility group nucleosome binding domain 1
  ENST ID: ENST00000380747
  CDS Start-End: 126-476
gcttcacgcaggcctgcgaagctggagcccctggatagcctttcttgccgacagaggcgggagaaatttgctacttcctgtataccttatccttctcccttcccagtctaagatacgaactataaatgttcgaacccaattcaccccggaggggaggggccagataccagtggcctgaaggcgcccaggtcagctccgccgaaggcgccgccaaggaagagcccaagaggagatcggcgcggttgtcagctaaacctcctgcaaaagtggaagcgaagccgaaaaaggcagcagcgaaggataaatcttcagacaaaaaagtgcaaacaaaagggaaaaggggagcaaagggaaaacaggccgaagtggctaaccaagaaactaaagaagacttacctgcggaaaacggggaaacgaagactgaggagagtccagcctctgatgaagcaggagagaaagaagccaagtctgattaataaccatataccatgtcttatcagtggtccctgtctcccttcttgtacaatccagaggaatatttttatcaactattttgtaaatgcaagttttttagtagctctagaaacatttttaagaaggagggaatcccacctcatcccattttttaagtgtaaatgcttttttttaagaggtgaaatcatttgctggttgtttattttttggtacaaccagaaaatagtgtgggata

SEQ ID NO: 140779 - DNA, 829 bp, Homo sapiens
  Payload ID: 7609
  Gene Symbol: HMGN1
  Gene Name: high mobility group nucleosome binding domain 1
  ENST ID: ENST00000380748
  CDS Start-End: 137-409
gcagctcgggcggcgggaggagtggcagcggcaaggcagcccagtttcgcgaaggctgtcggcgcgccgcggcccgcaggcacccggcacgcgccttccccgcaggcacccggcacgcgccttccccgccgccacgatgcccaagaggaaggtcagctccgccgaaggcgccgccaaggaagagaaacctcctgcaaaagtggaagcgaagccgaaaaaggcagcagcgaaggataaatcttcagacaaaaaagtgcaaacaaaagggaaaaggggagcaaagggaaaacaggccgaagtggctaaccaagaaactaaagaagacttacctgcggaaaacggggaaacgaagactgaggagagtccagcctctgatgaagcaggagagaaagaagccaagtctgattaataaccatataccatgtcttatcagtggtccctgtctcccttcttgtacaatccagaggaatatttttatcaactattttgtaaatgcaagttttttagtagctctagaaacatttttaagaaggagggaatcccacctcatcccattttttaagtgtaaatgcttttttttaagaggtgaaatcatttgctggttgtttattttttggtacaaccagaaaatagtgtgggatattgaattatgggaggctctgactgtctcgggtgtcagcttaacattccacagatggggggttagtttttatatcctataatacaaagcatattaaatggcaatatggagtcagtcctgcatttaatgtcttgaacattttaaattacttctattaccatgttgttttttagtagaattgtttcctaa

SEQ ID NO: 140780 - DNA, 1383 bp, Homo sapiens
  Payload ID: 7609
  Gene Symbol: HMGN1
  Gene Name: high mobility group nucleosome binding domain 1
  Uniprot ID: P05114
  ENST ID: ENST00000380749
  CDS Start-End: 284-586
gctgagtcccgtagccaatgggcgggggtggggggcggcccggccggcggggagggggagcccgcggccggggacgcggggggaggaggaggcgggctcccaatccggttccatccggttctcccaccgcccccgctgtgggtctcagcagctcgggcggcgggaggagtggcagcggcaaggcagcccagtttcgcgaaggctgtcggcgcgccgcggcccgcaggcacccggcacgcgccttccccgcaggcacccggcacgcgccttccccgccgccacgatgcccaagaggaaggtcagctccgccgaaggcgccgccaaggaagagcccaagaggagatcggcgcggttgtcagctaaacctcctgcaaaagtggaagcgaagccgaaaaaggcagcagcgaaggataaatcttcagacaaaaaagtgcaaacaaaagggaaaaggggagcaaagggaaaacaggccgaagtggctaaccaagaaactaaagaagacttacctgcggaaaacggggaaacgaagactgaggagagtccagcctctgatgaagcaggagagaaagaagccaagtctgattaataaccatataccatgtcttatcagtggtccctgtctcccttcttgtacaatccagaggaatatttttatcaactattttgtaaatgcaagttttttagtagctctagaaacatttttaagaaggagggaatcccacctcatcccattttttaagtgtaaatgcttttttttaagaggtgaaatcatttgctggttgtttattttttggtacaaccagaaaatagtgtgggatattgaattatgggaggctctgactgtctcgggtgtcagcttaacattccacagatggggggttagtttttatatcctataatacaaagcatattaaatggcaatatggagtcagtcctgcatttaatgtcttgaacattttaaattacttctattaccatgttgttttttagtagaattgtttcctaaagaaaaccactctttgatcatggctctctctgccagaattgtgtgcactctgtaacatctttgtggtagtcctgttttcctaataactttgttactgtgctgtgaaagattacagatttgaacatgtagtgtacgtgctgttgagttgtgaactggtgggccgtatgtaacagctgaccaacgtgaagatactggtacttgatagcctcttaaggaaaatttgcttccaaattttaagctggaaagtcactggaataactttaaaaaagaattacaatacatggctttttagaatttcgttacgtatgttaagatttgtgtacaaattgaaatgtctgtactgatcctcaaccaataaaatctcagttatgaaaata

SEQ ID NO: 140781 - DNA, 1552 bp, Homo sapiens
  Payload ID: 7609
  Gene Symbol: HMGN1
  Gene Name: high mobility group nucleosome binding domain 1
  ENST ID: ENST00000431390
  CDS Start-End: 224-361
cccgcggccggggacgcggggggaggaggaggcgggctcccaatccggttccatccggttctcccaccgcccccgctgtgggtctcagcagctcgggcggcgggaggagtggcagcggcaaggcagcccagtttcgcgaaggctgtcggcgcgccgcggcccgcaggcacccggcacgcgccttccccgcaggcacccggcacgcgccttccccgccgccacgatgcccaagaggaaggtcagctccgccgaaggcgccgccaaggaagagcccaagaggagatcggcgcggttgtcagctaaacctcctgcaaaagtggaagcgaagccgaaaaaggcagcagcgaaggtagaagtttagcactgcagtcatcagaagaggcaagattaatttccttgacattgaggagttgttggataattactaaatttgtccttgttaaataaagattcttcaaacacctaaatgaaagtgataaattcaaaactgatccttttagttcctcattatatgatatgaagggattaactgtagcaggatagtcaacctgaccgtacggcatggtgctttttttcaggataaatcttcagacaaaaaagtgcaaacaaaagggaaaaggggagcaaagggaaaacaggccgaagtggctaaccaagaaactaaagaagacttacctgcggaaaacggggaaacgaagactgaggagagtccagcctctgatgaagcaggagagaaagaagccaagtctgattaataaccatataccatgtcttatcagtggtccctgtctcccttcttgtacaatccagaggaatatttttatcaactattttgtaaatgcaagttttttagtagctctagaaacatttttaagaaggagggaatcccacctcatcccattttttaagtgtaaatgcttttttttaagaggtgaaatcatttgctggttgtttattttttggtacaaccagaaaatagtgtgggatattgaattatgggaggctctgactgtctcgggtgtcagcttaacattccacagatggggggttagtttttatatcctataatacaaagcatattaaatggcaatatggagtcagtcctgcatttaatgtcttgaacattttaaattacttctattaccatgttgttttttagtagaattgtttcctaaagaaaaccactctttgatcatggctctctctgccagaattgtgtgcactctgtaacatctttgtggtagtcctgttttcctaataactttgttactgtgctgtgaaagattacagatttgaacatgtagtgtacgtgctgttgagttgtgaactggtgggccgtatgtaacagctgaccaacgtgaagatactggtacttgatagcctcttaaggaaaatttgcttccaaattttaagctggaaagtcactggaataactttaaaaaagaattacaatacatggctttttagaatttcgttacgtatgttaagatttgtgtacaaattgaaatgtctgtactgatcctcaaccaataaaatctcagttatgaaaata

SEQ ID NO: 140782 - DNA, 823 bp, Homo sapiens
  Payload ID: 7609
  Gene Symbol: HMGN1
  Gene Name: high mobility group nucleosome binding domain 1
  ENST ID: ENST00000443046
  CDS Start-End: 138-272
agcagctcgggcggcgggaggagtggcagcggcaaggcagcccagtttcgcgaaggctgtcggcgcgccgcggcccgcaggcacccggcacgcgccttccccgcaggcacccggcacgcgccttccccgccgccacgatgcccaagaggaaggtcagctccgccgaaggcgccgccaaggaagagcccaagaggagatcggcgcggttgtcagctaaacctcctgcaaaagtggaagcgaagccgaaaaaggcagcagcgaagtgtaggtagaagtttagcactgcagtcatcagaagaggcaagattaatttccttgacattgaggagttgttggataattactaaatttgtccttgttaaataaagaaagttctgtttttgtgatccttttaaaaataaagcttcacggaagattcttcaaacacctaaatgaaagtgataaattcaaaactgatccttttagttcctcattatatgatatgaagggattaactgtagcaggatagtcaacctgaccgtacggcatggtgctttttttcaggataaatcttcagacaaaaaagtgcaaacaaaagggaaaaggggagcaaagggaaaacaggccgaagtggctaaccaagaaactaaagaagacttacctgcggaaaacggggaaacgaagactgaggagagtccagcctctgatgaagcaggagagaaagaagccaagtctgattaataaccatataccatgtcttatcagtggtccctgtctcccttcttgtacaatccagaggaatatttttatcaactattttgtaaatgcaagttttttagtagct

SEQ ID NO: 140783 - DNA, 850 bp, Homo sapiens
  Payload ID: 7609
  Gene Symbol: HMGN1
  Gene Name: high mobility group nucleosome binding domain 1
  ENST ID: ENST00000419378
  CDS Start-End: 124-261
cgggaggagtggcagcggcaaggcagcccagtttcgcgaaggctgtcggcgcgccgcggcccgcaggcacccggcacgcgccttccccgcaggcacccggcacgcgccttccccgccgccacgatgcccaagaggaaggtcagctccgccgaaggcgccgccaaggaagagcccaagaggagatcggcgcggttgtcagctaaacctcctgcaaaagtggaagcgaagccgaaaaaggcagcagcgaaggtagaagtttagcactgcagtcatcagaagaggcaagattaatttccttgacattgaggagttgttggataattactaaatttgtccttgttaaataaaggataaatcttcagacaaaaaagtgcaaacaaaagggaaaaggggagcaaagggaaaacaggccgaagtggctaaccaagaaactaaagaagacttacctgcggaaaacggggaaacgaagactgaggagagtccagcctctgatgaagcaggagagaaagaagccaagtctgattaataaccatataccatgtcttatcagtggtccctgtctcccttcttgtacaatccagaggaatatttttatcaactattttgtaaatgcaagttttttagtagctctagaaacatttttaagaaggagggaatcccacctcatcccattttttaagtgtaaatgcttttttttaagaggtgaaatcatttgctggttgtttattttttggtacaaccagaaaatagtgtgggatattgaattatgggaggctctgactgtctcgggtgtcagcttaacattccacagatggggggttagtttttatatcctataatacaaagcata

SEQ ID NO: 140784 - DNA, 1045 bp, Homo sapiens
  Payload ID: 7609
  Gene Symbol: HMGN1
  Gene Name: high mobility group nucleosome binding domain 1
  ENST ID: ENST00000436324
  CDS Start-End: 172-306
atccggttctcccaccgcccccgctgtgggtctcagcagctcgggcggcgggaggagtggcagcggcaaggcagcccagtttcgcgaaggctgtcggcgcgccgcggcccgcaggcacccggcacgcgccttccccgcaggcacccggcacgcgccttccccgccgccacgatgcccaagaggaaggtcagctccgccgaaggcgccgccaaggaagagcccaagaggagatcggcgcggttgtcagctaaacctcctgcaaaagtggaagcgaagccgaaaaaggcagcagcgaagtgtaggtagaagtttagcactgcagtcatcagaagaggcaagattaatttccttgacattgaggagttgttggataattactaaatttgtccttgttaaataaaggataaatcttcagacaaaaaagtgcaaacaaaagggaaaaggggagcaaagggaaaacaggccgaagtggctaaccaagaaactaaagaagacttacctgcggaaaacggggaaacgaagactgaggagagtccagcctctgatgaagcaggagagaaagaagccaagtctgattaataaccatataccatgtcttatcagtggtccctgtctcccttcttgtacaatccagaggaatatttttatcaactattttgtaaatgcaagttttttagtagctctagaaacatttttaagaaggagggaatcccacctcatcccattttttaagtgtaaatgcttttttttaagaggtgaaatcatttgctggttgtttattttttggtacaaccagaaaatagtgtgggatattgaattatgggaggctctgactgtctcgggtgtcagcttaacattccacagatggggggttagtttttatatcctataatacaaagcatattaaatggcaatatggagtcagtcctgcatttaatgtcttgaacattttaaattacttctattaccatgttgttttttagtagaattgtttcctaaagaaaaccactctttgatcatggctctctctgccagaattgtgtgc

SEQ ID NO: 140785 - DNA, 2126 bp, Homo sapiens
  Payload ID: 7610
  Gene Symbol: HMGN5
  Gene Name: high mobility group nucleosome binding domain 5
  Uniprot ID: P82970
  ENST ID: ENST00000358130
  CDS Start-End: 330-1178
aatagcaccgcgagatctgttgaaacattgatttttgacgattccttccctgagaagagggcgaggagaagaagaaagaaaaaggagaactgaattgaattagattagcatgaaggaccttttcacgcggagactaaaagtactgcgcataacttcctgctcagaaatatatgcaaataagaagacagatcctgaaagagcaagctaggagagtacaggtcgtgctgcagttagttcattgaaaactcatttgctcttggagcagtcaggcagtgactgccttcggctttttttctgctgactaagatctcctatagagagctacaacaatgcccaaaagaaaggctgcaggtcaaggtgatatgaggcaggagccaaagagaagatctgccaggttgtctgctatgcttgtgccagttacaccagaggtgaagcctaaaagaacatcaagttcaaggaaaatgaagacaaaaagtgatatgatggaagaaaacatagatacaagtgcccaagcagttgctgaaaccaagcaagaagcagttgttgaagaagactacaatgaaaatgctaaaaatggagaagccaaaattacagaggcaccagcttctgaaaaagaaattgtggaagtaaaagaagaaaatattgaagatgccacagaaaagggaggagaaaagaaagaagcagtggcagcagaagtaaaaaatgaagaagaagatcagaaagaagatgaagaagatcaaaacgaagagaaaggggaagctggaaaagaagacaaagatgaaaaaggggaagaagatggaaaagaggataaaaatggaaatgagaaaggagaagatgcaaaagagaaagaagatggaaaaaaaggtgaagacggaaaaggaaatggagaagatggaaaagagaaaggagaagatgaaaaagaggaagaagacagaaaagaaacaggagatggaaaagagaatgaagatggaaaagagaagggagataaaaaagaggggaaagatgtaaaagtcaaagaagatgaaaaagagagagaagatggaaaagaagatgaaggtggaaatgaggaagaagctggaaaagagaaagaagatttaaaagaagaggaagaaggaaaagaggaagatgagatcaaagaagatgatggaaaaaaagaggagccacagagtattgtttaaaactgccctatgtagtttcataatttggtaacatgtaccttcatgttgtaaagttaatagagataaatatttttatcaaaaattttataaacacagcctttctttagcattgatttaatttcagaacatcttcatattgattattagccataaagtttctaacatgaaacatttatctataaattttgtgattatagtagtggaatacatagaaaaaaatatgctttcaactttgtgagtgaatttcgtgttgtgtaagttatatgtcaaatctttgaattttaattttactcttttatacatgtgataatttcataaagtgagggatcccaaaaaaagagtttcatccaacattcttgttctgcaggttgcttttataaagaaggtgaactattttcatgtaatgttaagagttaaacttatctttcccaaatataactttattattagcttgggaaaaatgaaattgtattcccatttttaaaataaatacaaatgtttatttcagaagggcagttttgattatatgtgaatacacaaattttactggatttatcttaataaaaagactctgacgatgattgtgttttgttatatcttcaaaaatatagctagtgaaatattgtgcttaatttttttctattgtgttattcatgaaaatatttaatattcactgacataaaattaatataaagtaaaattcaccattttaattataataaaaataaagtatataattcaatggttgtcagtatattcacaatgttgtgtccactgtttaattccagagaatttttatcacccaaataagaaacaaagcaccaattagcagtctcttcccattttcgcccaacttatcccccacctccatcccttggcaaccactaatctgccttctatctctatggatttgcctattctgaacatttattataaatggaatcacat

SEQ ID NO: 140786 - DNA, 572 bp, Homo sapiens
  Payload ID: 7610
  Gene Symbol: HMGN5
  Gene Name: high mobility group nucleosome binding domain 5
  ENST ID: ENST00000373250
  CDS Start-End: 90-572
gaaaactcatttgctcttggagcagtcaggcagtgactgccttcggctttttttctgctgactaagatctcctatagagagctacaacaatgcccaaaagaaagccaaagagaagatctgccaggttgtctgctatgcttgtgccagttacaccagaggtgaagcctaaaagaacatcaagttcaaggaaaatgaagacaaaaagtgatatgatggaagaaaacatagatacaagtgcccaagcagttgctgaaaccaagcaagaagcagttgttgaagaagactacaatgaaaatgctaaaaatggagaagccaaaattacagaggcaccagcttctgaaaaagaaattgtggaagtaaaagaagaaaatattgaagatgccacagaaaagggaggagaaaagaaagaagcagtggcagcagaagtaaaaaatgaagaagaagatcagaaagaagatgaagaagatcaaaacgaagagaaaggggaagctggaaaagaagacaaagatgaaaaaggggaagaagatggaaaagaggataaaaatggaaatgagaaaggagaagatgcaaaa

SEQ ID NO: 140787 - DNA, 578 bp, Homo sapiens
  Payload ID: 7610
  Gene Symbol: HMGN5
  Gene Name: high mobility group nucleosome binding domain 5
  ENST ID: ENST00000430960
  CDS Start-End: 135-578
tttttttccagaggagagtacaggtcgtgctgcagttagttcattgaaaactcatttgctcttggagcagtcaggcagtgactgccttcggctttttttctgctgactaagatctcctatagagagctacaacaatgcccaaaagaaaggctgcaggtcaaggtgatatgaggcaggagccaaagagaagatctgccaggttgtctgctatgcttgtgccagttacaccagaggtgaagcctaaaagaacatcaagttcaaggaaaatgaagacaaaaagtgatatgatggaagaaaacatagatacaagtgcccaagcagttgctgaaaccaagcaagaagcagttgttgaagaagactacaatgaaaatgctaaaaatggagaagccaaaattacagaggcaccagcttctgaaaaagaaattgtggaagtaaaagaagaaaatattgaagatgccacagaaaagggaggagaaaagaaagaagcagtggcagcagaagtaaaaaatgaagaagaagatcagaaagaagatgaagaagatcaaaacgaagagaaaggggaagctggaaaagaagac

SEQ ID NO: 140788 - DNA, 720 bp, Homo sapiens
  Payload ID: 7610
  Gene Symbol: HMGN5
  Gene Name: high mobility group nucleosome binding domain 5
  ENST ID: ENST00000451455
  CDS Start-End: 454-720
gagggcgaggagaagaagaaagaaaaaggagaactgaattgaattagattagcatgaaggaccttttcacgcggagactaaaagtactgcgcataacttcctgctcagaaatatatgcaaataagaagacagatcctgaaagagcaagctatgcttcctgcccttgaacattggaatacaagttcttcagctttgggactcttggaccttcgaccacagactgaaggctgcactgtcggcttccctatttttgaggttttggaacttggactggctttcttgctcctcagcttgcagacagcctaatgtgggacttcatcttgtgatcgtaggagagtacaggtcgtgctgcagttagttcattgaaaactcatttgctcttggagcagtcaggcagtgactgccttcggctttttttctgctgactaagatctcctatagagagctacaacaatgcccaaaagaaaggctgcaggtcaaggtgatatgaggcaggagccaaagagaagatctgccaggttgtctgctatgcttgtgccagttacaccagaggtgaagcctaaaagaacatcaagttcaaggaaaatgaagacaaaaagtgatatgatggaagaaaacatagatacaagtgcccaagcagttgctgaaaccaagcaagaagcagttgttgaagaagactacaatgaaaatgctaaaaatggagaagccaaaattacagag

SEQ ID NO: 140789 - DNA, 742 bp, Homo sapiens
  Payload ID: 7610
  Gene Symbol: HMGN5
  Gene Name: high mobility group nucleosome binding domain 5
  ENST ID: ENST00000447319
  CDS Start-End: 140-742
ttttttttttttccagaggagagtacaggtcgtgctgcagttagttcattgaaaactcatttgctcttggagcagtcaggcagtgactgccttcggctttttttctgctgactaagatctcctatagagagctacaacaatgcccaaaagaaagatgcttgtgccagttacaccagaggtgaagcctaaaagaacatcaagttcaaggaaaatgaagacaaaaagtgatatgatggaagaaaacatagatacaagtgcccaagcagttgctgaaaccaagcaagaagcagttgttgaagaagactacaatgaaaatgctaaaaatggagaagccaaaattacagaggcaccagcttctgaaaaagaaattgtggaagtaaaagaagaaaatattgaagatgccacagaaaagggaggagaaaagaaagaagcagtggcagcagaagtaaaaaatgaagaagaagatcagaaagaagatgaagaagatcaaaacgaagagaaaggggaagctggaaaagaagacaaagatgaaaaaggggaagaagatggaaaagaggataaaaatggaaatgagaaaggagaagatgcaaaagagaaagaagatggaaaaaaaggtgaagacggaaaaggaaatggagaagatggaaaagagaaaggagaagatgaaaaagaggaagaagacagaaaagaaacaggagatggaaaagagaatgaagatggaaaagagaagggagataaaaaa

SEQ ID NO: 140790 - DNA, 859 bp, Homo sapiens
  Payload ID: 7610
  Gene Symbol: HMGN5
  Gene Name: high mobility group nucleosome binding domain 5
  ENST ID: ENST00000436386
  CDS Start-End: 554-859
gatttttgacgattccttccctgagaagagggcgaggagaagaagaaagaaaaaggagaactgaattgaattagattagcatgaaggaccttttcacgcggagactaaaagtactgcgcataacttcctgctcagaaatatatgcaaataagaagacagatcctgaaagagcaagcttatgacatccctttcccttctcaagtggacactgctatgctctcacccctcactcagaactaagagtctccagatgcttcctgcccttgaacattggaatacaagttcttcagctttgggactcttggaccttcgaccacagactgaaggctgcactgtcggcttccctatttttgaggttttggaacttggactggctttcttgctcctcagcttgcagacagcctaatgtgggacttcatcttgtgatcgtaggagagtacaggtcgtgctgcagttagttcattgaaaactcatttgctcttggagcagtcaggcagtgactgccttcggctttttttctgctgactaagatctcctatagagagctacaacaatgcccaaaagaaaggctgcaggtcaaggtgatatgaggcaggagccaaagagaagatctgccaggttgtctgctatgcttgtgccagttacaccagaggtgaagcctaaaagaacatcaagttcaaggaaaatgaagacaaaaagtgatatgatggaagaaaacatagatacaagtgcccaagcagttgctgaaaccaagcaagaagcagttgttgaagaagactacaatgaaaatgctaaaaatggagaagccaaaattacagaggcaccagcttctgaaaaagaaattgtggaagtaaaagaa

SEQ ID NO: 140791 - DNA, 6200 bp, Homo sapiens
  Payload ID: 7611
  Gene Symbol: HDX
  Gene Name: highly divergent homeobox
  Uniprot ID: Q7Z353
  ENST ID: ENST00000297977
  CDS Start-End: 113-2185
attgtctgaagcggcactggagacccaggaaaaatctcgctgaatccgcctgccccagcagcggcctgatctgggttccgctgattcctttcgtaaccgcaccacacccgagatgaatctacgttctgtatttactgtagaacaacaaaggattttacagcgttattatgaaaatggaatgacaaatcaaagtaaaaattgctttcagctcatattacagtgtgcacaggagactaagctggacttcagtgtagtcaggacgtgggttggcaataagagaagaaagatgagtagtaagaactctgaatctggaacagcaacaacaggaacctctttgtcagctccagacatcacagtcagaaatgtggttaatattgctcgaccctcaagccagcagtcttcttggacatctgccaataatgatgtcattgtaactggtatatacagtccagccagttcatcaagtaggcaaggaacaaacaaacatacagacacacaaattacagaagcacataaaatccctattcagaaaacagccactaaaaatgatactgagtttcagttacacattcctgtccaaagacaagtagcacactgtaaaaatgcttccctactcctaggtgaaaaaacaattattttgtcaagacagacaagtgtgctaaatgctggaaactcagtattcaatcacgcaaagaaaaactatggaaactcttcagtacaagcttctgaaatgacagtacctcaaaagccttctgtgtgccaccgaccttgtaaaattgaaccagttgggattcaaaggtcatataagcctgaacacacaggcccagcattacataacttatgtgggcaaaagccaactattagagacccttactgtagaacacaaaacttggaaatccgtgaagtgttttcattggcagttagcgattacccccagagaattctgggaggaaatgccccacagaagcctagctcagcagaaggaaattgtttgtccattgcaatggagactggagatgctgaggatgaatatgccagagaggaagagctggcatcgatgagagcacagataccaagctattcgagattttatgaaagtggcagttcccttcgagctgagaaccaaagtacaaccttgcccggaccaggaagaaatatgccaaattcacaaatggtgaatattagagatatgtcagacaatgtactgtatcaaaacagaaactaccatttgacaccacggacctcattacatacagcatctagtacaatgtacagtaataccaatccattacggagtaatttttctcctcattttgcatcatcaaaccaattgagattatcacaaaaccaaaacaattaccagatttcaggaaaccttactgtgccttggattacagggtgttctagaaaaagagcactacaggaccgcactcagttcagtgaccgagacttagccacccttaagaagtattgggacaatggcatgaccagcctgggctctgtttgtagagagaaaattgaagctgtggcaactgaattaaatgttgactgtgaaatagttcggacttggattgggaatcgaagaaggaaatatcgtttaatggggattgaagttccacctccaagaggaggccctgctgatttctctgagcagcctgagtctggttctttatctgcactcacaccaggagaggaagctgggcctgaagtaggagaggataatgacagaaatgatgaagtatccatctgtttgtctgaaggaagctctcaagaagagcccaatgaagttgttccgaatgatgcaagggctcataaggaagaggaccaccatgcagtaaccacagataatgtgaaaatagaaattattgatgatgaagaaagtgacatgataagtaattctgaagtagaacaagtaaactctttcttggattataagaatgaagaagtcaaattcattgaaaatgagctcgagattcaaaagcaaaaatactttaaacttcagacttttgttagaagcttgatattagcaatgaaagctgatgataaggaacaacagcaggcactgctgtcagatttacctcctgaattagaggaaatggatttcaatcatgcctcactggagcctgatgatacctcattcagtgtatcttctttgtcagagaaaaatgtctcagaaagtttgtgatttcagttggagggaatatatgatacagtcttttggcttcgtaacaggtgtgcatttcaagataactgcattctgttgccctggtattctttagttgggaaaacacattgttgaaacggacgtattctgtgaagaatgtacaagatataatggctacagtgcaacaaaaatgtaggtgaaatttaaaagcattgtttgagagagtatttttttaactgatggaactctggaaaaaaattatatttaagtttcagcagtttaaccctgaaattcattatgtctaatttctaaccagagacaaaataactaaagacatttcagcattgcttatcaagttgctacagcttgattagtcttgtttttgtagccattacatcttctttcttcttctctccttttcctatcatccacttacactttttctcaggaaagtggactgaacatttaaaacaaaactttaaaaaattatttaactcattatttaatgagttctctgatttagtttttaacccctatgaaaatttgacttaaactaatgactgaaaattaaatgattacaggtatgtaattgtaaattgctggtgttcttctattatctaacccaaatatttgtgtgggggtggggaagcacaatggaaaggtaatttaaccaacataacgtcaaataaattacgaagtgtacagaaacaaaatgttgtcaaaattagtcttgatggggattcttcattactacaaatgacaagtattgatacgattgacattccagtagtaaatttgtatacctgggttagatgaagtgttacacaaatattttaaatttatcaccatctttataattcttttttagttcttacatgttatgaaacaggaagtcaaggtaagctgctgagattttttaaaaatttagtcattcagctttgccacaaaatttacctcatttccatatgaggcctgtacagagccatcagccaaggatagtattcaaaaagagttatactactttggttgtaaatcacagtcttctgaattccatgaatactattctatgagtacacacctaaaatgggcaagctacccagttttctattattagtaggtaccagatggcaacacactgtagactgttctttgtagttcttcctttctggagtaccagatggtattaccaagacccatagaagaaaaaatgtcagtttctccctaagcccacagtgtcatatatttgtgacttggcagtgtgcaattgtgttgcatggttaaattactatctatacctaaaagattaatgaagtagctggatggctgtttcagccatcaagtttctgtttccaatttgtttttaatttttgttggtacctagtaggtattcagatatttttaaaaatttgtaattagagccaaatttgatcttgaaatttactagtactaacttatgaacacagaaaggcagtcataaatgtctttacccttgaagtgtcccatcctcccacacacacaaataggtaagctcccactgatagtctttcattttgtcacttatttgtttatattgctgccatactactgatatggtccctttgttagtaggaatatttcagtgttcagatatgcttccttgagccatatggagttttgcaaacaatagttagtttttcttgctgacaagtcaaattccattcagagaaagcagcagagagtaacagagcctcagatattacgattaaatgtaccagtcacaccaactcctccatgagatgaagagtcgcccccatatacaacgaagttagaaaccacttattaagtagcatgaacaaattccaggccttcaagtctctcctagggtctgcttcatagtcattgagtttatctttcaaatataattacttctgcttcaatttaagccccttcttatttggttctcattgcaaattaactataggtatattctctcctacagcttttaacactatagattttatttgtcacgcatcagccattagtcactaaatcgaaaaatacttgttgagctcctgctatagagaagacactgtgctggacattggatttctcagcaagctgtaaacatcacaaataattatttctttttaacatcttctatgatattaataaaccatatttaagtagaatttttaatagatttaaggttctgctaggtgtgattcttagaaggattcctagtccacaattttgagagaaagcatagatgatctttttgtctctgtttaacatttcatcaaaatagaaactatataaatcataacaatacatttagaactccttttgtcttgaaatttgtgtttcagcaccagaatatttttcttcaccatcattggaattaaaacacttctaaaatgaaatgtggctattctgtagcaggaactgaaggaaatacctctatctatagaaaaagaatcataattgccagattgaaattattcatggtagactttgaaaaagatgtcaaggtcaagctttgaaaagttgttatgaagaaagtatattttttacatatgtagataggagttggttttgagatatgttagagcaggaaaaattatcagcttataattactcttgtggacatcttcatggctggggataaaaattaactaactagtgtttctttctttagggctttgagattattaaaacagaccttactatctgaaggctctctcagggagacagaagccaatgtggaaaaaaacaaaaaacaaaaaacaacaacaagaaaaaacttctttttttctttcaactacatttctatgtctgctttaagcttagaacagccaagcagtttttaagccagaaatgtgtatgtaagagcacttaccttccaaaatgtgtacatatgaaaaaaaaaggaaggtattttcttcttttcagccaagctaaacttattcacaagaaaatgagaattgcaattgctctggagaataggaaaattagcacatgcaaagaaaaccttaaaagaaaattggcctcttcatggaaactggggatgttttgtcctaaggtcagttatcaacagcaggatttttgtattgccattgcaagcatgtgatagaaatgtttgttattgttggagaagaaaaggctgagacccaattataccctgtactctttattcgaccaagacctcaaaagatgtcaaagaagccatttctccaaagacagcaacatctattgtgaggcactttcatattcagcagtctgtaagtttgtaggagaaaacataagtggttaatttaaaataattttgggctctaaaatggactttgttgccttttttggtgggggtggtgggaatcggattcagcccatttccaagggatagtttcttcatctcagacaactattttgtgatcctttttaaaagacattctgaaaactttaactcctgcccttcttccgtattacagttgtgttattccagaaatattgtctacttttttaatatattagattttcattcagatcttaaacatgcaaacatgtgataggttagctttttaagggagttatcagtaccactgtatctaaatgttaggtaaatgggtagatttctctttgaagttggtattttccttggcagacagcactgtatcatgctcttcaccaagctatgctctgtaatgctataatcaaggaggctactaacttgtgaacctacagtcaacacaccattgctgaaaacaaactttgattaagaacagatttgctagggggaaaaaagagtaaagtgatattttcaagcaaatataattaaaattgtttcattaaaatatatactgagtgtatattgctccacactgaaattttattttgcattaacttgttaagtaattcattttagcaatcctgcatcccattttactagtactacctctgaaatatactgtcaccttaaaaccacatcagactgtaatgtgaatttttgtagagtttttatttaaacttttatagaggcaataaatgatttccaactaataga

SEQ ID NO: 140792 - DNA, 2924 bp, Homo sapiens
  Payload ID: 7611
  Gene Symbol: HDX
  Gene Name: highly divergent homeobox
  Uniprot ID: Q7Z353
  ENST ID: ENST00000373177
  CDS Start-End: 160-2232
ggcctgatctgggttccgctgattcctttcgtaaccgcaccacacccgagctacaatctctggacaaaattttaagagaaactccctcagaactcctaaaggtaaacaaaagcaggcagattgaggatggcagtcagaatatgaagtgaccatatatggatgaatctacgttctgtatttactgtagaacaacaaaggattttacagcgttattatgaaaatggaatgacaaatcaaagtaaaaattgctttcagctcatattacagtgtgcacaggagactaagctggacttcagtgtagtcaggacgtgggttggcaataagagaagaaagatgagtagtaagaactctgaatctggaacagcaacaacaggaacctctttgtcagctccagacatcacagtcagaaatgtggttaatattgctcgaccctcaagccagcagtcttcttggacatctgccaataatgatgtcattgtaactggtatatacagtccagccagttcatcaagtaggcaaggaacaaacaaacatacagacacacaaattacagaagcacataaaatccctattcagaaaacagccactaaaaatgatactgagtttcagttacacattcctgtccaaagacaagtagcacactgtaaaaatgcttccctactcctaggtgaaaaaacaattattttgtcaagacagacaagtgtgctaaatgctggaaactcagtattcaatcacgcaaagaaaaactatggaaactcttcagtacaagcttctgaaatgacagtacctcaaaagccttctgtgtgccaccgaccttgtaaaattgaaccagttgggattcaaaggtcatataagcctgaacacacaggcccagcattacataacttatgtgggcaaaagccaactattagagacccttactgtagaacacaaaacttggaaatccgtgaagtgttttcattggcagttagcgattacccccagagaattctgggaggaaatgccccacagaagcctagctcagcagaaggaaattgtttgtccattgcaatggagactggagatgctgaggatgaatatgccagagaggaagagctggcatcgatgagagcacagataccaagctattcgagattttatgaaagtggcagttcccttcgagctgagaaccaaagtacaaccttgcccggaccaggaagaaatatgccaaattcacaaatggtgaatattagagatatgtcagacaatgtactgtatcaaaacagaaactaccatttgacaccacggacctcattacatacagcatctagtacaatgtacagtaataccaatccattacggagtaatttttctcctcattttgcatcatcaaaccaattgagattatcacaaaaccaaaacaattaccagatttcaggaaaccttactgtgccttggattacagggtgttctagaaaaagagcactacaggaccgcactcagttcagtgaccgagacttagccacccttaagaagtattgggacaatggcatgaccagcctgggctctgtttgtagagagaaaattgaagctgtggcaactgaattaaatgttgactgtgaaatagttcggacttggattgggaatcgaagaaggaaatatcgtttaatggggattgaagttccacctccaagaggaggccctgctgatttctctgagcagcctgagtctggttctttatctgcactcacaccaggagaggaagctgggcctgaagtaggagaggataatgacagaaatgatgaagtatccatctgtttgtctgaaggaagctctcaagaagagcccaatgaagttgttccgaatgatgcaagggctcataaggaagaggaccaccatgcagtaaccacagataatgtgaaaatagaaattattgatgatgaagaaagtgacatgataagtaattctgaagtagaacaagtaaactctttcttggattataagaatgaagaagtcaaattcattgaaaatgagctcgagattcaaaagcaaaaatactttaaacttcagacttttgttagaagcttgatattagcaatgaaagctgatgataaggaacaacagcaggcactgctgtcagatttacctcctgaattagaggaaatggatttcaatcatgcctcactggagcctgatgatacctcattcagtgtatcttctttgtcagagaaaaatgtctcagaaagtttgtgatttcagttggagggaatatatgatacagtcttttggcttcgtaacaggtgtgcatttcaagataactgcattctgttgccctggtattctttagttgggaaaacacattgttgaaacggacgtattctgtgaagaatgtacaagatataatggctacagtgcaacaaaaatgtaggtgaaatttaaaagcattgtttgagagagtatttttttaactgatggaactctggaaaaaaattatatttaagtttcagcagtttaaccctgaaattcattatgtctaatttctaaccagagacaaaataactaaagacatttcagcattgcttatcaagttgctacagcttgattagtcttgtttttgtagccattacatcttctttcttcttctctccttttcctatcatccacttacactttttctcaggaaagtggactgaacatttaaaacaaaactttaaaaaattatttaactcattatttaatgagttctctgatttagtttttaacccctatgaaaatttgacttaaactaatgactgaaaattaaatgattacaggtatgtaattgtaaattgctggtgttcttctattatctaacccaaatatttgtgtgggggtggggaagcacaatggaaaggtaatttaaccaacataacgtcaaataaattacgaagtgtacagaaacaaaa

SEQ ID NO: 140793 - DNA, 786 bp, Homo sapiens
  Payload ID: 7611
  Gene Symbol: HDX
  Gene Name: highly divergent homeobox
  ENST ID: ENST00000449553
  CDS Start-End: 166-786
aattgatgatcggacacgctgatttcattgtctgaagcggcactggagacccaggaaaaatctcgctgaatccgcctgccccagcagcggcctgatctgggttccgctgattcctttcgtaaccgcaccacacccgagacgtgggttggcaataagagaagaaagatgagtagtaagaactctgaatctggaacagcaacaacaggaacctctttgtcagctccagacatcacagtcagaaatgtggttaatattgctcgaccctcaagccagcagtcttcttggacatctgccaataatgatgtcattgtaactggtatatacagtccagccagttcatcaagtaggcaaggaacaaacaaacatacagacacacaaattacagaagcacataaaatccctattcagaaaacagccactaaaaatgatactgagtttcagttacacattcctgtccaaagacaagtagcacactgtaaaaatgcttccctactcctaggtgaaaaaacaattattttgtcaagacagacaagtgtgctaaatgctggaaactcagtattcaatcacgcaaagaaaaactatggaaactcttcagtacaagcttctgaaatgacagtacctcaaaagccttctgtgtgccaccgaccttgtaaaattgaaccagttgggattcaaaggtcatataagcctgaacacacaggcccagcattacataacttatgtgggcaaaagccaactattagagacccttactgtagaacacaaaacttggaaatccgtgaagtg

SEQ ID NO: 140794 - DNA, 6158 bp, Homo sapiens
  Payload ID: 7611
  Gene Symbol: HDX
  Gene Name: highly divergent homeobox
  Uniprot ID: Q7Z353
  ENST ID: ENST00000506585
  CDS Start-End: 249-2147
attgtctgaagcggcactggagacccaggaaaaatctcgctgaatccgcctgccccagcagcggcctgatctgggttccgctgattcctttcgtaaccgcaccacacccgagctacaatctctggacaaaattttaagagaaactccctcagaactcctaaaggtaaacaaaagcaggcagattgaggatggcagtcagaatatgaagtgaccatatatggacgtgggttggcaataagagaagaaagatgagtagtaagaactctgaatctggaacagcaacaacaggaacctctttgtcagctccagacatcacagtcagaaatgtggttaatattgctcgaccctcaagccagcagtcttcttggacatctgccaataatgatgtcattgtaactggtatatacagtccagccagttcatcaagtaggcaaggaacaaacaaacatacagacacacaaattacagaagcacataaaatccctattcagaaaacagccactaaaaatgatactgagtttcagttacacattcctgtccaaagacaagtagcacactgtaaaaatgcttccctactcctaggtgaaaaaacaattattttgtcaagacagacaagtgtgctaaatgctggaaactcagtattcaatcacgcaaagaaaaactatggaaactcttcagtacaagcttctgaaatgacagtacctcaaaagccttctgtgtgccaccgaccttgtaaaattgaaccagttgggattcaaaggtcatataagcctgaacacacaggcccagcattacataacttatgtgggcaaaagccaactattagagacccttactgtagaacacaaaacttggaaatccgtgaagtgttttcattggcagttagcgattacccccagagaattctgggaggaaatgccccacagaagcctagctcagcagaaggaaattgtttgtccattgcaatggagactggagatgctgaggatgaatatgccagagaggaagagctggcatcgatgagagcacagataccaagctattcgagattttatgaaagtggcagttcccttcgagctgagaaccaaagtacaaccttgcccggaccaggaagaaatatgccaaattcacaaatggtgaatattagagatatgtcagacaatgtactgtatcaaaacagaaactaccatttgacaccacggacctcattacatacagcatctagtacaatgtacagtaataccaatccattacggagtaatttttctcctcattttgcatcatcaaaccaattgagattatcacaaaaccaaaacaattaccagatttcaggaaaccttactgtgccttggattacagggtgttctagaaaaagagcactacaggaccgcactcagttcagtgaccgagacttagccacccttaagaagtattgggacaatggcatgaccagcctgggctctgtttgtagagagaaaattgaagctgtggcaactgaattaaatgttgactgtgaaatagttcggacttggattgggaatcgaagaaggaaatatcgtttaatggggattgaagttccacctccaagaggaggccctgctgatttctctgagcagcctgagtctggttctttatctgcactcacaccaggagaggaagctgggcctgaagtaggagaggataatgacagaaatgatgaagtatccatctgtttgtctgaaggaagctctcaagaagagcccaatgaagttgttccgaatgatgcaagggctcataaggaagaggaccaccatgcagtaaccacagataatgtgaaaatagaaattattgatgatgaagaaagtgacatgataagtaattctgaagtagaacaagtaaactctttcttggattataagaatgaagaagtcaaattcattgaaaatgagctcgagattcaaaagcaaaaatactttaaacttcagacttttgttagaagcttgatattagcaatgaaagctgatgataaggaacaacagcaggcactgctgtcagatttacctcctgaattagaggaaatggatttcaatcatgcctcactggagcctgatgatacctcattcagtgtatcttctttgtcagagaaaaatgtctcagaaagtttgtgatttcagttggagggaatatatgatacagtcttttggcttcgtaacaggtgtgcatttcaagataactgcattctgttgccctggtattctttagttgggaaaacacattgttgaaacggacgtattctgtgaagaatgtacaagatataatggctacagtgcaacaaaaatgtaggtgaaatttaaaagcattgtttgagagagtatttttttaactgatggaactctggaaaaaaattatatttaagtttcagcagtttaaccctgaaattcattatgtctaatttctaaccagagacaaaataactaaagacatttcagcattgcttatcaagttgctacagcttgattagtcttgtttttgtagccattacatcttctttcttcttctctccttttcctatcatccacttacactttttctcaggaaagtggactgaacatttaaaacaaaactttaaaaaattatttaactcattatttaatgagttctctgatttagtttttaacccctatgaaaatttgacttaaactaatgactgaaaattaaatgattacaggtatgtaattgtaaattgctggtgttcttctattatctaacccaaatatttgtgtgggggtggggaagcacaatggaaaggtaatttaaccaacataacgtcaaataaattacgaagtgtacagaaacaaaatgttgtcaaaattagtcttgatggggattcttcattactacaaatgacaagtattgatacgattgacattccagtagtaaatttgtatacctgggttagatgaagtgttacacaaatattttaaatttatcaccatctttataattcttttttagttcttacatgttatgaaacaggaagtcaaggtaagctgctgagattttttaaaaatttagtcattcagctttgccacaaaatttacctcatttccatatgaggcctgtacagagccatcagccaaggatagtattcaaaaagagttatactactttggttgtaaatcacagtcttctgaattccatgaatactattctatgagtacacacctaaaatgggcaagctacccagttttctattattagtaggtaccagatggcaacacactgtagactgttctttgtagttcttcctttctggagtaccagatggtattaccaagacccatagaagaaaaaatgtcagtttctccctaagcccacagtgtcatatatttgtgacttggcagtgtgcaattgtgttgcatggttaaattactatctatacctaaaagattaatgaagtagctggatggctgtttcagccatcaagtttctgtttccaatttgtttttaatttttgttggtacctagtaggtattcagatatttttaaaaatttgtaattagagccaaatttgatcttgaaatttactagtactaacttatgaacacagaaaggcagtcataaatgtctttacccttgaagtgtcccatcctcccacacacacaaataggtaagctcccactgatagtctttcattttgtcacttatttgtttatattgctgccatactactgatatggtccctttgttagtaggaatatttcagtgttcagatatgcttccttgagccatatggagttttgcaaacaatagttagtttttcttgctgacaagtcaaattccattcagagaaagcagcagagagtaacagagcctcagatattacgattaaatgtaccagtcacaccaactcctccatgagatgaagagtcgcccccatatacaacgaagttagaaaccacttattaagtagcatgaacaaattccaggccttcaagtctctcctagggtctgcttcatagtcattgagtttatctttcaaatataattacttctgcttcaatttaagccccttcttatttggttctcattgcaaattaactataggtatattctctcctacagcttttaacactatagattttatttgtcacgcatcagccattagtcactaaatcgaaaaatacttgttgagctcctgctatagagaagacactgtgctggacattggatttctcagcaagctgtaaacatcacaaataattatttctttttaacatcttctatgatattaataaaccatatttaagtagaatttttaatagatttaaggttctgctaggtgtgattcttagaaggattcctagtccacaattttgagagaaagcatagatgatctttttgtctctgtttaacatttcatcaaaatagaaactatataaatcataacaatacatttagaactccttttgtcttgaaatttgtgtttcagcaccagaatatttttcttcaccatcattggaattaaaacacttctaaaatgaaatgtggctattctgtagcaggaactgaaggaaatacctctatctatagaaaaagaatcataattgccagattgaaattattcatggtagactttgaaaaagatgtcaaggtcaagctttgaaaagttgttatgaagaaagtatattttttacatatgtagataggagttggttttgagatatgttagagcaggaaaaattatcagcttataattactcttgtggacatcttcatggctggggataaaaattaactaactagtgtttctttctttagggctttgagattattaaaacagaccttactatctgaaggctctctcagggagacagaagccaatgtggaaaaaaacaaaaaacaaaaaacaacaacaagaaaaaacttctttttttctttcaactacatttctatgtctgctttaagcttagaacagccaagcagtttttaagccagaaatgtgtatgtaagagcacttaccttccaaaatgtgtacatatgaaaaaaaaaggaaggtattttcttcttttcagccaagctaaacttattcacaagaaaatgagaattgcaattgctctggagaataggaaaattagcacatgcaaagaaaaccttaaaagaaaattggcctcttcatggaaactggggatgttttgtcctaaggtcagttatcaacagcaggatttttgtattgccattgcaagcatgtgatagaaatgtttgttattgttggagaagaaaaggctgagacccaattataccctgtactctttattcgaccaagacctcaaaagatgtcaaagaagccatttctccaaagacagcaacatctattgtgaggcactttcatattcagcagtctgtaagtttgtaggagaaaacataagtggttaatttaaaataattttgggctctaaaatggactttgttgccttttttggtgggggtggtgggaatcggattcagcccatttccaagggatagtttcttcatctcagacaactattttgtgatcctttttaaaagacattctgaaaactttaactcctgcccttcttccgtattacagttgtgttattccagaaatattgtctacttttttaatatattagattttcattcagatcttaaacatgcaaacatgtgataggttagctttttaagggagttatcagtaccactgtatctaaatgttaggtaaatgggtagatttctctttgaagttggtattttccttggcagacagcactgtatcatgctcttcaccaagctatgctctgtaatgctataatcaaggaggctactaacttgtgaacctacagtcaacacaccattgctgaaaacaaactttgattaagaacagatttgctagggggaaaaaagagtaaagtgatattttcaagcaaatataattaaaattgtttcattaaaatatatactgagtgtatattgctccacactgaaattttattttgcattaacttgttaagtaattcattttagcaatcctgcatcccattttactagtactacctctgaaatatactgtcaccttaaaaccacatcagactgtaatgtgaatttttgtagagtttttatttaaacttttatagaggcaataaatgatttccaactaa

SEQ ID NO: 140795 - DNA, 1468 bp, Homo sapiens
  Payload ID: 7612
  Gene Symbol: HPCA
  Gene Name: hippocalcin
  Uniprot ID: P84074
  ENST ID: ENST00000373467
  CDS Start-End: 103-684
gcccgcccctcctgccgcccctgccgcgcgcgccgcagcagcgccgccttccctgcgcagtcggtgtctccgcgtcgctgggtgggacttggctcggcggccatgggcaagcagaacagcaagctgcggcccgagatgttgcaggacctgcgagagaacacagagttctcagagctggagctgcaggagtggtacaagggcttcctcaaggactgccccacaggaatcctcaatgtggatgagttcaagaagatctacgccaacttctttccctatggtgacgcctccaagtttgccgagcacgtcttccgcacctttgacaccaacagcgatggcaccatagactttcgggagttcatcattgcgctgagcgtgacctcgcgcggccgcctggagcagaagctcatgtgggccttcagcatgtatgacctggacggcaacggctacatcagccgggaggagatgctggagatcgtgcaggccatttacaagatggtttcgtccgtgatgaagatgccggaggacgagtcgaccccggaaaagaggactgagaaaatcttccgccaaatggacacaaacaacgacggcaagctgtccttggaggagttcatccgcggggccaaaagcgacccgtccatcgtgcgtctgctgcagtgcgaccccagcagcgcctcccagttctgagaggagccaggttccccttcctccctcccttcaccggccccctcccggctcttagcttccactcccttgtgtgtattctggctgggggccagattggggaagcccttctccccgggtctgccctgtggggggcttccggaaaagggaaccctgcggtacccccaggccaaagcaagtaagcggttagcaccccccaatcccagaggcaacaatagagacacaggctgggttggtctgcccctcagtcaggcccccttacccacccaccagccccaaggcccgacccctcccccaaaggggcagtccccttcttgcaggtctcagcttgcggggtggggggagtcatgcccaggggaggagactttttatctggaggggagagaaggattctaggggtgtggagttggagaaagaggcttccttgagccacccttcccaccccagcccttgctggtccctaggccaagccaccaagtgaaaccttccaggatactagcccgccagctgtgggccccagaaagccagcctgccttttagcacttggatacacacagacccacggagctctctgtgtttggcctctcacacacacacaggcccatagacagatgggcagatgcacccagagccccatgcacagtgtcctgcgtgggaaagagacacggtccccctggctgagcccctgtcctcccctctgtccccccaaccgccccccctgcatgcagccaaatggagcatctctgttctttttaataatttcagaataaagtctcatttcagtgca

SEQ ID NO: 140796 - DNA, 4856 bp, Homo sapiens
  Payload ID: 7613
  Gene Symbol: HPCAL4
  Gene Name: hippocalcin like 4
  Uniprot ID: Q9UM19
  ENST ID: ENST00000372844
  CDS Start-End: 393-968
ccccagacttgtaagccgggggctgagcctcagggcaggggtgcagatgggggtgcagccctcccgcttcccggcgactccgggaaggtcagcgcgggcaggcggggcgcgctcctgcggccgggcctcgccggccacccggtccccacctgaaaccccgcctgccactccgctccagaggagccaatagccgtgcaacctgcccgggatggggcggggcttatgcaaatagtgtcgccttcgggaggcacatagtgatacaagagctggaaggcggctccggcgcagaccttggagagcacagctgccggcccgcgagccagcctcggttcccgcggcccgccgaggctcggagccatccagcgacccggcgaccggcctcaggccccgccatggggaagaccaacagcaagctggcccccgaggtgctggaggaccttgttcagaacactgagttcagcgagcaggagctgaagcagtggtacaagggcttcctgaaggactgccccagcggcatcctcaacctggaggagtttcagcagctctacatcaagttcttcccctacggcgacgcctccaagttcgcgcagcacgctttccgcaccttcgacaagaacggcgacggcaccatcgacttccgggagttcatctgcgccctgtcggtcacctcccgcggcagcttcgagcagaagctcaactgggcctttgagatgtacgacctggacggcgacgggcgcatcacgcgcctggagatgctggagatcatcgaggcaatctacaagatggtgggcaccgtgatcatgatgcgcatgaaccaggacgggctcacgccccagcagcgtgtggacaagatcttcaagaagatggaccaggataaggacgaccagattacattggaggagttcaaggaggcagccaagagtgacccatccattgtgttgctgctgcagtgtgacatgcagaagtagaagctggtgaggggcagggtccctggccagaaggggcatggccacctcccaacctgatgacctctctggctggcctcccaggaggagggacactccagcccccctctctggcccacccagtcctctgcccaagcccttcctcccctccatcaagatctttgagggaccacctcaccctgcaaaagagacaggtcctccagtaccctgtcttctagccccacctcccacttggccagaaccaatgtccattgggcataggggagttggcttttgccccaggaggtgaggttaaggagttgggggcctggggttctggttaggaattctcttgatcctgggattatgctttataggatgtggtcccacaggcctgtcacagggccaaattgggtctgtccattcctgaggctccagatcccataaagggggtctcttccccatcccttctactctacctggcccttccagccccagcctttggagcgttcattcagtcctttcttcagctaatgattactgagcacctgtttggtgctaaggatatggtcatttacaagacacatcttgtgccctctggaagctcatagggttgtgaggcaaacttccagccgtcagggtctcagctaagcagaaggtgctggaaggctggttagtctgggaggagctatttcatcttccagctcagctccacacaaagctgcagaaggacgaaatgaaaagcatttggaagtttaggagccacgtgagtgaaagttttaagaaaaatgaaatttatgtcatacttatttttttagtaccctttaaaggagctacagtcattttattatttcaggaggttaaaatatactctatattacttggtttcttataaaatgattaaatgaatagagaaaatattaattttcaaggggaaaaaacctgagaagaaagggagaaaagaccatgaaatttaccagataacactttttaagactaagtcctgagctgccactctcagcagtttttgctgcttcagctcttcctttttattacctttttcaattcaacaagcaactttctgctacatacttactccggttgggtgctgacttcagggacaggaaaaagcaaggtttgcaaagagtgaaactagtgtatattccgtatcttggtagttcgtttctggattgggtttagtttcagaactggacttgttccttcactgccacagaatcagaaagagctagaagaaaaggctcacctggccactgtttaggcacccagacataatttatggacgaaatgcctaaaaatgtgccaggcatgctctgtttgagaggctttttctaaccccaaatcttagatctgccaggtagttcaacatcttccaagtgtgctggttctgctttccaatgcctgcttcccaattttggatccatgagctatacagctgcatgctttgactgccggaaaaattaatcttgcttcttcatcaggtctttctcctgtacttgtgatcagaaattacctttgacgtgcagtgacagttgatttcctcttgaactgccggtgaaaacagtctagtacacaggtgctgtcagcccagggtgggagcaggaaatgattgctgagcccggggcaggggaattgcatctgcaggaaagagatgcagcatgctcctcactcctgagtgcccacctgtcctgcttctctgcaggtgaaaactctgggggatgctgatcaatagagcttggtcccaagctctactgggcccttggaggtagcaaggccactgggttgctatcctcttgctggggatagcaaccactggtttgcaaccactgggttgctatccttttgctatcctcttgctcatgaccagccatatggtgaggctggggagttcacatcctcaggcaggaactagcagttgtttatccagcaatgcctcaaggatgttgcattgctcccaggaactggctattaggtatgtcttgtgcggtcagtcagcatcacagacacatagatgctcaccagcctggcttagctgggacctaaatcttctggtgaaaagcttttcactaagtgaggttccttccctgcaaatgctgaatctagcctaattcgcaaccacacagaatttcatggctttcaaaggcttgccatgtgccccatctcattctatactcacatcccatggaggtgaggattttcacttcttttctctagacttggaagctgagattcagagaggaagcatcccttgtgcaagatcacatagtcaggaggtgacacagggctaagacttgaaccaaggctctaagaggatttcttcttttcagagtctcttccctgtccatttctgtgactaagctgtgcagaggttgacagcagggcaagttacattgatattcatcctttataggcttcctgctaaaaagcttctgagattgtggtcttccaaaaaaaataggagcttggttgaagtccccacattttcaagcactcagtgttctgcctctggcagctgtgctaacagctcagtgctgtcctgggagtcctctgactcagaaccctcgaagcatcctgcattgtctttacccaccatcatcttcactaagagaaacatgcctacccatgaaggcgtgtttgattactccaggcttctggacacacatacccatgggtgatttttgctcctcaggcccaatattctcagacagcccagcagtgtgaacacacaatgccaggccaggaactgggaccaccatcttgctgatggaaggaacaacaggtggcccaggacatgctcctgcatactcctgggtgtcccagggactgtgtgctcaggagcactgtggtagagcactggccctgccttgagaagagacacaggtctcccgtccctgcaccagctgagagagacttgccgcaaagcacaaggctggcagagatttatgtatgacttgcacagacacaaaaatatacagacaatcaaaacattgatatattcaaactctcctttaaattccaatcttattgcaacaactctgtgaattgcaaggtcccagaatctgccttctcacatactctaccctcattcatccttttgggctaattgatgagcatcttatttcttatctctaaaaattatcagcaaaggctacttcagatggccactttagtcctttcagctgtagtcaggattatttaacttacctgtatatcaaaagtgaagaaaaagttagttcataagtaaaggcactaaatcctttcctgacaatggcagagtctctagaggtagaaatttgccttgctgcagagagagaaggaatggcgtgggatgggggaaagaaaagaaagagaagaagctggggtctccaggcagggtagtaagctgacactaaatattttttacacaaaaatgtattgaagcaacaaatatttcctgaagatccaccctgggtgaggctttgagctgactttagagatcactgtggggtcaagaatgtcttacatgttttattcatcattcttgaaaaaagaaataattcaaaccttggaattaaaaagtcagaaaaatatgggattttctttctggaattttcgaggttttctttttacctttgccagagtgtgggggcaggactgggcctgccagggtgtatagcccttcctgcttggtggaggccagtcaggcccagggccttctaagcagcagtagaaaggaggcttggggaagtggggggtctgggtagcaggggaaggaggccagttccagtgtagccccctatcccctccagatgtgctgcttctggctgtgcactcagtgactgccctcactgctcaaccctgtgctgtgtggtgtgtttctttccccactgacagtgaataaaaggtgcaactgtg

SEQ ID NO: 140797 - DNA, 4758 bp, Homo sapiens
  Payload ID: 7613
  Gene Symbol: HPCAL4
  Gene Name: hippocalcin like 4
  Uniprot ID: Q9UM19
  ENST ID: ENST00000617690
  CDS Start-End: 295-870
cgggatggggcggggcttatgcaaatagtgtcgccttcgggaggcacatagtgatacaagagctggaaggcggctccggcgcagaccttggagagcacagctgccggcccgcgagccagcctcggttcccgcggcccgccgaggctcggagccatccagcgacccggcgaccggcctcaggcggcagcaactgaagagcccacccctgggcaggagaccccccacctcagtccaggcccatgggtgcagagaaggaggcagagccgcctacttatccccagctcaggccccgccatggggaagaccaacagcaagctggcccccgaggtgctggaggaccttgttcagaacactgagttcagcgagcaggagctgaagcagtggtacaagggcttcctgaaggactgccccagcggcatcctcaacctggaggagtttcagcagctctacatcaagttcttcccctacggcgacgcctccaagttcgcgcagcacgctttccgcaccttcgacaagaacggcgacggcaccatcgacttccgggagttcatctgcgccctgtcggtcacctcccgcggcagcttcgagcagaagctcaactgggcctttgagatgtacgacctggacggcgacgggcgcatcacgcgcctggagatgctggagatcatcgaggcaatctacaagatggtgggcaccgtgatcatgatgcgcatgaaccaggacgggctcacgccccagcagcgtgtggacaagatcttcaagaagatggaccaggataaggacgaccagattacattggaggagttcaaggaggcagccaagagtgacccatccattgtgttgctgctgcagtgtgacatgcagaagtagaagctggtgaggggcagggtccctggccagaaggggcatggccacctcccaacctgatgacctctctggctggcctcccaggaggagggacactccagcccccctctctggcccacccagtcctctgcccaagcccttcctcccctccatcaagatctttgagggaccacctcaccctgcaaaagagacaggtcctccagtaccctgtcttctagccccacctcccacttggccagaaccaatgtccattgggcataggggagttggcttttgccccaggaggtgaggttaaggagttgggggcctggggttctggttaggaattctcttgatcctgggattatgctttataggatgtggtcccacaggcctgtcacagggccaaattgggtctgtccattcctgaggctccagatcccataaagggggtctcttccccatcccttctactctacctggcccttccagccccagcctttggagcgttcattcagtcctttcttcagctaatgattactgagcacctgtttggtgctaaggatatggtcatttacaagacacatcttgtgccctctggaagctcatagggttgtgaggcaaacttccagccgtcagggtctcagctaagcagaaggtgctggaaggctggttagtctgggaggagctatttcatcttccagctcagctccacacaaagctgcagaaggacgaaatgaaaagcatttggaagtttaggagccacgtgagtgaaagttttaagaaaaatgaaatttatgtcatacttatttttttagtaccctttaaaggagctacagtcattttattatttcaggaggttaaaatatactctatattacttggtttcttataaaatgattaaatgaatagagaaaatattaattttcaaggggaaaaaacctgagaagaaagggagaaaagaccatgaaatttaccagataacactttttaagactaagtcctgagctgccactctcagcagtttttgctgcttcagctcttcctttttattacctttttcaattcaacaagcaactttctgctacatacttactccggttgggtgctgacttcagggacaggaaaaagcaaggtttgcaaagagtgaaactagtgtatattccgtatcttggtagttcgtttctggattgggtttagtttcagaactggacttgttccttcactgccacagaatcagaaagagctagaagaaaaggctcacctggccactgtttaggcacccagacataatttatggacgaaatgcctaaaaatgtgccaggcatgctctgtttgagaggctttttctaaccccaaatcttagatctgccaggtagttcaacatcttccaagtgtgctggttctgctttccaatgcctgcttcccaattttggatccatgagctatacagctgcatgctttgactgccggaaaaattaatcttgcttcttcatcaggtctttctcctgtacttgtgatcagaaattacctttgacgtgcagtgacagttgatttcctcttgaactgccggtgaaaacagtctagtacacaggtgctgtcagcccagggtgggagcaggaaatgattgctgagcccggggcaggggaattgcatctgcaggaaagagatgcagcatgctcctcactcctgagtgcccacctgtcctgcttctctgcaggtgaaaactctgggggatgctgatcaatagagcttggtcccaagctctactgggcccttggaggtagcaaggccactgggttgctatcctcttgctggggatagcaaccactggtttgcaaccactgggttgctatccttttgctatcctcttgctcatgaccagccatatggtgaggctggggagttcacatcctcaggcaggaactagcagttgtttatccagcaatgcctcaaggatgttgcattgctcccaggaactggctattaggtatgtcttgtgcggtcagtcagcatcacagacacatagatgctcaccagcctggcttagctgggacctaaatcttctggtgaaaagcttttcactaagtgaggttccttccctgcaaatgctgaatctagcctaattcgcaaccacacagaatttcatggctttcaaaggcttgccatgtgccccatctcattctatactcacatcccatggaggtgaggattttcacttcttttctctagacttggaagctgagattcagagaggaagcatcccttgtgcaagatcacatagtcaggaggtgacacagggctaagacttgaaccaaggctctaagaggatttcttcttttcagagtctcttccctgtccatttctgtgactaagctgtgcagaggttgacagcagggcaagttacattgatattcatcctttataggcttcctgctaaaaagcttctgagattgtggtcttccaaaaaaaataggagcttggttgaagtccccacattttcaagcactcagtgttctgcctctggcagctgtgctaacagctcagtgctgtcctgggagtcctctgactcagaaccctcgaagcatcctgcattgtctttacccaccatcatcttcactaagagaaacatgcctacccatgaaggcgtgtttgattactccaggcttctggacacacatacccatgggtgatttttgctcctcaggcccaatattctcagacagcccagcagtgtgaacacacaatgccaggccaggaactgggaccaccatcttgctgatggaaggaacaacaggtggcccaggacatgctcctgcatactcctgggtgtcccagggactgtgtgctcaggagcactgtggtagagcactggccctgccttgagaagagacacaggtctcccgtccctgcaccagctgagagagacttgccgcaaagcacaaggctggcagagatttatgtatgacttgcacagacacaaaaatatacagacaatcaaaacattgatatattcaaactctcctttaaattccaatcttattgcaacaactctgtgaattgcaaggtcccagaatctgccttctcacatactctaccctcattcatccttttgggctaattgatgagcatcttatttcttatctctaaaaattatcagcaaaggctacttcagatggccactttagtcctttcagctgtagtcaggattatttaacttacctgtatatcaaaagtgaagaaaaagttagttcataagtaaaggcactaaatcctttcctgacaatggcagagtctctagaggtagaaatttgccttgctgcagagagagaaggaatggcgtgggatgggggaaagaaaagaaagagaagaagctggggtctccaggcagggtagtaagctgacactaaatattttttacacaaaaatgtattgaagcaacaaatatttcctgaagatccaccctgggtgaggctttgagctgactttagagatcactgtggggtcaagaatgtcttacatgttttattcatcattcttgaaaaaagaaataattcaaaccttggaattaaaaagtcagaaaaatatgggattttctttctggaattttcgaggttttctttttacctttgccagagtgtgggggcaggactgggcctgccagggtgtatagcccttcctgcttggtggaggccagtcaggcccagggccttctaagcagcagtagaaaggaggcttggggaagtggggggtctgggtagcaggggaaggaggccagttccagtgtagccccctatcccctccagatgtgctgcttctggctgtgcactcagtgactgccctcactgctcaaccctgtgctgtgtggtgtgtttctttccccactgacagtgaataaaaggtgcaactgtg

SEQ ID NO: 140798 - DNA, 4436 bp, Homo sapiens
  Payload ID: 7613
  Gene Symbol: HPCAL4
  Gene Name: hippocalcin like 4
  ENST ID: ENST00000612703
  CDS Start-End: 189-548
cgggatggggcggggcttatgcaaatagtgtcgccttcgggaggcacatagtgatacaagagctggaaggcggctccggcgcagaccttggagagcacagctgccggcccgcgagccagcctcggttcccgcggcccgccgaggctcggagccatccagcgacccggcgaccggcctcaggccccgccatggggaagaccaacagcaagctggcccccgaggtgctggaggaccttgttcagaacactgagttcagcgagcaggagctgaagcagtggtacaagggcttcctgaaggactgccccagcggcatcctcaacctggaggagtttcagcagctctacatcaaggcaatctacaagatggtgggcaccgtgatcatgatgcgcatgaaccaggacgggctcacgccccagcagcgtgtggacaagatcttcaagaagatggaccaggataaggacgaccagattacattggaggagttcaaggaggcagccaagagtgacccatccattgtgttgctgctgcagtgtgacatgcagaagtagaagctggtgaggggcagggtccctggccagaaggggcatggccacctcccaacctgatgacctctctggctggcctcccaggaggagggacactccagcccccctctctggcccacccagtcctctgcccaagcccttcctcccctccatcaagatctttgagggaccacctcaccctgcaaaagagacaggtcctccagtaccctgtcttctagccccacctcccacttggccagaaccaatgtccattgggcataggggagttggcttttgccccaggaggtgaggttaaggagttgggggcctggggttctggttaggaattctcttgatcctgggattatgctttataggatgtggtcccacaggcctgtcacagggccaaattgggtctgtccattcctgaggctccagatcccataaagggggtctcttccccatcccttctactctacctggcccttccagccccagcctttggagcgttcattcagtcctttcttcagctaatgattactgagcacctgtttggtgctaaggatatggtcatttacaagacacatcttgtgccctctggaagctcatagggttgtgaggcaaacttccagccgtcagggtctcagctaagcagaaggtgctggaaggctggttagtctgggaggagctatttcatcttccagctcagctccacacaaagctgcagaaggacgaaatgaaaagcatttggaagtttaggagccacgtgagtgaaagttttaagaaaaatgaaatttatgtcatacttatttttttagtaccctttaaaggagctacagtcattttattatttcaggaggttaaaatatactctatattacttggtttcttataaaatgattaaatgaatagagaaaatattaattttcaaggggaaaaaacctgagaagaaagggagaaaagaccatgaaatttaccagataacactttttaagactaagtcctgagctgccactctcagcagtttttgctgcttcagctcttcctttttattacctttttcaattcaacaagcaactttctgctacatacttactccggttgggtgctgacttcagggacaggaaaaagcaaggtttgcaaagagtgaaactagtgtatattccgtatcttggtagttcgtttctggattgggtttagtttcagaactggacttgttccttcactgccacagaatcagaaagagctagaagaaaaggctcacctggccactgtttaggcacccagacataatttatggacgaaatgcctaaaaatgtgccaggcatgctctgtttgagaggctttttctaaccccaaatcttagatctgccaggtagttcaacatcttccaagtgtgctggttctgctttccaatgcctgcttcccaattttggatccatgagctatacagctgcatgctttgactgccggaaaaattaatcttgcttcttcatcaggtctttctcctgtacttgtgatcagaaattacctttgacgtgcagtgacagttgatttcctcttgaactgccggtgaaaacagtctagtacacaggtgctgtcagcccagggtgggagcaggaaatgattgctgagcccggggcaggggaattgcatctgcaggaaagagatgcagcatgctcctcactcctgagtgcccacctgtcctgcttctctgcaggtgaaaactctgggggatgctgatcaatagagcttggtcccaagctctactgggcccttggaggtagcaaggccactgggttgctatcctcttgctggggatagcaaccactggtttgcaaccactgggttgctatccttttgctatcctcttgctcatgaccagccatatggtgaggctggggagttcacatcctcaggcaggaactagcagttgtttatccagcaatgcctcaaggatgttgcattgctcccaggaactggctattaggtatgtcttgtgcggtcagtcagcatcacagacacatagatgctcaccagcctggcttagctgggacctaaatcttctggtgaaaagcttttcactaagtgaggttccttccctgcaaatgctgaatctagcctaattcgcaaccacacagaatttcatggctttcaaaggcttgccatgtgccccatctcattctatactcacatcccatggaggtgaggattttcacttcttttctctagacttggaagctgagattcagagaggaagcatcccttgtgcaagatcacatagtcaggaggtgacacagggctaagacttgaaccaaggctctaagaggatttcttcttttcagagtctcttccctgtccatttctgtgactaagctgtgcagaggttgacagcagggcaagttacattgatattcatcctttataggcttcctgctaaaaagcttctgagattgtggtcttccaaaaaaaataggagcttggttgaagtccccacattttcaagcactcagtgttctgcctctggcagctgtgctaacagctcagtgctgtcctgggagtcctctgactcagaaccctcgaagcatcctgcattgtctttacccaccatcatcttcactaagagaaacatgcctacccatgaaggcgtgtttgattactccaggcttctggacacacatacccatgggtgatttttgctcctcaggcccaatattctcagacagcccagcagtgtgaacacacaatgccaggccaggaactgggaccaccatcttgctgatggaaggaacaacaggtggcccaggacatgctcctgcatactcctgggtgtcccagggactgtgtgctcaggagcactgtggtagagcactggccctgccttgagaagagacacaggtctcccgtccctgcaccagctgagagagacttgccgcaaagcacaaggctggcagagatttatgtatgacttgcacagacacaaaaatatacagacaatcaaaacattgatatattcaaactctcctttaaattccaatcttattgcaacaactctgtgaattgcaaggtcccagaatctgccttctcacatactctaccctcattcatccttttgggctaattgatgagcatcttatttcttatctctaaaaattatcagcaaaggctacttcagatggccactttagtcctttcagctgtagtcaggattatttaacttacctgtatatcaaaagtgaagaaaaagttagttcataagtaaaggcactaaatcctttcctgacaatggcagagtctctagaggtagaaatttgccttgctgcagagagagaaggaatggcgtgggatgggggaaagaaaagaaagagaagaagctggggtctccaggcagggtagtaagctgacactaaatattttttacacaaaaatgtattgaagcaacaaatatttcctgaagatccaccctgggtgaggctttgagctgactttagagatcactgtggggtcaagaatgtcttacatgttttattcatcattcttgaaaaaagaaataattcaaaccttggaattaaaaagtcagaaaaatatgggattttctttctggaattttcgaggttttctttttacctttgccagagtgtgggggcaggactgggcctgccagggtgtatagcccttcctgcttggtggaggccagtcaggcccagggccttctaagcagcagtagaaaggaggcttggggaagtggggggtctgggtagcaggggaaggaggccagttccagtgtagccccctatcccctccagatgtgctgcttctggctgtgcactcagtgactgccctcactgctcaaccctgtgctgtgtggtgtgtttctttccccactgacagtgaataaaaggtgcaactgtg

SEQ ID NO: 140799 - DNA, 1751 bp, Homo sapiens
  Payload ID: 7614
  Gene Symbol: HPCAL1
  Gene Name: hippocalcin-like 1
  Uniprot ID: P37235
  ENST ID: ENST00000307845
  CDS Start-End: 382-963
cgggccgcggcggcggcgggcagcggacgggcggactgacgggcgcctccaccttgctccctccctggctgccggcttccttttgtctttctgggcggcgatgagcgcagggccggcgcagcagctgcgggcgcacggaggcccgcgctgctagtcactcctcccggcctcggcgcgcttgtcccgggcagcggcccgggcccgctgcagccgccgccggcgccgaacttgggctcgggaagccggcggaccgcgtcctgcgccggagcaggggcatggtctagtggcccagtcaggacgcggaaacactccctggaggttctgacccactccctctcagcctccgcctggtctctggtgtagtcgccgccgccagccgccatgggcaaacagaacagcaagctgcggcccgaggtgctgcaggacctgcgggagaacacggagttcaccgaccacgagctgcaggagtggtacaagggcttcctcaaggactgccccaccggccacctgaccgtggacgagttcaagaagatctacgccaacttcttcccctacggcgacgcttccaagttcgccgagcacgtcttccgcaccttcgacaccaacggcgacggcaccatcgacttccgggagttcatcattgcgctgagcgtgacctcgcggggcaagctggagcagaagctcaagtgggccttcagcatgtacgacctggacggcaacggctacatcagccgcagcgagatgctggagatcgtgcaggccatctacaagatggtgtcgtctgtgatgaagatgccggaggatgagtccaccccggagaagcgcacagacaagatcttcaggcagatggacaccaacaatgacggcaaactgtccttggaagaattcatcagaggtgccaagagcgacccctccatcgtccgcctgctgcagtgcgaccccagcagtgccagtcagttctgagcgagcggcccctggacagttgcagagaaacacaggcttgtcgtgccgtttaagctttgcttgcaagagtggatgccccgcaatcgttcctgctctcccgggccccgggcctggggcatgcgttgcacctgcccagcccggtggctgcgcctccctcctccacctgaccaacgcgacattcctcccctcacgcctggcccggtcccttccagggcaactcccagggatgtggtgacatgcagggttcaagtgttcttggttccaggcacctcccggctcacggggagctcagaggtccatgccgaggagaccaggcaggacctcccgaggctgcgccccggccggcccatgcgttttgtgatcccaagtgactctgtgggaagggtggggacgaggcgtcgggagggtatacagggagcccctcccgtgcatggctgcccccccgttcattttctccaccacagccgcttgcacgtatagatactgtggtcccctttcttttaatatataaattatgtatggtgaagtggagtgtattgtgtaggtcccgtatttaatgcctctgactgcctttgaagcgcagccctctgtggcccgcagccccctgagcctggctgttgtgtggtatttatgctctctttgtctgcctgtttctaaggaaatgcatgtgtgccctgagccgtgatgatcctcccatccgtgttgtgagcacaggcatttgtgtctggtctgtcctccctgttgattggtctggcatttccggtattaaaatgataaaataaatggca

SEQ ID NO: 140800 - DNA, 1904 bp, Homo sapiens
  Payload ID: 7614
  Gene Symbol: HPCAL1
  Gene Name: hippocalcin-like 1
  Uniprot ID: P37235
  ENST ID: ENST00000381765
  CDS Start-End: 527-1108
agcttctgccaagggtgggggcccacgcggaggcgatccgctcgttcctcccagggccatggggcgacgaggagagccctggcctccccgcgacccgcactgcgacctgggccagacgcgccaccttccccggtcgcggtttgcttctctttaaaatgaggacagctcctcccttgggggctgtggtgacaggtgaaatgagaacgcactgaagacagctcttggtccaaagccccgcacacagggcatggtctagtggcccagtcaggacgcggaaacactccctggaggttctgacccactccctctcagcctccgcctggtctctgggttggctgttccagctccaaagagaaggaggaaccttttccttctgcagcccctccccaccagcctcattccttagctggggtcagacctggggtcctcactgcagctggcctctggcagcgttctcaggctagccctccctgctgaaaagagaaccgtgtgggactcacaggtgtagtcgccgccgccagccgccatgggcaaacagaacagcaagctgcggcccgaggtgctgcaggacctgcgggagaacacggagttcaccgaccacgagctgcaggagtggtacaagggcttcctcaaggactgccccaccggccacctgaccgtggacgagttcaagaagatctacgccaacttcttcccctacggcgacgcttccaagttcgccgagcacgtcttccgcaccttcgacaccaacggcgacggcaccatcgacttccgggagttcatcattgcgctgagcgtgacctcgcggggcaagctggagcagaagctcaagtgggccttcagcatgtacgacctggacggcaacggctacatcagccgcagcgagatgctggagatcgtgcaggccatctacaagatggtgtcgtctgtgatgaagatgccggaggatgagtccaccccggagaagcgcacagacaagatcttcaggcagatggacaccaacaatgacggcaaactgtccttggaagaattcatcagaggtgccaagagcgacccctccatcgtccgcctgctgcagtgcgaccccagcagtgccagtcagttctgagcgagcggcccctggacagttgcagagaaacacaggcttgtcgtgccgtttaagctttgcttgcaagagtggatgccccgcaatcgttcctgctctcccgggccccgggcctggggcatgcgttgcacctgcccagcccggtggctgcgcctccctcctccacctgaccaacgcgacattcctcccctcacgcctggcccggtcccttccagggcaactcccagggatgtggtgacatgcagggttcaagtgttcttggttccaggcacctcccggctcacggggagctcagaggtccatgccgaggagaccaggcaggacctcccgaggctgcgccccggccggcccatgcgttttgtgatcccaagtgactctgtgggaagggtggggacgaggcgtcgggagggtatacagggagcccctcccgtgcatggctgcccccccgttcattttctccaccacagccgcttgcacgtatagatactgtggtcccctttcttttaatatataaattatgtatggtgaagtggagtgtattgtgtaggtcccgtatttaatgcctctgactgcctttgaagcgcagccctctgtggcccgcagccccctgagcctggctgttgtgtggtatttatgctctctttgtctgcctgtttctaaggaaatgcatgtgtgccctgagccgtgatgatcctcccatccgtgttgtgagcacaggcatttgtgtctggtctgtcctccctgttgattggtctggcatttccggtattaaaatgataaaataaatggcattttctga

SEQ ID NO: 140801 - DNA, 587 bp, Homo sapiens
  Payload ID: 7614
  Gene Symbol: HPCAL1
  Gene Name: hippocalcin-like 1
  ENST ID: ENST00000422133
  CDS Start-End: 1-310
gctgagcgtgacctcgcggggcaagctggagcagaagctcaagtgggccttcagcatgtacgacctggacggcaacggctacatcagccgcagcgagatgctggagatcgtgcaggccatctacaagatggtgtcgtctgtgatgaagatgccggaggatgagtccaccccggagaagcgcacagacaagatcttcaggcagatggacaccaacaatgacgtgtccctggggaagccacccatggtcactcgctgcccgaatctgcctcctggcttggccctgcccacctcttcagagggcatcttctaggcaaactgtccttggaagaattcatcagaggtgccaagagcgacccctccatcgtccgcctgctgcagtgcgaccccagcagtgccagtcagttctgagcgagcggcccctggacagttgcagagaaacacaggcttgtcgtgccgtttaagctttgcttgcaagagtggatgccccgcaatcgttcctgctctcccgggccccgggcctggggcatgcgttgcacctgcccagcccggtggctgcgcctccctcctccacctgaccaacgcgacat

SEQ ID NO: 140802 - DNA, 586 bp, Homo sapiens
  Payload ID: 7614
  Gene Symbol: HPCAL1
  Gene Name: hippocalcin-like 1
  ENST ID: ENST00000423674
  CDS Start-End: 497-586
cttcccggagctggcaggcgggccgcggcggcggcgggcagcggacgggcggactgacgggcgcctccaccttgctccctccctggctgccggcttccttttgtctttctgggcggcgatgagcgcagggccggcgcagcagctgcgggcgcacggaggcccgcgctgctagtcactcctcccggcctcggcgcgcttgtcccgggcagcggcccgggcccgctgcagccgccgccggcgccgaacttgggctcgggaagccggcggaccgcgtcctgcgccggagcaggggcatggtctagtggcccagtcaggacgcggaaacactccctggaggttctgacccactccctctcagcctccgcctggtctctgctggagaactcctggaacctttaagccctggctcagccctcagctctgtcccatcccagctgacctctgtgctctgcgcccgagctcctgagcccacgtgtagtcgccgccgccagccgccatgggcaaacagaacagcaagctgcggcccgaggtgctgcaggacctgcgggagaacacggagttcaccgaccacgagctgcaggagtgg

SEQ ID NO: 140803 - DNA, 4781 bp, Homo sapiens
  Payload ID: 7614
  Gene Symbol: HPCAL1
  Gene Name: hippocalcin-like 1
  ENST ID: ENST00000419810
  CDS Start-End: 500-1027
agggaaggggacggagttctctggagtcaggtctggggccaggagacctggcccagcagaagtcctctctgtcttctccaggcgcagcccttcagccatgcaatcctgcgtgtcctcgttcttcattccacaaatacgttctaagggcctcctgcatttcaggcacttcagaggaccttctggaagcttcccagggcctgctatcttccctgtactgggcatggtctagtggcccagtcaggacgcggaaacactccctggaggttctgacccactccctctcagcctccgcctggtctctgggttggctgttccagctccaaagagaaggaggaaccttttccttctgcagcccctccccaccagcctcattccttagctggggtcagacctggggtcctcactgcagctggcctctggcagcgttctcaggctagccctccctgctgaaaagagaaccgtgtgggactcacaggtgtagtcgccgccgccagccgccatgggcaaacagaacagcaagctgcggcccgaggtgctgcaggacctgcgggagaacacggagttcaccgaccacgagctgcaggagtggtacaagggcttcctcaaggactgccccaccggccacctgaccgtggacgagttcaagaagatctacgccaacttcttcccctacggcgacgcttccaagttcgccgagcacgtcttccgcaccttcgacaccaacggcgacggcaccatcgacttccgggagttcatcattgcgctgagcgtgacctcgcggggcaagctggagcagaagctcaagtgggccttcagcatgtacgacctggacggcaacggctacatcagccgcagcgagatgctggagatcgtgcaggccatctacaagatggtgtcgtctgtgatgaagatgccggaggatgagtccaccccggagaagcgcacagacaagatcttcaggcagatggacaccaacaatgacggtagtgcggggtgggggcggggctgcatgtgtacgccacggtaggggcaaaaccatgtggtttggggcaccccctcccctctgcagcttcttggtctcctgagggccacccccgcccgccacctgcctggcgcctgccatgcccagggaagagcgggatgcagtcagggacacccgtgctgtatcctggctcctctgtgcagctttgtgatgctgggcatgttgtggcctctctgagccactgtctccccacttatagaatcgggcatacccatattcccgtgggtacaatgtttaggggcagggaggcaagcatgctggtggccctgaacctggaggggttgagatcaaaggatcccagatgttggggtcctggggtgctggccatgcctctcttgctgccatcctgagagaagaagctgcccagatggccccagtgtccaaggggaactgtcaggatgtacgctgccaccttgtccacctacagcagctctgtggagactcagccccactgcagaagtgcaagtctcacgatggtgggtggcagcagtggtgacagggctgtgcctcgagtgccctcctctgcattggctgtgaggtgagggcggctgtgcggccctcccattctgctcttcttgccggctttgtcaagagcagccacagcaccaggtttgctttgcttttgagcaataaagaaacacgaccttaagaagagaaaatacaggctgggcgcagtggctcacgcctgtaatcccagcactttgggaggccgaggtgggcagatcacgaggtcaggagatcgagaccatcctggctaacacggtgaaaccccgtctctgctaaaaatacaaaaaaattagccaggcgtggtggcgggcgcctgtagtcccagctactcgggaggctgaggcaggagaatggtgtgaacccgggaggcagagcttgcagtgagccgagatcgcaccactgcactccagcctgggcgatagagtgagactccatctcaaaaaaataaagaggaaatactccctgggttgtgctggggattaaacgataagctaatgcccaagaagctgctctgcgaagtctggagtgcagccctcgggtgagttaagcatggccccagcgggagacgggatgtgggggagctgtaagcagcaaagagcattccaggcagccaggtcacagtttcaaaacacacacacacagaaaacaaggctgcctggtgcctggcgttgcctttgggctgatgggaaatgtgtgttccaccctccagcctagcagggcacctgctgccgctctcctgaggctgtccgctcctcgtggggatggtgaatccggtcccatggggttgtgaggtttcagcgagatgatgccttaaagcttttagcagggcttgcactccacaaataatggctgttgttcccaacttcacagtgtccctggggaagccacccatggtcactcgctgcccgaatctgcctcctggcttggccctgcccacctcttcagagggcatcttctaggttggttgggaatttggatggcatggtcgttgctaatgtgcctgctgggatggagcacttcctcctgtgagcccaggggacccgcctgtccctggagcttggggcaaggagggaagagtgataccaggaaggtggggctgcagccaggggccagagtcagttcagggagtggtcctcggccctcaaagctcctccggggactgctcaggagtgatggtgccctggagtttgccccaacttccctggccaccctggaaggtgcctggctgctccaggcctctaggctgggctgatgggtttctccaggacacaagtatcattaaagccaccctctcctcagcttgtcaggccgcacatgtgggacaggctgtgctcagcaaccccctcgcctgccctgccctccatcaggaggagccagtggaaccttcggaagctcccagcatctcagcagccctcagagtcgtcctggggcagctctggttctcctgactggaggtccatctgggctggcctgctctctctcggcctgagacaggagggcctggggtcaggaactggaagtggggaggctggggccgtggactctgaggccccacacctagccaaggagatgaccacacagctggctgccctgagtggtcagaggtggagggtggggagccactctctccattggcagaggttcctggggactgtctgctgagggcctggctgtccctccctctccctacccaccccttagcccgggcattgtttgggctctcttggggccagcaggctgcccaggccccagaggcatcaagttcgtgccctggaagaagccagcctgcccaagcctgggccagagtcccatgaggacaggtgtccctgcctgccagtgggctggaggggctgaattcccagcagggccctactgtgcaggggcatcctccgtcctggtgctggtctgagtcctcaaatgcatcctcccaggtgcctttgagatgggtgttcccattatcccaccttcgagacgaagatcctgagacctggaaacgttggtggcttgccatgcgccagagccgagagcccctcctgcatgccttcccctgtgctgggcctggctgcatgcgtctgtgttgcctgcacagacattttgcagggtgccctagtgattccagctgacagcacagagcctcaaacagacacatggaggggctgccccaggaccaggccgccaggacgcagccaacctcaaacctcatccttccccaccagctggagccagagggaccgcctcctgcccttgaggccatgtctgaacgggcagaatccttacagcctatcctgcttgtggactagcagagccagggctatagtgaccacagtgttttcctctcaccgcatggggccaaaacagtacagagcatgagtttggtaccccaagcctgagcagcgggtctacgctgatgccagggaggatccggaccgtgcttccgggggcccccaaccagcatggccttctcagcctggattctgtatgggttagaggcaaatgcttcatttttctgcacagtgtacacgttccttaataagcgaagtgtggggtgatttctaaaaggatttaaatggccctcatcagccacgtcctgctgagcttgctgggcaaactgtccttggaagaattcatcagaggtgccaagagcgacccctccatcgtccgcctgctgcagtgcgaccccagcagtgccagtcagttctgagcgagcggcccctggacagttgcagagaaacacaggcttgtcgtgccgtttaagctttgcttgcaagagtggatgccccgcaatcgttcctgctctcccgggccccgggcctggggcatgcgttgcacctgcccagcccggtggctgcgcctccctcctccacctgaccaacgcgacattcctcccctcacgcctggcccggtcccttccagggcaactcccagggatgtggtgacatgcagggttcaagtgttcttggttccaggcacctcccggctcacggggagctcagaggtccatgccgaggagaccaggcaggacctcccgaggctgcgccccggccggcccatgcgttttgtgatcccaagtgactctgtgggaagggtggggacgaggcgtcgggagggtatacagggagcccctcccgtgcatggctgcccccccgttcattttctccaccacagccgcttgcacgtatagatactgtggtcccctttcttttaatatataaattatgtatggtgaagtgga

SEQ ID NO: 140804 - DNA, 1547 bp, Homo sapiens
  Payload ID: 7614
  Gene Symbol: HPCAL1
  Gene Name: hippocalcin-like 1
  Uniprot ID: P37235
  ENST ID: ENST00000613496
  CDS Start-End: 171-752
ggtggtggccgcccttggggagctggcctctcagcacagcgccgggcaccggggctcaaggggcatggtctagtggcccagtcaggacgcggaaacactccctggaggttctgacccactccctctcagcctccgcctggtctctggtgtagtcgccgccgccagccgccatgggcaaacagaacagcaagctgcggcccgaggtgctgcaggacctgcgggagaacacggagttcaccgaccacgagctgcaggagtggtacaagggcttcctcaaggactgccccaccggccacctgaccgtggacgagttcaagaagatctacgccaacttcttcccctacggcgacgcttccaagttcgccgagcacgtcttccgcaccttcgacaccaacggcgacggcaccatcgacttccgggagttcatcattgcgctgagcgtgacctcgcggggcaagctggagcagaagctcaagtgggccttcagcatgtacgacctggacggcaacggctacatcagccgcagcgagatgctggagatcgtgcaggccatctacaagatggtgtcgtctgtgatgaagatgccggaggatgagtccaccccggagaagcgcacagacaagatcttcaggcagatggacaccaacaatgacggcaaactgtccttggaagaattcatcagaggtgccaagagcgacccctccatcgtccgcctgctgcagtgcgaccccagcagtgccagtcagttctgagcgagcggcccctggacagttgcagagaaacacaggcttgtcgtgccgtttaagctttgcttgcaagagtggatgccccgcaatcgttcctgctctcccgggccccgggcctggggcatgcgttgcacctgcccagcccggtggctgcgcctccctcctccacctgaccaacgcgacattcctcccctcacgcctggcccggtcccttccagggcaactcccagggatgtggtgacatgcagggttcaagtgttcttggttccaggcacctcccggctcacggggagctcagaggtccatgccgaggagaccaggcaggacctcccgaggctgcgccccggccggcccatgcgttttgtgatcccaagtgactctgtgggaagggtggggacgaggcgtcgggagggtatacagggagcccctcccgtgcatggctgcccccccgttcattttctccaccacagccgcttgcacgtatagatactgtggtcccctttcttttaatatataaattatgtatggtgaagtggagtgtattgtgtaggtcccgtatttaatgcctctgactgcctttgaagcgcagccctctgtggcccgcagccccctgagcctggctgttgtgtggtatttatgctctctttgtctgcctgtttctaaggaaatgcatgtgtgccctgagccgtgatgatcctcccatccgtgttgtgagcacaggcatttgtgtctggtctgtcctccctgttgattggtctggcatttccggtattaaaatgataaaataaatggcattttctg

SEQ ID NO: 140805 - DNA, 1535 bp, Homo sapiens
  Payload ID: 7614
  Gene Symbol: HPCAL1
  Gene Name: hippocalcin-like 1
  Uniprot ID: P37235
  ENST ID: ENST00000622018
  CDS Start-End: 159-740
tatgctgtgttcggggctgtctgtcggcgccacagggaatgggggctggggcatggtctagtggcccagtcaggacgcggaaacactccctggaggttctgacccactccctctcagcctccgcctggtctctggtgtagtcgccgccgccagccgccatgggcaaacagaacagcaagctgcggcccgaggtgctgcaggacctgcgggagaacacggagttcaccgaccacgagctgcaggagtggtacaagggcttcctcaaggactgccccaccggccacctgaccgtggacgagttcaagaagatctacgccaacttcttcccctacggcgacgcttccaagttcgccgagcacgtcttccgcaccttcgacaccaacggcgacggcaccatcgacttccgggagttcatcattgcgctgagcgtgacctcgcggggcaagctggagcagaagctcaagtgggccttcagcatgtacgacctggacggcaacggctacatcagccgcagcgagatgctggagatcgtgcaggccatctacaagatggtgtcgtctgtgatgaagatgccggaggatgagtccaccccggagaagcgcacagacaagatcttcaggcagatggacaccaacaatgacggcaaactgtccttggaagaattcatcagaggtgccaagagcgacccctccatcgtccgcctgctgcagtgcgaccccagcagtgccagtcagttctgagcgagcggcccctggacagttgcagagaaacacaggcttgtcgtgccgtttaagctttgcttgcaagagtggatgccccgcaatcgttcctgctctcccgggccccgggcctggggcatgcgttgcacctgcccagcccggtggctgcgcctccctcctccacctgaccaacgcgacattcctcccctcacgcctggcccggtcccttccagggcaactcccagggatgtggtgacatgcagggttcaagtgttcttggttccaggcacctcccggctcacggggagctcagaggtccatgccgaggagaccaggcaggacctcccgaggctgcgccccggccggcccatgcgttttgtgatcccaagtgactctgtgggaagggtggggacgaggcgtcgggagggtatacagggagcccctcccgtgcatggctgcccccccgttcattttctccaccacagccgcttgcacgtatagatactgtggtcccctttcttttaatatataaattatgtatggtgaagtggagtgtattgtgtaggtcccgtatttaatgcctctgactgcctttgaagcgcagccctctgtggcccgcagccccctgagcctggctgttgtgtggtatttatgctctctttgtctgcctgtttctaaggaaatgcatgtgtgccctgagccgtgatgatcctcccatccgtgttgtgagcacaggcatttgtgtctggtctgtcctccctgttgattggtctggcatttccggtattaaaatgataaaataaatggcattttctg

SEQ ID NO: 140806 - DNA, 1941 bp, Homo sapiens
  Payload ID: 7614
  Gene Symbol: HPCAL1
  Gene Name: hippocalcin-like 1
  Uniprot ID: P37235
  ENST ID: ENST00000620771
  CDS Start-End: 565-1146
actgatgtgtgtgtttactgagctttctccgcagcctgctccggcagctccaaaatggcatttcaggaattgaattaccgacatttcagtacttgcggaatccaggaatagattatttgattgtatctgttggaagtcattgccgtaactggcttcgttttcttcaccaacatctaaaccgagtggggagggaccgcaggagaatgctgtggtgacttgattttcccaaaagcacatctcccaagctggcggcagccgatggcgttgccctgtgactgggggaagcctgaggactcacggtcgcctcaggctggccaccttcgcactggaacctgcccatcacatcaaggagccctctcaggctgaaaaccctgtgccggggtggctgcagcaacacaaggattcccctccagctctgtgatgtggggagcagagggccactgagtcctgccatgggcatggtctagtggcccagtcaggacgcggaaacactccctggaggttctgacccactccctctcagcctccgcctggtctctggtgtagtcgccgccgccagccgccatgggcaaacagaacagcaagctgcggcccgaggtgctgcaggacctgcgggagaacacggagttcaccgaccacgagctgcaggagtggtacaagggcttcctcaaggactgccccaccggccacctgaccgtggacgagttcaagaagatctacgccaacttcttcccctacggcgacgcttccaagttcgccgagcacgtcttccgcaccttcgacaccaacggcgacggcaccatcgacttccgggagttcatcattgcgctgagcgtgacctcgcggggcaagctggagcagaagctcaagtgggccttcagcatgtacgacctggacggcaacggctacatcagccgcagcgagatgctggagatcgtgcaggccatctacaagatggtgtcgtctgtgatgaagatgccggaggatgagtccaccccggagaagcgcacagacaagatcttcaggcagatggacaccaacaatgacggcaaactgtccttggaagaattcatcagaggtgccaagagcgacccctccatcgtccgcctgctgcagtgcgaccccagcagtgccagtcagttctgagcgagcggcccctggacagttgcagagaaacacaggcttgtcgtgccgtttaagctttgcttgcaagagtggatgccccgcaatcgttcctgctctcccgggccccgggcctggggcatgcgttgcacctgcccagcccggtggctgcgcctccctcctccacctgaccaacgcgacattcctcccctcacgcctggcccggtcccttccagggcaactcccagggatgtggtgacatgcagggttcaagtgttcttggttccaggcacctcccggctcacggggagctcagaggtccatgccgaggagaccaggcaggacctcccgaggctgcgccccggccggcccatgcgttttgtgatcccaagtgactctgtgggaagggtggggacgaggcgtcgggagggtatacagggagcccctcccgtgcatggctgcccccccgttcattttctccaccacagccgcttgcacgtatagatactgtggtcccctttcttttaatatataaattatgtatggtgaagtggagtgtattgtgtaggtcccgtatttaatgcctctgactgcctttgaagcgcagccctctgtggcccgcagccccctgagcctggctgttgtgtggtatttatgctctctttgtctgcctgtttctaaggaaatgcatgtgtgccctgagccgtgatgatcctcccatccgtgttgtgagcacaggcatttgtgtctggtctgtcctccctgttgattggtctggcatttccggtattaaaatgataaaataaatggcattttctg

SEQ ID NO: 140807 - DNA, 2777 bp, Homo sapiens
  Payload ID: 7615
  Gene Symbol: HIAT1
  Gene Name: hippocampus abundant transcript 1
  Uniprot ID: Q96MC6
  ENST ID: ENST00000370152
  CDS Start-End: 137-1609
aggcaggccgggccctcaagatggcggcgggcgcccagagcggctcggcccggcagtagtggtgggacggcactagctgctggggcctgccgccccgggagtggctgcagcagcgccaggaatcgaggatggtaaaatgacccaggggaagaagaagaaacgggccgcgaaccgcagtatcatgctggccaagaagatcatcattaaggacggaggcacgcctcaaggaataggttctcctagtgtctatcatgcagttatcgtcatctttttggagttttttgcttggggactattgacagcacccaccttggtggtattacatgaaacctttcctaaacatacatttctgatgaacggcttaattcaaggagtaaagggtttgttgtcattccttagtgccccgcttattggtgctctttctgatgtttggggccgaaaatccttcttgctgctaacggtgtttttcacatgtgccccaattcctttaatgaagatcagcccatggtggtactttgctgttatctctgtttctggggtttttgcagtgactttttctgtggtatttgcatacgtagcagatataacccaagagcatgaaagaagtatggcttatggactggtttcagcaacatttgctgcaagtttagtcaccagtcctgcaattggagcttatcttggacgagtatatggggacagcttggtggtggtcttagctacagcaatagctttgctagatatttgttttatccttgttgctgtgccagagtcgttgcctgagaaaatgcggccagcatcctggggagcacccatttcctgggaacaagctgacccttttgcgtccttaaaaaaagtcggccaagattccatagtgctgctgatctgcattacagtgtttctctcctacctaccggaggcaggccaatattccagcttttttttatacctcagacagataatgaaattttcaccagaaagtgttgcagcgtttatagcagtccttggcattctttccattattgcacagaccatagtcttgagtttacttatgaggtcaattggaaataagaacaccattttactgggtctaggatttcaaatattacagttggcatggtatggctttggttcagaaccttggatgatgtgggctgctggggcagtagcagccatgtctagcatcacctttcctgctgtcagtgcacttgtttcacgaactgctgatgctgatcaacagggtgtcgttcaaggaatgataacaggaattcgaggattatgcaatggtctgggaccggccctctatggattcattttctacatattccatgtggaacttaaagaactgccaataacaggaacagacttgggaacaaacacaagccctcagcaccactttgaacagaattccatcatccctggccctcccttcctatttggagcctgttcagtactgctggctctgcttgttgccttgtttattccggaacataccaatttaagcttaaggtccagcagttggagaaagcactgtggcagtcacagccatcctcataatacacaagcgccaggagaggccaaagaacctttactccaggacacaaatgtgtgacgactgaaatcaggaagatttttctatcagcacccaggtcttagttttcacctctagttctggatgtacattccatttccatccacagtgtactttaagattgtcttaagaaatgtatctgcatgaactccgtgggaactaaaggaagtgggaacttagaaccagacagttttccaaagatgttacaatttcttttgaaaaaccttttgtttattagcaccaatttcttgccactaagctatttgttttattatacatcctttaattaaaaactatatatgtaacttcttagatattagcaaatgtctctgctaccatttccttaaggtgttgagctttaactctatgctgactcagtgagacacagtaggtagtatggttgtggacctatttgttttaacattgtaaaattttgagtcagattttaatattgtaaaatcttgggtcaaataattcaaagccttaatgcagatgcactaaaacaaagaaatggtaaatgaattgtttgcatttaaaaaaaaaaactcttaagaaaactgtactaaatctgaatcatgttttgagcttgtttgcagtacttttaaacattattcactactgtttttgaagtgagaaagtatcagccatttagcatttaagttggggtatttagagcctgtaatctaaatgctggctcaaatttattccccagctacttcttataccactattcttttaatgtttgcataatcataagcacctcaacacttgaatacataatctaaaaattatatagtaaagctggtagccttgaaaatgtcagtgtgatatctattatgtagataaatatatatagtggcctttcaggactgtcacagtaacactttatttacagagctaatgtttgtcctaaattttcaggaccctagaggagagctttatacaattaccgatgtgaatttctctaaagtgtatatttttgtgtccagttatattatttaaaaaagtgttactttgtaaaaattgtatataaagaactgtatagtttacactgttttcatcttgtgtgtggttattgcttaatgctttttaaacttggaacactcactatggttaaataaggtcttaaaagaaatgtaaatattctgttaataaagttaaatattttaatgattttttttttaaaaaa

SEQ ID NO: 140808 - DNA, 467 bp, Homo sapiens
  Payload ID: 7615
  Gene Symbol: HIAT1
  Gene Name: hippocampus abundant transcript 1
  ENST ID: ENST00000421661
  CDS Start-End: 1-361
acatgaaacctttcctaaacatacatttctgatgaacggcttaattcaaggagtaaagggtttgttgtcattccttagtgccccgcttattggtgctctttctgatgtttggggccgaaaatccttcttgctgctaacggtgtttttcacatgtgccccaattcctttaatgaagatcagcccatggtggtactttgctgttatctctgtttctggggtttttgcagtgactttttctgtggtatttgcatacgtagcagatataacccaagagcatgaaagaagtatggcttatggactggtatgtatgtttattctataccttttgtatctgctgagaaatgccttgtttttaagataaatattattataaggagtgcaaacctttgcattacaagatttttgcgtaaaatatattttgtaataaaatcattcattagactacatttaaaatttttttgcggtat

SEQ ID NO: 140809 - DNA, 3420 bp, Homo sapiens
  Payload ID: 7616
  Gene Symbol: HIATL1
  Gene Name: hippocampus abundant transcript-like 1
  Uniprot ID: Q5SR56
  ENST ID: ENST00000375344
  CDS Start-End: 270-1790
cccgcccctgacgccgccggtaactgcgagagtcggggtcggtgcggtttgataagtggtcggttcctggagctgcggtcttctgctagcctgatccgcagcttcagcctccgccgcctcctcagccctcggcgccgccgctggcgccgccgcctgacccgcaggccgccgcgggccgcagagcccatgagggcgcgggcaccgccgccgcctccgcggcgtcgccgtcgtcccggagcgccccgggctggcgcgggcatggccgcggcatgagcgtggagccgccgccggagctggaggagaaggcggcgtcggagcccgaggcgggagccatgccggagaagcgcgcgggcgcgcaggccgcggggagcacctggctacaaggctttggccgaccaagtgtgtaccatgctgctattgtcatcttccttgaattctttgcgtggggcctgttgacaactccaatgttgactgttctacatgaaacattttctcaacacacattcctcatgaatggtctcattcaaggtgtaaagggcctgctctcttttttgagtgccccactcattggtgccctgtctgatgtgtgggggaggaagccctttctcctcggcactgtattctttacctgcttcccaatcccactgatgaggatcagcccatggtggtattttgcgatgatttctgtgtctggagtcttctcggtcacgttttctgttatatttgcctatgtagctgatgtcactcaggagcacgagcgaagtacagcttatggatgggtctcagccacctttgcggctagtcttgtcagcagcccggccattggagcatatctttctgccagttacggagacagcctcgttgtgctggtggccacagtggtggctcttctggacatctgcttcatcttagtggctgttccagaatctctgcctgagaaaatgagaccggtttcctggggagctcagatttcttggaaacaagcagacccttttgcgtcgttgaagaaagttggaaaagattctactgtcttactaatctgcatcaccgtgtttctttcataccttcctgaagctggacagtattcaagtttttttctctatctcaggcaggtcataggttttggatctgttaaaattgcagcattcatagctatggtaggaattctgtctattgtggctcagacggcctttcttagcatcttgatgagatcattaggaaataagaatactgtcctccttggcttgggcttccagatgctccagttagcctggtacggttttggatcacaggcctggatgatgtgggcagcagggaccgtggctgccatgtccagcatcacgtttccggcaatcagtgccctcgtctctcggaatgcagagtcagatcagcaaggagttgcccaggggatcataactggaataagaggactatgcaatggcctggggccagcactgtatggcttcatattctacatgttccatgtggaactgactgagttgggcccgaaattgaattctaacaacgttcccctgcagggagctgtcatcccaggcccgccgtttttatttggggcatgtatagtccttatgtcttttctggttgccttattcattcctgaatacagtaaagccagtggagttcaaaaacacagtaacagcagcagcggcagcctgaccaacaccccagaacggggcagtgatgaggacattgagccactactgcaagacagcagcatctgggagctctcttcatttgaggagcctgggaatcagtgcactgagctgtaaactcggcagaaagtgggattctgcatacgccatctctgagagccatggagggagccacacccctggtgacttcatggtgctggatgggagacgctagcggcatccttcagggccaagtttgataaataccaccgccatcattctgctcatcctcctcctgttttttttttttctcttacattctttttttttttcctgtttatacattagaacaagataagatttgaaatacttccttgcaaataatgtgcaactcccaaggtgaaactcaaatagaaaaagtcatctctctggtagaaaggatggctttcctgtaatgactatagagtaagagtggcagcaatctttccatgcccttttcagcagaaggcacagaacagtagcgggactgccatctctggcaagatttcaggtaaagaatctcttcttaatttctaccttcctgtttctctgaatcagcccataggtgttgatgagtggccactcttaaagagtcactcagtatcagggatctactgtctttgttcaaaggtcaaataaaaacctagtctccttttattctactttctattcttagctagaatgaaactcagcatatatacacttctggacataataatattgaatagtaattacctttactagatgaaagaaattttcattacaaacttaaatcatgtaaaactcaacaactcagattcctggacctggtgtcctggttgggtccaaggtgattttacagaagaaaaaaacaactcaagcattctggtggcaacatagagattgtaggctgcttctaagaaagttattaacaatttggaaattcctaagtaggatgagagttagtaactggatacgagtgaagtttatatccaagttcagactcaaaggcattattatgatttgcttcttcccatgtcttccatgtcctgcttctcaaagtttttctcatccatcacactcctgccttaactgctctgagtatgcatttgttttcaattcatctttatttcaatctgtttaacttttgaatcgcatgggaatacgcacattaagttcctttctaaaataaggttttatgaagctgagtttcacgataagtgtcttgctattttttgagatgttttatggacaaagaaaactttacagatttatatgtattttgctgcaccagtaaatggaccattaactagggcccacctttaacagagcacccctttgaaagttttataggtatgaaatatatgtagatatttgtaaagggttttaattttttttttttgatggggtgctgtgtaaatcttgtatttataaatgtaatgaaggtattgacagaaaaaaatatatacaacttttataaaggattgtgtactgactgaatacatttaaaagaaaatatattttgaaacctgttctgctatgaacagagataacatatctttttactatgctattggtttttaggttaagcttcctaatgcataataaatttacagtggttacttttatgtcttgtgtcttttttttaaagcaaatagtattgctcttttgggttctctgttgggtggctttcaattaaactgagttgtaatctttcagctgatgcaaaaggtatgtattttcaaaaaaa

SEQ ID NO: 140810 - DNA, 2275 bp, Homo sapiens
  Payload ID: 7616
  Gene Symbol: HIATL1
  Gene Name: hippocampus abundant transcript-like 1
  ENST ID: ENST00000428393
  CDS Start-End: 126-599
tcttactaatctgcatcaccgtgtttctttcataccttcctgaagctggacagtattcaagtttttttctctatctcaggcaggtcataggttttggatctgttaaaattgcagcattcatagctatggtaggaattctgtctattgtggctcagacggcctttcttagcatcttgatgagatcattaggaaataagaatactgtcctccttggcttgggcttccagatgctccagttagcctggtacggttttggatcacaggcctggatgatgtgggcagcagggaccgtggctgccatgtccagcatcacgtttccggcaatcagtgccctcgtctctcggaatgcagagtcagatcagcaaggatttaggagttgcccaggggatcataactggaataagaggactatgcaatggcctgggccagcactgtatggcttcatattctacatgttccatgtggaactgactgagttgggcccgaaattgaattctaacaacgttcccctgcaggggagctgtcatcccaggcccgccgtttttatttggggcatgtatagtccttatgtcttttctggttgccttattcattcctgaatacagtaaagccagtggagttcaaaaacacagtaacagcagcagcggcagcctgaccaacaccccagaacggggcagtgatgaggacattgagccactactgcaagacagcagcatctgggagctctcttcatttgaggagcctgggaatcagtgcactgagctgtaaactcggcagaaagtgggattctgcatacgccatctctgagagccatggagggagccacacccctggtgacttcatggtgctggatgggagacgctagcggcatccttcagggccaagtttgataaataccaccgccatcattctgctcatcctcctcctgttttttttttttctcttacattctttttttttttcctgtttatacattagaacaagataagatttgaaatacttccttgcaaataatgtgcaactcccaaggtgaaactcaaatagaaaaagtcatctctctggtagaaaggatggctttcctgtaatgactatagagtaagagtggcagcaatctttccatgcccttttcagcagaaggcacagaacagtagcgggactgccatctctggcaagatttcaggtaaagaatctcttcttaatttctaccttcctgtttctctgaatcagcccataggtgttgatgagtggccactcttaaagagtcactcagtatcagggatctactgtctttgttcaaaggtcaaataaaaacctagtctccttttattctactttctattcttagctagaatgaaactcagcatatatacacttctggacataataatattgaatagtaattacctttactagatgaaagaaattttcattacaaacttaaatcatgtaaaactcaacaactcagattcctggacctggtgtcctggttgggtccaaggtgattttacagaagaaaaaaacaactcaagcattctggtggcaacatagagattgtaggctgcttctaagaaagttattaacaatttggaaattcctaagtaggatgagagttagtaactggatacgagtgaagtttatatccaagttcagactcaaaggcattattatgatttgcttcttcccatgtcttccatgtcctgcttctcaaagtttttctcatccatcacactcctgccttaactgctctgagtatgcatttgttttcaattcatctttatttcaatctgtttaacttttgaatcgcatgggaatacgcacattaagttcctttctaaaataaggttttatgaagctgagtttcacgataagtgtcttgctattttttgagatgttttatggacaaagaaaactttacagatttatatgtattttgctgcaccagtaaatggaccattaactagggcccacctttaacagagcacccctttgaaagttttataggtatgaaatatatgtagatatttgtaaagggttttaattttttttttttgatggggtgctgtgtaaatcttgtatttataaatgtaatgaaggtattgacagaaaaaaatatatacaacttttataaaggattgtgtactgactgaatacatttaaaagaaaatatattttgaaacctgttctgctatgaacagagataacatatctttttactatgctattggtttttaggttaagcttcctaatgcataataaatttacagtggttactttt

SEQ ID NO: 140811 - DNA, 619 bp, Homo sapiens
  Payload ID: 7617
  Gene Symbol: HIATL2
  Gene Name: hippocampus abundant transcript-like 2
  Uniprot ID: Q5VZR4
  ENST ID: ENST00000375223
  CDS Start-End: 215-619
gcggtttgctaagtggtcggttcctggagctgcggtcttctgctagcctgatccgcagcttcagcctccgccgcctcctcagccctcggcgccgccgcctgacccgcaggccgccgcgggccgcagagcccatgagggcgcgggcaccgccgccgcctccgcggcgtcgccgtcgtcccggagcgccccgagctggcgcgggcatggccgcggcatgagcgtggagccgccgccggagctggaggagaaggcggcgtcggagcccgaggcgggagccatgccggagaagcgcgcgggcgcgcaggccgcggggagcacctggctacaaggctttggcccaccaagtgtgtaccatgctgctattgtcatcttccttgaattctttgcgtggggccttttgacaactccaatgttgactgttctacatgaaacattttctcaacacacattcctcatgaatggtctcattcaaggtgtaaagggcctgctctcttttttgagtgccccactcattggtgccctgtctgatgtgtgggggaggaagccctttctcctcggcactgtattctttacctgcttcccaatcccactgatgaggatcagcccatgccaggcgtga

SEQ ID NO: 140812 - DNA, 786 bp, Homo sapiens
  Payload ID: 7617
  Gene Symbol: HIATL2
  Gene Name: hippocampus abundant transcript-like 2
  ENST ID: ENST00000602917
  CDS Start-End: 215-667
gcggtttgctaagtggtcggttcctggagctgcggtcttctgctagcctgatccgcagcttcagcctccgccgcctcctcagccctcggcgccgccgcctgacccgcaggccgccgcgggccgcagagcccatgagggcgcgggcaccgccgccgcctccgcggcgtcgccgtcgtcccggagcgccccgagctggcgcgggcatggccgcggcatgagcgtggagccgccgccggagctggaggagaaggcggcgtcggagcccgaggcgggagccatgccggagaagcgcgcgggcgcgcaggccgcggggagcacctggctacaaggctttggcccaccaagtgtgtaccatgctgctattgtcatcttccttgaattctttgcgtggggccttttgacaactccaatgttgactgttctacatgaaacattttctcaacacacattcctcatgaatggtctcattcaaggtgtaaagggcctgctctcttttttgagtgccccactcattggtgccctgtctgatgtgtgggggaggaagccctttctcctcggcactgtattctttacctgcttcccaatcccactgatgaggatcagcccatgccgggtgtggtggcgtgcacctgtagtcccagctacctgtggcaggagaatggcttgaacccaggaagcggaggttgcagtgagccaagatcacaccattgcactccagcctaggcatggtgagactccatctcaaaaaaaaaaaaaaattaaattgtattgattttctcttttcaa

SEQ ID NO: 140813 - DNA, 3388 bp, Homo sapiens
  Payload ID: 7618
  Gene Symbol: HIRIP3
  Gene Name: HIRA interacting protein 3
  Uniprot ID: Q9BW71
  ENST ID: ENST00000279392
  CDS Start-End: 832-2502
cgcgccaggcctcatcccccacagccttcccgcggcagcactcacgtagatgaggaacttgagcttccgcttcagattccggtatttttttttgtagtccacttcgccgtccgccggcccgttcatgaccggcccgggagtggcgcccagagtctgccctcccgctaccccaagcagtggctgccgtgccgctcccgcctccacttccggagacgctgcaaggctgtgccgtcaggactacaactcccggcgtaccccgcgctcaggggcgtcaccgcacgggccgacctcccgggggacactgggacaggagcgcggcagccactgcgctggggatggcgtagcagcgacgcggtgacgccacaaaaatggcggacgctggaaagcgccgttcctgactctaatgtacttagacacttgaagccacaaaaggatttatccccgaggttcctcatctgctcgcgaggatgccttttctcttctgccttgcgaaataacagcagcctagctgttgcccgtgaccagtgagaaaggcagcgtcgcgggctgattaggtttcacccaaagggtgccggcgccgaattggtttctaacgagaacttttaaaatgatccgttccaaaaaagggtaggagccgcgagaccctccaactgcccagagaaaacaagtctcgtctggcaaagttctcggcccacgcggtccgcggccaagggccaacggtccctcgccccacgttgccgcagcactgcgcgtgcgcgagccgctgtcaaacgcgctgacggaggccgagaagaaaaaaaggcgggagccgtcaatcccgggttgagcaaaatggcgcgggagaaggagatgcaggagttcacccgtagcttcttccgaggccgcccggacctcagcacgcttacgcattccatcgtgcggcggaggtacttagctcactcgggccgcagccacctggagcccgaggagaagcaggcactgaagcggctggtggaggaggagctgctgaagatgcaggtggatgaagccgcttccagggaagacaaactggaccttaccaagaagggcaagaggcctcccaccccttgtagcgacccggagagaaaaaggttccgcttcaattcagagtcggagtccggctctgaagcctccagcccagactactttggacccccagcaaagaatggggtggcagcagaagtcagcccagccaaagaggagaatccaaggcgagcctcaaaggcagttgaggagagcagtgatgaggaacggcagagggacctgcccgcacagaggggagaggagagcagtgaggaggaggaaaaggggtacaaggggaagactaggaagaaacctgtggtaaagaagcaggcaccaggcaaggcctcagtcagtaggaagcaggccagggaagaaagtgaggagagcgaggcagaacccgttcagaggacagcaaagaaggtggagggaaataaaggaactaaaagcctgaaggaaagtgaacaggagagtgaagaggagatcctagcccagaagaaagagcagagagaggaggaagtggaggaggaagagaaagaagaggatgaggaaaagggggattggaaacccagaaccaggagcaatggccggagaaagtcagctagggaggagaggagctgtaagcagaaaagccaggcaaagaggctcttgggagactcagacagcgaggaagagcagaaagaggcagccagcagtggggatgacagtgggagagatagagaacccccagtgcagaggaagagtgaggacaggacccagcttaagggtgggaagaggttgagtggaagcagcgaggacgaggaagacagtgggaagggggaacccacagctaaaggctctagaaagatggccagactgggcagcaccagtggtgaggaaagtgacttggagagggaggtaagtgacagcgaggcagggggaggcccccagggggagaggaagaaccgctcttccaagaagagctccaggaaaggcaggacacgaagctcctcttcctcctcagatggaagtccagaggccaaaggagggaaggctggctcaggtcgccgtggagaggaccacccggctgtgatgaggctgaagcgctacattcgggcctgtggtgcccatcgaaactacaagaagctgttgggctcctgttgctcacacaaggagcgcctgagtatcctccgggcagaactggaagcgctaggcatgaagggtaccccttccctagggaagtgtcgggccctgaaggagcagagggaggaggcagctgaggtggcctccttggatgttgcgaacatcatcagtggctcgggccggccacgcagacgtacagcctggaaccctttaggagaagcagcacccccaggggagctgtaccgacggaccctggactcagatgaagagcggccccgtcccgcacccccagactggtcacatatgcgtggcatcatcagcagtgatggcgagagtaactgagctctgccacccccaggagggacccttgatacatgtacaaagcatacatagcaccccttgccctgtgtctgtggaacagaagcagcttccttcagagaagactgcagctcccaaggacacaagctgttgggatgctacttctcagcttcacgctgtccctttaaggtgtttattttttaagactcaataaaggagtgtttttaatcacctcatcaaatttggtcccccattctcacctcctgtattttgggccaggaaactgagcagtagtcactgcctccacctcctcccctggcctggttccctttaatttcccccgggttcctggaagaagtccctgcctccagaccctgtcatccaacagccaccagacccttttggagaagggtgtgtggctcctgtgctgcccgcctaccccgtggcccctctgcttttagcctagtctgataacctaatgcccacttgggagagggatagaatgacttgagggcagccagtgcttaagccttctcccttatgcaaacagccactttgtccatgggctgttagcctcaaaggggtggggaaaagcccatacctcctgggccagtcctagccctctaggcctctggctacaggcccagcctctgcagtcacatgaggtctccactgaactctggctgctgaggcttgcgggaagattcgtgagcatggagctgcctggggtctgtgtgggaggcaaacctaagaatctttgaagtcaaagcaaagaaaacgaattagaggtcaaggggttgaagaccacctttgagatccgagatctggtcacacctaaagtcattaaaatcactgaaatgtttagatacacagcccaataaattctctttataaaacacaagcagtacta

SEQ ID NO: 140814 - DNA, 988 bp, Homo sapiens
  Payload ID: 7618
  Gene Symbol: HIRIP3
  Gene Name: HIRA interacting protein 3
  Uniprot ID: Q9BW71
  ENST ID: ENST00000564026
  CDS Start-End: 39-566
aaaaaaaggcgggagccgtcaatcccgggttgagcaaaatggcgcgggagaaggagatgcaggagttcacccgtagcttcttccgaggccgcccggacctcagcacgcttacgcattccatcgtgcggcggaggtacttagctcactcgggccgcagccacctggagcccgaggagaagcaggcactgaagcggctggtggaggaggagctgctgaagatgcaggtggatgaagccgcttccagggaagacaaactggaccttaccaagaagggcaagaggcctcccaccccttgtagcgacccggagagaaaaaggttccgcttcaattcagagtcgggctggctcaggtcgccgtggagaggaccacccggctgtgatgaggctgaagcgctacattcgggcctgtggtgcccatcgaaactacaagaagctgttgggctcctgttgctcacacaaggagcgcctgagtatcctccgggcagaactggaagcgctaggcatgaagggtaccccttccctagggaagtgtcgggccctgaaggagcagagggaggaggcagctgaggtggcctccttggatgttgcgaacatcatcagtggctcgggccggccacgcagacgtacagcctggaaccctttaggagaagcagcacccccaggggagctgtaccgacggaccctggactcagatgaagagcggccccgtcccgcacccccagactggtcacatatgcgtggcatcatcagcagtgatggcgagagtaactgagctctgccacccccaggagggacccttgatacatgtacaaagcatacatagcaccccttgccctgtgtctgtggaacagaagcagcttccttcagagaagactgcagctcccaaggacacaagctgttgggatgctacttctcagcttcacgctgtccctttaaggtgtttattttttaagactcaataaaggagtgtttttaatcacctcatcaaa

SEQ ID NO: 140815 - DNA, 504 bp, Homo sapiens
  Payload ID: 7619
  Gene Symbol: HNMT
  Gene Name: histamine N-methyltransferase
  Uniprot ID: P50135
  ENST ID: ENST00000280096
  CDS Start-End: 20-175
ctttctcagaaaaccaaatatggcatcttccatgaggagcttgttttctgaccacgggaaatatgttgaatctttccggaggtttctcaaccattccacggaacaccagtgcatgcaggaattcatggacaagaagctgccaggcataataggaagataccagaattgctgttaacaaataaaatactggccagatgtgttggttcacgcctgtaatcctagcacttcgggaggctgaggcgggaggattacttgagcctaggagtttgagaccagcctgggcaacatagcaagatcccatctctacaaaaaagtgaaaaagttagctgaacaaggcggcatgcacatgctactccagacgctgaagtgggaagatcacttaagtccgagagatcgaggcttcagtgagatatggctgagacactgctctcagcctggatgacagagtgagaacctgtctcaaacaagagaaaaaaataaatcaaatgctactcaaaattctca

SEQ ID NO: 140816 - DNA, 3295 bp, Homo sapiens
  Payload ID: 7619
  Gene Symbol: HNMT
  Gene Name: histamine N-methyltransferase
  Uniprot ID: P50135
  ENST ID: ENST00000280097
  CDS Start-End: 183-1061
gactcagtaatgagctctacaagccagcctttgtggcatgttaaattcaaaacaagcttagcatttttttttttttttttggatagaaactggtgggggtggggaaagaaagagggaactgggaagagaaggaggggaacttaaaccttgcttcctgctctgtctttctcagaaaaccaaatatggcatcttccatgaggagcttgttttctgaccacgggaaatatgttgaatctttccggaggtttctcaaccattccacggaacaccagtgcatgcaggaattcatggacaagaagctgccaggcataataggaaggattggagacacaaaatcagaaattaagattctaagcataggcggaggtgcaggtgaaattgatcttcaaattctctccaaagttcaggctcaatacccaggagtttgtatcaacaatgaagttgttgagccaagtgctgaacaaattgccaaatacaaagagcttgtagccaagacatcgaacctcgagaacgtaaagtttgcttggcataaggagacatcatctgaataccaaagtagaatgttggagaaaaaggagcttcaaaagtgggactttattcatatgattcaaatgctgtattatgtaaaagacatcccagctaccctgaaattcttccatagtctcttaggtaccaatgctaagatgctcattattgttgtgtcaggaagcagtggctgggacaagctgtggaaaaagtacggatcacgctttccccaggatgacctctgccagtatatcacatcagatgacctcactcagatgctggacaacctagggcttaagtatgagtgctatgaccttttgtccaccatggatatatctgactgctttattgatggtaatgaaaatggagacctgctttgggattttttgactgaaacctgcaactttaatgccacagcaccacctgatctcagagcagagcttgggaaagatctacaagagcctgaatttagtgctaagaaagaggggaaggttctttttaataatactctgagtttcatagtgattgaggcataactatcaatcacaaaagtatattcaaaaattatattttgaacaactcgaatcactcatttatttccatattaaaatcacaaactcatccattaatgtagataaagcactgtttggatatgagatgtagcaaattccaatacattattggacttccatttggaatcatatgggatactgctggtcttatcctgtccctcctccaggtagagagaccacaagcaggctcaacataacataagctagaaaaattagatgactgaatttctatggcatattgataataaaattcattccatttgctgattgtctgaaattttctagaatactaataaaatacatactatagattctttattagtgaagtatgcactaatcaatactttgaacacaaagcctgtgttactgatttggccgttttgtgaagaaacatttatctttgtacgttcttctattgtgctttctatctaatttttattaatttgtaagagtaagcacctttagaatattaaaaattaattctttatcacatgttgtcatttcttcccattgtgttttctcttgtaattttatctgtgaattaatagctttttgtttgtctttttgatatactgaagttttctattatattcagccagatttttttttaagtctcggcttctgatacattttaaaagaccttctaaaaccaaggttttagaatactaacattttatcaaaataatattatagttttgctttttttaaaaaatgaaatctttactatgtttgaaatttagataagtataaacagtgagaacaaactgtttcccctcaaaataatagccagatgtataaacaaaatttattgaagaacaaagaaacacaaaactaaacctgttctagcttaaaatgcagcttttaccagatttctaggaattgggtaaatgcaaggttctagaaaaccttcaatgcattttgatactttatagtttcttatgtcactctcaagaactcctataagaccaagagtcatctttggactgtaggatttcaggggggttttgaaaacaaatttgatgtttcttatttttaataataacgctctgttatttttgacataaacagtacatttaataattaataaataaatattttaagtatgtaaataattagtactccctgtcacaaacaaaacaaaagtaaggttttactaaacagctcatgagccctcattctgccagtgaggaagccttcaaccccgtgtgatactcactctttcatgcaatagggcttccatgtaatgttgccgtataatcactttaaaaagttaaacgacccatctcaatcacctagtttatccccagggaatacactggcatagagagcctatttacactaataaactaccaagctttgttgttcataataagtaaaatggacttgcattgctctcttttttggacaacttcatcaatgctttttgaattatatgtttcaacaaatgaaacgacagttatccaatcagattcctgaaaatgaacactgaaccgttaatcatactgatatgtactactgacaaaggaaatctgtgaggcacacatgattgatgggtatggggccatgaagaccttgaagagcttcaccagaagtatggaaatcaagactttacagagtcttttgtataaagcacacgtgcaaaaacaaacaaaattagaactaacaatgctattgaaagatacaaaagaattgcagtccatagattggtgtttgtaaatatggcctttttctcgtccttattaaacccttagtatacaaggataaataaattctcacctgcttaattttagtgcaattgaaacacataagcctttttaaagagagaaattcccatgaaaacctactagtcagcaatgggaagttgtataaattcaagggataaacctatccctgttttcttcctgcactgtatgataataccaaaatttgggacagtcacatactaacttttcagatttgttcttgtgtttcagaaaaaagtgctcagcatgaatttggaatgttgttttatgtattgttgtggatctctcagtgtttaacatggtgccttgcatatggtaaatgctaagtaaagcgggatcaatgaattatttccttctcaaacatttatcttataccttgtgtgttcatattattattataaacagagctcaagaaacccaataaagttatgtgttgccagtgtaaaccttaactta

SEQ ID NO: 140817 - DNA, 835 bp, Homo sapiens
  Payload ID: 7619
  Gene Symbol: HNMT
  Gene Name: histamine N-methyltransferase
  Uniprot ID: P50135
  ENST ID: ENST00000329366
  CDS Start-End: 183-563
gactcagtaatgagctctacaagccagcctttgtggcatgttaaattcaaaacaagcttagcatttttttttttttttttggatagaaactggtgggggtggggaaagaaagagggaactgggaagagaaggaggggaacttaaaccttgcttcctgctctgtctttctcagaaaaccaaatatggcatcttccatgaggagcttgttttctgaccacgggaaatatgttgaatctttccggaggtttctcaaccattccacggaacaccagtgcatgcaggaattcatggacaagaagctgccaggcataataggaaggattggagacacaaaatcagaaattaagattctaagcataggcggaggtgcagattgtctcattcggggaagctccagggttctcaagcggaattcgtgtttcattttgtgtagcacccgtcagaaagacaagccaggcatgaggatccatgatgagcgctcttctgagttgccatttggagctgcccgtttagaaagcaaatctgcatttccctcattcctagtttccttcatcctcttttaagtgtcatcttttccatgaagcctactagatcacacagttgaaaattgcaaagtcttcacaccgcagcttcccctttctttgttgctttggttttctccgtgggacttcccaccatccgtaaaattaggtgtttttgcctgttttattcactgctacgtctccaatggttagaacctgacatttagtgggtgctcaataatatttgttgaagtaatgtataataacttcactttcttgagtaattactatatatcatgaactgtggtaaatta

SEQ ID NO: 140818 - DNA, 1150 bp, Homo sapiens
  Payload ID: 7619
  Gene Symbol: HNMT
  Gene Name: histamine N-methyltransferase
  Uniprot ID: P50135
  ENST ID: ENST00000410115
  CDS Start-End: 149-1027
cagtcttccgttaaagatttcactgctgtagatttctgagagtgctgtgtagctgtcctctttatcctggtgtttgccacttcgaacagtcactttcccacttggaacttacttgtggctttgctgacaaaacaggaaaaaaccaaatatggcatcttccatgaggagcttgttttctgaccacgggaaatatgttgaatctttccggaggtttctcaaccattccacggaacaccagtgcatgcaggaattcatggacaagaagctgccaggcataataggaaggattggagacacaaaatcagaaattaagattctaagcataggcggaggtgcaggtgaaattgatcttcaaattctctccaaagttcaggctcaatacccaggagtttgtatcaacaatgaagttgttgagccaagtgctgaacaaattgccaaatacaaagagcttgtagccaagacatcgaacctcgagaacgtaaagtttgcttggcataaggagacatcatctgaataccaaagtagaatgttggagaaaaaggagcttcaaaagtgggactttattcatatgattcaaatgctgtattatgtaaaagacatcccagctaccctgaaattcttccatagtctcttaggtaccaatgctaagatgctcattattgttgtgtcaggaagcagtggctgggacaagctgtggaaaaagtacggatcacgctttccccaggatgacctctgccagtatatcacatcagatgacctcactcagatgctggacaacctagggcttaagtatgagtgctatgaccttttgtccaccatggatatatctgactgctttattgatggtaatgaaaatggagacctgctttgggattttttgactgaaacctgcaactttaatgccacagcaccacctgatctcagagcagagcttgggaaagatctacaagagcctgaatttagtgctaagaaagaggggaaggttctttttaataatactctgagtttcatagtgattgaggcataactatcaatcacaaaagtatattcaaaaattatattttgaacaactcgaatcactcatttatttccatattaaaatcacaaactcatccattaatgtagataaagcactgtttggatatgagat

SEQ ID NO: 140819 - DNA, 743 bp, Homo sapiens
  Payload ID: 7619
  Gene Symbol: HNMT
  Gene Name: histamine N-methyltransferase
  Uniprot ID: P50135
  ENST ID: ENST00000475675
  CDS Start-End: 14-169
cagaaaaccaaatatggcatcttccatgaggagcttgttttctgaccacgggaaatatgttgaatctttccggaggtttctcaaccattccacggaacaccagtgcatgcaggaattcatggacaagaagctgccaggcataataggaagataccagaattgctgttaacaaataaaatactggccagatgtgttggttcacgcctgtaatcctagcacttcgggaggctgaggcgggaggattacttgagcctaggagtttgagaccagcctgggcaacatagcaagatcccatctctacaaaaaagtgaaaaagttagctgaacaaggcggcatgcacatgctactccagacgctgaagtgggaagatcacttaagtccgagagatcgaggcttcagtgagatatggctgagacactgctctcagcctggatgacagaaatcttcttacgtctagtattctgaaattttaaaatactgagctgtgaaatggttcctttttacccattttatgggtactccctgggctatttcaattgagattcagatccttcagttatgcggaactttggattggagacacaaaatcagaaattaagattctaagcataggcggaggtgcagggcggggccaagatggccgactagaaacagcagcgtttggaggcccccattgaaaaaaaacataagcttgtgaatacttcaccagcaaccaaggcatccaggttctctcatcagaactg

SEQ ID NO: 140820 - DNA, 4711 bp, Homo sapiens
  Payload ID: 7620
  Gene Symbol: HRH1
  Gene Name: histamine receptor H1
  Uniprot ID: P35367
  ENST ID: ENST00000397056
  CDS Start-End: 192-1655
agtattggagtgttacagggagacatacaggatttaagaagcccatcatggagaagaccttcaattacagagataaaaagtttttcttgtgaacaagttacactagatggaagataacagactgaggagtgagctgcttctgactcgattaaaaagggagtgagccataactggtggctgctcttgcgccaatgagcctccccaattcctcctgcctcttagaagacaagatgtgtgagggcaacaagaccactatggccagcccccagctgatgcccctggtggtggtcctgagcactatctgcttggtcacagtagggctcaacctgctggtgctgtatgccgtacggagtgagcggaagctccacactgtggggaacctgtacatcgtcagcctctcggtggcggacttgatcgtgggtgccgtcgtcatgcctatgaacatcctctacctgctcatgtccaagtggtcactgggccgtcctctctgcctcttttggctttccatggactatgtggccagcacagcgtccattttcagtgtcttcatcctgtgcattgatcgctaccgctctgtccagcagcccctcaggtaccttaagtatcgtaccaagacccgagcctcggccaccattctgggggcctggtttctctcttttctgtgggttattcccattctaggctggaatcacttcatgcagcagacctcggtgcgccgagaggacaagtgtgagacagacttctatgatgtcacctggttcaaggtcatgactgccatcatcaacttctacctgcccaccttgctcatgctctggttctatgccaagatctacaaggccgtacgacaacactgccagcaccgggagctcatcaataggtccctcccttccttctcagaaattaagctgaggccagagaaccccaagggggatgccaagaaaccagggaaggagtctccctgggaggttctgaaaaggaagccaaaagatgctggtggtggatctgtcttgaagtcaccatcccaaacccccaaggagatgaaatccccagttgtcttcagccaagaggatgatagagaagtagacaaactctactgctttccacttgatattgtgcacatgcaggctgcggcagaggggagtagcagggactatgtagccgtcaaccggagccatggccagctcaagacagatgagcagggcctgaacacacatggggccagcgagatatcagaggatcagatgttaggtgatagccaatccttctctcgaacggactcagataccaccacagagacagcaccaggcaaaggcaaattgaggagtgggtctaacacaggcctggattacatcaagtttacttggaagaggctccgctcgcattcaagacagtatgtatctgggttgcacatgaaccgcgaaaggaaggccgccaaacagttgggttttatcatggcagccttcatcctctgctggatcccttatttcatcttcttcatggtcattgccttctgcaagaactgttgcaatgaacatttgcacatgttcaccatctggctgggctacatcaactccacactgaaccccctcatctaccccttgtgcaatgagaacttcaagaagacattcaagagaattctgcatattcgctcctaagggaggctctgaggggatgcaacaaaatgatccttatgatgtccaacaaggaaatagaggacgaaggcctgtgtgttgccaggcaggcacctgggctttctggaatccaaaccacagtcttaggggcttggtagtttggaaagttcttaggcaccatagaagaacagcagatggcggtgatcagcagagagattgaactttgaggaggaagcagaatctttgcaagaaagtcagacctgtttcttgtaactgggttcaaaaagaaaaaaataataaaaataaaagagagagagaatcagacctgggtggaactctcctgctcctcaggaactatgggagcctcagactcattgtaattcaagctttccgagtcaagtgattgacaactgaagagacacgtggctagggttccactggagaattgaaaaggactcttgagccctcctggaatggagctgtataactgtgcagagactttatccatgccaatagttgctgtccccttccaggggtcaccttgagaggcatgacagctgttccacaggggctatcccttctcagaaaacttctcttctgagcctctttaacagctttctccagaaccagtgtctgaaccaccctggaaattctgccttattatttcttactcaaacatgtttagagtggatagaaaattatgcagcttgcacacccatcgtctttaaccccaaatttcctttggctattaaaaaagtggtggcaaaagacatcctcaaaagaaagagaaatgaaatatttttgaatggttgcacgttaaaaattaaaagaaggaatgggggcagaatgccatatttttgagggctgtactaggtttatctcatttaagccccacaacaccccacaggagggtaattttctaactctagtttgcagaggagcaaattgaggttcagcaaggtgagagaggtacccaaggtcacatagctagttatgtgagaaagttagagtacagatcctctggggtttcagcttattgtagcatattttctccgaaaggcaaaaatgtgcccttttggccgggcatggtagctcaagcctataatcccagcatgttgagaggctgaggtgggcagatcatttgaggccaggagttcaagaccagtctggccaatatggagaaaccttgtctctactaaaaacacaaaaattatctgggcatggtggggcatgcctgtagtcccacttacttgggaggccgaggcacgagaattgcttgaacccgggaggtggaggttgccgtgagccaagatcacgccactgcactccagcctgggcaacagagcaagactctgtctcaaaaaaaaaaatacaatattttaacaatgtgccctcttaagtgtgcacagatacacatacacggtattcccaagagtggtggcagctcaaaatgatatgtttgagtagacgaacagctgacatggagttcccgtgcacctacggaaggggacgctttgaaggaaccaagtgcatttttatctgtgagttctgttgtgtttgtcaaaaagtcattgtaatctttcatagccatacctggtaagcaaaaactagtaaagacataggaacatgtagttttacttggtgtttatgttgcaatctggttgtgatttatattttaaagcttggtgctaaaccacaatatgtatagcatatggagtgcctgtacaagctgatgttttgtattttgtgttcctctttgcatgatctgtcaaagtgagatatttttacctgcctaaaatatgatgtttaaaagcatactctatgtgatttatttatttctacctttctgagtctcttggactaagaagatgttttgaaatgtaccatcaaatgttaacagagtttgatatgggctttctctttggtttctcatcacatttgtaaatgtcttttcaaaaggatttactttttgtaaaaagcttcattctcactctgctttgcatcccccaaacttcttgttcaaaacggggggagtttaggagactttaatcccggtttcagaagctgcagctggtctgtttccaggtcagaaaccattgttcagaagacctccctgtgagagagttgctcctcagggtccctcaggaccaaagaacactcgaaaagagcacttcacacagacaagtggctaagtgtccattatttaccttgaacaatcaaggcaactagtggagagaactgattgtgagctctgcctctgggtcagagagacctggatttgagtctgacaagaacaagaaatggtcaataaatataaattaccagcgtctaaggaacaaggtctatgcattattgtatacagtgtctctagtgcttgtatagtgtctggtatacagagggcactcctatgcatttttaaaacatgctgagcacataccatgtgccaggctttgtgttttatctaatgttatctaatggtattggtgccattatgtaatgttgcctttacaacaacctcatgagggagatttccatctttacaaataggcaaactgaggcccagagagattgaggaactgctccgaggtctgattctggaatgtgcttcctttccactttatcaatctgctcttcgtactcctgtctgaacgatggaaattaatttttgaatgtataaaagacaacagactatgatacagaaatgtcagccccagcccactaagaaagccccagcccatcagtggctaatggctttaataaattggtcatttggctacttggcttgtggacaatctctgacctcttttgaagatgggcactgcatggacttccaggaggtggatttaatagtcttaactcagcatgaaaaagatgctgggatgctcctggctatttatgcaccctaagtgccatagagacatgctgttggcaaggcatggtggctcatgcctgtaatcccagcacactgggaggctgacgcgggcagatggctggagtccaggagttcgagacaagcctgggcaccatggtgaaatcctgtctctactaaaaataaaaaattagccaggggctgtgacgca

SEQ ID NO: 140821 - DNA, 574 bp, Homo sapiens
  Payload ID: 7620
  Gene Symbol: HRH1
  Gene Name: histamine receptor H1
  ENST ID: ENST00000413416
  CDS Start-End: 537-574
ttcccggcaggagagcagcatttgtaaaggtatggggtgtacacgagcagggcctatttggggagagtggagaatcagagatgaggctgcacagtaaggtgagaccaggtggaaaaagctctgtgtgatgggtcgaaggtattgacatatactagccactgcccggcaccctccctccgtttccggagtagacctgtttgcttatctcgtgggcatttgccaggctgattagagtaatgagtaaagaaaagagggcactgggaaagctaagttcatttatattagaaattacatgatactcttccataaatcagaaagattgaagagtgggtgaaagaagggaaaagggaattaaaggggaaccaaggcaacctgaagtttttgagagagagagcaggaagatttgaggatgagcaggtgatgctgtagctggcgctatgtagcgacagatgggagaagttctttgtgatggttttgcctctttgagagtcttcagtaaagggagtgagccataactggtggctgctcttgcgccaatgagcctccccaattcctcctgcctcttagaagacaa

SEQ ID NO: 140822 - DNA, 4278 bp, Homo sapiens
  Payload ID: 7620
  Gene Symbol: HRH1
  Gene Name: histamine receptor H1
  Uniprot ID: P35367
  ENST ID: ENST00000431010
  CDS Start-End: 63-1526
accaaactttccccggagccggcgccgggagtgagccataactggtggctgctcttgcgccaatgagcctccccaattcctcctgcctcttagaagacaagatgtgtgagggcaacaagaccactatggccagcccccagctgatgcccctggtggtggtcctgagcactatctgcttggtcacagtagggctcaacctgctggtgctgtatgccgtacggagtgagcggaagctccacactgtggggaacctgtacatcgtcagcctctcggtggcggacttgatcgtgggtgccgtcgtcatgcctatgaacatcctctacctgctcatgtccaagtggtcactgggccgtcctctctgcctcttttggctttccatggactatgtggccagcacagcgtccattttcagtgtcttcatcctgtgcattgatcgctaccgctctgtccagcagcccctcaggtaccttaagtatcgtaccaagacccgagcctcggccaccattctgggggcctggtttctctcttttctgtgggttattcccattctaggctggaatcacttcatgcagcagacctcggtgcgccgagaggacaagtgtgagacagacttctatgatgtcacctggttcaaggtcatgactgccatcatcaacttctacctgcccaccttgctcatgctctggttctatgccaagatctacaaggccgtacgacaacactgccagcaccgggagctcatcaataggtccctcccttccttctcagaaattaagctgaggccagagaaccccaagggggatgccaagaaaccagggaaggagtctccctgggaggttctgaaaaggaagccaaaagatgctggtggtggatctgtcttgaagtcaccatcccaaacccccaaggagatgaaatccccagttgtcttcagccaagaggatgatagagaagtagacaaactctactgctttccacttgatattgtgcacatgcaggctgcggcagaggggagtagcagggactatgtagccgtcaaccggagccatggccagctcaagacagatgagcagggcctgaacacacatggggccagcgagatatcagaggatcagatgttaggtgatagccaatccttctctcgaacggactcagataccaccacagagacagcaccaggcaaaggcaaattgaggagtgggtctaacacaggcctggattacatcaagtttacttggaagaggctccgctcgcattcaagacagtatgtatctgggttgcacatgaaccgcgaaaggaaggccgccaaacagttgggttttatcatggcagccttcatcctctgctggatcccttatttcatcttcttcatggtcattgccttctgcaagaactgttgcaatgaacatttgcacatgttcaccatctggctgggctacatcaactccacactgaaccccctcatctaccccttgtgcaatgagaacttcaagaagacattcaagagaattctgcatattcgctcctaagggaggctctgaggggatgcaacaaaatgatccttatgatgtccaacaaggaaatagaggacgaaggcctgtgtgttgccaggcaggcacctgggctttctggaatccaaaccacagtcttaggggcttggtagtttggaaagttcttaggcaccatagaagaacagcagatggcggtgatcagcagagagattgaactttgaggaggaagcagaatctttgcaagaaagtcagacctgtttcttgtaactgggttcaaaaagaaaaaaataataaaaataaaagagagagagaatcagacctgggtggaactctcctgctcctcaggaactatgggagcctcagactcattgtaattcaagctttccgagtcaagtgattgacaactgaagagacacgtggctagggttccactggagaattgaaaaggactcttgagccctcctggaatggagctgtataactgtgcagagactttatccatgccaatagttgctgtccccttccaggggtcaccttgagaggcatgacagctgttccacaggggctatcccttctcagaaaacttctcttctgagcctctttaacagctttctccagaaccagtgtctgaaccaccctggaaattctgccttattatttcttactcaaacatgtttagagtggatagaaaattatgcagcttgcacacccatcgtctttaaccccaaatttcctttggctattaaaaaagtggtggcaaaagacatcctcaaaagaaagagaaatgaaatatttttgaatggttgcacgttaaaaattaaaagaaggaatgggggcagaatgccatatttttgagggctgtactaggtttatctcatttaagccccacaacaccccacaggagggtaattttctaactctagtttgcagaggagcaaattgaggttcagcaaggtgagagaggtacccaaggtcacatagctagttatgtgagaaagttagagtacagatcctctggggtttcagcttattgtagcatattttctccgaaaggcaaaaatgtgcccttttggccgggcatggtagctcaagcctataatcccagcatgttgagaggctgaggtgggcagatcatttgaggccaggagttcaagaccagtctggccaatatggagaaaccttgtctctactaaaaacacaaaaattatctgggcatggtggggcatgcctgtagtcccacttacttgggaggccgaggcacgagaattgcttgaacccgggaggtggaggttgccgtgagccaagatcacgccactgcactccagcctgggcaacagagcaagactctgtctcaaaaaaaaaaatacaatattttaacaatgtgccctcttaagtgtgcacagatacacatacacggtattcccaagagtggtggcagctcaaaatgatatgtttgagtagacgaacagctgacatggagttcccgtgcacctacggaaggggacgctttgaaggaaccaagtgcatttttatctgtgagttctgttgtgtttgtcaaaaagtcattgtaatctttcatagccatacctggtaagcaaaaactagtaaagacataggaacatgtagttttacttggtgtttatgttgcaatctggttgtgatttatattttaaagcttggtgctaaaccacaatatgtatagcatatggagtgcctgtacaagctgatgttttgtattttgtgttcctctttgcatgatctgtcaaagtgagatatttttacctgcctaaaatatgatgtttaaaagcatactctatgtgatttatttatttctacctttctgagtctcttggactaagaagatgttttgaaatgtaccatcaaatgttaacagagtttgatatgggctttctctttggtttctcatcacatttgtaaatgtcttttcaaaaggatttactttttgtaaaaagcttcattctcactctgctttgcatcccccaaacttcttgttcaaaacggggggagtttaggagactttaatcccggtttcagaagctgcagctggtctgtttccaggtcagaaaccattgttcagaagacctccctgtgagagagttgctcctcagggtccctcaggaccaaagaacactcgaaaagagcacttcacacagacaagtggctaagtgtccattatttaccttgaacaatcaaggcaactagtggagagaactgattgtgagctctgcctctgggtcagagagacctggatttgagtctgacaagaacaagaaatggtcaataaatataaattaccagcgtctaaggaacaaggtctatgcattattgtatacagtgtctctagtgcttgtatagtgtctggtatacagagggcactcctatgcatttttaaaacatgctgagcacataccatgtgccaggctttgtgttttatctaatgttatctaatggtattggtgccattatgtaatgttgcctttacaacaacctcatgagggagatttccatctttacaaataggcaaactgaggcccagagagattgaggaactgctccgaggtctgattctggaatgtgcttcctttccactttatcaatctgctcttcgtactcctgtctgaacgatggaaattaatttttgaatgtataaaagacaacagactatgatacagaaatgtcagccccagcccactaagaaagccccagcccatcagtggctaatggctttaataaattggtcatttggcta

SEQ ID NO: 140823 - DNA, 2080 bp, Homo sapiens
  Payload ID: 7620
  Gene Symbol: HRH1
  Gene Name: histamine receptor H1
  Uniprot ID: P35367
  ENST ID: ENST00000438284
  CDS Start-End: 343-1806
atttcaaagcacaccatgccggcagcacttggaggtggtatgtgctgggaaactgaccaacagtttagtcagactgagtcacttcaaggaggggagtggagacagcagtgggtgccagatgacacggagctgtcggcttccgtgtgcattttcttttgatagtagccgtagagaagttgtccgccaggcagccctcaatgggatttttcatttaagaaaaatcactctgctcgtgcactgatggagaaatgaactacaagaagcaagccctgaggtctggagacaggaagctactgaaaccagccagggagtgagccataactggtggctgctcttgcgccaatgagcctccccaattcctcctgcctcttagaagacaagatgtgtgagggcaacaagaccactatggccagcccccagctgatgcccctggtggtggtcctgagcactatctgcttggtcacagtagggctcaacctgctggtgctgtatgccgtacggagtgagcggaagctccacactgtggggaacctgtacatcgtcagcctctcggtggcggacttgatcgtgggtgccgtcgtcatgcctatgaacatcctctacctgctcatgtccaagtggtcactgggccgtcctctctgcctcttttggctttccatggactatgtggccagcacagcgtccattttcagtgtcttcatcctgtgcattgatcgctaccgctctgtccagcagcccctcaggtaccttaagtatcgtaccaagacccgagcctcggccaccattctgggggcctggtttctctcttttctgtgggttattcccattctaggctggaatcacttcatgcagcagacctcggtgcgccgagaggacaagtgtgagacagacttctatgatgtcacctggttcaaggtcatgactgccatcatcaacttctacctgcccaccttgctcatgctctggttctatgccaagatctacaaggccgtacgacaacactgccagcaccgggagctcatcaataggtccctcccttccttctcagaaattaagctgaggccagagaaccccaagggggatgccaagaaaccagggaaggagtctccctgggaggttctgaaaaggaagccaaaagatgctggtggtggatctgtcttgaagtcaccatcccaaacccccaaggagatgaaatccccagttgtcttcagccaagaggatgatagagaagtagacaaactctactgctttccacttgatattgtgcacatgcaggctgcggcagaggggagtagcagggactatgtagccgtcaaccggagccatggccagctcaagacagatgagcagggcctgaacacacatggggccagcgagatatcagaggatcagatgttaggtgatagccaatccttctctcgaacggactcagataccaccacagagacagcaccaggcaaaggcaaattgaggagtgggtctaacacaggcctggattacatcaagtttacttggaagaggctccgctcgcattcaagacagtatgtatctgggttgcacatgaaccgcgaaaggaaggccgccaaacagttgggttttatcatggcagccttcatcctctgctggatcccttatttcatcttcttcatggtcattgccttctgcaagaactgttgcaatgaacatttgcacatgttcaccatctggctgggctacatcaactccacactgaaccccctcatctaccccttgtgcaatgagaacttcaagaagacattcaagagaattctgcatattcgctcctaagggaggctctgaggggatgcaacaaaatgatccttatgatgtccaacaaggaaatagaggacgaaggcctgtgtgttgccaggcaggcacctgggctttctggaatccaaaccacagtcttaggggcttggtagtttggaaagttcttaggcaccatagaagaacagcagatggcggtgatcagcagagagattgaactttgaggaggaagcagaatctttgcaagaaagtcagacctgtttcttgtaactgggttcaaaaagaaaaaaataat

SEQ ID NO: 140824 - DNA, 1080 bp, Homo sapiens
  Payload ID: 7621
  Gene Symbol: HRH2
  Gene Name: histamine receptor H2
  Uniprot ID: P25021
  ENST ID: ENST00000231683
  CDS Start-End: 1-1080
atggcacccaatggcacagcctcttccttttgcctggactctaccgcatgcaagatcaccatcaccgtggtccttgcggtcctcatcctcatcaccgttgctggcaatgtggtcgtctgtctggccgtgggcttgaaccgccggctccgcaacctgaccaattgtttcatcgtgtccttggctatcactgacctgctcctcggcctcctggtgctgcccttctctgccatctaccagctgtcctgcaagtggagctttggcaaggtcttctgcaatatctacaccagcctggatgtgatgctctgcacagcctccattcttaacctcttcatgatcagcctcgaccggtactgcgctgtcatggacccactgcggtaccctgtgctggtcaccccagttcgggtcgccatctctctggtcttaatttgggtcatctccattaccctgtcctttctgtctatccacctggggtggaacagcaggaacgagaccagcaagggcaatcataccacctctaagtgcaaagtccaggtcaatgaagtgtacgggctggtggatgggctggtcaccttctacctcccgctactgatcatgtgcatcacctactaccgcatcttcaaggtcgcccgggatcaggccaagaggatcaatcacattagctcctggaaggcagccaccatcagggagcacaaagccacagtgacactggccgccgtcatgggggccttcatcatctgctggtttccctacttcaccgcgtttgtgtaccgtgggctgagaggggatgatgccatcaatgaggtgttagaagccatcgttctgtggctgggctatgccaactcagccctgaaccccatcctgtatgctgcgctgaacagagacttccgcaccgggtaccaacagctcttctgctgcaggctggccaaccgcaactcccacaaaacttctctgaggtccaacgcctctcagctgtccaggacccaaagccgagaacccaggcaacaggaagagaaacccctgaagctccaggtgtggagtgggacagaagtcacggccccccagggagccacagacaggtaa

SEQ ID NO: 140825 - DNA, 2561 bp, Homo sapiens
  Payload ID: 7621
  Gene Symbol: HRH2
  Gene Name: histamine receptor H2
  Uniprot ID: P25021
  ENST ID: ENST00000377291
  CDS Start-End: 652-1845
gtgcgaggcgcggggcgcaggccgtgcgcgcgccgcccgctgcatccctgcccggagcgcagccggcgcgggcgcgggaccgaggcgaaccgggtgcggagccaatacccgcggcagcagcaccagctcctgccctccactgactccagagagggagatccccagtacttgactccatcacgcagatgggagcaggcaccagctatggagagggatacagctgcgtctccacatgacccatcctgcatgacaccaaagccaccgccagacagtgcctcggattctatgcaaaacctgggaagcggagacctaccccagccccgggaggaagctagctcttcaggggaccgtctgaggactggagtttgatccatgaacctggcttcgaggccttgcttttctctcttcttcattcatattcattcccaacaccttagaaggtgttgcttaatttatttctagaaaagcagcccagagtcagtcattgaagccttccccaccccctggccaaaaaaaaaaaaaaaaaaaaactggacacattttggatctgttgggagcttggagtccagtggttggcatagttgtcacattgggagcagagaagaagcaaccaggggccctgatcaggggactgagccgtagagtcccaggatggcacccaatggcacagcctcttccttttgcctggactctaccgcatgcaagatcaccatcaccgtggtccttgcggtcctcatcctcatcaccgttgctggcaatgtggtcgtctgtctggccgtgggcttgaaccgccggctccgcaacctgaccaattgtttcatcgtgtccttggctatcactgacctgctcctcggcctcctggtgctgcccttctctgccatctaccagctgtcctgcaagtggagctttggcaaggtcttctgcaatatctacaccagcctggatgtgatgctctgcacagcctccattcttaacctcttcatgatcagcctcgaccggtactgcgctgtcatggacccactgcggtaccctgtgctggtcaccccagttcgggtcgccatctctctggtcttaatttgggtcatctccattaccctgtcctttctgtctatccacctggggtggaacagcaggaacgagaccagcaagggcaatcataccacctctaagtgcaaagtccaggtcaatgaagtgtacgggctggtggatgggctggtcaccttctacctcccgctactgatcatgtgcatcacctactaccgcatcttcaaggtcgcccgggatcaggccaagaggatcaatcacattagctcctggaaggcagccaccatcagggagcacaaagccacagtgacactggccgccgtcatgggggccttcatcatctgctggtttccctacttcaccgcgtttgtgtaccgtgggctgagaggggatgatgccatcaatgaggtgttagaagccatcgttctgtggctgggctatgccaactcagccctgaaccccatcctgtatgctgcgctgaacagagacttccgcaccgggtaccaacagctcttctgctgcaggctggccaaccgcaactcccacaaaacttctctgaggtccaacgcctctcagctgtccaggacccaaagccgagaacccaggcaacaggaagagaaacccctgaagctccaggtgtggagtgggacagaagtcacggccccccagggagccacagacagaccatggctttgccttccagaatgctggtctgtggaactgacccattcattcattcatttgttcattcattcatttgcaaacattcatccaattcccaccacatgccaggaattatgatgaatactggggatgtagaaatgagattttttgggtttatggtgatgaagttacagaaaatcaatggcacagccctggtctcagctctgccgtcactcaacttgtatcttgagcaagttcctccccatctcaggcctcagtttcctcatcgcatagagagttggtcttccctcaccgggcttcctacttgccctccagagttgcctgaagctcacatgagcgaagggacatgaacatgctctgccatctcccaataggacataagtccacgctggagcgctgagcatcagactcaagaaaagcttgcgtggatattgcagacccaccaacaagggctccaggttctggagttgtggaggcaaaactgcctagtgagaaccctacatattccctctggtccttgcagctgccacccccattcccaggggtggagtgtccctccatagacttggatcctgggccctctgctccttcaccactgtccatctgaagcaagcctggttgctccggcactgaactgtggcctcgggccctggaccctgcccctcaaatccaccctccaagtgcacacctggaaacttccgcttccagtcctgatgggtaaaacgcccacctaccatatccttgcgcaatctcttattcaggaggcagctggagtgcaaagctgacttagttcacaaagtataaaaaaatacagggatgtggttcagctagaa

SEQ ID NO: 140826 - DNA, 1419 bp, Homo sapiens
  Payload ID: 7622
  Gene Symbol: HRH3
  Gene Name: histamine receptor H3
  ENST ID: ENST00000317393
  CDS Start-End: 298-1419
cgcgttgcgctccggctgcacggtcgcaccggcagcggctcaggctccggctcctctcccgctgcagcagccgcgctgccggccccactgggctcggatccggccccggccccctcggcaccgcctgctctggccccggccccggccccgcggaccatgcgctgggcgcccccaggggaacccgacccggccaagggcccgcaaagacgaggctcccgggccggggcccctcccggccgcccagctctcggccggcgccctgccccgcgtcccggagccgcgtgagcctgcggggccatggagcgcgcgccgcccgacgggccgctgaacgcttcgggggcgctggcgggcgaggcggcggcggcgggcggggcgcgcggcttctcggcagcctggaccgcggtgctggccgcgctcatggcgctgctcatcgtggccacggtgctgggcaacgcgctggtcatgctcgccttcgtggccgactcgagcctccgcacccagaacaacttcttcctgctcaacctcgccatctccgacttcctcgtcggcgccttctgcatcccactgtatgtaccctacgtgctgacaggccgctggaccttcggccggggcctctgcaagctgtggctggtagtggactacctgctgtgcacctcctctgccttcaacatcgtgctcatcagctacgaccgcttcctgtcggtcacccgagcggtctcataccgggcccagcagggtgacacgcggcgggcagtgcggaagatgctgctggtgtgggtgctggccttcctgctgtacggaccagccatcctgagctgggagtacctgtccgggggcagctccatccccgagggccactgctatgccgagttcttctacaactggtacttcctcatcacggcttccaccctggagttctttacgcccttcctcagcgtcaccttctttaacctcagcatctacctgaacatccagaggcgcacccgcctccggctggatggggctcgagaggcagccggccccgagccccctcccgaggcccagccctcaccacccccaccgcctggctgctggggctgctggcagaaggggcacggggaggccatgccgctgcacaggaaagtggccaagtcgctggccgtcatcgtgagcatctttgggctctgctgggccccatacacgctgctgatgatcatccgggccgcctgccatggccactgcgtccctgactactggtacgaaacctccttctggctcctgtgggccaactcggctgtcaaccctgtcctctaccctctgtgccaccacagcttccgccgggccttcaccaagctgctctgcccccagaagctcaaaatccagccccacagctccctggagcactgctggaaaaagatgaagaagaaaacatgtctgtga

SEQ ID NO: 140827 - DNA, 2659 bp, Homo sapiens
  Payload ID: 7622
  Gene Symbol: HRH3
  Gene Name: histamine receptor H3
  Uniprot ID: Q9Y5N1
  ENST ID: ENST00000340177
  CDS Start-End: 286-1623
cggctgcacggtcgcaccggcagcggctcaggctccggctcctctcccgctgcagcagccgcgctgccggccccactgggctcggatccggccccggccccctcggcaccgcctgctctggccccggccccggccccgcggaccatgcgctgggcgcccccaggggaacccgacccggccaagggcccgcaaagacgaggctcccgggccggggcccctcccggccgcccagctctcggccggcgccctgccccgcgtcccggagccgcgtgagcctgcggggccatggagcgcgcgccgcccgacgggccgctgaacgcttcgggggcgctggcgggcgaggcggcggcggcgggcggggcgcgcggcttctcggcagcctggaccgcggtgctggccgcgctcatggcgctgctcatcgtggccacggtgctgggcaacgcgctggtcatgctcgccttcgtggccgactcgagcctccgcacccagaacaacttcttcctgctcaacctcgccatctccgacttcctcgtcggcgccttctgcatcccactgtatgtaccctacgtgctgacaggccgctggaccttcggccggggcctctgcaagctgtggctggtagtggactacctgctgtgcacctcctctgccttcaacatcgtgctcatcagctacgaccgcttcctgtcggtcacccgagcggtctcataccgggcccagcagggtgacacgcggcgggcagtgcggaagatgctgctggtgtgggtgctggccttcctgctgtacggaccagccatcctgagctgggagtacctgtccgggggcagctccatccccgagggccactgctatgccgagttcttctacaactggtacttcctcatcacggcttccaccctggagttctttacgcccttcctcagcgtcaccttctttaacctcagcatctacctgaacatccagaggcgcacccgcctccggctggatggggctcgagaggcagccggccccgagccccctcccgaggcccagccctcaccacccccaccgcctggctgctggggctgctggcagaaggggcacggggaggccatgccgctgcacaggtatggggtgggtgaggcggccgtaggcgctgaggccggggaggcgaccctcgggggtggcggtgggggcggctccgtggcttcacccacctccagctccggcagctcctcgaggggcactgagaggccgcgctcactcaagaggggctccaagccgtcggcgtcctcggcctcgctggagaagcgcatgaagatggtgtcccagagcttcacccagcgctttcggctgtctcgggacaggaaagtggccaagtcgctggccgtcatcgtgagcatctttgggctctgctgggccccatacacgctgctgatgatcatccgggccgcctgccatggccactgcgtccctgactactggtacgaaacctccttctggctcctgtgggccaactcggctgtcaaccctgtcctctaccctctgtgccaccacagcttccgccgggccttcaccaagctgctctgcccccagaagctcaaaatccagccccacagctccctggagcactgctggaagtgagtggcccaccagagcctccctcagccacgcctctctcagcccaggtctcctgggcatctggccctgctgccccctacccggctcgttcccccaggggtgagccccgccgtgtctgtggccctctcttaatgccacggcagccaccctgccatggaggcgccttcctgggttggccagagggcccctcactggctggactggaggctgggtggccggccctgccccccacattctggctccaccgggagggacagtctggaggtcccagacatgctgcccaccccctgctggtgcccacccttcgcagttactggttggtgttcttcccaaagcaagcacctgggtgtgctccaggcttcctgccctagcagtttgcctctgcacgtgcacacacctgcacacccctgcacacacctgcacaccgtccctctccccggacaagcccaggacactgcctttgctgccttctgtctcttgcataagcctcaggcctggccctttcacccctcttcccaccaactctctctgcccccaaaagtgtcaaggggccctaggaacctcgaagctgttctctgcttttccattctgggtgttttcagaaagatgaagaagaaaacatgtctgtgaacttgatgttcctgggatgtttaatcaagagagacaaaattgctgaggagctcagggctggattggcaggtgtgggctcccacgccctcctccctccgctaaggcttccggctgagctgtgccagctgcttctgcccaccccgcctctgggctcacaccagccctggtggccaagcctgccccggccactctgtttgctcacccaggacctctgggggttgttgggaggagggggcccggctgggcccgagggtcccaaggcgtgcaggggcggtccagaggaggtgcccgggcaggggccgcttcgccatgtgctgtgcacccgtgccacgcgctctgcatgctcctctgcctgtgcccgctgcgctgccctgcaaaccgtgaggtcacaataaagtgtattttttta

SEQ ID NO: 140828 - DNA, 900 bp, Homo sapiens
  Payload ID: 7622
  Gene Symbol: HRH3
  Gene Name: histamine receptor H3
  ENST ID: ENST00000611492
  CDS Start-End: 298-900
cgcgttgcgctccggctgcacggtcgcaccggcagcggctcaggctccggctcctctcccgctgcagcagccgcgctgccggccccactgggctcggatccggccccggccccctcggcaccgcctgctctggccccggccccggccccgcggaccatgcgctgggcgcccccaggggaacccgacccggccaagggcccgcaaagacgaggctcccgggccggggcccctcccggccgcccagctctcggccggcgccctgccccgcgtcccggagccgcgtgagcctgcggggccatggagcgcgcgccgcccgacgggccgctgaacgcttcgggggcgctggcgggcgaggcggcggcggcgggcggggcgcgcggcttctcggcagcctggaccgcggtgctggccgcgctcatggcgctgctcatcgtggccacggtgctgggcaacgcgctggtcatgctcgccttcgtggccgactcgagcctccgcacccagaacaacttcttcctgctcaacctcgccatctccgacttcctcgtcggcgccttctgcatcccactgtatgtaccctacgtgctgacaggccgctggaccttcggccggggcctctgcaagctgtggctggtagtggactacctgctgtgcacctcctctgccttcaacatcgtgctcatcagctacgaccgcttcctgtcggtcacccgagcggtctcataccgggcccagcagggtgacacgcggcgggcagtgcggaagatgctgctggtgtgggtgctggccttcctgctgtacggaccagctccggcagctcctcgaggggcactgagaggccgcgctcactcaagaggggctccaagccgtcggcgtcctcggcctcgctggagaagcgcatga

SEQ ID NO: 140829 - DNA, 3668 bp, Homo sapiens
  Payload ID: 7623
  Gene Symbol: HRH4
  Gene Name: histamine receptor H4
  Uniprot ID: Q9H3N8
  ENST ID: ENST00000256906
  CDS Start-End: 101-1273
ggaagactacacattttaggtatgtgattagaaaacatacttgtcagaattgtctggctggattaatttgctaatttgaccttcttcatcatttgatgtgatgccagatactaatagcacaatcaatttatcactaagcactcgtgttactttagcattttttatgtccttagtagcttttgctataatgctaggaaatgctttggtcattttagcttttgtggtggacaaaaaccttagacatcgaagtagttatttttttcttaacttggccatctctgacttctttgtgggtgtgatctccattcctttgtacatccctcacacgctgttcgaatgggattttggaaaggaaatctgtgtattttggctcactactgactatctgttatgtacagcatctgtatataacattgtcctcatcagctatgatcgatacctgtcagtctcaaatgctgtgtcttatagaactcaacatactggggtcttgaagattgttactctgatggtggccgtttgggtgctggccttcttagtgaatgggccaatgattctagtttcagagtcttggaaggatgaaggtagtgaatgtgaacctggatttttttcggaatggtacatccttgccatcacatcattcttggaattcgtgatcccagtcatcttagtcgcttatttcaacatgaatatttattggagcctgtggaagcgtgatcatctcagtaggtgccaaagccatcctggactgactgctgtctcttccaacatctgtggacactcattcagaggtagactatcttcaaggagatctctttctgcatcgacagaagttcctgcatcctttcattcagagagacagaggagaaagagtagtctcatgttttcctcaagaaccaagatgaatagcaatacaattgcttccaaaatgggttccttctcccaatcagattctgtagctcttcaccaaagggaacatgttgaactgcttagagccaggagattagccaagtcactggccattctcttaggggtttttgctgtttgctgggctccatattctctgttcacaattgtcctttcattttattcctcagcaacaggtcctaaatcagtttggtatagaattgcattttggcttcagtggttcaattcctttgtcaatcctcttttgtatccattgtgtcacaagcgctttcaaaaggctttcttgaaaatattttgtataaaaaagcaacctctaccatcacaacacagtcggtcagtatcttcttaaagacaattttctcacctctgtaaattttagtctcaatctcacctaaatgaatcaggtctgccctttatcttgcccttttcattctaccaacagatctgcactttgaagtcaatggtaaattactccagtgaataatagcagtataatatgacttgataatatttttgtaaacttgtagtcataatagtactatattcttcttagtcctcacctcttccttgtcttttagatcttaatttcatgctgattacaaaaatccagttttgttttctttctatgttccatgcataatacagtcttaagtgaatttctcttttttaattttatcgtaatagaaacttatccagtttgaaaatcattccctaaagcatgcaataggaaaaagaacctcctggctgggactgcccaactctgttctgatcagtgggtgggtgaggtagggtttgagttggcaagagcagggaacgggcatgtgcccaggtgagctcctgtgtgtgtccagattttatattcctaatcccagtaaggaagaaagcgtagtgtgggagaggagagagctgatgactgcagttctcaaaggtcctcagtgaagttattttggaggccctggtggtcacaggatcagaaggcaagggataggcagtggtcaccaatggttgaaagtatggcttgtcccatttcttcctgttctctttttctagcttccacatcagcttccttttttgagaacatatagaagaagaaggctaagagatggtgaagagactgcatgattaaactagatagacctggtatacagtcactgaactagtagatgtcaataattattatttttaaaaatttttatttgttggccgggcatggtggctcacgcctgaaatcccagcactttgggaggccaaggtgggcggatcatgaggtcaggagatcgagaccatcctggccaacatggtgaaaccccatctgtactaaaatacaaacaagtagctggttgtggcgccgcatgcctgtagtcccagctactcgggaggctgaggcaggggaattgcttgaacccgggaggcggagtttgccagcctggcaacagaacaagactctgtctaaaaagaaaaaaaaatttttttgtttaagacagcatcttgctctgtctcccaggctggagcgtagtaatgcaatcatagctcactgcagcctggaactccttggctcaagcaatcctgctgccttggcctcccaagtatgtaggactacaggtactcgccaccacacctggataattaaaaaattatttctgtagagatgaagtctcactgtgttgcccagcctgggtgtcaataattattttttaaaaaaaatttttaaaaaggttttttgagacagattcttgctctgtcacccaggctggagtgcagtagcatgatcagggatcactgcaacctctgcctcctgggttcaagcgattcttgtgcctaagccacctgagcagctgggattacaggtgcatgccaccatgcctggctaattttggtatttttagtagagatgaggttttgccattttggtcaggctggaatttttttttttttaattttgataagacagggtattgccgtgttggccagactggtctcaaactcctgggctgaaacaatcctcccgccttggcctcccaaagtgctgggattataggcacaagacaccacaataattattgcctgtatgtcaattattattttaaaatattgttgtatttacttaatgtctttaatgcatttgcccaatattttacattgtactgctcagaggtattcctttattatgtggttagcataggttatactttgctgacgattcacattttattagtttggttatgttttgtccttttaaaacattttcttttgagatgggggtcttgctctgttgcccacgcaggagtgcagtggcatgctctcagctcactgcagccctgactgcctaggctccagcaatcttcttacgtcagcctccagagtagctgggaccgcaggcacttgccaccacgccccactaaaaattttttaaattgttgcctttcttgaagtgttctctgcctgtctttgtcacaaaatttcatttttctcatagttaatttcatctctccggtaagattttattggtgtttcttttataactttgcagttcttacaccgtttggtgattttcatgtttcttagaaactttaaacctttaacttcaaacattaaaatacaagtcttttaagtacatgagtgcttagaaatgtacataatgtttatatacacttatgccttacattaaagtccaatatgagaaatacatgtttaacattcaataataattttaaaaatttgagaaataaactctcataaatgca

SEQ ID NO: 140830 - DNA, 909 bp, Homo sapiens
  Payload ID: 7623
  Gene Symbol: HRH4
  Gene Name: histamine receptor H4
  Uniprot ID: Q9H3N8
  ENST ID: ENST00000426880
  CDS Start-End: 1-909
atgccagatactaatagcacaatcaatttatcactaagcactcgtgttactttagcattttttatgtccttagtagcttttgctataatgctaggaaatgctttggtcattttagcttttgtggtggacaaaaaccttagacatcgaagtagttatttttttcttaacttggccatctctgacttctttgtggtttcagagtcttggaaggatgaaggtagtgaatgtgaacctggatttttttcggaatggtacatccttgccatcacatcattcttggaattcgtgatcccagtcatcttagtcgcttatttcaacatgaatatttattggagcctgtggaagcgtgatcatctcagtaggtgccaaagccatcctggactgactgctgtctcttccaacatctgtggacactcattcagaggtagactatcttcaaggagatctctttctgcatcgacagaagttcctgcatcctttcattcagagagacagaggagaaagagtagtctcatgttttcctcaagaaccaagatgaatagcaatacaattgcttccaaaatgggttccttctcccaatcagattctgtagctcttcaccaaagggaacatgttgaactgcttagagccaggagattagccaagtcactggccattctcttaggggtttttgctgtttgctgggctccatattctctgttcacaattgtcctttcattttattcctcagcaacaggtcctaaatcagtttggtatagaattgcattttggcttcagtggttcaattcctttgtcaatcctcttttgtatccattgtgtcacaagcgctttcaaaaggctttcttgaaaatattttgtataaaaaagcaacctctaccatcacaacacagtcggtcagtatcttcttaa

SEQ ID NO: 140831 - DNA, 580 bp, Homo sapiens
  Payload ID: 7624
  Gene Symbol: HTN1
  Gene Name: histatin 1
  Uniprot ID: P15515
  ENST ID: ENST00000246896
  CDS Start-End: 108-281
aacgtgtttaaatacatcagccatatagaaaaggacatctcttgagacttcacttcagcttcactgacttcttgactctcctcttgagtaaaaggactcagccaactatgaagttttttgtctttgctttagtcttggctctcatgatttccatgattagcgctgattcacatgaaaagagacatcatgggtatagaagaaaattccatgaaaagcatcattcacatcgagaatttccattttatggggactatggatcaaattatctatatgacaattgatatccttagtaatcatggggcatgattatagaggtttgactggcaaattcactttttactcatttattctcattcatcataccgcatcacactaccactgctttttgaagaattatcataaggcaatggagaataaaagaaagaccatgatttagtgaattctgtgtttcatgatacttcccttcctaattatcatttgattagatacttgcaatttaaactgttaagctgttttcactgctgtttctgagtaatagaaattcattcctctccaaaagcaataaatttctagcacatta

SEQ ID NO: 140832 - DNA, 623 bp, Homo sapiens
  Payload ID: 7624
  Gene Symbol: HTN1
  Gene Name: histatin 1
  Uniprot ID: P15515
  ENST ID: ENST00000511674
  CDS Start-End: 72-245
atctcttgagacttcacttcagcttcactgacttcttgactctcctcttgagtaaaaggactcagccaactatgaagttttttgtctttgctttagtcttggctctcatgatttccatgattagcgctgattcacatgaaaagagacatcatgggtatagaagaaaattccatgaaaagcatcattcacatcgagaatttccattttatggggactatggatcaaattatctatatgacaattgatatccttagtaatcatggggcatgattatagaggtaagctgactctagttgcttgtctttctagaagtgtcaacactgacagtttaaaaaaaaagccataagctaacaaccattccagtttaagaaatgtagcatgggttagctccttgaagtgtattcatttgtataaatgcttctgaagctgtagatatgtggtgttatttctgaggtctctgttctgtgccattggtctgtatgttgttttggtactggtaccatgctgttttggtaactgtagctttgtagtatagtttgaagtcaggtagtgtgatgccttcagctttgttcttttgcttacaattgtcttgggtatatgagcttttctttggatccatatga

SEQ ID NO: 140833 - DNA, 536 bp, Homo sapiens
  Payload ID: 7624
  Gene Symbol: HTN1
  Gene Name: histatin 1
  Uniprot ID: P15515
  ENST ID: ENST00000610341
  CDS Start-End: 68-241
cttgagacttcacttcagcttcactgacttcttgactctcctcttgagtaaaaggactcagccaactatgaagttttttgtctttgctttagtcttggctctcatgatttccatgattagcgctgattcacatgaaaagagacatcatgggtatagaagaaaattccatgaaaagcatcattcacatcgagaatttccattttatggggactatggatcaaattatctatatgacaattgatatccttagtaatcatggggcatgattatagaggtttgactggcaaattcactttttactcatttattctcattcatcataccgcatcacactaccactgctttttgaagaattatcataaggcaatggagaataaaagaaagaccatgatttagtgaattctgtgtttcatgatacttcccttcctaattatcatttgattagatacttgcaatttaaactgttaagctgttttcactgctgtttctgagtaatagaaattcattcctctccaaaagcaataaatttctagcac

SEQ ID NO: 140834 - DNA, 623 bp, Homo sapiens; identical to SEQ ID NO: 140832
  Payload ID: 7624
  Gene Symbol: HTN1
  Gene Name: histatin 1
  ENST ID: ENST00000635569
  CDS Start-End: 72-245

SEQ ID NO: 140835 - DNA, 580 bp, Homo sapiens; identical to SEQ ID NO: 140831
  Payload ID: 7624
  Gene Symbol: HTN1
  Gene Name: histatin 1
  ENST ID: ENST00000635327
  CDS Start-End: 108-281

SEQ ID NO: 140836 - DNA, 536 bp, Homo sapiens; identical to SEQ ID NO: 140833
  Payload ID: 7624
  Gene Symbol: HTN1
  Gene Name: histatin 1
  ENST ID: ENST00000634477
  CDS Start-End: 68-241

SEQ ID NO: 140837 - DNA, 493 bp, Homo sapiens
  Payload ID: 7625
  Gene Symbol: HTN3
  Gene Name: histatin 3
  ENST ID: ENST00000381057
  CDS Start-End: 72-197
atctcttgagacttcacttcagcttcactgacttctggattctcctcttgagtaaaaggactcagccaactatgaagttttttgtttttgctttaatcttggctctcatgctttccatgactggagctgattcacatgcaaaggaaaagcatcattcacatcgaggctatagatcaaattatctgtatgacaattgatatcttcagtaatcacggggcatgattatggaggtttgactggcaaattcgctttggactcgtgtattctcatttgtcataccgcatcacactaccactgctttttgaagaattatcataaggcaatgcagaataaaagaaataccatgatttagtgaattctgtgtttcaggatacttcccttcctaattatcatttgattagatacttgcaatttaaatgttaagctgttttcactgctgtttctgagtaatagaaattcattcctctccaaaagcaataaaattcaagcacat

SEQ ID NO: 140838 - DNA, 775 bp, Homo sapiens
  Payload ID: 7625
  Gene Symbol: HTN3
  Gene Name: histatin 3
  Uniprot ID: P15516
  ENST ID: ENST00000530128
  CDS Start-End: 76-231
ggacatctcttgagacttcacttcagcttcactgacttctggattctcctcttgagtaaaaggactcagccaactatgaagttttttgtttttgctttaatcttggctctcatgctttccatgactggagctgattcacatgcaaagagacatcatgggtataaaagaaaattccatgaaaagcatcattcacatcgaggctatagatcaaattatctgtatgacaattgatatcttcagtaatcacggggcatgattatggaggtctctgcttgctatctgatctacgacaatcctgacaaaaacaagcaatgggaaaaggatctcctagtcaataaatggtactgggaaaactggctagccatatacagaaaactgaaactggaccccttccttacaccttatacaaaaattaactcaagatggattgaaaattaaatgaaaaacccaaaaccaaaaaaagaccctagaagaaaacctaggtgatatcattcgggacataggcatggacaaagacttcatgaagaaaatgccaaaagcaatggcaacaaaagccaaaattcacaaatgggatctaattaaactaaagagcttctgcacaacaaaagaaactatcatcagagtgaacaggtaacttagagattgggagaaaatttttgcagtctacccatctgacaaaggtgtagtgtccagagtctacaaggaacttaaacaaatttacaagacaaaaacaaaaaacccgtctaaaagtggacaaaggatatgaacagacact

SEQ ID NO: 140839 - DNA, 578 bp, Homo sapiens
  Payload ID: 7625
  Gene Symbol: HTN3
  Gene Name: histatin 3
  Uniprot ID: P15516
  ENST ID: ENST00000526767
  CDS Start-End: 118-273
gggagatttcaacgtgtttaaatacatcagccatctaggaaaggacatctcttgagacttcacttcagcttcactgacttctggattctcctcttgagtaaaaggactcagccaactatgaagttttttgtttttgctttaatcttggctctcatgctttccatgactggagctgattcacatgcaaagagacatcatgggtataaaagaaaattccatgaaaagcatcattcacatcgaggctatagatcaaattatctgtatgacaattgatatcttcagtaatcacggggcatgattatggaggtttgactggcaaattcgctttggactcgtgtattctcatttgtcataccgcatcacactaccactgctttttgaagaattatcataaggcaatgcagaataaaagaaataccatgatttagtgaattctgtgtttcaggatacttcccttcctaattatcatttgattagatacttgcaatttaaatgttaagctgttttcactgctgtttctgagtaatagaaattcattcctctccaaaagcaataaaattcaagcacattattatgtg

SEQ ID NO: 140840 - DNA, 578 bp, Homo sapiens; identical to SEQ ID NO: 140839
  Payload ID: 7625
  Gene Symbol: HTN3
  Gene Name: histatin 3
  ENST ID: ENST00000634949
  CDS Start-End: 118-273

SEQ ID NO: 140841 - DNA, 775 bp, Homo sapiens; identical to SEQ ID NO: 140838
  Payload ID: 7625
  Gene Symbol: HTN3
  Gene Name: histatin 3
  ENST ID: ENST00000635585
  CDS Start-End: 76-231

SEQ ID NO: 140842 - DNA, 493 bp, Homo sapiens; identical to SEQ ID NO: 140837
  Payload ID: 7625
  Gene Symbol: HTN3
  Gene Name: histatin 3
  ENST ID: ENST00000635125
  CDS Start-End: 72-197

SEQ ID NO: 140843 - DNA, 3913 bp, Homo sapiens
  Payload ID: 7626
  Gene Symbol: HAL
  Gene Name: histidine ammonia-lyase
  Uniprot ID: P42357
  ENST ID: ENST00000261208
  CDS Start-End: 370-2343
gttttacagttgagtaatctcagataaagacaggaacatggtgtttataagctgcccttaatggcagagaacacagacagaaacgagggaagagagagaaattggggaccctgaagaaagggggccagcagcaggtaggtgccatcagggacaagaacagcacctcccagggtgggagaccccaggcctttctggcagcaggtctggatggaaagtggacaggaggctcacccgtctgcatcccctgctcctgcccctgctcggctacaaaaaccaaagggacagcagctgaccacaccccggtagccactcctgcataaagctctcccctcctgtgaccagctgaggacctcaggctgcagcggagccatgcccagatacacggtgcacgtacgtggggaatggctggcagtgccctgccaggacgcgcagctcactgtgggctggctgggccgggaggccgtgaggcgctatatcaagaataagcccgacaatggtggcttcacctccgtggatgacgcgcacttccttgtgcgccggtgcaagggcctgggcctgctggacaacgaggaccggctcgaggtggccctagagaacaacgagttcgtggaagtggttatagagggtgatgccatgtctcctgacttcattccatctcaaccagaaggagtttatctatacagcaagtaccgggagcctgaaaagtacatcgagttagatggagaccgtctgaccacggaggatctggtcaacttgggaaagggacgctacaaaataaagctcaccccaacagctgagaagagggtgcagaaatccagggaggtcatagatagcatcataaaagagaaaacagttgtttacggtattactacaggttttgggaaatttgccagaactgtaattcctatcaataagctacaggagcttcaggtcaacttagtacgctcacattcttcaggtgttgggaaaccactaagtcctgagaggtgtcggatgctcttggctttaaggatcaatgtcttagccaaaggatacagtggcatttccctggagaccctcaaacaagtcatagaaatgtttaatgcctcctgcctgccctatgtcccagagaaaggaaccgttggtgccagtggagaccttgccccactctctcatcttgctcttgggctagttggagaagggaagatgtggtctccgaagagtggctgggctgatgctaaatacgtgctagaagcccatggattgaaaccagttattttaaaaccaaaagagggcctggcactcatcaatgggacgcagatgatcacatccctgggctgtgaagctgtagagcgagccagtgctattgcacggcaggctgacattgtggcagccctgacccttgaggtgctgaagggcaccaccaaagcctttgacactgacattcatgctcttcgacctcaccgtgggcaaattgaagttgcttttcggtttcggtcactcttggactcagatcaccacccatcagaaatagcagagagtcacaggttctgtgatcgcgtccaggatgcatacaccttgcgctgctgtccacaggtccatggtgtggtgaatgatacaatagcatttgtgaagaacatcattaccacagaactgaacagcgcaacagataatcctatggtctttgccaataggggagagacagtttctggaggaaacttccatggtgaatacccagccaaagccctagactacttggccattggcatccatgaacttgctgcaatcagtgagagaagaatcgagcggctctgcaatccctccctcagtgagctgcctgccttcctggtggctgaaggtggtctgaactctgggttcatgatagctcactgcacggcagcagcccttgtttctgagaacaaggctctgtgccatccctcgtctgttgactccctctccaccagcgcagccacggaggaccacgtctccatgggaggatgggcagcaaggaaagccctcagggtcatcgagcatgtggagcaagtgctggccatcgagctccttgcagcctgccagggcatagagtttctacgtcccctgaaaacaaccactccgctggagaaggtctatgacctggtgcgctctgttgtaaggccctggataaaagatcgcttcatggccccggacatcgaggcagcccacaggctgctcctggagcagaaggtttgggaagtagctgctccatacattgaaaaatacagaatggagcatattccagaatcaagacctctttctccaacagccttttcactgcaatttctgcacaagaaatccaccaaaatcccggagtctgaggacctttaatgggctttgtcatgaagtagcagatgagagggcagtcagtttagcacaaagcaatactaggctgaaggagagacctgagaactttcctaggtagatcaatccattgtatcattcagttcttctaaagcctacgttggttaggctgatggcagtattatagttgctaaattcagcactgtgttcctgttgtcgtggttcaagacccaccaggtattttcagattataaaacttttctttctttcttaacagtttcaacaggccactcactcttaagggtgagaagaataaccacaattgtatgtgcctgttttttactcttagcattagatgaattcaaatttggaaacagattgatagcaattttttctaaaaacattagacttttgttaacctttttttttttttttaaatttgcttcaacaagctctccaccagttgactttctttggctaattttactttgcatgatatgccttaatatgccttcataaataaccattttaagtcataatttgtccttaagctgcttttttcttctattaattggatcatagtaaagagtagtcaatagggtcttcagctattaattgtagaggtgattaaaaccaacaaggagtttcatgtgcaaaggagataaggaatgaatataaagattgctatttgggtggctcttattaaactgtgtattttgtacttatcactacacgtatcccccaaatgcttacatgggagtttgaggttagtattttcacttccttggtgttagtactctattcacattcttattgtaaccttcctcatttcacagataaggaatctttggggattaaccaacctcctttctgtaatggtaatcattaaaataagtcctattgataaaggtcagatggagccctagagtgtattactgcatctatttttttccccgagaagataaaggaccttcagggatggcttaagtgtatctgtccagatgaaggatgggtcacatgacctcttggcttcccaagtctaagctctgtgactttgcaccagtgtgtgcatatatgtgcaaggcccttcaagtggtctgaaaccgtggctctaaaaaccacagctggtggagaggaggacagacacacttgccaccttgcctacctaattgccatctaaaatgggccgaacagtggatttcacaatagagttttcaccctttagatttacaacctgtcaggtggaaactgaagtgaaaactgctgcacacagcaattcagggagcaaaaaatgtgctgaggagactgtttacctaaaggttgttcttggtgctattccttgtcaaaatgtgaacacacacaaatgaggtttgtgcattgtcatccgtgggctgccattgagccagtaacccccagtggtctcatggtgctcttcgctccagtttggggaatgctggattctttcagcccctgcagccctccaggtcaaaatgacactttgtcactgagttttctacacagctctattagtaactgacagcacacgccttcaagggaacttcaagggaaacatggaataaactaagtctcaattgcc

SEQ ID NO: 140844 - DNA, 2804 bp, Homo sapiens
  Payload ID: 7626
  Gene Symbol: HAL
  Gene Name: histidine ammonia-lyase
  ENST ID: ENST00000544080
  CDS Start-End: 296-799
agacagaaacgagggaagagagagaaattggggaccctgaagaaagggggccagcagcaggtaggtgccatcagggacaagaacagcacctcccagggtgggagaccccaggcctttctggcagcaggtctggatggaaagtggacaggaggctcacccgtctgcatcccctgctcctgcccctgctcggctacaaaaaccaaagggacagcagctgaccacaccccggtagccactcctgcataaagctctcccctcctgtgaccagctgaggacctcaggctgcagcggagccatgcccagatacacggtgcacgtacgtggggaatggctggcagtgccctgccaggacgcgcagctcactgtgggctggctgggccgggaggccgtgaggcgctatatcaagaataagcccgacaatggtggcttcacctccgtggatgacgcgcacttccttgtgcgccggtgcaagggcctgggcctgctggacaacgaggaccggctcgaggtggccctagagaacaacgagttcgtggaagtggttatagagggtgatgccatgtctcctgacttcattccatctcaaccagaaggagtttatctatacagcaagtaccgggagcctgaaaagtacatcgagttagatggagaccgtctgaccacggaggatctggtcaacttgggaaagggacgctacaaaataaagctcaccccaacagctgagaagagggtgcagaaatccagggaggtcatagatagcatcataaaagagaaaacagggagcttcaggtcaacttagtacgctcacattcttcaggtgttgggaaaccactaagtcctgagaggtgtcggatgctcttggctttaaggatcaatgtcttagccaaaggatacagtggcatttccctggagaccctcaaacaagtcatagaaatgtttaatgcctcctgcctgccctatgtcccagagaaaggaaccgttggtgccagtggagaccttgccccactctctcatcttgctcttgggctagttggagaagggaagatgtggtctccgaagagtggctgggctgatgctaaatacgtgctagaagcccatggattgaaaccagttattttaaaaccaaaagagggcctggcactcatcaatgggacgcagatgatcacatccctgggctgtgaagctgtagagcgagccagtgctattgcacggcaggctgacattgtggcagccctgacccttgaggtgctgaagggcaccaccaaagcctttgacactgacattcatgctcttcgacctcaccgtgggcaaattgaagttgcttttcggtttcggtcactcttggactcagatcaccacccatcagaaatagcagagagtcacaggttctgtgatcgcgtccaggatgcatacaccttgcgctgctgtccacaggtccatggtgtggtgaatgatacaatagcatttgtgaagaacatcattaccacagaactgaacagcgcaacagataatcctatggtctttgccaataggggagagacagtttctggaggaaacttccatggtgaatacccagccaaagccctagactacttggccattggcatccatgaacttgctgcaatcagtgagagaagaatcgagcggctctgcaatccctccctcagtgagctgcctgccttcctggtggctgaaggtggtctgaactctgggttcatgatagctcactgcacggcagcagcccttgtttctgagaacaaggctctgtgccatccctcgtctgttgactccctctccaccagcgcagccacggaggaccacgtctccatgggaggatgggcagcaaggaaagccctcagggtcatcgagcatgtggagcaagtgctggccatcgagctccttgcagcctgccagggcatagagtttctacgtcccctgaaaacaaccactccgctggagaaggtctatgacctggtgcgctctgttgtaaggccctggataaaagatcgcttcatggccccggacatcgaggcagcccacaggctgctcctggagcagaaggtttgggaagtagctgctccatacattgaaaaatacagaatggagcatattccagaatcaagacctctttctccaacagccttttcactgcaatttctgcacaagaaatccaccaaaatcccggagtctgaggacctttaatgggctttgtcatgaagtagcagatgagagggcagtcagtttagcacaaagcaatactaggctgaaggagagacctgagaactttcctaggtagatcaatccattgtatcattcagttcttctaaagcctacgttggttaggctgatggcagtattatagttgctaaattcagcactgtgttcctgttgtcgtggttcaagacccaccaggtattttcagattataaaacttttctttctttcttaacagtttcaacaggccactcactcttaagggtgagaagaataaccacaattgtatgtgcctgttttttactcttagcattagatgaattcaaatttggaaacagattgatagcaattttttctaaaaacattagacttttgttaacctttttttttttttttaaatttgcttcaacaagctctccaccagttgactttctttggctaattttactttgcatgatatgccttaatatgccttcataaataaccattttaagtcataatttgtccttaagctgcttttttcttctattaattggatcatagtaaagagtagtcaatagggtcttcagctattaattgtagaggtgatt

SEQ ID NO: 140845 - DNA, 2637 bp, Homo sapiens
  Payload ID: 7626
  Gene Symbol: HAL
  Gene Name: histidine ammonia-lyase
  Uniprot ID: P42357
  ENST ID: ENST00000538703
  CDS Start-End: 349-2124
agataaagacaggaacatggtgtttataagctgcccttaatggcagagaacacagacagaaacgagggaagagagagaaattggggaccctgaagaaagggggccagcagcaggtaggtgccatcagggacaagaacagcacctcccagggtgggagaccccaggcctttctggcagcaggtctggatggaaagtggacaggaggctcacccgtctgcatcccctgctcctgcccctgctcggctacaaaaaccaaagggacagcagctgaccacaccccggtagccactcctgcataaagctctcccctcctgtgaccagctgaggacctcaggctgcagcggagccatgcccagatacacggtgcacgtacgtggggaatggctggcagtgccctgccaggacgcgcagctcactgtgggctggctgggccgggaggccgtgaggcgctatatcaagaataagcccgacaatggtggcttcacctccgtggatgacgcgcacttccttgtgcgccggtgcaagggcctgggcctgctggacaacgaggaccggctcgaggtggccctagagaacaacgagttcgtggaagtggttatagagggtgatgccatgtctcctgacttcattccatctcaaccagaaggagtttatctatacagcaagtaccgggagcctgaaaagtacatcgagttagatggagaccgtctgaccacggaggatctggtcaacttgggaaagggacgctacaaaataaagctcaccccaacagctgagaagagggtgcagaaatccagggaggtcatagatagcatcataaaagagaaaacagttgtttacggtattactacaggttttgggaaatttgccagaactgtaattcctatcaataagctacaggagcttcaggtcaacttagtacgctcacattcttcaggtgttgggaaaccactaagtcctgagaggtgtcggatgctcttggctttaaggatcaatgtcttagccaaaggatacagtggcatttccctggagaccctcaaacaagtcatagaaatgtttaatgcctcctgcctgccctatgtcccagagaaaggaaccgttggtgccagtggagaccttgccccactctctcatcttgctcttgggctagttggagaagggaagatgtggtctccgaagagtggctgggctgatgctaaatacgtgctagaagcccatggattgaaaccagttattttaaaaccaaaagagggcctggcactcatcaatgggacgcagatgatcacatccctgggctgtgaagctgtagagcgagccagtgctattgcacggcaggctgacattgtggcagccctgacccttgaggtgctgaagggcaccaccaaagcctttgacactgacattcatgctcttcgacctcaccgtgggcaaattgaagttgcttttcggtttcggtcactcttggactcagatcaccacccatcagaaatagcagagagtcacaggttctgtgatcgcgtccaggatgcatacaccttgcgctgctgtccacaggtccatggtgtggtgaatgatacaatagcatttgtgaagaacatcattaccacagaactgaacagcgcaacagataatcctatggtctttgccaataggggagagacagtttctggaggaaacttccatggtgaatacccagccaaagccctagactacttggccattggcatccatgaacttgctgcaatcagtgagagaagaatcgagcggctctgcaatccctccctcagtgagctgcctgccttcctggtggctgaaggtggtctgaactctgggttcatgatagctcactgcacggcagcagcccttgtttctgagaacaaggctctgtgccatccctcgtctgttgactccctctccaccagcgcagccacggaggaccacgtctccatgggaggatgggcagcaaggaaagccctcagggtcatcgagcatgtggagcaagtgctggccatcgagctccttgcagcctgccagggcatagagtttctacgtcccctgaaaacaaccactccgctggagaaggtctatgacctggtgcgctctgttgtaaggtttgggaagtagctgctccatacattgaaaaatacagaatggagcatattccagaatcaagacctctttctccaacagccttttcactgcaatttctgcacaagaaatccaccaaaatcccggagtctgaggacctttaatgggctttgtcatgaagtagcagatgagagggcagtcagtttagcacaaagcaatactaggctgaaggagagacctgagaactttcctaggtagatcaatccattgtatcattcagttcttctaaagcctacgttggttaggctgatggcagtattatagttgctaaattcagcactgtgttcctgttgtcgtggttcaagacccaccaggtattttcagattataaaacttttctttctttcttaacagtttcaacaggccactcactcttaagggtgagaagaataaccacaattgtatgtgcctgttttttactcttagcattagatgaattcaaatttggaaacagattgatagcaattttttctaaaaacattagacttt

SEQ ID NO: 140846 - DNA, 3846 bp, Homo sapiens
  Payload ID: 7626
  Gene Symbol: HAL
  Gene Name: histidine ammonia-lyase
  Uniprot ID: P42357
  ENST ID: ENST00000541929
  CDS Start-End: 927-2276
gttttacagttgagtaatctcagataaagacaggaacatggtgtttataagctgcccttaatggcagagaacacagacagaaacgagggaagagagagaaattggggaccctgaagaaagggggccagcagcaggtaggtgccatcagggacaagaacagcacctcccagggtgggagaccccaggcctttctggcagcaggtctggatggaaagtggacaggaggctcacccgtctgcatcccctgctcctgcccctgctcggctacaaaaaccaaagggacagcagctgaccacaccccggtagccactcctgcataaagctctcccctcctgtgaccagctgaggacctcaggctgcagcggagccatgcccagatacacggtgcacgtacgtggggaatggctggcagtgccctgccaggacgcgcagctcactgtgggctggctgggccgggaggccgtgaggcgctatatcaagaataagcccgacaatggtggcttcacctccgtggatgacgcgcacttccttgtgcgccggtgcaagggcctgggcctgctggacaacgaggaccggctcgaggtggccctagagaacaacgagttcgtggaagtggttatagagggtgatgccatgtctcctgacttcattccatctcaaccagaaggagtttatctatacagcaagtaccgggagcctgaaaagtacatcgagttagatggagaccgtctgaccacggaggatctggtcaacttgggaaagggacgctacaaaataaagctcaccccaacagctgagaagagggtgcagaaatccagggaggtcatagatagcatcataaaagagaaaacagggagcttcaggtcaacttagtacgctcacattcttcaggtgttgggaaaccactaagtcctgagaggtgtcggatgctcttggctttaaggatcaatgtcttagccaaaggatacagtggcatttccctggagaccctcaaacaagtcatagaaatgtttaatgcctcctgcctgccctatgtcccagagaaaggaaccgttggtgccagtggagaccttgccccactctctcatcttgctcttgggctagttggagaagggaagatgtggtctccgaagagtggctgggctgatgctaaatacgtgctagaagcccatggattgaaaccagttattttaaaaccaaaagagggcctggcactcatcaatgggacgcagatgatcacatccctgggctgtgaagctgtagagcgagccagtgctattgcacggcaggctgacattgtggcagccctgacccttgaggtgctgaagggcaccaccaaagcctttgacactgacattcatgctcttcgacctcaccgtgggcaaattgaagttgcttttcggtttcggtcactcttggactcagatcaccacccatcagaaatagcagagagtcacaggttctgtgatcgcgtccaggatgcatacaccttgcgctgctgtccacaggtccatggtgtggtgaatgatacaatagcatttgtgaagaacatcattaccacagaactgaacagcgcaacagataatcctatggtctttgccaataggggagagacagtttctggaggaaacttccatggtgaatacccagccaaagccctagactacttggccattggcatccatgaacttgctgcaatcagtgagagaagaatcgagcggctctgcaatccctccctcagtgagctgcctgccttcctggtggctgaaggtggtctgaactctgggttcatgatagctcactgcacggcagcagcccttgtttctgagaacaaggctctgtgccatccctcgtctgttgactccctctccaccagcgcagccacggaggaccacgtctccatgggaggatgggcagcaaggaaagccctcagggtcatcgagcatgtggagcaagtgctggccatcgagctccttgcagcctgccagggcatagagtttctacgtcccctgaaaacaaccactccgctggagaaggtctatgacctggtgcgctctgttgtaaggccctggataaaagatcgcttcatggccccggacatcgaggcagcccacaggctgctcctggagcagaaggtttgggaagtagctgctccatacattgaaaaatacagaatggagcatattccagaatcaagacctctttctccaacagccttttcactgcaatttctgcacaagaaatccaccaaaatcccggagtctgaggacctttaatgggctttgtcatgaagtagcagatgagagggcagtcagtttagcacaaagcaatactaggctgaaggagagacctgagaactttcctaggtagatcaatccattgtatcattcagttcttctaaagcctacgttggttaggctgatggcagtattatagttgctaaattcagcactgtgttcctgttgtcgtggttcaagacccaccaggtattttcagattataaaacttttctttctttcttaacagtttcaacaggccactcactcttaagggtgagaagaataaccacaattgtatgtgcctgttttttactcttagcattagatgaattcaaatttggaaacagattgatagcaattttttctaaaaacattagacttttgttaacctttttttttttttttaaatttgcttcaacaagctctccaccagttgactttctttggctaattttactttgcatgatatgccttaatatgccttcataaataaccattttaagtcataatttgtccttaagctgcttttttcttctattaattggatcatagtaaagagtagtcaatagggtcttcagctattaattgtagaggtgattaaaaccaacaaggagtttcatgtgcaaaggagataaggaatgaatataaagattgctatttgggtggctcttattaaactgtgtattttgtacttatcactacacgtatcccccaaatgcttacatgggagtttgaggttagtattttcacttccttggtgttagtactctattcacattcttattgtaaccttcctcatttcacagataaggaatctttggggattaaccaacctcctttctgtaatggtaatcattaaaataagtcctattgataaaggtcagatggagccctagagtgtattactgcatctatttttttccccgagaagataaaggaccttcagggatggcttaagtgtatctgtccagatgaaggatgggtcacatgacctcttggcttcccaagtctaagctctgtgactttgcaccagtgtgtgcatatatgtgcaaggcccttcaagtggtctgaaaccgtggctctaaaaaccacagctggtggagaggaggacagacacacttgccaccttgcctacctaattgccatctaaaatgggccgaacagtggatttcacaatagagttttcaccctttagatttacaacctgtcaggtggaaactgaagtgaaaactgctgcacacagcaattcagggagcaaaaaatgtgctgaggagactgtttacctaaaggttgttcttggtgctattccttgtcaaaatgtgaacacacacaaatgaggtttgtgcattgtcatccgtgggctgccattgagccagtaacccccagtggtctcatggtgctcttcgctccagtttggggaatgctggattctttcagcccctgcagccctccaggtcaaaatgacactttgtcactgagttttctacacagctctattagtaactgacagcacacgccttcaagggaacttcaagggaaacatggaataaactaagtctcaattgcc

SEQ ID NO: 140847 - DNA, 753 bp, Homo sapiens
  Payload ID: 7626
  Gene Symbol: HAL
  Gene Name: histidine ammonia-lyase
  ENST ID: ENST00000548808
  CDS Start-End: 1-463
aagaatcgagcggctctgcaatccctccctcagtgagctgcctgccttcctggtggctgaaggtggtctgaactctgggttcatgatagctcactgcacggcagcagcccttgtttctgagaacaaggctctgtgccatccctcgtctgttgactccctctccaccagcgcagccacggaggaccacgtctccatgggaggatgggcagcaaggaaagccctcagggtcatcgagcatgtggagcaagtgctggccatcgagctccttgcagcctgccagggcatagagtttctacgtcccctgaaaacaaccactccgctggagaaggtctatgacctggtgcgctctgttgtaaggccctggataaaagatcgcttcatggccccggacatcgaggcagcccacaggctgctcctggagcagaaggcaagctggctccttggcttgtttcttaatttttaattgttacaggaaagcaaagtcggggatggagaaacattgccttattctattgttttctggccattccttgggaatgagcaaaaaggtatttgagcaacaacttgcagcaccactaagaagccatataataaacactaagtgcaccagggtgcagccaacggttgaatatctaaggattagaaacagaaatggattttaaatggagttttgggacaatattcatggggaaaaaaataagatgtcaggttcattgatgcctccccacccctgcaagatgtcctctttgattc

SEQ ID NO: 140848 - DNA, 697 bp, Homo sapiens
  Payload ID: 7626
  Gene Symbol: HAL
  Gene Name: histidine ammonia-lyase
  ENST ID: ENST00000546579
  CDS Start-End: 225-697
ccctggtctctgccctgacacctacctttctgctttttgctctcctcctacataaagatgctaagaccacatgaaaccatctgaagcagttttaaagcagccatttctatagaattcatgggccaatgatgggccgttccttggtttaacagggggaacatggctgtacaatgtgatctgtaacgagtctcccgtgcattgttttagttatagagggtgatgccatgtctcctgacttcattccatctcaaccagaaggagtttatctcaagtaccgggagcctgaaaagtacatcgagttagatggagaccgtctgaccacggaggatctggtcaacttgggaaagggacgctacaaaataaagctcaccccaacagctgagaagagggtgcagaaatccagggaggtcatagatagcatcataaaagagaaaacagttgtttacggtattactacaggttttgggaaatttgccagaactgtaattcctatcaataagctacaggagcttcaggtcaacttagtacgctcacattcttcaggtgttgggaaaccactaagtcctgagaggtgtcggatgctcttggctttaaggatcaatgtcttagccaaaggatacagtggcatttccctggagaccctcaaacaagtcatagaaatgtttaatgcctcctgcctgccctatgtcccagagaa

SEQ ID NO: 140849 - DNA, 2271 bp, Homo sapiens
  Payload ID: 7626
  Gene Symbol: HAL
  Gene Name: histidine ammonia-lyase
  ENST ID: ENST00000546999
  CDS Start-End: 230-733
gccatcagggacaagaacagcacctcccagggtgggagaccccaggcctttctggcagcaggtctggatggaaagtggacaggaggctcacccgtctgcatcccctgctcctgcccctgctcggctacaaaaaccaaagggacagcagctgaccacaccccggtagccactcctgcataaagctctcccctcctgtgaccagctgaggacctcaggctgcagcggagccatgcccagatacacggtgcacgtacgtggggaatggctggcagtgccctgccaggacgcgcagctcactgtgggctggctgggccgggaggccgtgaggcgctatatcaagaataagcccgacaatggtggcttcacctccgtggatgacgcgcacttccttgtgcgccggtgcaagggcctgggcctgctggacaacgaggaccggctcgaggtggccctagagaacaacgagttcgtggaagtggttatagagggtgatgccatgtctcctgacttcattccatctcaaccagaaggagtttatctatacagcaagtaccgggagcctgaaaagtacatcgagttagatggagaccgtctgaccacggaggatctggtcaacttgggaaagggacgctacaaaataaagctcaccccaacagctgagaagagggtgcagaaatccagggaggtcatagatagcatcataaaagagaaaacagggagcttcaggtcaacttagtacgctcacattcttcaggtgttgggaaaccactaagtcctgagaggtgtcggatgctcttggctttaaggatcaatgtcttagccaaaggatacagtggcatttccctggagaccctcaaacaagtcatagaaatgtttaatgcctcctgcctgccctatgtcccagagaaaggaaccgttggtgccagtggagaccttgccccactctctcatcttgctcttgggctagttggagaagggaagatgtggtctccgaagagtggctgggctgatgctaaatacgtgctagaagcccatggattgaaaccagttattttaaaaccaaaagagggcctggcactcatcaatgggacgcagatgatcacatccctgggctgtgaagctgtagagcgagccagtgctattgcacggcaggctgacattgtggcagccctgacccttgaggtgctgaagggcaccaccaaagcctttgacactgacattcatgctcttcgacctcaccgtgggcaaattgaagttgcttttcggtttcggtcactcttggactcagatcaccacccatcagaaatagcagagagtcacaggttctgtgatcgcgtccaggatgcatacaccttgcgctgctgtccacaggtccatggtgtggtgaatgatacaatagcatttgtgaagaacatcattaccacagaactgaacagcgcaacagataatcctatggtctttgccaataggggagagacagtttctggaggaaacttccatggccctagactacttggccattggcatccatgaacttgctgcaatcagtgagagaagaatcgagcggctctgcaatccctccctcagtgagctgcctgccttcctggtggctgaaggtggtctgaactctgggttcatgatagctcactgcacggcagcagcccttgtttctgagaacaaggctctgtgccatccctcgtctgttgactccctctccaccagcgcagccacggaggaccacgtctccatgggaggatgggcagcaaggaaagccctcagggtcatcgagcatgtggagcaagtgctggccatcgagctccttgcagcctgccagggcatagagtttctacgtcccctgaaaacaaccactccgctggagaaggtctatgacctggtgcgctctgttgtaaggccctggataaaagatcgcttcatggccccggacatcgaggcagcccacaggctgctcctggagcagaaggtttgggaagtagctgctccatacattgaaaaatacagaatggagcatattccagaatcaagacctctttctccaacagccttttcactgcaatttctgcacaagaaatccaccaaaatcccggagtctgaggacctttaatgggctttgtcatgaagtagcagatgagagggcagtcagtttagcacaaagcaatactaggctgaaggagagacctgagaactttcctaggtagatcaatccattgtatcattcagttcttctaaagcctacgttggttaggctgatggcag

SEQ ID NO: 140850 - DNA, 1026 bp, Homo sapiens
  Payload ID: 7626
  Gene Symbol: HAL
  Gene Name: histidine ammonia-lyase
  ENST ID: ENST00000552509
  CDS Start-End: 19-1026
tcaggctgcagcggagccatgcccagatacacggtgcacgtacgtggggaatggctggcagtgccctgccaggacgcgcagctcactgtgggctggctgggccgggaggccgtgaggcgctatatcaagaataagcccgacaatggtggcttcacctccgtggatgacgcgcacttccttgtgcgccggtgcaagggcctgggcctgctggacaacgaggaccggctcgaggtggccctagagaacaacgagttcgtggaagtggttatagagggtgatgccatgtctcctgacttcattccatctcaaccagaaggagtttatctatacagcaagtaccgggagcctgaaaagtacatcgagttagatggagaccgtctgaccacggaggatctggtcaacttgggaaagggacgctacaaaataaagctcaccccaacagctgagaagagggtgcagaaatccagggaggtcatagatagcatcataaaagagaaaacagatcagaggatgaggcttgggttaccttgcatggagcttcaggtcaacttagtacgctcacattcttcaggtgttgggaaaccactaagtcctgagaggtgtcggatgctcttggctttaaggatcaatgtcttagccaaaggatacagtggcatttccctggagaccctcaaacaagtcatagaaatgtttaatgcctcctgcctgccctatgtcccagagaaaggaaccgttggtgccagtggagaccttgccccactctctcatcttgctcttgggctagttggagaagggaagatgtggtctccgaagagtggctgggctgatgctaaatacgtgctagaagcccatggattgaaaccagttattttaaaaccaaaagagggcctggcactcatcaatgggacgcagatgatcacatccctgggctgtgaagctgtagagcgagccagtgctattgcacggcaggctgacattgtggcagccctgacccttgaggtgctgaagggcaccaccaaagccttt

SEQ ID NO: 140851 - DNA, 2705 bp, Homo sapiens
  Payload ID: 7627
  Gene Symbol: HDC
  Gene Name: histidine decarboxylase
  Uniprot ID: P19113
  ENST ID: ENST00000267845
  CDS Start-End: 404-2392
gggagcttgtctgaggctggagctctattgtctgaatccaggggcagaaagaactgagggctcttttacggcatccacctggaggctgcctgcaggcttgggttgctaagtgcactgcttaatttagaagcgccttttatcctggctctcttgaccagtcaaagttgtggtcgctgttttctacaaggactggggaaagaaagggtggaattaattaaacctggaggaagggactttgaagggcggagctaaggtcaaagaaagaaccctttaaataaagggcccacactggctgccagggagtgcgcaggactggcaagagggaagccgggctgctccacgcctttcacgccttccacctcctgcgtgtccatctgtgagaaggagccagagcccaagggagatgatggagcctgaggagtacagagagagagggagagagatggtggattacatctgccagtacctgagcactgtgcgggagagacgtgtgacgccagacgtgcagcctggctacctgcgagcccagctgcctgagagtgctcctgaggaccccgacagctgggacagcatctttggggacattgaacgaatcatcatgcctggggtggtacattggcagagcccccatatgcacgcctactacccagccctcacctcttggccctccctgctaggagacatgctggctgatgccatcaactgcttgggattcacctgggcatccagccctgcgtgtacagagctggagatgaacgtcatggactggttggcaaaaatgctgggacttccagagcacttcttgcaccaccaccccagcagccagggcggaggcgtcctgcagagcacggtcagtgaatccactttgattgccctgctggcagcaaggaagaacaaaatcctggaaatgaaaacgtctgagcccgatgctgatgagtcctgcctaaatgcccgactcgtggcctatgcctctgaccaggctcactcctctgtggaaaaggctggtttgatttcccttgtgaagatgaaatttctgcctgtggatgacaacttctcactccgaggggaagctcttcagaaggccatcgaggaagacaagcagcggggcttggtgcccgtctttgtctgtgcaacactagggaccactggggtctgtgcatttgactgcctgtcagagctgggccccatctgtgcccgtgaggggctgtggctccacatcgatgctgcttatgcaggcactgccttcctgtgccccgagttccgggggtttctgaaggggattgagtatgccgactccttcacctttaatccttccaagtggatgatggtgcattttgactgtactgggttctgggtcaaggacaagtacaagctgcagcagaccttcagtgtgaatcccatctacctcaggcatgccaactcaggcgtggccaccgacttcatgcactggcagatccccctgagccgacggtttcgctctgttaaactctggttcgtgattcggtccttcggggtgaagaatcttcaagcacatgtcagacatggtactgaaatggctaaatattttgaatctctggtcagaaacgacccttcctttgaaattcctgccaagaggcaccttggcctggtggtttttcgtctaaagggtcctaattgtctcacagaaaatgtgttaaaggaaatagctaaagctggccgtctcttcctcatcccggccactatccaggacaagttaatcatccgtttcactgtgacatcccagtttaccactagggatgacatcctgagagactggaatctcattcgagatgctgccactctcatcctgagtcagcactgtacttcccaacccagccctcgggttgggaacctcatctcccaaatcaggggtgccagagcctgggcctgtggaacgtcccttcagtctgtcagtggggcaggagatgatccagtccaggccaggaagatcatcaagcagcctcagcgtgtgggagccggtcccatgaaaagggaaaatggcctccatcttgaaaccctgctggacccagttgatgactgcttttcagaagaggccccagatgccaccaagcacaagctgtcctccttcctgttcagttacttgtctgtgcagactaagaagaagacggtgcgctccctcagttgcaacagtgtgccagtgagtgctcagaagccactgcccacagaggcctctgtgaagaatgggggctcctccagggtcagaatcttttccaggtttccagaagacatgatgatgctgaagaaaagtgccttcaaaaaactcatcaaattctacagcgtccccagctttcctgaatgcagctctcaatgtggactccagctgccctgttgccctctgcaggccatggtttagacacagggccttcagccagagtctgaggatatacttcagggactctgtgaacccctcacaattgtatgccaactttgtgtgcttatgtgtacatgcatttttcttggggcgagttcataattttaatcaaattctcataggggttcatgacccacaataggatacaaacgaagagtttaagccagcatgatccagatgggttcagcagtctggtcagtgagaaagggccgagggtagacaggcagcttctgtggttcagcttgtgacatgatatataacacagaaataaattatgcttgtccctgaaacaaaa

SEQ ID NO: 140852 - DNA, 2180 bp, Homo sapiens
  Payload ID: 7627
  Gene Symbol: HDC
  Gene Name: histidine decarboxylase
  Uniprot ID: P19113
  ENST ID: ENST00000543581
  CDS Start-End: 44-1933
tcctgcgtgtccatctgtgagaaggagccagagcccaagggagatgatggagcctgaggagtacagagagagagggagagagatggtggattacatctgccagtacctgagcactgtgcgggagagacgtgtgacgccagacgtgcagcctggctacctgcgagcccagctgcctgagagtgctcctgaggaccccgacagctgggacagcatctttggggacattgaacgaatcatcatgcctggggtggtacattggcagagcccccatatgcacgcctactacccagccctcacctcttggccctccctgctaggagacatgctggctgatgccatcaactgcttgggattcacctgggcatccagccctgcgtgtacagagctggagatgaacgtcatggactggttggcaaaaatgctgggacttccagagcacttcttgcaccaccaccccagcagccagggcggaggcgtcctgcagagcacggtcagtgaatccactttgattgccctgctggcagcaaggaagaacaaaatcctggaaatgaaaacgtctgagcccgatgctgatgagtcctgcctaaatgcccgactcgtggcctatgcctctgaccaggctcactcctctgtggaaaaggctggtttgatttcccttgtgaagatgaaatttctgcctgtggatgacaacttctcactccgaggggaagctcttcagaaggccatcgaggaagacaagcagcggggcttggtgcccgtctttgtctgtgcaacactagggaccactggggtctgtgcatttgactgcctgtcagagctgggccccatctgtgcccgtgaggggctgtggctccacatcgatgctgcttatgcaggcactgccttcctgtgccccgagttccgggggtttctgaaggggattgagtatgccgactccttcacctttaatccttccaagtggatgatggtgcattttgactgtactgggttctgggtcaaggacaagtacaagctgcagcagaccttcagtgtgaatcccatctacctcaggcatgccaactcaggcgtggccaccgacttcatgggtactgaaatggctaaatattttgaatctctggtcagaaacgacccttcctttgaaattcctgccaagaggcaccttggcctggtggtttttcgtctaaagggtcctaattgtctcacagaaaatgtgttaaaggaaatagctaaagctggccgtctcttcctcatcccggccactatccaggacaagttaatcatccgtttcactgtgacatcccagtttaccactagggatgacatcctgagagactggaatctcattcgagatgctgccactctcatcctgagtcagcactgtacttcccaacccagccctcgggttgggaacctcatctcccaaatcaggggtgccagagcctgggcctgtggaacgtcccttcagtctgtcagtggggcaggagatgatccagtccaggccaggaagatcatcaagcagcctcagcgtgtgggagccggtcccatgaaaagggaaaatggcctccatcttgaaaccctgctggacccagttgatgactgcttttcagaagaggccccagatgccaccaagcacaagctgtcctccttcctgttcagttacttgtctgtgcagactaagaagaagacggtgcgctccctcagttgcaacagtgtgccagtgagtgctcagaagccactgcccacagaggcctctgtgaagaatgggggctcctccagggtcagaatcttttccaggtttccagaagacatgatgatgctgaagaaaagtgccttcaaaaaactcatcaaattctacagcgtccccagctttcctgaatgcagctctcaatgtggactccagctgccctgttgccctctgcaggccatggtttagacacagggccttcagccagagtctgaggatatacttcagggactctgtgaacccctcacaattgtatgccaactttgtgtgcttatgtgtacatgcatttttcttggggcgagttcataattttaatcaaattctcataggggttcatgacccacaataggatacaaacgaagagtttaagccagcatgatccagatgggttcagcagtctggtcagtgagaaagggccgagggtagacaggcagct

SEQ ID NO: 140853 - DNA, 545 bp, Homo sapiens
  Payload ID: 7627
  Gene Symbol: HDC
  Gene Name: histidine decarboxylase
  ENST ID: ENST00000559683
  CDS Start-End: 10-545
gatttctctatgtcacttctagggagagagatggtggattacatctgccagtacctgagcactgtgcgggagagacgtgtgacgccagacgtgcagcctggctacctgcgagcccagctgcctgagagtgctcctgaggaccccgacagctgggacagcatctttggggacattgaacgaatcatcatgcctggggtggtacattggcagagcccccatatgcacgcctactacccagccctcacctcttggccctccctgctaggagacatgctggctgatgccatcaactgcttgggattcacctgggcatccagccctgcgtgtacagagctggagatgaacgtcatggactggttggcaaaaatgctgggacttccagagcacttcttgcaccaccaccccagcagccagggcggaggcgtcctgcagagcacggtcagtgaatccactttgattgccctgctggcagcaaggaagaacaaaatcctggaaatgaaaacgtctgagcccgatgctgatgagtcctgcctaaatgcccgact

SEQ ID NO: 140854 - DNA, 2385 bp, Homo sapiens
  Payload ID: 7628
  Gene Symbol: HRC
  Gene Name: histidine rich calcium binding protein
  Uniprot ID: P23327
  ENST ID: ENST00000252825
  CDS Start-End: 188-2287
ctccggagacagcctcagaggggtgtccagagccaggcagcaaggaccagaggaaggtggacagagaccgaaaggacaaaggagagacacagagaaaaaaagagaccaaccccaaagggacaaagaccccaacgtttgtccacattgccgcagaggcagctggagccagtgctgcctgtccgtccccatgggccaccataggccatggctgcacgcttctgtcctctgggctggggtggccagcctgctcctccccccggccatgacccagcagctcagaggggatgggctaggcttcagaaaccggaacaacagcactggagtcgccgggctctccgaggaggcatcagcagagcttcgccaccacctccacagccctagagaccatccagatgagaacaaggatgtttccacagagaatgggcatcatttctggagccacccagaccgtgaaaaggaggatgaagatgtctccaaggaatatgggcacctactcccaggccacaggtcccaagaccacaaagtcggagatgagggtgtctcaggtgaggaggtctttgcagagcatggtgggcaggcccgtgggcacagaggccacgggagtgaagacacggaagactcagctgagcacaggcaccacctccccagccacaggagccacagccatcaagacgaggatgaggatgaagttgtgtccagtgagcatcaccatcatatcctcaggcatggacaccgaggccatgatggggaagatgatgaaggagaagaggaggaggaggaggaggaggaggaagaggaggcctccactgagtatggacaccaggcccacaggcaccgaggccatgggagtgaagaggatgaggatgtctcagatggacaccatcatcatggccccagccacaggcaccaaggccatgaagaagatgacgatgatgatgatgatgatgatgatgatgatgatgatgatgatgtctccattgaatatagacaccaggctcacaggcaccaaggccacgggattgaagaggatgaagatgtctcagatggacaccatcatcgcgaccccagccacaggcaccgaagccatgaagaagatgacaatgatgatgatgatgtctccactgagtatggacaccaggcccacaggcaccaagaccacagaaaggaagaggttgaggctgtctcaggtgaacaccaccatcatgtccctgaccacaggcaccaaggccacagagacgaggaagaagatgaggatgtgtccactgaacgttggcaccagggtccccaacatgtccaccatggccttgtagatgaggaagaggaagaagaggagatcacagtccagttcggccactatgttgcaagccaccaacctcgaggccacaagagtgatgaagaggacttccaagatgagtataaaacagaagtccctcaccatcaccaccacagagtccccagggaggaagatgaggaggtctctgctgagcttggccaccaggcccccagccacaggcaaagccaccaagatgaagaaactggccatggtcaaagagggtccatcaaagagatgagccatcaccccccaggacacacagtggtcaaggatagaagccatttgaggaaggatgattctgaggaggaaaaggagaaggaagaggaccccggctcccatgaggaagacgatgaaagttcagagcagggagagaaaggcacccatcatggcagccgggaccaggaagatgaggaggatgaggaggaaggtcatggcctcagcctgaaccaggaggaggaagaagaggaagacaaggaggaggaggaggaggaagaagacgaggagaggagggaagagagggctgaggttggggccccactgagcccagaccacagcgaggaggaagaggaggaggaggaggggctggaggaagatgagccccgcttcaccatcatccccaacccactggacaggagagaggaggctggaggtgcctccagcgaggaggaaagcggtgaggacacaggtccacaggatgctcaggagtatgggaactaccagccagggtccctgtgtggctactgctccttctgcaatcgatgcactgaatgtgagagctgtcactgtgatgaggagaacatgggtgagcactgcgaccagtgccagcactgtcagttctgctatctctgcccgctggtctgcgaaacggtctgcgctccaggaagctacgttgactatttctcctcgtccctttatcaggccctggcagacatgctggaaacgccggaaccctgacccagtcgctcgactgcgacgcaggtgtacctccccctgccttccaacccctttccacgagctatatttatttctccgaataaacgtgctccccgaaa

SEQ ID NO: 140855 - DNA, 303 bp, Homo sapiens
  Payload ID: 7628
  Gene Symbol: HRC
  Gene Name: histidine rich calcium binding protein
  ENST ID: ENST00000598858
  CDS Start-End: 1-289
cagcgaggaggaaagcggtgaggacacaggtccacaggatgctcaggagtatgggaactaccagccagggtccctgtgtggctactgctccttctgcaatcgatgcactgaatgtgagagctgtcactgtgatgaggagaacatgggtgagcactgcgaccagtgccagggccctggcagacatgctggaaacgccggaaccctgacccagtcgctcgactgcgacgcaggtgtacctccccctgccttccaacccctttccacgagctatatttatttctccgaataaacgtgctccccgaa

SEQ ID NO: 140856 - DNA, 2044 bp, Homo sapiens
  Payload ID: 7628
  Gene Symbol: HRC
  Gene Name: histidine rich calcium binding protein
  ENST ID: ENST00000595625
  CDS Start-End: 7-2037
gtccccatgggccaccataggccatggctgcacgcttctgtcctctgggctggggtggccagcctgctcctccccccggccatgacccagcagctcagaggggatgggctaggcttcagaaaccggaacaacagcactggagtcgccgggctctccgaggaggcatcagcagagcttcgccaccacctccacagccctagagaccatccagatgagaacaaggatgtttccacagagaatgggcatcatttctggagccacccagaccgtgaaaaggaggatgaagatgtctccaaggaatatgggcacctactcccaggccacaggtcccaagaccacaaagtcggagatgagggtgtctcaggtgaggaggtctttgcagagcatggtgggcaggcccgtgggcacagaggccacgggagtgaagacacggaagactcagctgagcacaggcaccacctccccagccacaggagccacagccatcaagacgaggatgaggatgaagttgtgtccagtgagcatcaccatcatatcctcaggcatggacaccgaggccatgatggggaagatgatgaaggagaagaggaggaggaggaggaggaggaggaagaggaggcctccactgagtatggacaccaggcccacaggcaccgaggccatgggagtgaagaggatgaggatgtctcagatggacaccatcatcatggccccagccacaggcaccaaggccatgaagaagatgacgatgatgatgatgatgatgatgatgatgatgatgatgatgatgtctccattgaatatagacaccaggctcacaggcaccaaggccacgggattgaagaggatgaagatgtctcagatggacaccatcatcgcgaccccagccacaggcaccgaagccatgaagaagatgacaatgatgatgatgatgtctccactgagtatggacaccaggcccacaggcaccaagaccacagaaaggaagaggttgaggctgtctcaggtgaacaccaccatcatgtccctgaccacaggcaccaaggccacagagacgaggaagaagatgaggatgtgtccactgaacgttggcaccagggtccccaacatgtccaccatggccttgtagatgaggaagaggaagaagaggagatcacagtccagttcggccactatgttgcaagccaccaacctcgaggccacaagagtgatgaagaggacttccaagatgagtataaaacagaagtccctcaccatcaccaccacagagtccccagggaggaagatgaggaggtctctgctgagcttggccaccaggcccccagccacaggcaaagccaccaagatgaagaaactggccatggtcaaagagggtccatcaaagagatgagccatcaccccccaggacacacagtggtcaaggatagaagccatttgaggaaggatgattctgaggaggaaaaggagaaggaagaggaccccggctcccatgaggaagacgatgaaagttcagagcagggagagaaaggcacccatcatggcagccgggaccaggaagatgaggaggatgaggaggaaggtcatggcctcagcctgaaccaggaggaggaagaagaggaagacaaggaggaggaggaggaggaagaagacgaggagaggagggaagagagggctgaggttggggccccactgagcccagaccacagcgaggaggaagaggaggaggaggaggggctggaggaagatgagccccgcttcaccatcatccccaacccactggacaggagagaggaggctggaggtgcctccagcgaggaggaaagcggtgaggacacaggtccacaggatgctcaggagtatgggaactaccagccagggtccctgtgtggctactgctccttctgcaatcactgtcagttctgctatctctgcccgctggtctgcgaaacggtctgcgctccaggaagctacgttgactatttctcctcgtccctttatcaggccctggcagacatgctggaaacgccggaaccctgacccagtc

SEQ ID NO: 140857 - DNA, 950 bp, Homo sapiens
  Payload ID: 7629
  Gene Symbol: HRCT1
  Gene Name: histidine rich carboxyl terminus 1
  Uniprot ID: Q6UXD1
  ENST ID: ENST00000354323
  CDS Start-End: 97-444
aacaaagttcagtgactgagagggctgagcggaggctgctgaaggggagaaaggagtgaggagctgctgggcagagagggactgtccggctcccagatgctgggcctcctggggagcacagccctcgtgggatggatcacaggtgctgctgtggcggtcctgctgctgctgctgctgctggccacctgccttttccacggacggcaggactgtgacgtggagaggaaccgtacagctgcagggggaaaccgagtccgccgggcccagccttggcccttccggcggcggggccacctgggaatctttcaccatcaccgtcatcctggccacgtatctcatgtgccgaatgtgggcctccaccaccaccaccacccccgccacacccctcaccacctccaccaccaccaccacccccaccgccaccatccccgccacgctcgctgaggctgctgtcgccggtgcctgtggacagcagctgcccctgccctcccatctgttcccaggacaagtggaccccatgtttccatgtggaaggatgcatctctggggtgaacgaggggaacaatagactggggcttgctccagctgcatttgcatggcatgccccagtgtactatggcagcagagaatggaggaacactgggtctgcagtgctgaagggtttggggagtggagagcaagggtgctctttcggggctggacagcccgtcttgtgacagtgactcccagtgagccccagaaatgacaagcgtgtcttggcagagccagcacacaagtggatgtgaagtgcccgtcttgacctcctcatcaggctgctgcaggcctctggcgggcagggcactgggagaggccctgagaatgtccttttggtttggagaaggcagtgtgaggctgcacagtcaattcatcggtgccttagtccaagaaaataaaaaccactaagaagcttt

SEQ ID NO: 140858 - DNA, 1081 bp, Homo sapiens
  Payload ID: 7630
  Gene Symbol: HINT1
  Gene Name: histidine triad nucleotide binding protein 1
  Uniprot ID: P49773
  ENST ID: ENST00000304043
  CDS Start-End: 281-661
gcattccccaggagacaagaaaggaggatagaaaaacgacttaggaatctccttggagctcaagaccaggaacttccccaagccggaggtccctgaggcgctctagcgcgctggccgcactcgcagcccaggtcgccagtgcgcacgcgcaagattaggtggggcgccagagccggggcacctgcgcaggcttggctgcgccctctcgcgccgcacgctctgcgggttcctcccttcttccgagcctctcctctggccgccgcgcgggagagaggccgagatggcagatgagattgccaaggctcaggtcgctcggcctggtggcgacacgatctttgggaagatcatccgcaaggaaataccagccaaaatcatttttgaggatgaccggtgccttgctttccatgacatttcccctcaagcaccaacacattttctggtgatacccaagaaacatatatcccagatttctgtggcagaagatgatgatgaaagtcttcttggacacttaatgattgttggcaagaaatgtgctgctgatctgggcctgaataagggttatcgaatggtggtgaatgaaggttcagatggtggacagtctgtctatcacgttcatctccatgttcttggaggtcggcaaatgcattggcctcctggttaagcacgttttggggataattttctcttctttaggcaatgattaagttaggcaatttccagtatgttaagtaacacacttatttttgcctgtgtatggagagattcaagaaataattttaaaaccgcatacataataaaagacattgttgcatggcttatagtctctctgagtgttgcgtttgatttgttattttaaaaacatatttgttggaatatgtgaaggtgggtttataattttggatgtttcttgctttttcttcccaaggaggactcaacatatgaacatcgcattgttttaatggtgttactagtctttgaagacaaataatgagagtttataaatttagctttaacttcgaaatatctttccaggctaaaataggtccaacttagatttttaagctaattctcacattttcta

SEQ ID NO: 140859 - DNA, 656 bp, Homo sapiens
  Payload ID: 7630
  Gene Symbol: HINT1
  Gene Name: histidine triad nucleotide binding protein 1
  ENST ID: ENST00000513345
  CDS Start-End: 129-326
gattaggtggggcgccagagccggggcacctgcgcaggcttggctgcgccctctcgcgccgcacgctctgcgggttcctcccttcttccgagcctctcctctggccgccgcgcgggagagaggccgagatggcagatgagattgccaaggctcaggtcgctcggcctggtggcgacacgatctttgggaagatcatccgcaaggaaataccagccaaaatcatttttgaggatgaccgggtaggtactgggcaccacctctctcgcctgctgagtgccttgctttccatgacatttcccctcaagcaccaacacattttctggtgatacccaagaaacatatatcccagatttctgtggcagaagatgatgatgaaagtcttcttggacacttaatgattgttggcaagaaatgtgctgctgatctgggcctgaataagggttatcgaatggtggtgaatgaaggttcagatggtggacagtctgtctatcacgttcatctccatgttcttggaggtcggcaaatgcattggcctcctggttaagcacgttttggggataattttctcttctttaggcaatgattaagttaggcaatttccagtatgttaagtaacacacttatttttgcctgtgtatggagagattcaagaaata

SEQ ID NO: 140860 - DNA, 583 bp, Homo sapiens
  Payload ID: 7630
  Gene Symbol: HINT1
  Gene Name: histidine triad nucleotide binding protein 1
  ENST ID: ENST00000513012
  CDS Start-End: 52-249
ctcccttcttccgagcctctcctctggccgccgcgcgggagagaggccgagatggcagatgagattgccaaggctcaggtcgctcggcctggtggcgacacgatctttgggaagatcatccgcaaggaaataccagccaaaatcatttttgaggatgaccgggtaggtactgggcaccacctctctcgcctgctgagtgccttgctttccatgacatttcccctcaagcaccaacacattttctggtgatacccaagaaacatatatcccagatttctgtggcagaagatgatgatgaaagtgtaagtacatttctaacatgatttattttcttgctttttaaattgtgagattaattttgtccttaaagtgctgtcacattttcatcttcctaaggtcattactaaggaaaaaccagaaaaaccattaggacttcaactgcccagctgttttccaaagttactgcatcattttgtatcccaccagcaatgaatgagcgttccagcttctccgtatccttatcaacacttgctattaccttttttttttttttttgagacagagtcttgctctgtcgcccagg

SEQ ID NO: 140861 - DNA, 825 bp, Homo sapiens
  Payload ID: 7630
  Gene Symbol: HINT1
  Gene Name: histidine triad nucleotide binding protein 1
  ENST ID: ENST00000508495
  CDS Start-End: 97-333
cgcaggcttggctgcgccctctcgcgccgcacgctctgcgggttcctcccttcttccgagcctctcctctggccgccgcgcgggagagaggccgagatggcagatgagattgccaaggctcaggtcgctcggcctggtggcgacacgatctttgggaagatcatccgcaaggaaataccagccaaaatcatttttgaggatgaccggtgccttgctttccatgacatttcccctcaagcaccaacacattttctggtgatacccaagaaacatatatcccagatttctgtggcagaagatgatgatgaaagtagtgttgaatatctcatgtaagagtattttactgcatatcaccagtctggaaaaggatcagaattcgaagtatggtttctcctgaatgcatatcgccacaccattgtaaagttgaaaaatcataatttccccaacttacaatttttgtccattgtccatctgtacaatggaccttactgcatgagtaagcttcttggacacttaatgattgttggcaagaaatgtgctgctgatctgggcctgaataagggttatcgaatggtggtgaatgaaggttcagatggtggacagtctgtctatcacgttcatctccatgttcttggaggtcggcaaatgcattggcctcctggttaagcacgttttggggataattttctcttctttaggcaatgattaagttaggcaatttccagtatgttaagtaacacacttatttttgcctgtgtatggagagattcaagaaataattttaaaaccgcatacataataaaagacattgttgcatggcttata

SEQ ID NO: 140862 - DNA, 619 bp, Homo sapiens
  Payload ID: 7630
  Gene Symbol: HINT1
  Gene Name: histidine triad nucleotide binding protein 1
  ENST ID: ENST00000504202
  CDS Start-End: 16-213
gggagagaggccgagatggcagatgagattgccaaggctcaggtcgctcggcctggtggcgacacgatctttgggaagatcatccgcaaggaaataccagccaaaatcatttttgaggatgaccgggtaggtactgggcaccacctctctcgcctgctgagtgccttgctttccatgacatttcccctcaagcaccaacacattttctggtgatacccaagaaacatatatcccagatttctgtggcagaagatgatgatgaaagtgtcattactaaggaaaaaccagaaaaaccattaggacttcaactgcccagctgttttccaaagttactgcatcattttgtatcccaccagcaatgaatgagcgttccagcttctccttgggcaaaatcatctaatacagagcctattctgtaacagagtgttgaatatctcatgtaagagtattttactgcatatcaccagtctggaaaaggatcagaattcgaagtatggtttctcctgaatgcatatcgccacaccattgtaaagttgaaaaatcataatttccccaacttacaatttttgtccattgtccatctgtacaatggaccttactgcatgagtaagcttcttgg

SEQ ID NO: 140863 - DNA, 681 bp, Homo sapiens
  Payload ID: 7630
  Gene Symbol: HINT1
  Gene Name: histidine triad nucleotide binding protein 1
  ENST ID: ENST00000506908
  CDS Start-End: 137-373
acgcgcaagattaggtggggcgccagagccggggcacctgcgcaggcttggctgcgccctctcgcgccgcacgctctgcgggttcctcccttcttccgagcctctcctctggccgccgcgcgggagagaggccgagatggcagatgagattgccaaggctcaggtcgctcggcctggtggcgacacgatctttgggaagatcatccgcaaggaaataccagccaaaatcatttttgaggatgaccggtgccttgctttccatgacatttcccctcaagcaccaacacattttctggtgatacccaagaaacatatatcccagatttctgtggcagaagatgatgatgaaagtgtaagtacatttctaacatgatttattttcttgctttttaaattgtgagattaattttgtccttaaagtgctgtcacattttcatcttcctaaggtcattactaaggaaaaaccagaaaaaccattaggacttcaactgcccagctgttttccaaagttactgcatcattttgtatcccaccagcaatgaatgagcgttccagcttctccgtatccttatcaacacttgctattaccttttttttttttttttgagacagagtcttgctctgtcgcccaggctgcagtgcagtggcactcggctcactgcaagctccacctccctggtt

SEQ ID NO: 140864 - DNA, 923 bp, Homo sapiens
  Payload ID: 7630
  Gene Symbol: HINT1
  Gene Name: histidine triad nucleotide binding protein 1
  ENST ID: ENST00000511475
  CDS Start-End: 36-347
ctctcctctggccgccgcgcgggagagaggccgagatggcagatgagattgccaaggctcaggtcgctcggcctggtggcgacacgatctttgggaagatcatccgcaaggaaataccagccaaaatcatttttgaggatgaccggtgccttgctttccatgacatttcccctcaagcaccaacacattttctggtgatacccaagaaacatatatcccagatttctgtggcagaagatgatgatgaaagtgtcattactaaggaaaaaccagaaaaaccattaggacttcaactgcccagctgttttccaaagttactgcatcattttgtatcccaccagcaatgaatgagcgttccagcttctccttgggcaaaatcatctaatacagagcctattctgtaacagagtgttgaatatctcatgtaagagtattttactgcatatcaccagtctggaaaaggatcagaattcgaagtatggtttctcctgaatgcatatcgccacaccattgtaaagttgaaaaatcataatttccccaacttacaatttttgtccattgtccatctgtacaatggaccttactgcatgagtaagcttcttggacacttaatgattgttggcaagaaatgtgctgctgatctgggcctgaataagggttatcgaatggtggtgaatgaaggttcagatggtggacagtctgtctatcacgttcatctccatgttcttggaggtcggcaaatgcattggcctcctggttaagcacgttttggggataattttctcttctttaggcaatgattaagttaggcaatttccagtatgttaagtaacacacttatttttgcctgtgtatggagagattcaagaaataattttaaaaccgcatacataataaaagacattgttgcatggcttatagtc

SEQ ID NO: 140865 - DNA, 703 bp, Homo sapiens
  Payload ID: 7630
  Gene Symbol: HINT1
  Gene Name: histidine triad nucleotide binding protein 1
  ENST ID: ENST00000508488
  CDS Start-End: 121-432
ggggcgccagagccggggcacctgcgcaggcttggctgcgccctctcgcgccgcacgctctgcgggttcctcccttcttccgagcctctcctctggccgccgcgcgggagagaggccgagatggcagatgagattgccaaggctcaggtcgctcggcctggtggcgacacgatctttgggaagatcatccgcaaggaaataccagccaaaatcatttttgaggatgaccggtgccttgctttccatgacatttcccctcaagcaccaacacattttctggtgatacccaagaaacatatatcccagatttctgtggcagaagatgatgatgaaagtgtcattactaaggaaaaaccagaaaaaccattaggacttcaactgcccagctgttttccaaagttactgcatcattttgtatcccaccagcaatgaatgagcgttccagcttctccgtatccttatcaacacttgctattaccttttttttttttttttgagacagagtcttgctctgtcgcccaggctgcagtgcagtggcactcggctcactgcaagctccacctccctggttcacaccattctcctgcctcagcctcccgagtagtgggacaacaggcgcccgccaccaaggctggctaattttttgtatttttagtagagacggctttcaccatgttagtcaggatagtttcgatttcctgac

SEQ ID NO: 140866 - DNA, 82 bp, Homo sapiens
  Payload ID: 7630
  Gene Symbol: HINT1
  Gene Name: histidine triad nucleotide binding protein 1
  ENST ID: ENST00000520028
  CDS Start-End: 1-82
tgatacccaagaaacatatatcccagatttctgtggcagaagatgatgatgaaagttgctgtcacattttcatcttcctaag

SEQ ID NO: 140867 - DNA, 628 bp, Homo sapiens
  Payload ID: 7631
  Gene Symbol: HINT2
  Gene Name: histidine triad nucleotide binding protein 2
  Uniprot ID: Q9BX68
  ENST ID: ENST00000259667
  CDS Start-End: 43-534
cgagtgctgacccgggtgagaggttcccgcggctcagggaagatggcggcagccgtggtgctggctgctgggttgcgcgcggcgcgcagagccgtggcggccacgggggtgcgcggggggcaggtccgaggagctgcaggtgtgactgatgggaatgaagtggccaaggcccagcaggcaactcctgggggagcagccccaaccatcttctcccggatcctggacaagagcctcccagctgacattctctatgaggaccagcagtgtcttgtgttccgtgatgtggcccctcaggctcctgtgcacttcctggtcattcctaagaagcccattcctcggattagccaggctgaagaagaagaccagcagcttctaggacacctactccttgtggccaagcagacagcaaaggctgagggcctgggagatggataccgacttgtgatcaacgatgggaagctgggtgcacaatctgtgtatcatctgcacattcatgtacttgggggccggcagctccagtggcctccaggttgaacctgccaactgattaaaggacaccagactctggatgcttggatggaaagggaaaaatggaccctgtgatgctaataaaactgttctcccttaa

SEQ ID NO: 140868 - DNA, 3314 bp, Homo sapiens
  Payload ID: 7632
  Gene Symbol: HINT3
  Gene Name: histidine triad nucleotide binding protein 3
  Uniprot ID: Q9NQE9
  ENST ID: ENST00000229633
  CDS Start-End: 198-746
gccggttttgaggccggcctccggctttgaagttcctcaccgcgtctccttccctctccccaaagcctggatcaccgcccagcgtcaggcgaggggcgacgtctcgaggtaaaacggaggaggtgcgggacgcggagactgcgcgggcccggtagccctggagaggccgaggctctaggccgcgaggggcgggtgcaatggcggaggaacaggtgaaccgcagcgccggcctggcccccgactgtgaggcctcggcgactgcagaaactacggtttcctcagtggggacctgtgaagccgctggcaagtcaccagagcccaaggactacgacagcacctgcgtgttctgccggatcgcggggcggcaggacccgggcaccgaactcctgcactgcgagaatgaggacctaatttgcttcaaagatatcaaaccagcagcaactcatcattatcttgtggtgccaaagaagcatattggaaactgcagaactctaaggaaagatcaagtagaactggttgagaacatggtaactgttggaaaaaccattcttgaaagaaataatttcactgacttcacgaatgtgaggatgggttttcatatgccaccattctgttccatttcccacttgcaccttcatgttctggcaccagtggatcagcttggcttcttatccaagttggtttatagagtcaattcctattggtttatcacagctgatcacttgattgaaaaactaagaacatgaaaatgtcaagagtggaagatttttctaatcttggttcagcatgaagtggtatttaggtcccttttaagtctaattgcaattttaagatttgttgggttttatgagaggctgttacttagtggccttaaatcttttctgaatgtctgtttcctaagatctgtgatacagttatgtgaatattttgttactgacttgtttcaatggttacttgtataaggattttatatatatgatactatagataaaatcctatttaagacaaattctgttaatcaacaagggctctgtatttttttaagttaaaatattttcatttctcagtaagtagtcagttataatagtgatttatttatgaagaataaactactatagaaagtactttgtgggaacctttattactgtgaaggagaaaaatagctatttcttgacagttctatagttatacacataaattttcaaaataaagaataccatactacacaatgatctctgattttgctgagggaaggaattatatatgtgccactttttcctcaaatttcagatgccagttttcactttttgaagcattgcatctttttaataaatctatcctgaaagctatataatatatataatttatatcaatgaatttacaataactatcaaattggctatcagaattcactgtaatggaattttgcctctaataacataaagggggaagaaacataaagtggttctcttaataaaactagcagaaaatgttgctttatggcatgtttttgtatcaaagagaaatcagaggttaaactttgcttttatcatgaaaagggcctgatttgaaggtagagataggcttagatgagaaaaattgataacgcaatgttaatactattgatatttcataggtatattttgttagaaattggttttttggtgctaatctataggcacaatagtgaatatgaatgaagagtaggtgctgcaagttaatcctacattgtgccagtgtatattagtaccatgtaaatgaatatgaataaatgaacatgaggattaacgaactgttgaaaataggctgagatactagttttctttcttttttagagggggcatgatattaaagatagttttaagtaacaaattacttattacaaagttacaacatgtggaatcaatagttttatttgttcattaatttattcattcagcaaacatttgttgaacatttaatgtgtaccagatattgccaggatcaggaaataaagaactaaaaatggacattcagactgcaattgctagtacaggggtcaaacaaaatcagtgattagaatttagtgcgttaagttccctgatgccttcacagccagaagaggctgtgaagggataaacacttctgagagtgggtggtagtagaactgagtattcaagactgaatgttaggcaggtagacagtgactggttaggctgagaaacttacaagtattttcgttgagttctgcttccactattatttactttacaatggatatgaagttcagatttcatcttatttactgaaggtggagaaaggatgtggaagtaggggttatgggctctcaaaagtagatttagagagatttttttatcactgttttatgatatagttcactgagcacttacatagattaacagttacaagtttccataaatcagttagaatatgactagcttcagggaaggaattttcaacaactgcaatctttgattgttttactgtgggaacttgcagtgatataattgacaacattatttaacaataataggtaaagtaggccgggtgtggtggctcacgcctgtaatcctagcactttgggaggccgaggtgggtggatcacaaggtcaggagttcgagaccagcctggccaatatggtgaaaccccgtctcttctaaaaaaatacaaaaattagccgggtatggtggcgcatgcctgtagtcccagctactggggaggctgaggcaagagaattgcttgaactcgggaggcggaggtcgcagtgagccgagatcgtgccactgcactccagcctgggtgacagagtgagactttgtctcaaagaaaaaaaaacaataataggtaaagtatttaaggaattctcagatgccttatggacctcttcaaaaatgtggttagccaattgattcaacttttataggtttatatgctctcatgtaaacctatttgtttccgagatcagacgagatcgggcgcgttcagggtggtatggccgtagacaacctatttgttaaaaacccttggaaacacatcttttagtagaggttcttatttacttataaagattaataatcaaattactacaattaatatccatttagccttttcagtagtctaaatatttggtaactccctagccatctataacactagttcaaaacaaggctaattcataacctgtcttaaaaatgtttgaagtggtatcaagagcattgtttatgcatgttgtgatactatttgtggaactgtttaatgagctatttcaaactgctagaagaaaatgaaataaaaatggaaaaatactgtcaaa

SEQ ID NO: 140869 - DNA, 2015 bp, Homo sapiens
  Payload ID: 7633
  Gene Symbol: HRG
  Gene Name: histidine-rich glycoprotein
  Uniprot ID: P04196
  ENST ID: ENST00000232003
  CDS Start-End: 81-1658
ttaatcaattgcgtgtgtttcagaaagtctgtataaaattctctgcagtggcagatcatagcaagggatggtttaacaaaatgaaggcactcattgcagcactgcttttgatcacattgcagtattcgtgtgccgtgagtcccactgactgcagtgctgttgagccggaggctgagaaagctctagacctgatcaataaaaggcgacgggatggctaccttttccaattgctgcggattgctgatgcccacttggacagagtggaaaatacaactgtatattacttagtcttagatgtgcaagaatcggactgttcggtcctatccaggaaatactggaatgactgtgagccacctgattccagacgtccatctgaaatagtgatcggacaatgtaaggtaatagctacaagacattcccatgaatctcaggacctcagagtgattgactttaactgcaccacaagttctgtctcttcagcactggccaataccaaagatagtccggtcctcatagatttctttgaggatactgagcgctacagaaaacaagccaacaaagcccttgagaagtacaaagaggagaatgatgactttgcctctttcagagtggaccgaatcgagagagttgcaagagtgagaggaggggaaggaactggttacttcgtggacttctctgtgcggaactgccccagacaccatttccccagacaccccaatgtctttggattctgcagagcagatttgttctatgatgtagaagccttggacttggaaagcccgaaaaaccttgtcataaactgtgaagtcttcgaccctcaggaacatgagaacatcaatggtgtaccgcctcatttgggacatcccttccactggggtgggcatgagcgttcttctaccaccaagcctccattcaagccccatggatctagagatcatcatcatccccacaagccacacgaacatggacccccacctcctccagatgaaagagatcactcacatggacccccacttccacaaggccctcctccactattgcccatgtcctgctcaagttgtcaacatgccacttttggcacaaatggggcccaaagacattctcataataataattccagtgacctccatccccataagcatcattcccatgaacagcatccccacggacaccatccccatgcacaccatcctcatgaacatgatacccatagacagcatccccatggacaccacccccatggacaccatcctcatggacaccacccccatggacaccatccccatggacaccatccccactgccatgatttccaagactatggaccttgtgacccaccaccccataaccaaggtcactgttgccatggccacggcccaccacctgggcacttaagaaggcgaggcccaggtaaaggaccccgtcccttccattgcagacaaattggatctgtgtaccgactccctcctctaagaaaaggtgaggtgctgccacttcctgaggccaattttcccagcttcccattgccgcaccacaaacatcctctaaagccagacaatcagccctttcctcaatcagtctctgaatcatgtccagggaagttcaagagtgggtttccacaagtttccatgttttttacacatacatttccaaaataaaatgtgattcctttgaagaggaaaatgaataatacattgaattagaaacataaataaaatgaccagtaattgtgaaaattacagttcttttcaacctactttcatactgaagatgcagcaaaatgtgaatgggaaaagagatggcctgagaagagagatcaaatggaaaggagaggaaagaactcagtgctgcctattagtagttaattctgtcactcaccactacatcacttgagacaaatctatgccactcagaatctccttctttcctggacttaactctaattctagagtctctgttactgcttgggctatacctgggcatactaataaagtatggtattgaaactattgtta

SEQ ID NO: 140870 - DNA, 1780 bp, Homo sapiens
  Payload ID: 7634
  Gene Symbol: HARS
  Gene Name: histidyl-tRNA synthetase
  Uniprot ID: P12081
  ENST ID: ENST00000307633
  CDS Start-End: 80-1429
atagccggaagtcatccttgctgaggctggggcaaccaccgcaggtcgagacagcaggcggctcaagtggacagccgggatggcagagcgtgcggcgctggaggagctggtgaaacttcagggagagcgcgtgcgaggcctcaagcagcagaaggccagcgccgagctgatcgaggaggaggtggcgaaactcctgaaactgaaggcacagctgggtcctgatgaaagcaaacagaaatttgtgctcaaaacccccaaggaaacactgatgggaaagtatggggaagactccaagcttatctatgacctgaaggaccagggcggggagctcctgtcccttcgctatgacctcactgttccttttgctcggtatttggcaatgaataaactgaccaacattaaacgctaccacatagcaaaggattttgacattgctgggaactttgatcccatgatccctgatgcagagtgcctgaagatcatgtgcgagatcctgagttcacttcagataggcgacttcctggtcaaggtaaacgatcgacgcattctagatgggatgtttgctatctgtggtgtttctgacagcaagttccgtaccatctgctcctcagtagacaagctggacaaggtgtcctgggaagaggtgaagaatgagatggtgggagagaagggccttgcacctgaggtggctgaccgcattggggactatgtccagcaacatggtggggtatccctggtggaacagctgctccaggatcctaaactatcccaaaacaagcaggccttggagggcctgggagacctgaagttgctctttgagtacctgaccctatttggcattgatgacaaaatctcctttgacctgagccttgctcgagggctggattactacactggggtgatctatgaggcagtgctgctacagaccccagcccaggcaggggaagagcccctgggtgtgggcagtgtggctgctggaggacgctatgatgggctagtgggcatgttcgaccccaaagggcgcaaggtgccatgtgtggggctcagcattggggtggagcggattttctccatcgtggaacagagactagaggctttggaggagaagatacggaccacggagacacaggtgcttgtggcatctgcacagaagaagctgctagaggaaagactaaagcttgtctcagaactgtgggatgctgggatcaaggctgagctgctgtacaagaagaacccaaagctactgaaccagttacagtactgtgaggaggcaggcatcccactggtggctatcatcggcgagcaggaactcaaggatggggtcatcaagctccgttcagtgacgagcagggaagaggtggatgtccgaagagaagaccttgtggaggaaatcaaaaggagaacaggccagcccctctgcatctgctgaactgaacaaactatcagaggaaaggaagtgggactggcactatttgaggttaagacaaactgcatatgtacttcaattgctttgcacttttccgtttcagcggaagacctgaagagtggtcagaacagagcctttgatttttattatggttattttattgattattactggcaaaaacggccaggtacaacacctttttcatacaaggcccaggaggcttagtccagtctgtgctcctgggctacaaggacccagcctgagatggtcccatctgcagggccccgcaccagttggagcagatgcctccccaccaccaattgccaaaggtccaataaaatgcctcaaccacgg

SEQ ID NO: 140871 - DNA, 1896 bp, Homo sapiens
  Payload ID: 7634
  Gene Symbol: HARS
  Gene Name: histidyl-tRNA synthetase
  Uniprot ID: P12081
  ENST ID: ENST00000457527
  CDS Start-End: 74-1543
ggaagtcatccttgctgaggctggggcaaccaccgcaggtcgagacagcaggcggctcaagtggacagccgggatggcagagcgtgcggcgctggaggagctggtgaaacttcagggagagcgcgtgcgaggcctcaagcagcagaaggccagcgccgagctgatcgaggaggaggtggcgaaactcctgaaactgaaggcacagctgggtcctgatgaaagcaaacagaaatttgtgctcaaaacccccaagggcacaagagactatagtccccggcagatggcagttcgcgagaaggtgtttgacgtaatcatccgttgcttcaagcgccacggtgcagaagtcattgatacacctgtatttgaactaaaggaaacactgatgggaaagtatggggaagactccaagcttatctatgacctgaaggaccagggcggggagctcctgtcccttcgctatgacctcactgttccttttgctcggtatttggcaatgaataaactgaccaacattaaacgctaccacatagcaaaggattttgacattgctgggaactttgatcccatgatccctgatgcagagtgcctgaagatcatgtgcgagatcctgagttcacttcagataggcgacttcctggtcaaggtaaacgatcgacgcattctagatgggatgtttgctatctgtggtgtttctgacagcaagttccgtaccatctgctcctcagtagacaagctggacaaggtgtcctgggaagaggtgaagaatgagatggtgggagagaagggccttgcacctgaggtggctgaccgcattggggactatgtccagcaacatggtggggtatccctggtggaacagctgctccaggatcctaaactatcccaaaacaagcaggccttggagggcctgggagacctgaagttgctctttgagtacctgaccctatttggcattgatgacaaaatctcctttgacctgagccttgctcgagggctggattactacactggggtgatctatgaggcagtgctgctacagaccccagcccaggcaggggaagagcccctgggtgtgggcagtgtggctgctggaggacgctatgatgggctagtgggcatgttcgaccccaaagggcgcaaggtgccatgtgtggggctcagcattggggtggagcggattttctccatcgtggaacagagactagaggctttggaggagaagatacggaccacggagacacaggtgcttgtggcatctgcacagaagaagctgctagaggaaagactaaagcttgtctcagaactgtgggatgctgggatcaaggctgagctgctgtacaagaagaacccaaagctactgaaccagttacagtactgtgaggaggcaggcatcccactggtggctatcatcggcgagcaggaactcaaggatggggtcatcaagctccgttcagtgacgagcagggaagaggtggatgtccgaagagaagaccttgtggaggaaatcaaaaggagaacaggccagcccctctgcatctgctgaactgaacaaactatcagaggaaaggaagtgggactggcactatttgaggttaagacaaactgcatatgtacttcaattgctttgcacttttccgtttcagcggaagacctgaagagtggtcagaacagagcctttgatttttattatggttattttattgattattactggcaaaaacggccaggtacaacacctttttcatacaaggcccaggaggcttagtccagtctgtgctcctgggctacaaggacccagcctgagatggtcccatctgcagggccccgcaccagttggagcagatgcctccccaccaccaattgccaaaggtccaataaaatgcctcaaccacggag

SEQ ID NO: 140872 - DNA, 1774 bp, Homo sapiens
  Payload ID: 7634
  Gene Symbol: HARS
  Gene Name: histidyl-tRNA synthetase
  ENST ID: ENST00000431330
  CDS Start-End: 234-1421
gaaaactcgggcgtttgcgcacctcactagtcacgaaggctgaggtgggatcctcccaagttcccttagtagccagcttcggcacttccgggaggagccggaaataatttttgtgctcggcggaggctctctaggcgtgcgacccagcgactcgatagccggaagtcatccttgctgaggctggggcaaccaccgcaggtcgagacagcaggcggctcaagtggacagccgggatggcagagcgtgcggcgctggaggagctggtgaaacttcagggagagcgcgtgcgaggcctcaagcagcagaaggccagcgccgagctgatcgaggaggaggtggcgaaactcctgaaactgaaggcacagctgggtcctgatgaaagcaaacagaaatttgtgctcaaaacccccaaggattttgacattgctgggaactttgatcccatgatccctgatgcagagtgcctgaagatcatgtgcgagatcctgagttcacttcagataggcgacttcctggtcaaggtaaacgatcgacgcattctagatgggatgtttgctatctgtggtgtttctgacagcaagttccgtaccatctgctcctcagtagacaagctggacaaggtgtcctgggaagaggtgaagaatgagatggtgggagagaagggccttgcacctgaggtggctgaccgcattggggactatgtccagcaacatggtggggtatccctggtggaacagctgctccaggatcctaaactatcccaaaacaagcaggccttggagggcctgggagacctgaagttgctctttgagtacctgaccctatttggcattgatgacaaaatctcctttgacctgagccttgctcgagggctggattactacactggggtgatctatgaggcagtgctgctacagaccccagcccaggcaggggaagagcccctgggtgtgggcagtgtggctgctggaggacgctatgatgggctagtgggcatgttcgaccccaaagggcgcaaggtgccatgtgtggggctcagcattggggtggagcggattttctccatcgtggaacagagactagaggctttggaggagaagatacggaccacggagacacaggtgcttgtggcatctgcacagaagaagctgctagaggaaagactaaagcttgtctcagaactgtgggatgctgggatcaaggctgagctgctgtacaagaagaacccaaagctactgaaccagttacagtactgtgaggaggcaggcatcccactggtggctatcatcggcgagcaggaactcaaggatggggtcatcaagctccgttcagtgacgagcagggaagaggtggatgtccgaagagaagaccttgtggaggaaatcaaaaggagaacaggccagcccctctgcatctgctgaactgaacaaactatcagaggaaaggaagtgggactggcactatttgaggttaagacaaactgcatatgtacttcaattgctttgcacttttccgtttcagcggaagacctgaagagtggtcagaacagagcctttgatttttattatggttattttattgattattactggcaaaaacggccaggtacaacacctttttcatacaaggcccaggaggcttagtccagtctgtgctcctgggctacaaggacccagcctgagatggtcccatctgcagggccccgcaccagttggagcagatgcctccccaccaccaattgccaaaggtccaataaaatgcctcaaccacggag

SEQ ID NO: 140873 - DNA, 1401 bp, Homo sapiens
  Payload ID: 7634
  Gene Symbol: HARS
  Gene Name: histidyl-tRNA synthetase
  ENST ID: ENST00000415192
  CDS Start-End: 38-1345
aggtcgagacagcaggcggctcaagtggacagccgggatggcagagcgtgcggcgctggaggagctggtgaaacttcagggagagcgcgtgcgaggcctcaagcagcagaaggccagcgccgagctgatcgaggaggaggtggcgaaactcctgaaactgaaggcacagctgggtcctgatgaaagcaaacagaaatttgtgctcaaaacccccaagggcacaagagactatagtccccggcagatggcagttcgcgagaaggtgtttgacgtaatcatccgttgcttcaagcgccacggtgcagaagtcattgatacacctgtatttgaactaaaggattttgacattgctgggaactttgatcccatgatccctgatgcagagtgcctgaagatcatgtgcgagatcctgagttcacttcagataggcgacttcctggtcaaggtaaacgatcgacgcattctagatgggatgtttgctatctgtggtgtttctgacagcaagttccgtaccatctgctcctcagtagacaagctggacaaggtgtcctgggaagaggtgaagaatgagatggtgggagagaagggccttgcacctgaggtggctgaccgcattggggactatgtccagcaacatggtggggtatccctggtggaacagctgctccaggatcctaaactatcccaaaacaagcaggccttggagggcctgggagacctgaagttgctctttgagtacctgaccctatttggcattgatgacaaaatctcctttgacctgagccttgctcgagggctggattactacactggggtgatctatgaggcagtgctgctacagaccccagcccaggcaggggaagagcccctgggtgtgggcagtgtggctgctggaggacgctatgatgggctagtgggcatgttcgaccccaaagggcgcaaggtgccatgtgtggggctcagcattggggtggagcggattttctccatcgtggaacagagactagaggctttggaggagaagatacggaccacggagacacaggtgcttgtggcatctgcacagaagaagctgctagaggaaagactaaagcttgtctcagaactgtgggatgctgggatcaaggctgagctgctgtacaagaagaacccaaagctactgaaccagttacagtactgtgaggaggcaggcatcccactggtggctatcatcggcgagcaggaactcaaggatggggtcatcaagctccgttcagtgacgagcagggaagaggtggatgtccgaagagaagaccttgtggaggaaatcaaaaggagaacaggccagcccctctgcatctgctgaactgaacaaactatcagaggaaaggaagtgggactggcactatttgaggttaagac

SEQ ID NO: 140874 - DNA, 1789 bp, Homo sapiens
  Payload ID: 7634
  Gene Symbol: HARS
  Gene Name: histidyl-tRNA synthetase
  Uniprot ID: P12081
  ENST ID: ENST00000438307
  CDS Start-End: 38-1447
aggtcgagacagcaggcggctcaagtggacagccgggatggcagagcgtgcggcgctggaggagctggtgaaacttcagggagagcgcgtgcgaggcctcaagcagcagaaggccagcgccgagctgatcgaggaggaggtggcgaaactcctgaaactgaaggcacagctgggtcctgatgaaagcaaacagaaatttgtgctcaaaacccccaaggaaacactgatgggaaagtatggggaagactccaagcttatctatgacctgaaggaccagggcggggagctcctgtcccttcgctatgacctcactgttccttttgctcggtatttggcaatgaataaactgaccaacattaaacgctaccacatagcaaaggtatatcggcgggataacccagccatgacccgtggccgataccgggaattctaccagtgtgattttgacattgctgggaactttgatcccatgatccctgatgcagagtgcctgaagatcatgtgcgagatcctgagttcacttcagataggcgacttcctggtcaaggtaaacgatcgacgcattctagatgggatgtttgctatctgtggtgtttctgacagcaagttccgtaccatctgctcctcagtagacaagctggacaaggtgtcctgggaagaggtgaagaatgagatggtgggagagaagggccttgcacctgaggtggctgaccgcattggggactatgtccagcaacatggtggggtatccctggtggaacagctgctccaggatcctaaactatcccaaaacaagcaggccttggagggcctgggagacctgaagttgctctttgagtacctgaccctatttggcattgatgacaaaatctcctttgacctgagccttgctcgagggctggattactacactggggtgatctatgaggcagtgctgctacagaccccagcccaggcaggggaagagcccctgggtgtgggcagtgtggctgctggaggacgctatgatgggctagtgggcatgttcgaccccaaagggcgcaaggtgccatgtgtggggctcagcattggggtggagcggattttctccatcgtggaacagagactagaggctttggaggagaagatacggaccacggagacacaggtgcttgtggcatctgcacagaagaagctgctagaggaaagactaaagcttgtctcagaactgtgggatgctgggatcaaggctgagctgctgtacaagaagaacccaaagctactgaaccagttacagtactgtgaggaggcaggcatcccactggtggctatcatcggcgagcaggaactcaaggatggggtcatcaagctccgttcagtgacgagcagggaagaggtggatgtccgaagagaagaccttgtggaggaaatcaaaaggagaacaggccagcccctctgcatctgctgaactgaacaaactatcagaggaaaggaagtgggactggcactatttgaggttaagacaaactgcatatgtacttcaattgctttgcacttttccgtttcagcggaagacctgaagagtggtcagaacagagcctttgatttttattatggttattttattgattattactggcaaaaacggccaggtacaacacctttttcatacaaggcccaggaggcttagtccagtctgtgctcctgggctacaaggacccagcctgagatggtcccatctgcagggccccgcaccagttggagcagatgcctccccaccaccaattgccaaaggtccaataaaatgcct

SEQ ID NO: 140875 - DNA, 580 bp, Homo sapiens
  Payload ID: 7634
  Gene Symbol: HARS
  Gene Name: histidyl-tRNA synthetase
  ENST ID: ENST00000512396
  CDS Start-End: 38-220
aggtcgagacagcaggcggctcaagtggacagccgggatggcagagcgtgcggcgctggaggagctggtgaaacttcagggagagcgcgtgcgaggcctcaagcagcagaaggccagcgccgagctgatcgaggaggaggtggcgaaactcctgaaactgaaggcacagctgggtcctgatgaaagcaaacagaaatttgtgctcaaaacccccaagtagagacgaggtttcaccatgttggccaggctggtctcgaacccctgacctcaggcaatccatctgccttggcctcccgaagtgctgggattacaggcgtgagccactgtgcctggcctcagggcacaagagactatagtccccggcagatggcagttcgcgagaaggtgtttgacgtaatcatccgttgcttcaagcgccacggtgcagaagtcattgatacacctgtatttgaactaaaggaaacactgatgggaaagtatggggaagactccaagcttatctatgacctgaaggaccagggcggggagctcctgtcccttcgctatgacctcactgttccttttgctcggtatttggcaa

SEQ ID NO: 140876 - DNA, 3334 bp, Homo sapiens
  Payload ID: 7634
  Gene Symbol: HARS
  Gene Name: histidyl-tRNA synthetase
  Uniprot ID: P12081
  ENST ID: ENST00000504156
  CDS Start-End: 721-2250
cccttactacatatccgtgtataagtcattcatttaatcttgcagcctccgtttcctcaactgcagaatggaaatcaaaactccaacctctcaagattgctccaaggattaaatgaccaggcatccaaatcgcttagttcagtgtcagtacatagtgggcactcgataaaaaccgattgtaacactactggaatacaggccgcgaggctatgcgttcagatctggagaccctgctgggacagaccagagataattctgtctcgctcacctggctttggcaacggaccgccccggtgcacgaagcgcagggcggtcgcaggagctggctgagcagcgaagcccaggccctcctgggaagaagtccgagcaggggcatcgcgcggcaggacgccggctttccgggacaggaacaaaaggcctgggaaggaggcgggtcagacaccaggaagggtggagggcactgcaaaggcggaacccgcgcaccagggaaaactcgggcgtttgcgcacctcactagtcacgaaggctgaggtgggatcctcccaagttcccttagtagccagcttcggcacttccgggaggagccggaaataatttttgtgctcggcggaggctctctaggcgtgcgacccagcgactcgatagccggaagtcatccttgctgaggctggggcaaccaccgcaggtcgagacagcaggcggctcaagtggacagccgggatggcagagcgtgcggcgctggaggagctggtgaaacttcagggagagcgcgtgcgaggcctcaagcagcagaaggccagcgccgagctgatcgaggaggaggtggcgaaactcctgaaactgaaggcacagctgggtcctgatgaaagcaaacagaaatttgtgctcaaaacccccaagggcacaagagactatagtccccggcagatggcagttcgcgagaaggtgtttgacgtaatcatccgttgcttcaagcgccacggtgcagaagtcattgatacacctgtatttgaactaaaggaaacactgatgggaaagtatggggaagactccaagcttatctatgacctgaaggaccagggcggggagctcctgtcccttcgctatgacctcactgttccttttgctcggtatttggcaatgaataaactgaccaacattaaacgctaccacatagcaaaggtatatcggcgggataacccagccatgacccgtggccgataccgggaattctaccagtgtgattttgacattgctgggaactttgatcccatgatccctgatgcagagtgcctgaagatcatgtgcgagatcctgagttcacttcagataggcgacttcctggtcaaggtaaacgatcgacgcattctagatgggatgtttgctatctgtggtgtttctgacagcaagttccgtaccatctgctcctcagtagacaagctggacaaggtgtcctgggaagaggtgaagaatgagatggtgggagagaagggccttgcacctgaggtggctgaccgcattggggactatgtccagcaacatggtggggtatccctggtggaacagctgctccaggatcctaaactatcccaaaacaagcaggccttggagggcctgggagacctgaagttgctctttgagtacctgaccctatttggcattgatgacaaaatctcctttgacctgagccttgctcgagggctggattactacactggggtgatctatgaggcagtgctgctacagaccccagcccaggcaggggaagagcccctgggtgtgggcagtgtggctgctggaggacgctatgatgggctagtgggcatgttcgaccccaaagggcgcaaggtgccatgtgtggggctcagcattggggtggagcggattttctccatcgtggaacagagactagaggctttggaggagaagatacggaccacggagacacaggtgcttgtggcatctgcacagaagaagctgctagaggaaagactaaagcttgtctcagaactgtgggatgctgggatcaaggctgagctgctgtacaagaagaacccaaagctactgaaccagttacagtactgtgaggaggcaggcatcccactggtggctatcatcggcgagcaggaactcaaggatggggtcatcaagctccgttcagtgacgagcagggaagaggtggatgtccgaagagaagaccttgtggaggaaatcaaaaggagaacaggccagcccctctgcatctgctgaactgaacaaactatcagaggaaaggaagtgggactggcactatttgaggttaagacaaactgcatatgtacttcaattgctttgcacttttccgtttcagcggaagacctgaagagtggtcagaacagagcctttgatttttattatggttattttattgattattactggcaaaaacggccaggtacaacacctttttcatacaaggcccaggaggcttagtccagtctgtgctcctgggctacaaggacccagcctgagatggtcccatctgcagggccccgcaccagttggagcagatgcctccccaccaccaattgccaaaggtccaataaaatgcctcaaccacggagtctgcgtgtgtcagtgatgcctagccccgccttccccagcagaccaatgtagggatggaaaagggagaaaaacagtaaacttgtgaccctgaggttcttgtctccagcgtccaccctgcggcttgggagctcctcctcgggaggcagcccccgtacatacgcacccgcgactttgcagctttcacctgaaggtctgagcgaagcccgggcggcgcacgtgcagtggatacctccacccccctgggaggcggggtcgcgctcagagccaatgagagcttgcggggtggaggggtagggaagcttccagaggccggtggggaggaagttataaagagggtacgagggggccagctggagagccatgcagtccaagcgggattgtgaggtaagcggctggcgacttgggggccggcgagccccgccggagcgggggtcggctttagggaccccagtaccacaggagaggtgggggcgcgcttggcgatccgccattccaaccttcctttccctctcagctgtggtgtgagagggtgaatccagagaacaaggcggcgctggaggcgtgggtcagggagacaggcatccgcctggtgcaggtgaacgggcagaggaagtatggcgggccacccccaggtacggtagtcccagcccctccgcctgtccggctacaccagccccctttgggggaggggctgctccgagccttcactgtcagaaactgcgaactaccc

SEQ ID NO: 140877 - DNA, 950 bp, Homo sapiens
  Payload ID: 7634
  Gene Symbol: HARS
  Gene Name: histidyl-tRNA synthetase
  ENST ID: ENST00000507746
  CDS Start-End: 86-950
gactcgatagccggaagtcatccttgctgaggctggggcaaccaccgcaggtcgagacagcaggcggctcaagtggacagccgggatggcagagcgtgcggcgctggaggagctggtgaaacttcagggagagcgcgtgcgaggcctcaagcagcagaaggccagcgccgagctgatcgaggaggaggtggcgaaactcctgaaactgaaggcacagctgggtcctgatgaaagcaaacagaaatttgtgctcaaaacccccaagggcacaagagactatagtccccggcagatggcagttcgcgagaaggtgtttgacgtaatcatccgttgcttcaagcgccacggtgcagaagtcattgatacacctgtatttgaactaaaggtaaacgatcgacgcattctagatgggatgtttgctatctgtggtgtttctgacagcaagttccgtaccatctgctcctcagtagacaagctggacaaggtgtcctgggaagaggtgaagaatgagatggtgggagagaagggccttgcacctgaggtggctgaccgcattggggactatgtccagcaacatggtggggtatccctggtggaacagctgctccaggatcctaaactatcccaaaacaagcaggccttggagggcctgggagacctgaagttgctctttgagtacctgaccctatttggcattgatgacaaaatctcctttgacctgagccttgctcgagggctggattactacactggggtgatctatgaggcagtgctgctacagaccccagcccaggcaggggaagagcccctgggtgtgggcagtgtggctgctggaggacgctatgatgggctagtgggcatgttcgaccccaaagggcgcaaggtgccatgtgtggggctcagcattggggtggagcggattttctccatcgtggaacagagactagagg

SEQ ID NO: 140878 - DNA, 3494 bp, Homo sapiens
  Payload ID: 7634
  Gene Symbol: HARS
  Gene Name: histidyl-tRNA synthetase
  ENST ID: ENST00000504366
  CDS Start-End: 1821-3143
ttgaaactctgtacccattaaacaataactccccacttcaccctccctccagcccctggtaactgctatcctactttctactttctgtctctatggatttgactattctaggtactagataagtgagagactaattgttctttttttttttttttaagttcattgatctagctttcaaattccacattgcaaccaatctttaagaaacaaccacttgttggattctgatgtagtaccaaagaaaaatatccacagttagctgaaaagtttgttaaaatactcttccttttacaactacatatctgtgtaaggttagattttcgttatatacttcaaccagcacgacatatcacgacagattgaatgcaaaaatcacatatgagaatcctgctgtcttctattcagtcagacattaaagatttgcaaagatgtaaatcagtgccactcttctcactaaattgttttggaaaacagttacctttttctaaaatattatttgcgttaacatataatagatatattatttgtgttaacatatgttatttgttaaatgaataaatattttaaaatttttgccgttctaattctaatacagtaaatattgataggtataatccactttggggtcttgaatacatagtaagagtgtaaagaggtcctgaaaccaaagactttggagtagggtataaaagcccagattggaagctctgacctggaaggacaacacagttctagtcctgactgccacgaacatgctgaatggccttaagaaatgacttaacttctcaacatcctgtacttcatctgtaaaatttatctgcctagcctatgtcatagagttgttaccagaaacaaattagagaacaaacagttgtaactaagatttaaaagaaaagttatattgggagagaaacgttgcttataaaatttggaattcaattagttgagccagtttgagttggttatattgcctataatcatgtaggtatttttttgttgttattatttttgtttgtttggttgggtttgtttttgtttttgtttttgttttgacagagtcttgctctgtctcccaggctggagtgcagtggcactatctcagctcactgcaagctccacctgccgggttcacgccattctcctgcctcagcctcccaagtagctgggactacaggcacctgccaccacgcccggctaatttttttgtatttttagtagagacggggtttcacagtgttcgccaggatggtcttgatctcctgacttcgtgatccgcccgcctcggcctccccaagtgctggcattacaggtgtgagccaccgcgcccggctggttggtttgttttgtttttgagacagagtctcgctctgtctctcagtctggagtgcagtggtgcaatcttggctcactgcaacctccgcctcccaggttcaagtgattctccctgccttgagcctcctgagtagctgggattacaggcacctgccaccaccatttgtttgttttattgagacagtctcactctgttgcccaggctggagtgcagtggcacaatctcggctcactgcaacctccacctcccaggttcaaggatcctcatgcatcagcctcccaagtagctgggactacaaggggcgtgtcgtcgcacccggctaatttctgtatttttagtagagacgaggtttcaccatgttggccaggctggtctcgaacccctgacctcaggcaatccatctgccttggcctcccgaagtgctgggattacaggcgtgagccactgtgcctggcctcagggcacaagagactatagtccccggcagatggcagttcgcgagaaggtgtttgacgtaatcatccgttgcttcaagcgccacggtgcagaagtcattgatacacctgtatttgaactaaaggaaacactgatgggaaagtatggggaagactccaagcttatctatgacctgaaggaccagggcggggagctcctgtcccttcgctatgacctcactgttccttttgctcggtatttggcaatgaataaactgaccaacattaaacgctaccacatagcaaaggtatatcggcgggataacccagccatgacccgtggccgataccgggaattctaccagtgtgattttgacattgctgggaactttgatcccatgatccctgatgcagagtgcctgaagatcatgtgcgagatcctgagttcacttcagataggcgacttcctggtcaaggtaaacgatcgacgcattctagatgggatgtttgctatctgtggtgtttctgacagcaagttccgtaccatctgctcctcagtagacaagctggacaaggtgtcctgggaagaggtgaagaatgagatggtgggagagaagggccttgcacctgaggtggctgaccgcattggggactatgtccagcaacatggtggggtatccctggtggaacagctgctccaggatcctaaactatcccaaaacaagcaggccttggagggcctgggagacctgaagttgctctttgagtacctgaccctatttggcattgatgacaaaatctcctttgacctgagccttgctcgagggctggattactacactggggtgatctatgaggcagtgctgctacagaccccagcccaggcaggggaagagcccctgggtgtgggcagtgtggctgctggaggacgctatgatgggctagtgggcatgttcgaccccaaagggcgcaaggtgccatgtgtggggctcagcattggggtggagcggattttctccatcgtggaacagagactagaggctttggaggagaagatacggaccacggagacacaggtgcttgtggcatctgcacagaagaagctgctagaggaaagactaaagcttgtctcagaactgtgggatgctgggatcaaggctgagctgctgtacaagaagaacccaaagctactgaaccagttacagtactgtgaggaggcaggcatcccactggtggctatcatcggcgagcaggaactcaaggatggggtcatcaagctccgttcagtgacgagcagggaagaggtggatgtccgaagagaagaccttgtggaggaaatcaaaaggagaacaggccagcccctctgcatctgctgaactgaacaaactatcagaggaaaggaagtgggactggcactatttgaggttaagacaaactgcatatgtacttcaattgctttgcacttttccgtttcagcggaagacctgaagagtggtcagaacagagcctttgatttttattatggttattttattgattattactggcaaaaacggccaggtacaacacctttttcatacaaggcccaggaggcttagtccagtctgtgctcctgggctacaaggacccagcctgagatggtcccatctgcagggccccgcaccagttggagcagatgcctccccaccaccaattgccaaaggtccaataaaatgcctcaaccacgg

SEQ ID NO: 140879 - DNA, 2483 bp, Homo sapiens
  Payload ID: 7635
  Gene Symbol: HARS2
  Gene Name: histidyl-tRNA synthetase 2, mitochondrial
  Uniprot ID: P49590
  ENST ID: ENST00000230771
  CDS Start-End: 224-1744
aaaaattatttccggctcctcccggaagtgccgaagctggctactaagggaacttgggaggatcccacctcagccttcgtgactagtgaggtgcgcaaacgcccgagttttccctggtgcgcgggttccgcctttgcagtgccctccacccttcctggtgtctgacccgcctccttcccaggccttttgttcctgtcccggaaagccggcgtcctgccgcgcgatgcccctgctcggacttcttcccaggagggcctgggcttcgctgctcagccagctcctgcgaccgccctgcgcttcgtgcaccggggcggtccgttgccaaagccaggttgcagaggcagtgttaacatcccaactgaaagcacatcaagagaaaccaaattttattatcaagaccccaaagggtaccagggatcttagtcctcagcatatggttgtgagggagaaaattcttgatttggttatcagctgctttaaacgtcatggagcaaaggggatggacaccccagcatttgagctgaaggaaaccctgactgagaagtatggagaggactctgggctcatgtatgatctgaaggatcaaggtggagagctgttgtccctccgctatgaccttactgttccctttgctcgttatctggccatgaataaggtgaagaagatgaaacgttatcatgttggaaaggtgtggcggcgagagagcccaaccatagtccaaggccgttatagggagttctgccagtgtgattttgacattgctggtcagtttgaccctatgatccccgatgcagagtgtttgaagatcatgtgtgaaatcctaagtggattgcagttgggagactttctcattaaggtaaatgaccggcggattgtggatgggatgtttgctgtctgtggtgttcctgaaagcaagttccgtgccatctgctcctccatagataaactagacaagatggcttggaaagatgtgagacatgagatggtggtgaagaaaggcctggctcctgaggtggctgatcgaattggggactatgtccagtgtcatggtggggtatccctagtagagcaaatgtttcaggatcccagactatcccagaacaagcaggccctggagggcctgggagacctaaagctgctatttgaatacctgactttatttggaattgctgataagatctcctttgacctcagcctggctcggggcctagactactatacaggagtgatctatgaagcagtgctgctgcagaccccaactcaggctggggaggagcccctgaatgtgggcagtgtggctgctggtgggcgctatgatgggctggtgggcatgtttgaccccaagggccacaaggtgccatgtgtgggactcagcattggggttgagcgaatcttctacattgtggagcagaggatgaagaccaaaggtgagaaggtgcggactacagagactcaagtgtttgtggccacaccacagaagaactttctccaagaacggttgaagcttattgcagagctttgggattctggaatcaaggcagagatgctatacaagaacaaccccaaactattaacccagctgcactattgtgagagcacaggcattccactggtggtcattattggtgagcaagaactgaaagaaggggtcatcaagatccgttcagtggccagcagagaggaggtggccattaaacgggaaaattttgtggctgaaattcagaagcgactgtctgagtcttgatccttgcctgattcccatctgctgctctttgtagaaaaggtttcctctagaactgaattcctctggaattgagtgatggacttcacaacaactagccaggaagggtgacaagtaccttctgcctcctccattcttcctgggtgcagaactgtagaagaccctgaggactcctgggctagtgtgagcagctattctgcatgggtgcagatggctggatgtgaaagagacatgctctagctgcagaggcaaatttgaagtgccacggaacgttgtcaagaggtagtgagattgttgctgtgagcaaggctctgggagagtcacctcaggctcaggattctgaaccattgagatcagaaaccagatacttagccttctactgtagctacggaaccagattctggtgaatttgtccacaatcagccattggcctgtctggggagtttttggaagacagcaaagaggggcaatggctgctttcagctttgaggacagatgctatcctaagggcatggcagtacccatgttgatttgacatctctctagcccatccattgcttacagtagaagagtggggctgtatgcttgataatcttgaacattgaacttaatagatgacttgacaaggtagagatctgatattttgagattttggagaccatttcctgtgccagaatcactgctctattccataccgtgccatggaggctgttttagaagtggttggataacatgttaaata

SEQ ID NO: 140880 - DNA, 1426 bp, Homo sapiens
  Payload ID: 7635
  Gene Symbol: HARS2
  Gene Name: histidyl-tRNA synthetase 2, mitochondrial
  ENST ID: ENST00000448069
  CDS Start-End: 36-1040
gttcctgtcccggaaagccggcgtcctgccgcgcgatgcccctgctcggacttcttcccaggagggcctgggcttcgctgctcagccagctcctgcgaccgccctgcgcttcgtgcaccggggcggtccgttgccaaagccaggattttgacattgctggtcagtttgaccctatgatccccgatgcagagtgtttgaagatcatgtgtgaaatcctaagtggattgcagttgggagactttctcattaagatggcttggaaagatgtgagacatgagatggtggtgaagaaaggcctggctcctgaggtggctgatcgaattggggactatgtccagtgtcatggtggggtatccctagtagagcaaatgtttcaggatcccagactatcccagaacaagcaggccctggagggcctgggagacctaaagctgctatttgaatacctgactttatttggaattgctgataagatctcctttgacctcagcctggctcggggcctagactactatacaggagtgatctatgaagcagtgctgctgcagaccccaactcaggctggggaggagcccctgaatgtgggcagtgtggctgctggtgggcgctatgatgggctggtgggcatgtttgaccccaagggccacaaggtgccatgtgtgggactcagcattggggttgagcgaatcttctacattgtggagcagaggatgaagaccaaaggtgagaaggtgcggactacagagactcaagtgtttgtggccacaccacagaagaactttctccaagaacggttgaagcttattgcagagctttgggattctggaatcaaggcagagatgctatacaagaacaaccccaaactattaacccagctgcactattgtgagagcacaggcattccactggtggtcattattggtgagcaagaactgaaagaaggggtcatcaagatccgttcagtggccagcagagaggaggtggccattaaacgggaaaattttgtggctgaaattcagaagcgactgtctgagtcttgatccttgcctgattcccatctgctgctctttgtagaaaaggtttcctctagaactgaattcctctggaattgagtgatggacttcacaacaactagccaggaagggtgacaagtaccttctgcctcctccattcttcctgggtgcagaactgtagaagaccctgaggactcctgggctagtgtgagcagctattctgcatgggtgcagatggctggatgtgaaagagacatgctctagctgcagaggcaaatttgaagtgccacggaacgttgtcaagaggtagtgagattgttgctgtgagcaaggctctgggagagtcacctcaggctcaggattctgaaccattgagatcagaaaccagatacttagccttctactgtagctac

SEQ ID NO: 140881 - DNA, 1450 bp, Homo sapiens
  Payload ID: 7635
  Gene Symbol: HARS2
  Gene Name: histidyl-tRNA synthetase 2, mitochondrial
  ENST ID: ENST00000510104
  CDS Start-End: 219-518
ttatttccggctcctcccggaagtgccgaagctggctactaagggaacttgggaggatcccacctcagccttcgtgactagtgaggtgcgcaaacgcccgagttttccctggtgcgcgggttccgcctttgcagtgccctccacccttcctggtgtctgacccgcctccttcccaggccttttgttcctgtcccggaaagccggcgtcctgccgcgcgatgcccctgctcggacttcttcccaggagggcctgggcttcgctgctcagccagctcctgcgaccgccctgcgcttcgtgcaccggggcggtccgttgccaaagccagggtgaagagtctttgcaggttggtggtcaacagggtcagagatgccacaggtctggccagtgtccagagaagccacatctcacattcattcttctgccaggttgcagaggcagtgttaacatcccaactgaaagcacatcaagagaaaccaaattttattatcaagaccccaaagggtaccagggatcttagtcctcagcatatggttgtgagggagaaaattcttgatttggttatcagctgctttaaacgtcatggagcaaaggggatggacaccccagcatttgagctgaaggaaaccctgactgagaagtatggagaggactctgggctcatgtatgatctgaaggatcaaggtggagagctgttgtccctccgctatgaccttactgttccctttgctcgttatctggccatgaataaggtgaagaagatgaaacgttatcatgttggaaaggtgtggcggcgagagagcccaaccatagtccaaggccgttatagggagttctgccagtgtgattttgacattgctggtcagtttgaccctatgatccccgatgcagagtgtttgaagatcatgtgtgaaatcctaagtggattgcagttgggagactttctcattaaggtgaggccagggctgagaactgtgggagaagtctggatttggcctaatactgtttatgcaagtcccaaacttgggtgactccaacccttaagcctgcaactgtaggactttcctagtaaagctgttgtatttcctatatgtctgtactcttcctgtgaaatttccatcctttttgtgtgtcaggaaagtaggtactgccattgttttgagtggaagggcattgacaagcacttgggtcactgacattgagttctcaggtaaatgaccggcggattgtggatgggatgtttgctgtctgtggtgttcctgaaagcaagttccgtgccatctgctcctccatagataaactagacaaggtaacaaagaagacatacttcagtagaccctatctagcttctgccctgccctcaaatccataccactagtgaaaaataaggagattgtggctggaagtgggctattttggggtggaaggtaaggaggcatactctgaaggaag

SEQ ID NO: 140882 - DNA, 1562 bp, Homo sapiens
  Payload ID: 7635
  Gene Symbol: HARS2
  Gene Name: histidyl-tRNA synthetase 2, mitochondrial
  Uniprot ID: P49590
  ENST ID: ENST00000508522
  CDS Start-End: 41-1486
cttttgttcctgtcccggaaagccggcgtcctgccgcgcgatgcccctgctcggacttcttcccaggagggcctgggcttcgctgctcagccagctcctgcgaccgccctgcgcttcgtgcaccggggcggtccgttgccaaagccagggtaccagggatcttagtcctcagcatatggttgtgagggagaaaattcttgatttggttatcagctgctttaaacgtcatggagcaaaggggatggacaccccagcatttgagctgaaggaaaccctgactgagaagtatggagaggactctgggctcatgtatgatctgaaggatcaaggtggagagctgttgtccctccgctatgaccttactgttccctttgctcgttatctggccatgaataaggtgaagaagatgaaacgttatcatgttggaaaggtgtggcggcgagagagcccaaccatagtccaaggccgttatagggagttctgccagtgtgattttgacattgctggtcagtttgaccctatgatccccgatgcagagtgtttgaagatcatgtgtgaaatcctaagtggattgcagttgggagactttctcattaaggtaaatgaccggcggattgtggatgggatgtttgctgtctgtggtgttcctgaaagcaagttccgtgccatctgctcctccatagataaactagacaagatggcttggaaagatgtgagacatgagatggtggtgaagaaaggcctggctcctgaggtggctgatcgaattggggactatgtccagtgtcatggtggggtatccctagtagagcaaatgtttcaggatcccagactatcccagaacaagcaggccctggagggcctgggagacctaaagctgctatttgaatacctgactttatttggaattgctgataagatctcctttgacctcagcctggctcggggcctagactactatacaggagtgatctatgaagcagtgctgctgcagaccccaactcaggctggggaggagcccctgaatgtgggcagtgtggctgctggtgggcgctatgatgggctggtgggcatgtttgaccccaagggccacaaggtgccatgtgtgggactcagcattggggttgagcgaatcttctacattgtggagcagaggatgaagaccaaaggtgagaaggtgcggactacagagactcaagtgtttgtggccacaccacagaagaactttctccaagaacggttgaagcttattgcagagctttgggattctggaatcaaggcagagatgctatacaagaacaaccccaaactattaacccagctgcactattgtgagagcacaggcattccactggtggtcattattggtgagcaagaactgaaagaaggggtcatcaagatccgttcagtggccagcagagaggaggtggccattaaacgggaaaattttgtggctgaaattcagaagcgactgtctgagtcttgatccttgcctgattcccatctgctgctctttgtagaaaaggtttcctctagaactgaattcctctggaattgagtga

SEQ ID NO: 140883 - DNA, 541 bp, Homo sapiens
  Payload ID: 7635
  Gene Symbol: HARS2
  Gene Name: histidyl-tRNA synthetase 2, mitochondrial
  ENST ID: ENST00000503873
  CDS Start-End: 192-541
gaagctggctactaagggaacttgggaggatcccacctcagccttcgtgactagtgaggtgcgcaaacgcccgagttttccctggtgcgcgggttccgcctttgcagtgccctccacccttcctggtgtctgacccgcctccttcccaggccttttgttcctgtcccggaaagccggcgtcctgccgcgcgatgcccctgctcggacttcttcccaggagggcctgggcttcgctgctcagccagctcctgcgaccgccctgcgcttcgtgcaccggggcggtccgttgccaaagccagggtgaagagtctttgcaggttgcagaggcagtgttaacatcccaactgaaagcacatcaagagaaaccaaattttattatcaagaccccaaagggtaccagggatcttagtcctcagcatatggttgtgagggagaaaattcttgatttggttatcagctgctttaaacgtcatggagcaaaggggatggacaccccagcatttgagctgaaggaaaccctgactgagaagtatggagagga

SEQ ID NO: 140884 - DNA, 648 bp, Homo sapiens
  Payload ID: 7635
  Gene Symbol: HARS2
  Gene Name: histidyl-tRNA synthetase 2, mitochondrial
  ENST ID: ENST00000509299
  CDS Start-End: 106-648
gtgccgaagctggctactaagggaacttgggaggatcccacctcagccttcgtgactagtgaggccttttgttcctgtcccggaaagccggcgtcctgccgcgcgatgcccctgctcggacttcttcccaggagggcctgggcttcgctgctcagccagctcctgcgaccgccctgcgcttcgtgcaccggggcggtccgttgccaaagccagggtgaagagtctttgcaggttgcagaggcagtgttaacatcccaactgaaagcacatcaagagaaaccaaattttattatcaagaccccaaagggtaccagggatcttagtcctcagcatatggttgtgagggagaaaattcttgatttggttatcagctgctttaaacgtcatggagcaaaggggatggacaccccagcatttgagctgaaggaaaccctgactgagaagtatggagaggactctgggctcatgtatgatctgaaggatcaaggtggagagctgttgtccctccgctatgaccttactgttccctttgctcgttatctggccatgaataaggtgaagaagatgaaacgttatcatgttggaaaggtgtggcggcgagagagcccaaccatagtccaaggccgttatagggagttctgccagtgt

SEQ ID NO: 140885 - DNA, 564 bp, Homo sapiens
  Payload ID: 7635
  Gene Symbol: HARS2
  Gene Name: histidyl-tRNA synthetase 2, mitochondrial
  ENST ID: ENST00000520095
  CDS Start-End: 129-428
attatttccggctcctcccggaagtgccgaagctggctactaagggaacttgggaggatcccacctcagccttcgtgactagtgaggccttttgttcctgtcccggaaagccggcgtcctgccgcgcgatgcccctgctcggacttcttcccaggagggcctgggcttcgctgctcagccagctcctgcgaccgccctgcgcttcgtgcaccggggcggtccgttgccaaagccagggtgaagagtctttgcaggttggtggtcaacagggtcagagatgccacaggtctggccagtgtccagagaagccacatctcacattcattcttctgccaggttgcagaggcagtgttaacatcccaactgaaagcacatcaagagaaaccaaattttattatcaagaccccaaagggtaccagggatcttagtcctcagcatatggttgtgagggagaaaattcttgatttggttatcagctgctttaaacgtcatggagcaaaggggatggacaccccagcatttgagctgaaggattttgacattgctggtcagtttgaccctatg

SEQ ID NO: 140886 - DNA, 1809 bp, Homo sapiens
  Payload ID: 7636
  Gene Symbol: HM13
  Gene Name: histocompatibility (minor) 13
  Uniprot ID: Q8TCT9
  ENST ID: ENST00000335574
  CDS Start-End: 125-1309
ggagggagcacgtcacttcctgttgccttaggggaacgtggctttccctgcagagccggtgtctccgcctgcgtccctgctgcagcaaccggagctggagtcggatcccgaacgcaccctcgccatggactcggccctcagcgatccgcataacggcagtgccgaggcaggcggccccaccaacagcactacgcggccgccttccacgcccgagggcatcgcgctggcctacggcagcctcctgctcatggcgctgctgcccatcttcttcggcgccctgcgctccgtacgctgcgcccgcggcaagaatgcttcagacatgcctgaaacaatcaccagccgggatgccgcccgcttccccatcatcgccagctgcacactcttggggctctacctctttttcaaaatattctcccaggagtacatcaacctcctgctgtccatgtatttcttcgtgctgggaatcctggccctgtcccacaccatcagccccttcatgaataagttttttccagccagctttccaaatcgacagtaccagctgctcttcacacagggttctggggaaaacaaggaagagatcatcaattatgaatttgacaccaaggacctggtgtgcctgggcctgagcagcatcgttggcgtctggtacctgctgaggaagcactggattgccaacaacctttttggcctggccttctcccttaatggagtagagctcctgcacctcaacaatgtcagcactggctgcatcctgctgggcggactcttcatctacgatgtcttctgggtatttggcaccaatgtgatggtgacagtggccaagtccttcgaggcaccaataaaattggtgtttccccaggatctgctggagaaaggcctcgaagcaaacaactttgccatgctgggacttggagatgtcgtcattccagggatcttcattgccttgctgctgcgctttgacatcagcttgaagaagaatacccacacctacttctacaccagctttgcagcctacatcttcggcctgggccttaccatcttcatcatgcacatcttcaagcatgctcagcctgccctcctatacctggtccccgcctgcatcggttttcctgtcctggtggcgctggccaagggagaagtgacagagatgttcagctacgagtcctcggcggaaatcctgcctcataccccgaggctcacccacttccccacagtctcgggctccccagccagcctggccgactccatgcagcagaagctagctggccctcgccgccggcgcccgcagaatcccagcgccatgtaatgcccagcgggtgcccacctgcccgcttccccctactgccccggggcccaagttatgaggagtcaaatcctaaggatccagcggcagtgacagaatccaaagagggaacagaggcatcagcatcgaaggggctggagaagaaagagaaatgatgcagctggtgcccgagcctctcagggccagaccagacagatgggggctgggcccacacaggcgtgcaccggtagagggcacaggaggccaagggcagctccaggacagggcagggggcagcaggatacctccagccaggcctctgtggcctctgtttccttctccctttcttggccctcctctgctcctccccacaccctgcaggcaaaagaaacccccagcttcccccctccccgggagccaggtgggaaaagtgggtgtgatttttagattttgtattgtggactgattttgcctcacattaaaaactcatcccatggccagggcgggccactgtgctcctggaa

SEQ ID NO: 140887 - DNA, 847 bp, Homo sapiens
  Payload ID: 7636
  Gene Symbol: HM13
  Gene Name: histocompatibility (minor) 13
  ENST ID: ENST00000344042
  CDS Start-End: 32-847
gctggagtcggatcccgaacgcaccctcgccatggactcggccctcagcgatccgcataacggcagtgccgaggcaggcggccccaccaacagcactacgcggccgccttccacgcccgagggcatcgcgctggcctacggcagcctcctgctcatggcgctgctgcccatcttcttcggcgccctgcgctccgtacgctgcgcccgcggcaagaatgcttcagacatgcctgaaacaatcaccagccgggatgccgcccgcttccccatcatcgccagctgcacactcttggggctctacctctttttcaaaatattctcccaggagtacatcaacctcctgctgtccatgtatttcttcgtgctgggaatcctggccctgtcccacaccatcagccccttcatgaataagttttttccagccagctttccaaatcgacagtaccagctgctcttcacacagggttctggggaaaacaaggaagagatcatcaattatgaatttgacaccaaggacctggtgtgcctgggcctgagcagcatcgttggcgtctggtacctgctgaggaaggtatttggcaccaatgtgatggtgacagtggccaagtccttcgaggcaccaataaaattggtgtttccccaggatctgctggagaaaggcctcgaagcaaacaactttgccatgctgggacttggagatgtcgtcattccagggatcttcattgccttgctgctgcgctttgacatcagcttgaagaagaatacccacacctacttctacaccagctttgcagcctacatcttcggcctgggccttaccatcttcatcatgcacatcttcaagcat

SEQ ID NO: 140888 - DNA, 1606 bp, Homo sapiens
  Payload ID: 7636
  Gene Symbol: HM13
  Gene Name: histocompatibility (minor) 13
  Uniprot ID: Q8TCT9
  ENST ID: ENST00000340852
  CDS Start-End: 125-1258
ggagggagcacgtcacttcctgttgccttaggggaacgtggctttccctgcagagccggtgtctccgcctgcgtccctgctgcagcaaccggagctggagtcggatcccgaacgcaccctcgccatggactcggccctcagcgatccgcataacggcagtgccgaggcaggcggccccaccaacagcactacgcggccgccttccacgcccgagggcatcgcgctggcctacggcagcctcctgctcatggcgctgctgcccatcttcttcggcgccctgcgctccgtacgctgcgcccgcggcaagaatgcttcagacatgcctgaaacaatcaccagccgggatgccgcccgcttccccatcatcgccagctgcacactcttggggctctacctctttttcaaaatattctcccaggagtacatcaacctcctgctgtccatgtatttcttcgtgctgggaatcctggccctgtcccacaccatcagccccttcatgaataagttttttccagccagctttccaaatcgacagtaccagctgctcttcacacagggttctggggaaaacaaggaagagatcatcaattatgaatttgacaccaaggacctggtgtgcctgggcctgagcagcatcgttggcgtctggtacctgctgaggaagcactggattgccaacaacctttttggcctggccttctcccttaatggagtagagctcctgcacctcaacaatgtcagcactggctgcatcctgctgggcggactcttcatctacgatgtcttctgggtatttggcaccaatgtgatggtgacagtggccaagtccttcgaggcaccaataaaattggtgtttccccaggatctgctggagaaaggcctcgaagcaaacaactttgccatgctgggacttggagatgtcgtcattccagggatcttcattgccttgctgctgcgctttgacatcagcttgaagaagaatacccacacctacttctacaccagctttgcagcctacatcttcggcctgggccttaccatcttcatcatgcacatcttcaagcatgctcagcctgccctcctatacctggtccccgcctgcatcggttttcctgtcctggtggcgctggccaagggagaagtgacagagatgttcagttatgaggagtcaaatcctaaggatccagcggcagtgacagaatccaaagagggaacagaggcatcagcatcgaaggggctggagaagaaagagaaatgatgcagctggtgcccgagcctctcagggccagaccagacagatgggggctgggcccacacaggcgtgcaccggtagagggcacaggaggccaagggcagctccaggacagggcagggggcagcaggatacctccagccaggcctctgtggcctctgtttccttctccctttcttggccctcctctgctcctccccacaccctgcaggcaaaagaaacccccagcttcccccctccccgggagccaggtgggaaaagtgggtgtgatttttagattttgtattgtggactgattttgcctcacattaaaaactcatcccatggccagggcgggccactgtgctcctggaa

SEQ ID NO: 140889 - DNA, 3792 bp, Homo sapiens
  Payload ID: 7636
  Gene Symbol: HM13
  Gene Name: histocompatibility (minor) 13
  Uniprot ID: Q8TCT9
  ENST ID: ENST00000398174
  CDS Start-End: 125-1405
ggagggagcacgtcacttcctgttgccttaggggaacgtggctttccctgcagagccggtgtctccgcctgcgtccctgctgcagcaaccggagctggagtcggatcccgaacgcaccctcgccatggactcggccctcagcgatccgcataacggcagtgccgaggcaggcggccccaccaacagcactacgcggccgccttccacgcccgagggcatcgcgctggcctacggcagcctcctgctcatggcgctgctgcccatcttcttcggcgccctgcgctccgtacgctgcgcccgcggcaagaatgcttcagacatgcctgaaacaatcaccagccgggatgccgcccgcttccccatcatcgccagctgcacactcttggggctctacctctttttcaaaatattctcccaggagtacatcaacctcctgctgtccatgtatttcttcgtgctgggaatcctggccctgtcccacaccatcagccccttcatgaataagttttttccagccagctttccaaatcgacagtaccagctgctcttcacacagggttctggggaaaacaaggaagagatcatcaattatgaatttgacaccaaggacctggtgtgcctgggcctgagcagcatcgttggcgtctggtacctgctgaggaagcactggattgccaacaacctttttggcctggccttctcccttaatggagtagagctcctgcacctcaacaatgtcagcactggctgcatcctgctgggcggactcttcatctacgatgtcttctgggtatttggcaccaatgtgatggtgacagtggccaagtccttcgaggcaccaataaaattggtgtttccccaggatctgctggagaaaggcctcgaagcaaacaactttgccatgctgggacttggagatgtcgtcattccagggatcttcattgccttgctgctgcgctttgacatcagcttgaagaagaatacccacacctacttctacaccagctttgcagcctacatcttcggcctgggccttaccatcttcatcatgcacatcttcaagcatgctcagcctgccctcctatacctggtccccgcctgcatcggttttcctgtcctggtggcgctggccaagggagaagtgacagagatgttcagctacgagtcctcggcggaaatcctgcctcataccccgaggctcacccacttccccacagtctcgggctccccagccagcctggccgactccatgcagcagaagctagctggccctcgccgccggcgcccgcagaatcccagcgccatttatgaggagtcaaatcctaaggatccagcggcagtgacagaatccaaagagggaacagaggcatcagcatcgaaggggctggagaagaaagagaaatgatgcagctggtgcccgagcctctcagggccagaccagacagatgggggctgggcccacacaggcgtgcaccggtagagggcacaggaggccaagggcagctccaggacagggcagggggcagcaggatacctccagccaggcctctgtggcctctgtttccttctccctttcttggccctcctctgctcctccccacaccctgcaggcaaaagaaacccccagcttcccccctccccgggagccaggtgggaaaagtgggtgtgatttttagattttgtattgtggactgattttgcctcacattaaaaactcatcccatggccagggcgggccactgtgctcctggaagattctctgtttaagcacccagtgtcttgccctgggttttctaggtctcacctgcccacccaaaatcttttctgcaagccccttaagggtgcccaccccagtgcctggccagccctgcacccgtaaaacaccttttagccagtagagggggcccacgagccctctctcaccagctagcacttttctcaccaccttcctcgaaatacttgggggcagcaagggtgttggcagatgagagtctcccactcaccatggtgagagtggtggggagtacccagggctgacctgactcacaagggaagcagtaactgtagaacctgccagcctccctggtccctgtgcccatatggcttcggctgatgagggctcagactctaggttgccctgaagatcaaggctttgtctcccattctgcccattcctgggtttcttcccaaaatgactactgtggggccagtcatggcacaagggccaggacctctagaggctggggtggggaaggactgagctagtgattcttagaggccttctggggcctaagagctgaaatctcagcgcccgggtttccctaaagtttgctgaagacagcagccccggccagcaggagaccgaccgggcaccaccccaaaccaggcaaacggtggccacaaccctcatccacccacctggtatgaggtcactgagtggggaaacagacaggagcgggtggccaccatactgacagacccggggctctcccttgcccaagcttcaggttcaaaggctgaaaataacagtggcttccagtttggaagtggccaaaggacaatcatgaccagagactcaggagtatgactgtaataccctcactaggtattgacatgcactaagcaccttgatataggatttcacttccttctgagtcttgggctgtatgtgctattattcgctccgctgtgcagatgagggaattgaggcagcttgcccatggacatcgatttgaccttagccaagccaaacaattccaggttcctaaggaccgcagctcctccccagacccctgggaccaagtcactggctggtgtgctgggcatccctgagccccagccacccaattttactggctccagggttctataggaaggaaaaggggtagaaaatttcaaaaggcttcttcctttcagggaggggggttccctttcaggggcttctggaatctctacccactccagccaactctgaggccatgtggtcctggaacaaggcccctctgaggcagatggggcaggcggcccaggcacatagcatggttggctctgcggcccagggcgcacaaaggccttattgagtcaccaccagcccccggcagaggctgaggtggcagtggcgccgagcgcctgccacctaatgactgtcctggtccagccagatgttccacagacctccggagcagcggactagggcccgcccggccagccggcaccgcagaggccactgtaattccaattaaccagcttcagctgagcaaacagcgggcagtggtggcccagcccaggcggtaggcctggcccgcagagcctgcgagtctagactccagatgtgaaccgccaccatcagagtcccatggaaaaatggcaccaggccgggcaaggattgggcctgcatgctggggagggggtgtgggtggttgggcagggccccgagtgggctagatgccagcctcacctggtttggggtggattattaggaaactgctctagaacccaagttctaccctgctttattagattctgtttctgtgcctcagtctcccatgactgcgacaagagagagggttccaaggggaaaaccagccctgctgagaccccagtgtgcactgactgtatttcacgtgactagcattatgctagtgcaactgacccttgaacaacacagggattaggggcaccaacccatcatggtcgaaaatctgtataacttttcagtcccgcaaaacaactaatagtctgctgttgaccagaagccttacctgataacataaacagtcaaaacatcttgta

SEQ ID NO: 140890 - DNA, 3932 bp, Homo sapiens
  Payload ID: 7636
  Gene Symbol: HM13
  Gene Name: histocompatibility (minor) 13
  ENST ID: ENST00000498035
  CDS Start-End: 96-527
aggggaacgtggctttccctgcagagccggtgtctccgcctgcgtccctgctgcagcaaccggagctggagtcggatcccgaacgcaccctcgccatggactcggccctcagcgatccgcataacggcagtgccgaggcaggcggccccaccaacagcactacgcggccgccttccacgcccgagggcatcgcgctggcctacggcagcctcctgctcatggcgctgctgcccatcttcttcggcgccctgcgctccgtacgctgcgcccgcggcaagaatgcttcagacatgcctgaaacaatcaccagccgggatgccgcccgcttccccatcatcgccagctgcacactcttggggctctacctctttttcaaaatattctcccaggagtacatcaacctcctgctgtccatgtatttcttcgtgctgggaatcctggccctgtcccacaccatcaggtcagaaggcatctctctgcaacatttgaagcagctttctcgggaaccagtacagggtcttggatgagaacatgacttttggcatcattcagagccaggtttgaatcctggctataaaactcaagggactctttcccctgcacactgtagatgactaggacaagaacaatgacctctctgggccacagtttccttatagacatgatgaggatctggtgggtgtttccaccaccacagctgttgggaaagtgatttgtgagcagtaatgtcatgttagttgtgacagtactcaggtgagtaacaccagtaccacctgccgggtgttgtggcctagctgtgtgctaagtgccatgttgggctcctcacacatgatcgtgtttcgtaaggagccagaggcagcatagtgaaaagttaggagcgtgggctctggcatttgactaccttactttgagtccagactctgccacttaatagctctgtgatcttgggcaagttacttaatctctctggcctcaatttcctggtgaatgtggagaaaaataatagtgcccttcccatggggtcatgtggaaagcttttagcacagtatctggtgatttaaagtgttcagtaactattagctgttactgtcattatctgtgttaacctgccagacaaccttatatgggttgcttttgctttcacacctgtatgatagtcatggaaactgaagcccagagaggttaagaaatttgctaggatcacaccactaataagcaacagagccaggattcaaacccaggtgtggctccagagcccatcctcttcccactgctaccctaactcaaactgccacatgctcgtgtcctttcagtggggagagtggttcattagagggggttgctacttttattttggacaggccagttctccattctgcaggactatcccatgtattacaaacagttggcaaccttgccctgctcaccaaatgggagttgcataccagtattccccagcttgtgactacagagatgtcccagtatgtttctttctgccccgttgaagaggtgcagcctcaggctgagaaacactgatagaccaagaggtggccagggttcccagaaggaaggaactcaccttgaacttagctttctttgaagggtaggaaacctggaagacgtacaaaggagggagaggtcaggtgctagaaagtttgtgcacattgagggcatgggcagaatctgctcccaaaagcattgaaagccaatatgaggccaggtggtggctcatgcctgtaatcccagcactttgggaggccaaggcaggcggatcacaaggtcaggagattgagaccatcctggccaacatggtgaaaccccgtctctactaaaaatacaaaaaaattagctgggcatggtggtgcatgcctgtagtcccagctactcaggaggctgaggtaggagaatcattgaacctgggaggcggaggttgcagtgagccgagattgcaccactgcattccagcctggcgacagagtgagactccatctcaaaaaaaaaaaaaaagccaatatgaatgtggcttcattcttctaggcacactggcaggacagtgtggtagtcaggagcacagggtcaagaggcaggcagccttgggacaaacacctggtgctgccagctctaatatgtgtaaattactcaagctctgagcatagttcttctacctataaaatggagagactacaggtacctcctcagaggtgtggggagggtctagtgagccccaggctgtaacatccctagagcacagtgccaagcacacagtgagcctagtggctggcccagggttacacagctgagacttcacctctggtcttcccactgaggtcattgttgtcctcacctgcactgactcttcacccacaaaattctattctagctagcttgggagaattctagtccagccccgcatcctgaaaaatggaggcccagggaacctgagtgacttggacccaaccaagataatggcaggcccagtcgcccttgctcacaggacaaaccagtcctttcgtggtggacctggggtggggtgggggcagtcacttgcagacattgggtgtcctcctttcccatgctgattaggatcctccccaactgtagcccatcctaccccagcatctgtgagacgcttgagacccccaagtctccccacagcccagcctccacctcagagagcccagtgggttttgaaagccactgttaggctgtgtgctgaggaactgattatttaatgttatagcaacaaccctacaatgaagatcttatctctacccagctgcctaggcagggtattttgaacctttatcatcttgacaccaaagactttttttcccttttagaataataactaagggacattgtcccaaatttctcatagatgagtaatctatgtcaagaaataattgagggtgggcacggtggctcacacctgtaatcgcagcactttgtgaggccaaggcaggtggatcacctgaggtcaggagttcaagaccagcctgggcaacatggtgaaaccttgtctactaaaaatacaaaaaagtagccgggtgtgatgacgcacccagctactcgggaggctgaggcaggagaatcacttgaacccaggaggtggaggtcgcaatgagtcaagatcgcaccactgcactccagcctgggtgacagagggagactccatctcaaaaaaaaaaaaaagaaataattgtctatctgtcttttagccacttcataatttttagagatagatattatcaacagaaaataaaaccaacagcagctaaaactgcacatggtaaaatgtatgagtgactagaaactaacagaagaataattttcttaatgaaatttagagcaacaaaatttgacctgggaaaaccataccttttaaaaataatggatcacctgggcatggtggttcacacctgtcatcccagcactttgggaaccctaggctgttggatcacctgagctcaggagttcaagaccagcctgggcaacatgttgagaccctgtctccacaaaaaatacaaaaattagccgggtatggtggtgcgtgcctgtggtcccaactgctcggtaggctgaggtgggatgatcgcgtgaacctgggaggcagagaggttgcagtgagctgtgatcatgccactgcactccagcctgggtaacagagtaagaccccatctgaaaaatataaaaaaaaaaaaaaaagaataatggatggccataggcagaaggtatgcttaccatatggggttaaagctggtccactaaaaaatttgatggggaccaaaaactgtcagatgaaggaaatcattattgtaaaattaacatgaaaaagaactgaatccagtgaaaataattttagtaagtaggggatgatttgatcatgctttttagaaagttggtctaccaattaaatggatgtttcaattaaa

SEQ ID NO: 140891 - DNA, 455 bp, Homo sapiens
  Payload ID: 7636
  Gene Symbol: HM13
  Gene Name: histocompatibility (minor) 13
  ENST ID: ENST00000619859
  CDS Start-End: 1-153
ttcattgccttgctgctgcgctttgacatcagcttgaagaagaatacccacacctacttctacaccagctttgcagcctacatcttcggcctgggccttaccatcttcatcatgcacatcttcaagcatgctcaggttcttggtctacactgacttcaaaaacgaagctgcagaccctcgcagtgaatgttacagttcttaaaggcagcgtgtctggaatttgttccttgtgatgttcggatgtgctgggagttttttccttctggtgggttcgtgatctcactggctcaggaatgaagctgcagaccctcgcggtgagtgttacagttcttaaggcggcgtatccggagttgttcgttcctccccgtgggtttgtggtctcgctggcttcaaaagtgaagctgtagacctttacagcgagtatcacagctcacaaaagcaatgtggaaccaaac

SEQ ID NO: 140892 - DNA, 4273 bp, Homo sapiens
  Payload ID: 7637
  Gene Symbol: HMHA1
  Gene Name: histocompatibility (minor) HA-1
  Uniprot ID: Q92619
  ENST ID: ENST00000313093
  CDS Start-End: 241-3651
cactccgcagagccgcaggctgaggccgggaagggtcgggggcgaggccgcgtcgccgcctccccgaagccttttcctgttggggggagggcccgccagtgacggccgggcctgtcacgtgggcctgacagctggggagggggtggccggcgacaatgtggtcccgaagcggccagcgccgggagctgcagcgctgagacccccagcccgccccctcgggctcccggccggggccccatcatgttctccaggaagaaacgagagctcatgaaaaccccttccatctcgaaaaagaaccgcgcgggaagccccagcccgcagccctcgggggagctgcccaggaaggatggggctgacgcggtgttccccggaccaagcctggagccgcccgctgggtcctccggcgtcaaggccacagggaccctcaagcggcccaccagcctgagccgccacgccagcgcggctggcttccccctgtcgggtgctgcctcctggacactgggccggagccaccggagcccactgacagccgccagcccgggcgagctgcccaccgagggtgccggcccggacgtcgtcgaggacatctcccatctgctggcggacgtggcccgcttcgctgagggccttgagaaacttaaggagtgtgtgttgcgtgacgacctccttgaggcccgccgcccgcgggcccacgagtgcctgggtgaggctctgcgtgtcatgcatcagatcatctccaagtacccgctgctgaacaccgtggagacgctcaccgcagccggcaccctcattgccaaggtcaaagccttccattatgagagcaacaatgatctggagaaacaggagttcgagaaggccctggagacgattgctgtggccttcagtagcacagtgtccgagttcctcatgggtgaagtggacagcagcaccctcctagcagtgcctcctggggactcgagccagtccatggaaagcctgtatggaccgggcagtgagggcacgcctcccagcctggaagactgtgacgccggctgcctgcccgccgaggaggtggacgtgctgctacagcgctgtgaggggggcgtggatgccgcactgctgtatgccaagaacatggccaagtacatgaaggacctcatcagctacctggagaagcggacgacgctggagatggagtttgccaagggcctgcagaagatcgctcacaactgcagacagagcgtcatgcaggagccccacatgccgctcctgtccatctactcgctggccctggagcaggacctggagttcggccacagcatggtgcaggcggtgggcaccttgcagacccagaccttcatgcagcccctgaccctgcggcggcttgaacacgagaagcgcaggaaggagatcaaggaggcctggcaccgtgcccagaggaagctgcaagaggcggagtccaacctgcgcaaggccaagcagggttacgtgcagcgctgcgaggaccacgacaaggctcgcttcctcgtggccaaggcggaggaggagcaggctggcagcgcgccgggagcaggcagcacggccaccaagaccctggacaagcggcggcggctggaggaggaggccaagaacaaggcggaggaagctatggccacctaccgcacctgcgtggccgacgcgaagacgcagaagcaggagctggaggataccaaggtgacggcgctgcggcagatccaggaggtcatccggcagagcgaccaaaccatcaagtcggccacgatctcctactaccagatgatgcatatgcagacggcgccgctgcccgtgcacttccagatgctgtgtgagagcagcaagctgtatgacccaggccagcagtacgcctcccacgtgcgccagctgcagcgggaccaggagcccgatgtgcactacgactttgagccccacgtctccgccaacgcctggtcccccgtcatgcgtgcccggaagagcagcttcaacgtgagtgatgtggcgcggccggaggctgccgggagccccccagaagaaggcgggtgcactgagggcacacctgccaaggaccacagggccgggcgaggacaccaggttcacaagtcatggccgctctcgatctcagactcggacagtgggctggaccccggccctggcgcaggggactttaagaagttcgagcggacgtcatccagtggtaccatgtcgtccacggaggagctggtggacccagacggtggagccggggcttcagcctttgagcaggctgacctcaacggcatgacccccgagctgccggtggccgtgcccagtggaccgttccgccacgaggggctgtccaaggcggcccgtactcaccggctccggaagctccgcacgcccgccaagtgccgcgagtgcaacagctacgtctacttccagggtgctgagtgtgaagagtgctgcctggcctgccacaagaaatgtctggagacgctggccatacagtgcgggcacaagaagctgcaaggccgcctgcagctgttcggccaggacttcagccacgcggcccgcagcgcccccgacggcgtgcccttcatcgtcaagaagtgcgtctgcgagatcgagcggcgggcgctgcgcaccaagggcatctaccgggtcaatggggtaaagacacgcgtggagaagctgtgccaggccttcgagaacggcaaggagctggtcgagctgtcgcaggcctcgccccacgacatcagcaacgtcctcaagctctacctgcgtcagcttcccgagccgctcatctccttccgcctctaccacgagctcgtagggctggccaaggacagcctgaaggcagaggccgaggccaaggcggcgtcccggggccggcaggacggctcggagagcgaggcagtggcggtggccctggcaggtcggctgcgggagctcctgcgggacctgccgcctgagaaccgggcctcgctgcagtacctgctgcgtcacctacgcaggatcgtggaggtggagcaggacaacaagatgacccccgggaacctgggcatcgtgttcgggcccacgctgcttcggccacggcccaccgaggccaccgtgtccctctcctccctggtggattatccccatcaggcccgcgtcatcgagactctcatcgtccactacggcctggtcttcgaggaggagccggaggagacccccgggggccaggacgagtcatccaaccagcgagctgaggtagtcgtccaggtgccgtacctggaggcgggcgaggcggtggtctacccgctgcaggaggcggcggcggacgggtgcagagaatcccgagttgtgtccaacgattcggactcggacctagaggaggcctccgagctgctgtcctcatcggaggccagtgccctgggccacctcagcttcctggagcagcagcagagcgaggccagcctagaggtggcttctggcagccacagcggcagtgaggagcagctggaggccacagcccgggaggacggggacggggacgaggacggcccggcccagcagctctcaggattcaacaccaaccagtccaacaacgtgctgcaggccccactgccccccatgaggctccgtggcgggcggatgacactgggctcctgcagggaaaggcagccggaattcgtgtgagctggggtggggctgggaccacaggtggcttctctcttgcctgctcctgtccctccagcacgtcccctgcaccacggcatagcttaggtgcgccgtcctggggtcgctgccgagagcgcctggacttcgacgtcccaccagcgggcgcctcctcccagaggcttccaggagcacgagggccttgcggcacaggactgtgccctgtgctgtcccctgcaccccggctcagctgagctggggaacactgctgtcgtgtgaagtcacagtggccttgttggtgcccacagggctgtgtggatggaggaagctgtccctgcccagtgcatcccccaggtcatcacggggacgcaggaggcaggccctgccctgccctctcctcacaggtctgttgcagggactccagaaaccattctgggagccgtggatgggggcggagctggggtttggtgcagtttccagggtgcagtacagcagggcctgaatactggccctggactcccttttccagaacaccaggtgtggccacctggggctcaggtacacagtggggtctctcggaagccaccgtgtggttctttcacaggcacgtttattttgctgaaataaaaagtttttaatcggg

SEQ ID NO: 140893 - DNA, 3750 bp, Homo sapiens
  Payload ID: 7637
  Gene Symbol: HMHA1
  Gene Name: histocompatibility (minor) HA-1
  ENST ID: ENST00000543365
  CDS Start-End: 69-3128
cggagacccccatcggtcagctgccaggccccacgcgctcgcggtctccgcgccccgacggctgcgccatgtgtatctgcgggacggcgcacccggtgctggacgagggccccgtgcgctgccgggcgggcccccgagacctccttgaggcccgccgcccgcgggcccacgagtgcctgggtgaggctctgcgtgtcatgcatcagatcatctccaagtacccgctgctgaacaccgtggagacgctcaccgcagccggcaccctcattgccaaggtcaaagccttccattatgagagcaacaatgatctggagaaacaggagttcgagaaggccctggagacgattgctgtggccttcagtagcacagtgtccgagttcctcatgggtgaagtggacagcagcaccctcctagcagtgcctcctggggactcgagccagtccatggaaagcctgtatggaccgggcagtgagggcacgcctcccagcctggaagactgtgacgccggctgcctgcccgccgaggaggtggacgtgctgctacagcgctgtgaggggggcgtggatgccgcactgctgtatgccaagaacatggccaagtacatgaaggacctcatcagctacctggagaagcggacgacgctggagatggagtttgccaagggcctgcagaagatcgctcacaactgcagacagagcgtcatgcaggagccccacatgccgctcctgtccatctactcgctggccctggagcaggacctggagttcggccacagcatggtgcaggcggtgggcaccttgcagacccagaccttcatgcagcccctgaccctgcggcggcttgaacacgagaagcgcaggaaggagatcaaggaggcctggcaccgtgcccagaggaagctgcaagaggcggagtccaacctgcgcaaggccaagcagggttacgtgcagcgctgcgaggaccacgacaaggctcgcttcctcgtggccaaggcggaggaggagcaggctggcagcgcgccgggagcaggcagcacggccaccaagaccctggacaagcggcggcggctggaggaggaggccaagaacaaggcggaggaagctatggccacctaccgcacctgcgtggccgacgcgaagacgcagaagcaggagctggaggataccaaggtgacggcgctgcggcagatccaggaggtcatccggcagagcgaccaaaccatcaagtcggccacgatctcctactaccagatgatgcatatgcagacggcgccgctgcccgtgcacttccagatgctgtgtgagagcagcaagctgtatgacccaggccagcagtacgcctcccacgtgcgccagctgcagcgggaccaggagcccgatgtgcactacgactttgagccccacgtctccgccaacgcctggtcccccgtcatgcgtgcccggaagagcagcttcaacgtgagtgatgtggcgcggccggaggctgccgggagccccccagaagaaggcgggtgcactgagggcacacctgccaaggaccacagggccgggcgaggacaccaggttcacaagtcatggccgctctcgatctcagactcggacagtgggctggaccccggccctggcgcaggggactttaagaagttcgagcggacgtcatccagtggtaccatgtcgtccacggaggagctggtggacccagacggtggagccggggcttcagcctttgagcaggctgacctcaacggcatgacccccgagctgccggtggccgtgcccagtggaccgttccgccacgaggggctgtccaaggcggcccgtactcaccggctccggaagctccgcacgcccgccaagtgccgcgagtgcaacagctacgtctacttccagggtgctgagtgtgaagagtgctgcctggcctgccacaagaaatgtctggagacgctggccatacagtgcgggcacaagaagctgcaaggccgcctgcagctgttcggccaggacttcagccacgcggcccgcagcgcccccgacggcgtgcccttcatcgtcaagaagtgcgtctgcgagatcgagcggcgggcgctgcgcaccaagggcatctaccgggtcaatggggtaaagacacgcgtggagaagctgtgccaggccttcgagaacggcaaggagctggtcgagctgtcgcaggcctcgccccacgacatcagcaacgtcctcaagctctacctgcgtcagcttcccgagccgctcatctccttccgcctctaccacgagctcgtagggctggccaaggacagcctgaaggcagaggccgaggccaaggcggcgtcccggggccggcaggacggctcggagagcgaggcagtggcggtggccctggcaggtcggctgcgggagctcctgcgggacctgccgcctgagaaccgggcctcgctgcagtacctgctgcgtcacctacgcaggatcgtggaggtggagcaggacaacaagatgacccccgggaacctgggcatcgtgttcgggcccacgctgcttcggccacggcccaccgaggccaccgtgtccctctcctccctggtggattatccccatcaggcccgcgtcatcgagactctcatcgtccactacggcctggtcttcgaggaggagccggaggagacccccgggggccaggacgagtcatccaaccagcgagctgaggtagtcgtccaggtgccgtacctggaggcgggcgaggcggtggtctacccgctgcaggaggcggcggcggacgggtgcagagaatcccgagttgtgtccaacgattcggactcggacctagaggaggcctccgagctgctgtcctcatcggaggccagtgccctgggccacctcagcttcctggagcagcagcagagcgaggccagcctagaggtggcttctggcagccacagcggcagtgaggagcagctggaggccacagcccgggaggacggggacggggacgaggacggcccggcccagcagctctcaggattcaacaccaaccagtccaacaacgtgctgcaggccccactgccccccatgaggctccgtggcgggcggatgacactgggctcctgcagggaaaggcagccggaattcgtgtgagctggggtggggctgggaccacaggtggcttctctcttgcctgctcctgtccctccagcacgtcccctgcaccacggcatagcttaggtgcgccgtcctggggtcgctgccgagagcgcctggacttcgacgtcccaccagcgggcgcctcctcccagaggcttccaggagcacgagggccttgcggcacaggactgtgccctgtgctgtcccctgcaccccggctcagctgagctggggaacactgctgtcgtgtgaagtcacagtggccttgttggtgcccacagggctgtgtggatggaggaagctgtccctgcccagtgcatcccccaggtcatcacggggacgcaggaggcaggccctgccctgccctctcctcacaggtctgttgcagggactccagaaaccattctgggagccgtggatgggggcggagctggggtttggtgcagtttccagggtgcagtacagcagggcctgaatactggccctggactcccttttccagaacaccaggtgtggccacctggggctcaggtacacagtggggtctctcggaagccaccgtgtggttctttcacaggcacgtttattttgctgaaataaaaagtttttaatcggg

SEQ ID NO: 140894 - DNA, 4184 bp, Homo sapiens
  Payload ID: 7637
  Gene Symbol: HMHA1
  Gene Name: histocompatibility (minor) HA-1
  Uniprot ID: Q92619
  ENST ID: ENST00000539243
  CDS Start-End: 104-3562
aagcttacaggagcccggtgtcccggagcacaggccagggccgggccagaagcccatccgacatccagctgaccctcaccctctgaccccagccctcagcgccatgagtcgggggcaaagagttctcaagggtctgctgggctgggtttgcacttggacctgggcctggagagccagacttggagcaaggggctgtggccttcatgtcctgtgccccagagatctgcccctcccacccgaggagctgcccaggaaggatggggctgacgcggtgttccccggaccaagcctggagccgcccgctgggtcctccggcgtcaaggccacagggaccctcaagcggcccaccagcctgagccgccacgccagcgcggctggcttccccctgtcgggtgctgcctcctggacactgggccggagccaccggagcccactgacagccgccagcccgggcgagctgcccaccgagggtgccggcccggacgtcgtcgaggacatctcccatctgctggcggacgtggcccgcttcgctgagggccttgagaaacttaaggagtgtgtgttgcgtgacgacctccttgaggcccgccgcccgcgggcccacgagtgcctgggtgaggctctgcgtgtcatgcatcagatcatctccaagtacccgctgctgaacaccgtggagacgctcaccgcagccggcaccctcattgccaaggtcaaagccttccattatgagagcaacaatgatctggagaaacaggagttcgagaaggccctggagacgattgctgtggccttcagtagcacagtgtccgagttcctcatgggtgaagtggacagcagcaccctcctagcagtgcctcctggggactcgagccagtccatggaaagcctgtatggaccgggcagtgagggcacgcctcccagcctggaagactgtgacgccggctgcctgcccgccgaggaggtggacgtgctgctacagcgctgtgaggggggcgtggatgccgcactgctgtatgccaagaacatggccaagtacatgaaggacctcatcagctacctggagaagcggacgacgctggagatggagtttgccaagggcctgcagaagatcgctcacaactgcagacagagcgtcatgcaggagccccacatgccgctcctgtccatctactcgctggccctggagcaggacctggagttcggccacagcatggtgcaggcggtgggcaccttgcagacccagaccttcatgcagcccctgaccctgcggcggcttgaacacgagaagcgcaggaaggagatcaaggaggcctggcaccgtgcccagaggaagctgcaagaggcggagtccaacctgcgcaaggccaagcagggttacgtgcagcgctgcgaggaccacgacaaggctcgcttcctcgtggccaaggcggaggaggagcaggctggcagcgcgccgggagcaggcagcacggccaccaagaccctggacaagcggcggcggctggaggaggaggccaagaacaaggcggaggaagctatggccacctaccgcacctgcgtggccgacgcgaagacgcagaagcaggagctggaggataccaaggtgacggcgctgcggcagatccaggaggtcatccggcagagcgaccaaaccatcaagtcggccacgatctcctactaccagatgatgcatatgcagacggcgccgctgcccgtgcacttccagatgctgtgtgagagcagcaagctgtatgacccaggccagcagtacgcctcccacgtgcgccagctgcagcgggaccaggagcccgatgtgcactacgactttgagccccacgtctccgccaacgcctggtcccccgtcatgcgtgcccggaagagcagcttcaacgtgagtgatgtggcgcggccggaggctgccgggagccccccagaagaaggcgggtgcactgagggcacacctgccaaggaccacagggccgggcgaggacaccaggttcacaagtcatggccgctctcgatctcagactcggacagtgggctggaccccggccctggcgcaggggactttaagaagttcgagcggacgtcatccagtggtaccatgtcgtccacggaggagctggtggacccagacggtggagccggggcttcagcctttgagcaggctgacctcaacggcatgacccccgagctgccggtggccgtgcccagtggaccgttccgccacgaggggctgtccaaggcggcccgtactcaccggctccggaagctccgcacgcccgccaagtgccgcgagtgcaacagctacgtctacttccagggtgctgagtgtgaagagtgctgcctggcctgccacaagaaatgtctggagacgctggccatacagtgcgggcacaagaagctgcaaggccgcctgcagctgttcggccaggacttcagccacgcggcccgcagcgcccccgacggcgtgcccttcatcgtcaagaagtgcgtctgcgagatcgagcggcgggcgctgcgcaccaagggcatctaccgggtcaatggggtaaagacacgcgtggagaagctgtgccaggccttcgagaacggcaaggagctggtcgagctgtcgcaggcctcgccccacgacatcagcaacgtcctcaagctctacctgcgtcagcttcccgagccgctcatctccttccgcctctaccacgagctcgtagggctggccaaggacagcctgaaggcagaggccgaggccaaggcggcgtcccggggccggcaggacggctcggagagcgaggcagtggcggtggccctggcaggtcggctgcgggagctcctgcgggacctgccgcctgagaaccgggcctcgctgcagtacctgctgcgtcacctacgcaggatcgtggaggtggagcaggacaacaagatgacccccgggaacctgggcatcgtgttcgggcccacgctgcttcggccacggcccaccgaggccaccgtgtccctctcctccctggtggattatccccatcaggcccgcgtcatcgagactctcatcgtccactacggcctggtcttcgaggaggagccggaggagacccccgggggccaggacgagtcatccaaccagcgagctgaggtagtcgtccaggtgccgtacctggaggcgggcgaggcggtggtctacccgctgcaggaggcggcggcggacgggtgcagagaatcccgagttgtgtccaacgattcggactcggacctagaggaggcctccgagctgctgtcctcatcggaggccagtgccctgggccacctcagcttcctggagcagcagcagagcgaggccagcctagaggtggcttctggcagccacagcggcagtgaggagcagctggaggccacagcccgggaggacggggacggggacgaggacggcccggcccagcagctctcaggattcaacaccaaccagtccaacaacgtgctgcaggccccactgccccccatgaggctccgtggcgggcggatgacactgggctcctgcagggaaaggcagccggaattcgtgtgagctggggtggggctgggaccacaggtggcttctctcttgcctgctcctgtccctccagcacgtcccctgcaccacggcatagcttaggtgcgccgtcctggggtcgctgccgagagcgcctggacttcgacgtcccaccagcgggcgcctcctcccagaggcttccaggagcacgagggccttgcggcacaggactgtgccctgtgctgtcccctgcaccccggctcagctgagctggggaacactgctgtcgtgtgaagtcacagtggccttgttggtgcccacagggctgtgtggatggaggaagctgtccctgcccagtgcatcccccaggtcatcacggggacgcaggaggcaggccctgccctgccctctcctcacaggtctgttgcagggactccagaaaccattctgggagccgtggatgggggcggagctggggtttggtgcagtttccagggtgcagtacagcagggcctgaatactggccctggactcccttttccagaacaccaggtgtggccacctggggctcaggtacacagtggggtctctcggaagccaccgtgtggttctttcacaggcacgtttattttgctgaaataaaaagtttttaatcggg

SEQ ID NO: 140895 - DNA, 3875 bp, Homo sapiens
  Payload ID: 7637
  Gene Symbol: HMHA1
  Gene Name: histocompatibility (minor) HA-1
  ENST ID: ENST00000587602
  CDS Start-End: 90-272
gacaatgtggtcccgaagcggccagcgccgggagctgcagcgctgagacccccagcccgccccctcgggctcccggccggggccccatcatgttctccaggaagaaacgagagctcatgaaaaccccttccatctcgaaaaagaaccgcgcgggaagccccagcccgcagccctcggggacctccttgaggcccgccgcccgcgggcccacgagtgcctgggtgaggctctgcgtgtcatgcatcagatcatctccaagtacccgctgctgaacaccgtggagacgctcaccgcagccggcaccctcattgccaaggtcaaagccttccattatgagagcaacaatgatctggagaaacaggagttcgagaaggccctggagacgattgctgtggccttcagtagcacagtgtccgagttcctcatgggtgaagtggacagcagcaccctcctagcagtgcctcctggggactcgagccagtccatggaaagcctgtatggaccgggcagtgagggcacgcctcccagcctggaagactgtgacgccggctgcctgcccgccgaggaggtggacgtgctgctacagcgctgtgaggggggcgtggatgccgcactgctgtatgccaagaacatggccaagtacatgaaggacctcatcagctacctggagaagcggacgacgctggagatggagtttgccaagggcctgcagaagatcgctcacaactgcagacagagcgtcatgcaggagccccacatgccgctcctgtccatctactcgctggccctggagcaggacctggagttcggccacagcatggtgcaggcggtgggcaccttgcagacccagaccttcatgcagcccctgaccctgcggcggcttgaacacgagaagcgcaggaaggagatcaaggaggcctggcaccgtgcccagaggaagctgcaagaggcggagtccaacctgcgcaaggccaagcagggttacgtgcagcgctgcgaggaccacgacaaggctcgcttcctcgtggccaaggcggaggaggagcaggctggcagcgcgccgggagcaggcagcacggccaccaagaccctggacaagcggcggcggctggaggaggaggccaagaacaaggcggaggaagctatggccacctaccgcacctgcgtggccgacgcgaagacgcagaagcaggagctggaggataccaaggtgacggcgctgcggcagatccaggaggtcatccggcagagcgaccaaaccatcaagtcggccacgatctcctactaccagatgatgcatatgcagacggcgccgctgcccgtgcacttccagatgctgtgtgagagcagcaagctgtatgacccaggccagcagtacgcctcccacgtgcgccagctgcagcgggaccaggagcccgatgtgcactacgactttgagccccacgtctccgccaacgcctggtcccccgtcatgcgtgcccggaagagcagcttcaacgtgagtgatgtggcgcggccggaggctgccgggagccccccagaagaaggcgggtgcactgagggcacacctgccaaggaccacaggggtgagtgtccggcggggcccaggggcggacgctggctccctgcgacccaccctggcccttcaccagagacgcctctttctccagccgggcgaggacaccaggttcacaagtcatggccgctctcgatctcagactcggacagtgggctggaccccggccctggcgcaggggactttaagaagttcgagcggacgtcatccagtggtaccatgtcgtccacggaggagctggtggacccagacggtggagccggggcttcagcctttgagcaggctgacctcaacggcatgacccccgagctgccggtggccgtgcccagtggaccgttccgccacgaggggctgtccaaggcggcccgtactcaccggctccggaagctccgcacgcccgccaagtgccgcgagtgcaacagctacgtctacttccagggtgctgagtgtgaagagtgctgcctggcctgccacaagaaatgtctggagacgctggccatacagtgcgggcacaagaagctgcaaggccgcctgcagctgttcggccaggacttcagccacgcggcccgcagcgcccccgacggcgtgcccttcatcgtcaagaagtgcgtctgcgagatcgagcggcgggcgctgcgcaccaagggcatctaccgggtcaatggggtaaagacacgcgtggagaagctgtgccaggccttcgagaacggcaaggagctggtcgagctgtcgcaggcctcgccccacgacatcagcaacgtcctcaagctctacctgcgtcagcttcccgagccgctcatctccttccgcctctaccacgagctcgtagggctggccaaggacagcctgaaggcagaggccgaggccaaggcggcgtcccggggccggcaggacggctcggagagcgaggcagtggcggtggccctggcaggtcggctgcgggagctcctgcgggacctgccgcctgagaaccgggcctcgctgcagtacctgctgcgtcacctacgcaggatcgtggaggtggagcaggacaacaagatgacccccgggaacctgggcatcgtgttcgggcccacgctgcttcggccacggcccaccgaggccaccgtgtccctctcctccctggtggattatccccatcaggcccgcgtcatcgagactctcatcgtccactacggcctggtcttcgaggaggagccggaggagacccccgggggccaggacgagtcatccaaccagcgagctgaggtagtcgtccaggtgccgtacctggaggcgggcgaggcggtggtctacccgctgcaggaggcggcggcggacgggtgcagagaatcccgagttgtgtccaacgattcggactcggacctagaggaggcctccgagctgctgtcctcatcggaggccagtgccctgggccacctcagcttcctggagcagcagcagagcgaggccagcctagaggtggcttctggcagccacagcggcagtgaggagcagctggaggccacagcccgggaggacggggacggggacgaggacggcccggcccagcagctctcaggattcaacaccaaccagtccaacaacgtgctgcaggccccactgccccccatgaggctccgtggcgggcggatgacactgggctcctgcagggaaaggcagccggaattcgtgtgagctggggtggggctgggaccacaggtggcttctctcttgcctgctcctgtccctccagcacgtcccctgcaccacggcatagcttaggtgcgccgtcctggggtcgctgccgagagcgcctggacttcgacgtcccaccagcgggcgcctcctcccagaggcttccaggagcacgagggccttgcggcacaggactgtgccctgtgctgtcccctgcaccccggctcagctgagctggggaacactgctgtcgtgtgaagtcacagtggccttgttggtgcccacagggctgtgtggatggaggaagctgtccctgcccagtgcatcccccaggtcatcacggggacgcaggaggcaggccctgccctgccctctcctcacaggtctgttgcagggactccagaaaccattctgggagccgtggatgggggcggagctggggtttggtgcagtttccagggtgcagtacagcagggcctgaatactggccctggactcccttttccagaacaccaggtgtggccacctggggctcaggtacacagtggggtctctcggaagccaccgtgtggttctttcacaggcacgtttattttgctgaaataaaaagtttttaatcggg

SEQ ID NO: 140896 - DNA, 4191 bp, Homo sapiens
  Payload ID: 7637
  Gene Symbol: HMHA1
  Gene Name: histocompatibility (minor) HA-1
  ENST ID: ENST00000590214
  CDS Start-End: 80-3571
tcccgaagcggccagcgccgggagctgcagcgctgagacccccagcccgccccctcgggctcccggccggggccccatcatgttctccaggaagaaacgagagctcatgaaaaccccttccatctcgaaaaagaaccgcgcgggaagccccagcccgcagccctcggggccccacttcatttctggggaaactgaggccgtgtccaggccggaaaatccctttaacgagctcccctcggacctgcccaaggagctgcccaggaaggatggggctgacgcggtgttccccggaccaagcctggagccgcccgctgggtcctccggcgtcaaggccacagggaccctcaagcggcccaccagcctgagccgccacgccagcgcggctggcttccccctgtcgggtgctgcctcctggacactgggccggagccaccggagcccactgacagccgccagcccgggcgagctgcccaccgagggtgccggcccggacgtcgtcgaggacatctcccatctgctggcggacgtggcccgcttcgctgagggccttgagaaacttaaggagtgtgtgttgcgtgacgacctccttgaggcccgccgcccgcgggcccacgagtgcctgggtgaggctctgcgtgtcatgcatcagatcatctccaagtacccgctgctgaacaccgtggagacgctcaccgcagccggcaccctcattgccaaggtcaaagccttccattatgagagcaacaatgatctggagaaacaggagttcgagaaggccctggagacgattgctgtggccttcagtagcacagtgtccgagttcctcatgggtgaagtggacagcagcaccctcctagcagtgcctcctggggactcgagccagtccatggaaagcctgtatggaccgggcagtgagggcacgcctcccagcctggaagactgtgacgccggctgcctgcccgccgaggaggtggacgtgctgctacagcgctgtgaggggggcgtggatgccgcactgctgtatgccaagaacatggccaagtacatgaaggacctcatcagctacctggagaagcggacgacgctggagatggagtttgccaagggcctgcagaagatcgctcacaactgcagacagagcgtcatgcaggagccccacatgccgctcctgtccatctactcgctggccctggagcaggacctggagttcggccacagcatggtgcaggcggtgggcaccttgcagacccagaccttcatgcagcccctgaccctgcggcggcttgaacacgagaagcgcaggaaggagatcaaggaggcctggcaccgtgcccagaggaagctgcaagaggcggagtccaacctgcgcaaggccaagcagggttacgtgcagcgctgcgaggaccacgacaaggctcgcttcctcgtggccaaggcggaggaggagcaggctggcagcgcgccgggagcaggcagcacggccaccaagaccctggacaagcggcggcggctggaggaggaggccaagaacaaggcggaggaagctatggccacctaccgcacctgcgtggccgacgcgaagacgcagaagcaggagctggaggataccaaggtgacggcgctgcggcagatccaggaggtcatccggcagagcgaccaaaccatcaagtcggccacgatctcctactaccagatgatgcatatgcagacggcgccgctgcccgtgcacttccagatgctgtgtgagagcagcaagctgtatgacccaggccagcagtacgcctcccacgtgcgccagctgcagcgggaccaggagcccgatgtgcactacgactttgagccccacgtctccgccaacgcctggtcccccgtcatgcgtgcccggaagagcagcttcaacgtgagtgatgtggcgcggccggaggctgccgggagccccccagaagaaggcgggtgcactgagggcacacctgccaaggaccacagggccgggcgaggacaccaggttcacaagtcatggccgctctcgatctcagactcggacagtgggctggaccccggccctggcgcaggggactttaagaagttcgagcggacgtcatccagtggtaccatgtcgtccacggaggagctggtggacccagacggtggagccggggcttcagcctttgagcaggctgacctcaacggcatgacccccgagctgccggtggccgtgcccagtggaccgttccgccacgaggggctgtccaaggcggcccgtactcaccggctccggaagctccgcacgcccgccaagtgccgcgagtgcaacagctacgtctacttccagggtgctgagtgtgaagagtgctgcctggcctgccacaagaaatgtctggagacgctggccatacagtgcgggcacaagaagctgcaaggccgcctgcagctgttcggccaggacttcagccacgcggcccgcagcgcccccgacggcgtgcccttcatcgtcaagaagtgcgtctgcgagatcgagcggcgggcgctgcgcaccaagggcatctaccgggtcaatggggtaaagacacgcgtggagaagctgtgccaggccttcgagaacggcaaggagctggtcgagctgtcgcaggcctcgccccacgacatcagcaacgtcctcaagctctacctgcgtcagcttcccgagccgctcatctccttccgcctctaccacgagctcgtagggctggccaaggacagcctgaaggcagaggccgaggccaaggcggcgtcccggggccggcaggacggctcggagagcgaggcagtggcggtggccctggcaggtcggctgcgggagctcctgcgggacctgccgcctgagaaccgggcctcgctgcagtacctgctgcgtcacctacgcaggatcgtggaggtggagcaggacaacaagatgacccccgggaacctgggcatcgtgttcgggcccacgctgcttcggccacggcccaccgaggccaccgtgtccctctcctccctggtggattatccccatcaggcccgcgtcatcgagactctcatcgtccactacggcctggtcttcgaggaggagccggaggagacccccgggggccaggacgagtcatccaaccagcgagctgaggtagtcgtccaggtgccgtacctggaggcgggcgaggcggtggtctacccgctgcaggaggcggcggcggacgggtgcagagaatcccgagttgtgtccaacgattcggactcggacctagaggaggcctccgagctgctgtcctcatcggaggccagtgccctgggccacctcagcttcctggagcagcagcagagcgaggccagcctagaggtggcttctggcagccacagcggcagtgaggagcagctggaggccacagcccgggaggacggggacggggacgaggacggcccggcccagcagctctcaggattcaacaccaaccagtccaacaacgtgctgcaggccccactgccccccatgaggctccgtggcgggcggatgacactgggctcctgcagggaaaggcagccggaattcgtgtgagctggggtggggctgggaccacaggtggcttctctcttgcctgctcctgtccctccagcacgtcccctgcaccacggcatagcttaggtgcgccgtcctggggtcgctgccgagagcgcctggacttcgacgtcccaccagcgggcgcctcctcccagaggcttccaggagcacgagggccttgcggcacaggactgtgccctgtgctgtcccctgcaccccggctcagctgagctggggaacactgctgtcgtgtgaagtcacagtggccttgttggtgcccacagggctgtgtggatggaggaagctgtccctgcccagtgcatcccccaggtcatcacggggacgcaggaggcaggccctgccctgccctctcctcacaggtctgttgcagggactccagaaaccattctgggagccgtggatgggggcggagctggggtttggtgcagtttccagggtgcagtacagcagggcctgaatactggccctggactcccttttccagaacaccaggtgtggccacctggggctcaggtacacagtggggtctctcggaagccaccgtgtggttctttcacaggcacgtttattttgctgaaataaaaagtttttaatcg

SEQ ID NO: 140897 - DNA, 539 bp, Homo sapiens
  Payload ID: 7637
  Gene Symbol: HMHA1
  Gene Name: histocompatibility (minor) HA-1
  ENST ID: ENST00000587186
  CDS Start-End: 29-539
aaccaggtgtcctcagcatattctgccgatggtggggtccacaccacactttggggacccctgtgcaggcagcccaggaccaggtggacgtggggacccagacggacgtggggacccagacggacagggcccggagctgcccaggaaggatggggctgacgcggtgttccccggaccaagcctggagccgcccgctgggtcctccggcgtcaaggccacagggaccctcaagcggcccaccagcctgagccgccacgccagcgcggctggcttccccctgtcgggtgctgcctcctggacactgggccggagccaccggagcccactgacagccgccagcccgggcgagctgcccaccgagggtgccggcccggacgtcgtcgaggacatctcccatctgctggcggacgtggcccgcttcgctgagggccttgagaaacttaaggagtgtgtgttgcgtgacgacctccttgaggcccgccgcccgcgggcccacgagtgcctgggtgaggctctgcgtgtcatgcatcagatcatct

SEQ ID NO: 140898 - DNA, 3218 bp, Homo sapiens
  Payload ID: 7637
  Gene Symbol: HMHA1
  Gene Name: histocompatibility (minor) HA-1
  ENST ID: ENST00000590577
  CDS Start-End: 281-2596
gattctagtgcctcagcctcccgagtagctgggattacaagcgtgcaccacaatgcccggctaattgttttaaattttgggtagatacggggtttcactatgttggccaggctggtctcaaactcctgacctcaagtgatccacctgcctcggcctcccaaagtgctgggattacagacgtgagccaccgcgcccggccactcctcctgtttttccgctgccgattgttgtgcagggtcctctgcatgcccagctgggccatggggccttgctgagagagatgggggtggggaggaaaggaggagctggggagactgagtcccatccgaggatagggttggaactggcctcctggctcccacacccacagcaagaggcggagtccaacctgcgcaaggccaagcagggttacgtgcagcgctgcgaggaccacgacaaggctcgcttcctcgtggccaaggcggaggaggagcaggctggcagcgcgccgggagcaggcagcacggccaccaagaccctggacaagcggcggcggctggaggaggaggccaagaacaaggcggaggaagctatggccacctaccgcacctgcgtggccgacgcgaagacgcagaagcaggagctggaggataccaaggtgacggcgctgcggcagatccaggaggtcatccggcagagcgaccaaaccatcaagtcggccacgatctcctactaccagatgatgcatatgcagacggcgccgctgcccgtgcacttccagatgctgtgtgagagcagcaagctgtatgacccaggccagcagtacgcctcccacgtgcgccagctgcagcgggaccaggagcccgatgtgcactacgactttgagccccacgtctccgccaacgcctggtcccccgtcatgcgtgcccggaagagcagcttcaacgtgagtgatgtggcgcggccggaggctgccgggagccccccagaagaaggcgggtgcactgagggcacacctgccaaggaccacagggccgggcgaggacaccaggttcacaagtcatggccgctctcgatctcagactcggacagtgggctggaccccggccctggcgcaggggactttaagaagttcgagcggacgtcatccagtggtaccatgtcgtccacggaggagctggtggacccagacggtggagccggggcttcagcctttgagcaggctgacctcaacggcatgacccccgagctgccggtggccgtgcccagtggaccgttccgccacgaggggctgtccaaggcggcccgtactcaccggctccggaagctccgcacgcccgccaagtgccgcgagtgcaacagctacgtctacttccagggtgctgagtgtgaagagtgctgcctggcctgccacaagaaatgtctggagacgctggccatacagtgcgggcacaagaagctgcaaggccgcctgcagctgttcggccaggacttcagccacgcggcccgcagcgcccccgacggcgtgcccttcatcgtcaagaagtgcgtctgcgagatcgagcggcgggcgctgcgcaccaagggcatctaccgggtcaatggggtaaagacacgcgtggagaagctgtgccaggccttcgagaacggcaaggagctggtcgagctgtcgcaggcctcgccccacgacatcagcaacgtcctcaagctctacctgcgtcagcttcccgagccgctcatctccttccgcctctaccacgagctcgtagggctggccaaggacagcctgaaggcagaggccgaggccaaggcggcgtcccggggccggcaggacggctcggagagcgaggcagtggcggtggccctggcaggtcggctgcgggagctcctgcgggacctgccgcctgagaaccgggcctcgctgcagtacctgctgcgtcacctacgcaggatcgtggaggtggagcaggacaacaagatgacccccgggaacctgggcatcgtgttcgggcccacgctgcttcggccacggcccaccgaggccaccgtgtccctctcctccctggtggattatccccatcaggcccgcgtcatcgagactctcatcgtccactacggcctggtcttcgaggaggagccggaggagacccccgggggccaggacgagtcatccaaccagcgagctgaggtagtcgtccaggtgccgtacctggaggcgggcgaggcggtggtctacccgctgcaggaggcggcggcggacgggtgcagagaatcccgagttgtgtccaacgattcggactcggacctagaggaggcctccgagctgctgtcctcatcggaggccagtgccctgggccacctcagcttcctggagcagcagcagagcgaggccagcctagaggtggcttctggcagccacagcggcagtgaggagcagctggaggccacagcccgggaggacggggacggggacgaggacggcccggcccagcagctctcaggattcaacaccaaccagtccaacaacgtgctgcaggccccactgccccccatgaggctccgtggcgggcggatgacactgggctcctgcagggaaaggcagccggaattcgtgtgagctggggtggggctgggaccacaggtggcttctctcttgcctgctcctgtccctccagcacgtcccctgcaccacggcatagcttaggtgcgccgtcctggggtcgctgccgagagcgcctggacttcgacgtcccaccagcgggcgcctcctcccagaggcttccaggagcacgagggccttgcggcacaggactgtgccctgtgctgtcccctgcaccccggctcagctgagctggggaacactgctgtcgtgtgaagtcacagtggccttgttggtgcccacagggctgtgtggatggaggaagctgtccctgcccagtgcatcccccaggtcatcacggggacgcaggaggcaggccctgccctgccctctcctcacaggtctgttgcagggactccagaaaccattctgggagccgtggatgggggcggagctggggtttggtgcagtttccagggtgcagtacagcagggcctgaatactggccctggactcccttttccagaacaccaggtgtggccacctggggctcaggtacacagtggggtctctcggaagccaccgtgtggttctttcacaggcacgtttattttgctgaaataaaaagtttttaatcggg

SEQ ID NO: 140899 - DNA, 4120 bp, Homo sapiens
  Payload ID: 7637
  Gene Symbol: HMHA1
  Gene Name: histocompatibility (minor) HA-1
  ENST ID: ENST00000586866
  CDS Start-End: 76-3498
gagtggagcccgggtgagacccggagctgacgccgggccgcagggggacagggacccgccctgtgctcggggctcatgctggggcggcggctgggggctcgtgccagctacagcccctaccgggcgggacggcaggggccacagcagagaggccgggaccccggcattcagctcacggagctgcccaggaaggatggggctgacgcggtgttccccggaccaagcctggagccgcccgctgggtcctccggcgtcaaggccacagggaccctcaagcggcccaccagcctgagccgccacgccagcgcggctggcttccccctgtcgggtgctgcctcctggacactgggccggagccaccggagcccactgacagccgccagcccgggcgagctgcccaccgagggtgccggcccggacgtcgtcgaggacatctcccatctgctggcggacgtggcccgcttcgctgagggccttgagaaacttaaggagtgtgtgttgcgtgacgacctccttgaggcccgccgcccgcgggcccacgagtgcctgggtgaggctctgcgtgtcatgcatcagatcatctccaagtacccgctgctgaacaccgtggagacgctcaccgcagccggcaccctcattgccaaggtcaaagccttccattatgagagcaacaatgatctggagaaacaggagttcgagaaggccctggagacgattgctgtggccttcagtagcacagtgtccgagttcctcatgggtgaagtggacagcagcaccctcctagcagtgcctcctggggactcgagccagtccatggaaagcctgtatggaccgggcagtgagggcacgcctcccagcctggaagactgtgacgccggctgcctgcccgccgaggaggtggacgtgctgctacagcgctgtgaggggggcgtggatgccgcactgctgtatgccaagaacatggccaagtacatgaaggacctcatcagctacctggagaagcggacgacgctggagatggagtttgccaagggcctgcagaagatcgctcacaactgcagacagagcgtcatgcaggagccccacatgccgctcctgtccatctactcgctggccctggagcaggacctggagttcggccacagcatggtgcaggcggtgggcaccttgcagacccagaccttcatgcagcccctgaccctgcggcggcttgaacacgagaagcgcaggaaggagatcaaggaggcctggcaccgtgcccagaggaagctgcaagaggcggagtccaacctgcgcaaggccaagcagggttacgtgcagcgctgcgaggaccacgacaaggctcgcttcctcgtggccaaggcggaggaggagcaggctggcagcgcgccgggagcaggcagcacggccaccaagaccctggacaagcggcggcggctggaggaggaggccaagaacaaggcggaggaagctatggccacctaccgcacctgcgtggccgacgcgaagacgcagaagcaggagctggaggataccaaggtgacggcgctgcggcagatccaggaggtcatccggcagagcgaccaaaccatcaagtcggccacgatctcctactaccagatgatgcatatgcagacggcgccgctgcccgtgcacttccagatgctgtgtgagagcagcaagctgtatgacccaggccagcagtacgcctcccacgtgcgccagctgcagcgggaccaggagcccgatgtgcactacgactttgagccccacgtctccgccaacgcctggtcccccgtcatgcgtgcccggaagagcagcttcaacgtgagtgatgtggcgcggccggaggctgccgggagccccccagaagaaggcgggtgcactgagggcacacctgccaaggaccacagggccgggcgaggacaccaggttcacaagtcatggccgctctcgatctcagactcggacagtgggctggaccccggccctggcgcaggggactttaagaagttcgagcggacgtcatccagtggtaccatgtcgtccacggaggagctggtggacccagacggtggagccggggcttcagcctttgagcaggctgacctcaacggcatgacccccgagctgccggtggccgtgcccagtggaccgttccgccacgaggggctgtccaaggcggcccgtactcaccggctccggaagctccgcacgcccgccaagtgccgcgagtgcaacagctacgtctacttccagggtgctgagtgtgaagagtgctgcctggcctgccacaagaaatgtctggagacgctggccatacagtgcgggcacaagaagctgcaaggccgcctgcagctgttcggccaggacttcagccacgcggcccgcagcgcccccgacggcgtgcccttcatcgtcaagaagtgcgtctgcgagatcgagcggcgggcgctgcgcaccaagggcatctaccgggtcaatggggtaaagacacgcgtggagaagctgtgccaggccttcgagaacggcaaggagctggtcgagctgtcgcaggcctcgccccacgacatcagcaacgtcctcaagctctacctgcgtcagcttcccgagccgctcatctccttccgcctctaccacgagctcgtagggctggccaaggacagcctgaaggcagaggccgaggccaaggcggcgtcccggggccggcaggacggctcggagagcgaggcagtggcggtggccctggcaggtcggctgcgggagctcctgcgggacctgccgcctgagaaccgggcctcgctgcagtacctgctgcgtcacctacgcaggatcgtggaggtggagcaggacaacaagatgacccccgggaacctgggcatcgtgttcgggcccacgctgcttcggccacggcccaccgaggccaccgtgtccctctcctccctggtggattatccccatcaggcccgcgtcatcgagactctcatcgtccactacggcctggtcttcgaggaggagccggaggagacccccgggggccaggacgagtcatccaaccagcgagctgaggtagtcgtccaggtgccgtacctggaggcgggcgaggcggtggtctacccgctgcaggaggcggcggcggacgggtgcagagaatcccgagttgtgtccaacgattcggactcggacctagaggaggcctccgagctgctgtcctcatcggaggccagtgccctgggccacctcagcttcctggagcagcagcagagcgaggccagcctagaggtggcttctggcagccacagcggcagtgaggagcagctggaggccacagcccgggaggacggggacggggacgaggacggcccggcccagcagctctcaggattcaacaccaaccagtccaacaacgtgctgcaggccccactgccccccatgaggctccgtggcgggcggatgacactgggctcctgcagggaaaggcagccggaattcgtgtgagctggggtggggctgggaccacaggtggcttctctcttgcctgctcctgtccctccagcacgtcccctgcaccacggcatagcttaggtgcgccgtcctggggtcgctgccgagagcgcctggacttcgacgtcccaccagcgggcgcctcctcccagaggcttccaggagcacgagggccttgcggcacaggactgtgccctgtgctgtcccctgcaccccggctcagctgagctggggaacactgctgtcgtgtgaagtcacagtggccttgttggtgcccacagggctgtgtggatggaggaagctgtccctgcccagtgcatcccccaggtcatcacggggacgcaggaggcaggccctgccctgccctctcctcacaggtctgttgcagggactccagaaaccattctgggagccgtggatgggggcggagctggggtttggtgcagtttccagggtgcagtacagcagggcctgaatactggccctggactcccttttccagaacaccaggtgtggccacctggggctcaggtacacagtggggtctctcggaagccaccgtgtggttctttcacaggcacgtttattttgctgaaataaaaagtttttaatcggg

SEQ ID NO: 140900 - DNA, 1284 bp, Homo sapiens
  Payload ID: 7637
  Gene Symbol: HMHA1
  Gene Name: histocompatibility (minor) HA-1
  ENST ID: ENST00000591169
  CDS Start-End: 1-237
ggccggcaggacggctcggagagcgaggcagtggcggtggccctggcaggtcggctgcgggagctcctgcgggacctgccgcctgagaaccgggcctcgctgcagtacctgctgcgtcacctacgcaggcccgcgtcatcgagactctcatcgtccactacggcctggtcttcgaggaggagccggaggagacccccgggggccaggacgagtcatccaaccagcgagctgaggtagtcgtccaggtgccgtacctggaggcgggcgaggcggtggtctacccgctgcaggaggcggcggcggacgggtgcagagaatcccgagttgtgtccaacgattcggactcggacctagaggaggcctccgagctgctgtcctcatcggaggccagtgccctgggccacctcagcttcctggagcagcagcagagcgaggccagcctagaggtggcttctggcagccacagcggcagtgaggagcagctggaggccacagcccgggaggacggggacggggacgaggacggcccggcccagcagctctcaggattcaacaccaaccagtccaacaacgtgctgcaggccccactgccccccatgaggctccgtggcgggcggatgacactgggctcctgcagggaaaggcagccggaattcgtgtgagctggggtggggctgggaccacaggtggcttctctcttgcctgctcctgtccctccagcacgtcccctgcaccacggcatagcttaggtgcgccgtcctggggtcgctgccgagagcgcctggacttcgacgtcccaccagcgggcgcctcctcccagaggcttccaggagcacgagggccttgcggcacaggactgtgccctgtgctgtcccctgcaccccggctcagctgagctggggaacactgctgtcgtgtgaagtcacagtggccttgttggtgcccacagggctgtgtggatggaggaagctgtccctgcccagtgcatcccccaggtcatcacggggacgcaggaggcaggccctgccctgccctctcctcacaggtctgttgcagggactccagaaaccattctgggagccgtggatgggggcggagctggggtttggtgcagtttccagggtgcagtacagcagggcctgaatactggccctggactcccttttccagaacaccaggtgtggccacctggggctcaggtacacagtggggtctctcggaagccaccgtgtggttctttcacaggcacgtttattttgctgaaataaaaagtttttaatcggg

SEQ ID NO: 140901 - DNA, 384 bp, Homo sapiens
  Payload ID: 7638
  Gene Symbol: HMHB1
  Gene Name: histocompatibility (minor) HB-1
  Uniprot ID: O97980
  ENST ID: ENST00000289448
  CDS Start-End: 108-233
ccacatcccaggaggccgaggcggcttgccccgcatctcagaagccgggcaggccctgagccttctgacctcacatcctctgccacaccacagtggagaaaccagaactggaggagcagccagaatgcagagaagaaaaaagaggttctctgcatgtttggaagtcggaattggttgaagttgaagatgatgtgtatctgaggcacagctcttccctgacttataggctttgacactgctgttgaggtttgactcgaagcccagagttttggtgtggatgagcagggacaaattgctgagcatgaagaagagtaaaattaagcaagtggaacatatgccctttgcctctgctctgcacagtgaaatgaaaagtcaacctttgaa

SEQ ID NO: 140902 - DNA, 2101 bp, Homo sapiens
  Payload ID: 7639
  Gene Symbol: HMSD
  Gene Name: histocompatibility (minor) serpin domain containing
  Uniprot ID: A8MTL9
  ENST ID: ENST00000408945
  CDS Start-End: 203-622
attcactgggaactaacacccggcgccgctcagacatctctattcccgcctctccgacccggtctcacttcgctcctgggcagctgcgcggagaactggggctcaccgtcatggatgctctatcagaagcaaatggcacatttgcattaaaccttttgaaaaagctaggggaaaacaactcaaacaacttatttttttccccatgagcatatcatcagccttggccatggttttcatgggggcaaagggaaacactgcagctcagatgtctcaggcactttgttttagtaaaatcggaggtgaagatggagatattcatcgaggttttcagtcacttcttgttgcaattaacagaactgacactgaatatgtgcttagaactgccaacgggctctttggagaaaagtcttatgatttcctcacaggttttacagattcctgtggcaaattctaccaagcaacgataaaacagctagactttgtgaatgatacagagaagtccacaacacgtgtaaactcctgggttgctgataaaactaaaggtgaaaatatattgttattctatttcgataatattttaaacagttttatagtcagttctttacaaaactgtcaaatataaaaaggagtccttttttctctaaacaactatgcaaacattaaaacctttctttggaaatattgccaactcgtagaccttttctctagctttagcttttcccttatcaagtatctgtgatgtctctctagatgaaataatctcttccaggtttttttgcttgttaatattaggtagtttttcttttcacaaatagcgttaaaatttgaatttaaaaatttctagctgtctccctcactggtattgccatactgtatggtttacaggcttgaaatgcaactgctgtgatcagtgataagggaacacactgatgatttagattgaacagggagagttatattgttttctagggcacagctaaaaagacattccatcaacccccttgcagccagaaagaccctgagccctcagaacttcactgacacaacccatattttctttccataactggccaacttttccctttgtaccaaagccagctacttagcttcagggagagaatgagactgaagattacaaggagacatccacattatatgtgggctgagagaggaaagagggagtatcagaggttgccgggtttgctactctcattcctcttcctcctctgcccaacacttggacttggaaagaagtctgaaaggtggggaataatcagcccatatgattcttccactgcagagagagcctctgagtgttacagccaggagcaacagggtggcaccctcttcttcagggaaacacacacctctttgcactgccttgtggatagtccagtcaagtggagtaagaggtgggagtggggagtgtaaatggagtaacctctaagtatccaagcaggagggtgttttttttttttctttcctggaatgaggataatcaaatcatttcaatatgaattatgaaaatgaatgataatggttttatctgttatagaaatataatataatcagactttagccatgtaaatcataaaacatagagataacaatatgcatattgttcctagagggtcttgtgaaattttgtttgtcatattctctttgaagagttatcattcactattttatttctgtcttgtaaagcctgaaagctcatgtgctgccttgacatctatgggcttctcagggcctcagaggcctggccatgaagtcccctgctcttgtcagatatgtgcaccctattcacccactgagcaggaaggctcttcccccttctaagttcccttaccaggcagtcagctgtaccctccctgggtctcaacgtggctcacttccctccagcctggaaaattattcaaacaagcctgtcacatctggaggagccaggaatcgcctcttcctcttgttactgcaaagcctgccttccacagcccctactggttcactctattcccaaatgcaactctcctgtgaccccgcatggcatgtggtgacctccctccctgtgagcagttgtgactaataaactgccgccaatttc

SEQ ID NO: 140903 - DNA, 162 bp, Homo sapiens
  Payload ID: 7639
  Gene Symbol: HMSD
  Gene Name: histocompatibility (minor) serpin domain containing
  Uniprot ID: P0C7T4
  ENST ID: ENST00000526932
  CDS Start-End: 1-162
atggagatattcatcgaggttttcagtcacttcttgttgcaattaacagaactgacactgaatatgtgcttagaactgccaacgggctctttggagaaaagtcttatgatttcctcacaggttttacagattcctgtggcaaattctaccaagcaacgataa

SEQ ID NO: 140904 - DNA, 1626 bp, Homo sapiens
  Payload ID: 7640
  Gene Symbol: HAT1
  Gene Name: histone acetyltransferase 1
  Uniprot ID: O14929
  ENST ID: ENST00000264108
  CDS Start-End: 37-1296
cgtccttcctcagccgcgggtgatcgtagctcggaaatggcgggatttggtgctatggagaaatttttggtagaatataagagtgcagtggagaagaaactggcagagtacaaatgtaacaccaacacagcaattgaactaaaattagttcgttttcctgaagatcttgaaaatgacattagaactttctttcctgagtatacccatcaactctttggggatgatgaaactgcttttggttacaagggtctaaagatcctgttatactatattgctggtagcctgtcaacaatgttccgtgttgaatatgcatctaaagttgatgagaactttgactgtgtagaggcagatgatgttgagggcaaaattagacaaatcattccacctggattttgcacaaacacgaatgatttcctttctttactggaaaaggaagttgatttcaagccattcggaaccttacttcatacctactcagttctcagtccaacaggaggagaaaactttacctttcagatatataaggctgacatgacatgtagaggctttcgagaatatcatgaaaggcttcagacctttttgatgtggtttattgaaactgctagctttattgacgtggatgatgaaagatggcactactttctagtatttgagaagtataataaggatggagctacgctctttgcgaccgtaggctacatgacagtctataattactatgtgtacccagacaaaacccggccacgtgtaagtcagatgctgattttgactccatttcaaggtcaaggccatggtgctcaacttcttgaaacagttcatagatactacactgaatttcctacagttcttgatattacagcggaagatccatccaaaagctatgtgaaattacgagactttgtgcttgtgaagctttgtcaagatttgccctgtttttcccgggaaaaattaatgcaaggattcaatgaagatatggtgatagaggcacaacagaagttcaaaataaataagcaacacgctagaagggtttatgaaattcttcgactactggtaactgacatgagtgatgccgaacaatacagaagctacagactggatattaaaagaagactaattagcccatataagaaaaagcagagagatcttgctaagatgagaaaatgtctcagaccagaagaactgacaaaccagatgaaccaaatagaaataagcatgcaacatgaacagctggaagagagttttcaggaactagtggaagattaccggcgtgttattgaacgacttgctcaagagtaaagattatactgctctgtacaggaagcttgcaaattttctgtacaatgtgctgtgaaaaatctgatgactttaattttaaaatcttgtgacattttgcttatactaaaagttatctatctttagttgaatattttcttttggagagattgtatattttaaaatactgtttagagtttatgagcatatattgcatttaaagaaagataaagcttctgaaatactactgcaattgcttcccttcttaaacagtataataaatgcttagttgtgatatgttaatgtgtgatgatatgattcttaaatacttacaataaacctcattcttaaata

SEQ ID NO: 140905 - DNA, 1642 bp, Homo sapiens
  Payload ID: 7640
  Gene Symbol: HAT1
  Gene Name: histone acetyltransferase 1
  ENST ID: ENST00000457761
  CDS Start-End: 40-417
attcgtccttcctcagccgcgggtgatcgtagctcggaaatggcgggatttggtgctatggagaaatttttggtagaatataagagtgcagtggagaagaaactggcagagtacaaatgtaacaccaacacagcaattgaactaaaattagttcgttttcctgaagatcttgaaaatgacattagaactttctttcctgagtatacccatcaactctttggggatgagcagatgatgttgagggcaaaattagacaaatcattccacctggattttgcacaaacacgaatgatttcctttctttactggaaaaggaagttgatttcaagccattcggaaccttacttcatacctactcagttctcagtccaacaggaggagaaaactttacctttcagatatataaggctgacatgacatgtagaggctttcgagaatatcatgaaaggcttcagacctttttgatgtggtttattgaaactgctagctttattgacgtggatgatgaaagatggcactactttctagtatttgagaagtataataaggatggagctacgctctttgcgaccgtaggctacatgacagtctataattactatgtgtacccagacaaaacccggccacgtgtaagtcagatgctgattttgactccatttcaaggtcaaggccatggtgctcaacttcttgaaacagttcatagatactacactgaatttcctacagttcttgatattacagcggaagatccatccaaaagctatgtgaaattacgagactttgtgcttgtgaagctttgtcaagatttgccctgtttttcccgggaaaaattaatgcaaggattcaatgaagatatggtgatagaggcacaacagaagttcaaaataaataagcaacacgctagaagggtttatgaaattcttcgactactggtaactgacatgagtgatgccgaacaatacagaagctacagactggatattaaaagaagactaattagcccatataaggtaggactttcaagaatcttaaacactgtattcttttcactgtttaaaacagaagaaaagctaccaaatatcagtatatgagagagtccaagtcattttgtaaaattaacttttacaaaagtagaaatattcttccagtaatttataaaaattctcactcatggccgggcgtggtggcccacacctgtaatcccagcactcagggaggccaaggcgggtggatcacctcaggtcagaagttcaagaccagcctggccaacgtggtgaaaccctgtctctactaaaaatacaaacattagctaggcttggtggtgggcgcctgtaatacagtgacttgggaggctgaagcaggagaatcgcttgaatccaggaggtggaggttgctgtgagccaagattgcaccattgcactccagcctgggtgacaagagcaaaactccatctgaaaagaaaagaaaagaaaagaaaaaaaacccgggtgcagtggctcacgcctgtaatcccagcactgtgggaggccgaggtaggtggatcacttgaggtcaggagttcaagaccaccctggccaacatggcgaaaccccatctctactaaaaatacaaaaattagctgggcatgataacacgtgcctgt

SEQ ID NO: 140906 - DNA, 1567 bp, Homo sapiens
  Payload ID: 7640
  Gene Symbol: HAT1
  Gene Name: histone acetyltransferase 1
  ENST ID: ENST00000412731
  CDS Start-End: 54-194
gagcgcgcgggttgattcgtccttcctcagccgcgggtgatcgtagctcggaaatggcgggatttggtgctatggagaaatttttggtagaatataagagtgcagtggagaagaaactggcagagtacaaatgtaacaccaacacagcaattgaactaaaattagtgaaactgcttttggttacaagggtctaaagatcctgttatactatattgctggtagcctgtcaacaatgttccgtgttgaatatgcatctaaagttgatgagaactttgactgtgtagaggcagatgatgttgagggcaaaattagacaaatcattccacctggattttgcacaaacacgaatgatttcctttctttactggaaaaggaagttgatttcaagccattcggaaccttacttcatacctactcagttctcagtccaacaggaggagaaaactttacctttcagatatataaggctgacatgacatgtagaggctttcgagaatatcatgaaaggcttcagacctttttgatgtggtttattgaaactgctagctttattgacgtggatgatgaaagatggcactactttctagtatttgagaagtataataaggatggagctacgctctttgcgaccgtaggctacatgacagtctataattactatgtgtacccagacaaaacccggccacgtgtaagtcagatgctgattttgactccatttcaaggtcaaggccatggtgctcaacttcttgaaacagttcatagatactacactgaatttcctacagttcttgatattacagcggaagatccatccaaaagctatgtgaaattacgagactttgtgcttgtgaagctttgtcaagatttgccctgtttttcccgggaaaaattaatgcaaggattcaatgaagatatggtgatagaggcacaacagaagttcaaaataaataagcaacacgctagaagggtttatgaaattcttcgactactggtaactgacatgagtgatgccgaacaatacagaagctacagactggatattaaaagaagactaattagcccatataagaaaaagcagagagatcttgctaagatgagaaaatgtctcagaccagaagaactgacaaaccagatgaaccaaatagaaataagcatgcaacatgaacagctggaagagagttttcaggaactagtggaagattaccggcgtgttattgaacgacttgctcaagagtaaagattatactgctctgtacaggaagcttgcaaattttctgtacaatgtgctgtgaaaaatctgatgactttaattttaaaatcttgtgacattttgcttatactaaaagttatctatctttagttgaatattttcttttggagagattgtatattttaaaatactgtttagagtttatgagcatatattgcatttaaagaaagataaagcttctgaaatactactgcaattgcttcccttcttaaacagtataataaatgcttagttgtgatatgttaatgtgtgatgatatgattcttaaatacttacaataaacctcattcttaaata

SEQ ID NO: 140907 - DNA, 4053 bp, Homo sapiens
  Payload ID: 7641
  Gene Symbol: HIRA
  Gene Name: histone cell cycle regulator
  Uniprot ID: P54198
  ENST ID: ENST00000263208
  CDS Start-End: 258-3311
gttgcccgggagccgcctgaggaggagcggcgcaggggatgcggctgtggtggcggcggcggcggccgagcgcgggtggcggctgtggcggcggaggggggcgcgggccggcgatggcgcggcggccctgagggcgcggggcgggcggcggccggagggcgggtggcgcgggaggaagcggcggcggtggctccatggcccgggcgcgctgagggacccggcgctcgcctcagcccggcggcggcggcggccgaacaatgaagctcctgaagccgacctgggtcaaccacaatggcaagccgattttttcagttgatattcaccctgacgggaccaagttcgcaactggaggacaagggcaggattctgggaaggttgtgatctggaatatgtctccagtcctccaggaggatgacgagaaggatgaaaatattcccaagatgctttgccagatggacaatcacttagcatgtgtgaactgtgtgcggtggtcaaacagtgggatgtatttagcttctgggggagatgacaaactgattatggtgtggaagcgggctacgtacatcggccccagcaccgtgttcggctccagtggtaagcttgccaatgtggagcagtggcggtgtgtctctatcctccggaatcattcaggcgatgtgatggatgtagcatggtctccccacgatgcctggctagcctcatgcagcgtggataacactgtcgtcatctggaatgctgtaaagttcccagaaattctagctactctgagaggtcattctggcttggtcaaagggttgacatgggaccctgttggtaaatacatagcttctcaagctgatgaccgcagcctaaaggtgtggaggacgctggactggcagttggagaccagcatcaccaagccttttgatgagtgtggaggaacgacccatgtgttgcggctcagctggtcacctgatgggcattacctggtgtctgcccatgccatgaacaactcaggccccactgcccagatcatcgaacgggagggatggaagaccaacatggactttgttgggcaccggaaagctgtgactgtcgtgaaattcaacccaaaaatcttcaaaaagaagcagaagaatgggagttctgcgaagcctagctgcccgtactgctgctgtgctgttggcagcaaggaccgctcgctttctgtctggctcacatgtctgaaacggccgctggtggtcatccatgaactgtttgacaaatccatcatggatatttcctggactctgaatgggctgggcatcttggtatgctctatggacggctctgtggcattcctcgacttctcccaggatgagcttggcgatcccctgagcgaggaggagaagagccgcattcaccagtccacctatggcaagagcctagccatcatgaccgaggcccagctctccacagccgtcattgagaaccctgagatgctcaagtaccagcgaaggcagcagcagcagcagctggaccagaagagtgctgcgaccagggagatgggctcagccacctcagtcgcaggcgttgtcaacggggagagtcttgaagatatcaggaagaatcttttgaagaaacaagttgagactcggacagcagatggccggagaagaatcacgcctctctgcatagcacagctggacactggggacttctccacggcattctttaacagcatccccctctcgggctccctggcgggcaccatgctctcttctcatagcagtccacagctactgccactggactccagtacccctaactccttcggcgcctcgaagccttgcacagagcctgtggtggctgccagtgccagacctgcaggcgattctgtcaataaagacagtatgaatgctacctctactcctgctgcattgtcaccttctgtgttaacgaccccgtccaagatcgaacccatgaaagcgtttgactcccggttcacagagcggtccaaagccacaccaggtgctcctgccctgaccagcatgactccgacagctgtggaaaggttaaaagagcagaaccttgtgaaagagctgaggccccgagacctcctggagagcagcagtgacagcgatgagaaagtccctttggctaaggcttcctcactgtccaagcgaaaacttgagcttgaggtagagacagtagagaagaagaagaaagggcggcctcggaaggactctcgtctcatgcctgtgtctctgtctgtccagtctccagctgccctaaccgcagagaaggaggccatgtgtctgtctgcaccagcacttgcactgaagctgccaattccaagcccccagagagcattcaccctccaggtcagctccgatccttccatgtacattgaggtggagaatgaagtgacagtggtggggggcgtgaagctgagccgcctgaagtgcaaccgggaagggaaggagtgggagacggtactcaccagccggatcctcactgctgcgggcagctgtgacgtggtgtgtgtcgcctgtgaaaaaaggatgctgtcagtgttctccacctgtggtcgccgtctcctctctcccatcctcctgccatccccgatctctactttgcattgcacaggctcctacgtcatggcgctcaccgctgcagccacactctctgtctgggatgttcacagacaggtggttgtggtgaaagaagagtctctacactccatcctggcaggaagtgatatgacggtatcacagatcttgctgacgcagcatggaatcccagtaatgaacctgtccgatgggaaggcgtactgctttaatccgtcactttccacatggaacctggtttctgacaagcaggactcactggctcagtgtgcagactttaggagcagcctgccatcccaggacgccatgctgtgctcaggaccgttagccataatccagggccgcacctccaactcgggaaggcaggctgcccggctcttctccgtgcctcatgtggtgcagcaagagaccaccctggcctacctagagaaccaggtggcagcagcactcaccctgcagtccagccacgagtaccgccattggctcctcgtctacgcacggtacctcgtaaacgaagggtttgaataccgacttcgagaaatatgcaaggacttactgggtccggttcactactccactggaagccagtgggagtcaacagtagtgggtctgcggaagagggagctgctgaaggagctgctaccagtcatcgggcagaacctccgattccagcgcctcttcaccgagtgtcaggaacagctcgacatcctgagggacaagtagcctgccccagcctgccctggctgcagcaagggcagggccacactctcgccgctgatgacatgcaggaccgcctctcacctgaccaggctgtagggggaggagacactggcaggagatgtgctgtcctgcaccagcgccagcccagctccctgggcagatgtgccctgtgtcctgggtctgacattgcctcaggagggggaagctcatccctccctccaagcccccgatgcggagctagggctggagctctgcccaggtgccctggggccagcaaggcagtcccaggcctgccgtctccagcacggccccaaggtggacactagcccctgctgctgcaggcaccatgctgcttcagcagtgacgattgagccatttgtgagagagaatccggaagcgttaggtattacagcagactgacctaagacctatgtaaaaggaaagctgttccaacacacggactatttttgtactagaatttgctaacttgtaatattgaatttcctttggccgataatcaggatttccctataagtcacttggacattggtcacttgtaggaaatttaaactctaattatgacagctacactgaaaaataattgtactgaaattaacttgtctatcttcatttggttttaatttttaaatgtttgtaaaaagagactgttttgggggaatggggcaaaggggtgggcgatttcttttgtaagtgtaaaataaatgaacacgcattgaataccaaa

SEQ ID NO: 140908 - DNA, 3395 bp, Homo sapiens
  Payload ID: 7641
  Gene Symbol: HIRA
  Gene Name: histone cell cycle regulator
  Uniprot ID: P54198
  ENST ID: ENST00000340170
  CDS Start-End: 221-2653
gatgcggctgtggtggcggcggcggcggccgagcgcgggtggcggctgtggcggcggaggggggcgcgggccggcgatggcgcggcggccctgagggcgcggggcgggcggcggccggagggcgggtggcgcgggaggaagcggcggcggtggctccatggcccgggcgcgctgagggacccggcgctcgcctcagcccggcggcggcggcggccgaacaatgaagctcctgaagccgacctgggtcaaccacaatggcaagccgattttttcagttgatattcaccctgacgggaccaagttcgcaactggaggacaagggcaggattctgggaaggttgtgatctggaatatgtctccagtcctccaggaggatgacgagaaggatgaaaatattcccaagatgctttgccagatggacaatcacttagcatgtgtgaactgtgtgcggtggtcaaacagtgggatgtatttagcttctgggggagatgacaaactgattatggtgtggaagcgggctacgtacatcggccccagcaccgtgttcggctccagtggtaagcttgccaatgtggagcagtggcggtgtgtctctatcctccggaatcattcaggcgatgtgatggatgtagcatggtctccccacgatgcctggctagcctcatgcagcgtggataacactgtcgtcatctggaatgctgtaaagttcccagaaattctagctactctgagaggtcattctggcttggtcaaagggttgacatgggaccctgttggtaaatacatagcttctcaagctgatgaccgcagcctaaaggtgtggaggacgctggactggcagttggagaccagcatcaccaagccttttgatgagtgtggaggaacgacccatgtgttgcggctcagctggtcacctgatgggcattacctggtgtctgcccatgccatgaacaactcaggccccactgcccagatcatcgaacgggagggatggaagaccaacatggactttgttgggcaccggaaagctgtgactgtcgtgaaattcaacccaaaaatcttcaaaaagaagcagaagaatgggagttctgcgaagcctagctgcccgtactgctgctgtgctgttggcagcaaggaccgctcgctttctgtctggctcacatgtctgaaacggccgctggtggtcatccatgaactgtttgacaaatccatcatggatatttcctggactctgaatgggctgggcatcttggtatgctctatggacggctctgtggcattcctcgacttctcccaggatgagcttggcgatcccctgagcgaggaggagaagagccgcattcaccagtccacctatggcaagagcctagccatcatgaccgaggcccagctctccacagccgtcattgagaaccctgagatgctcaagtaccagcgaaggcagcagcagcagcagctggaccagaagagtgctgcgaccagggagatgggctcagccacctcagtcgcaggcgttgtcaacggggagagtcttgaagatatcaggaagaatcttttgaagaaacaagttgagactcggacagcagatggccggagaagaatcacgcctctctgcatagcacagctggacactggggacttctccacggcattctttaacagcatccccctctcgggctccctggcgggcaccatgctctcttctcatagcagtccacagctactgccactggactccagtacccctaactccttcggcgcctcgaagccttgcacagagcctgtggtggctgccagtgccagacctgcaggcgattctgtcaataaagacagtatgaatgctacctctactcctgctgcattgtcaccttctgtgttaacgaccccgtccaagatcgaacccatgaaagcgtttgactcccggttcacagagcggtccaaagccacaccaggtgctcctgccctgaccagcatgactccgacagctgtggaaagggatgttcacagacaggtggttgtggtgaaagaagagtctctacactccatcctggcaggaagtgatatgacggtatcacagatcttgctgacgcagcatggaatcccagtaatgaacctgtccgatgggaaggcgtactgctttaatccgtcactttccacatggaacctggtttctgacaagcaggactcactggctcagtgtgcagactttaggagcagcctgccatcccaggacgccatgctgtgctcaggaccgttagccataatccagggccgcacctccaactcgggaaggcaggctgcccggctcttctccgtgcctcatgtggtgcagcaagagaccaccctggcctacctagagaaccaggtggcagcagcactcaccctgcagtccagccacgagtaccgccattggctcctcgtctacgcacggtacctcgtaaacgaagggtttgaataccgacttcgagaaatatgcaaggacttactgggtccggttcactactccactggaagccagtgggagtcaacagtagtgggtctgcggaagagggagctgctgaaggagctgctaccagtcatcgggcagaacctccgattccagcgcctcttcaccgagtgtcaggaacagctcgacatcctgagggacaagtagcctgccccagcctgccctggctgcagcaagggcagggccacactctcgccgctgatgacatgcaggaccgcctctcacctgaccaggctgtagggggaggagacactggcaggagatgtgctgtcctgcaccagcgccagcccagctccctgggcagatgtgccctgtgtcctgggtctgacattgcctcaggagggggaagctcatccctccctccaagcccccgatgcggagctagggctggagctctgcccaggtgccctggggccagcaaggcagtcccaggcctgccgtctccagcacggccccaaggtggacactagcccctgctgctgcaggcaccatgctgcttcagcagtgacgattgagccatttgtgagagagaatccggaagcgttaggtattacagcagactgacctaagacctatgtaaaaggaaagctgttccaacacacggactatttttgtactagaatttgctaacttgtaatattgaatttcctttggccgataatcaggatttccctataagtcacttggacattggtcacttgtaggaaatttaaactctaattatgacagctacactgaaaaataattgtactgaaattaacttgtctatcttcatttggttttaatttttaaatgtttgtaaaaagagactgttttgggggaatggggcaaaggggtgggcgatttcttttgtaagtgtaaaataaatgaacacgcattgaataccaaa

SEQ ID NO: 140909 - DNA, 453 bp, Homo sapiens
  Payload ID: 7641
  Gene Symbol: HIRA
  Gene Name: histone cell cycle regulator
  ENST ID: ENST00000452818
  CDS Start-End: 1-160
ggcctgcgaacagtggcagcgcgacctggccagctgccgcgactgggaggagcgccggaacgccgaggcccaggcaagccgattttttcagttgatattcaccctgacgggaccaagttcgcaactggaggacaagggcaggattctgggaaggttgtgatctggaatatgtctccagtcctccaggaggatgacgagaaggatgaaaatattcccaagatgctttgccagatggacaatcacttagcatgtgtgaactgtgtgcggtggtcaaacagtgggatgtatttagcttctgggggagatgacaaactgattatggtgtggaagcgggctacgtacatcggccccagcaccgtgttcggctccagtggtaagcttgccaatgtggagcagtggcggtgtgtctctatcctccggaatcattcaggcgatgtgatggatgtagcatgg

SEQ ID NO: 140910 - DNA, 648 bp, Homo sapiens
  Payload ID: 7642
  Gene Symbol: HIST1H1A
  Gene Name: histone cluster 1, H1a
  Uniprot ID: Q02539
  ENST ID: ENST00000244573
  CDS Start-End: 1-648
atgtctgaaacagtgcctcccgcccccgccgcttctgctgctcctgagaaacctttagctggcaagaaggcaaagaaacctgctaaggctgcagcagcctccaagaaaaaacccgctggcccttccgtgtcagagctgatcgtgcaggctgcttcctcctctaaggagcgtggtggtgtgtcgttggcagctcttaaaaaggcgctggcggccgcaggctacgacgtggagaagaacaacagccgcattaagctgggcattaagagcctggtaagcaagggaacgttggtgcagacaaagggtaccggagcctcgggttccttcaagctcaacaagaaggcgtcctccgtggaaaccaagcccggcgcctcaaaggtggctacaaaaactaaggcaacgggtgcatctaaaaagctcaaaaaggccacgggggctagcaaaaagagcgtcaagactccgaaaaaggctaaaaagcctgcggcaacaaggaaatcctccaagaatccaaaaaaacccaaaactgtaaagcccaagaaagtagctaaaagccctgctaaagctaaggctgtaaaacccaaggcggccaaggctagggtgacgaagccaaagactgccaaacccaagaaagcggcacccaagaaaaagtaa

SEQ ID NO: 140911 - DNA, 681 bp, Homo sapiens
  Payload ID: 7643
  Gene Symbol: HIST1H1B
  Gene Name: histone cluster 1, H1b
  Uniprot ID: P16401
  ENST ID: ENST00000331442
  CDS Start-End: 1-681
atgtcggaaaccgctcctgccgagacagccaccccagcgccggtggagaaatccccggctaagaagaaggcaactaagaaggctgccggcgccggcgctgctaagcgcaaagcgacggggcccccagtctcagagctgatcaccaaggctgtggctgcttctaaggagcgcaatggcctttctttggcagcccttaagaaggccttagcggccggtggctacgacgtggagaagaataacagccgcattaagctgggcctcaagagcttggtgagcaagggcaccctggtgcagaccaagggcactggtgcttctggctcctttaaactcaacaagaaggcggcctccggggaagccaagcccaaagccaagaaggcaggcgccgctaaagctaagaagcccgcgggggccacgcctaagaaggccaagaaggctgcaggggcgaaaaaggcagtgaagaagactccgaagaaggcgaagaagcccgcggcggctggcgtcaaaaaggtggcgaagagccctaagaaggccaaggccgctgccaaaccgaaaaaggcaaccaagagtcctgccaagcccaaggcagttaagccgaaggcggcaaagcccaaagccgctaagcccaaagcagcaaaacctaaagctgcaaaggccaagaaggcggctgccaaaaagaagtag

SEQ ID NO: 140912 - DNA, 642 bp, Homo sapiens
  Payload ID: 7644
  Gene Symbol: HIST1H1C
  Gene Name: histone cluster 1, H1c
  Uniprot ID: P16403
  ENST ID: ENST00000343677
  CDS Start-End: 1-642
atgtccgagactgctcctgccgctcccgctgccgcgcctcctgcggagaaggcccctgtaaagaagaaggcggccaaaaaggctgggggtacgcctcgtaaggcgtctggtcccccggtgtcagagctcatcaccaaggctgtggccgcctctaaagagcgtagcggagtttctctggctgctctgaaaaaagcgttggctgccgccggctatgatgtggagaaaaacaacagccgtatcaaacttggtctcaagagcctggtgagcaagggcactctggtgcaaacgaaaggcaccggtgcttctggctcctttaaactcaacaagaaggcagcctccggggaagccaagcccaaggttaaaaaggcgggcggaaccaaacctaagaagccagttggggcagccaagaagcccaagaaggcggctggcggcgcaactccgaagaagagcgctaagaaaacaccgaagaaagcgaagaagccggccgcggccactgtaaccaagaaagtggctaagagcccaaagaaggccaaggttgcgaagcccaagaaagctgccaaaagtgctgctaaggctgtgaagcccaaggccgctaagcccaaggttgtcaagcctaagaaggcggcgcccaagaagaaatag

SEQ ID NO: 140913 - DNA, 666 bp, Homo sapiens
  Payload ID: 7645
  Gene Symbol: HIST1H1D
  Gene Name: histone cluster 1, H1d
  Uniprot ID: P16402
  ENST ID: ENST00000244534
  CDS Start-End: 1-666
atgtcggagactgctccacttgctcctaccattcctgcacccgcagaaaaaacacctgtgaagaaaaaggcgaagaaggcaggcgcaactgctgggaaacgcaaagcatccggacccccagtatctgagcttatcaccaaggcagtggcagcttctaaggagcgcagcggcgtttctctggccgcgcttaagaaagcgcttgcggctgctggctacgatgtagaaaaaaacaacagccgtatcaagcttggcctcaagagcttggtgagcaaaggtactctggtgcagaccaaaggtaccggtgcttctggctccttcaaactcaacaagaaagcggcttccggggaaggcaaacccaaggccaaaaaggctggcgcagccaagcctaggaagcctgctggggcagccaagaagcccaagaaggtggctggcgccgctaccccgaagaaaagcatcaaaaagactcctaagaaggtaaagaagccagcaaccgctgctgggaccaagaaagtggccaagagtgcgaaaaaggtgaaaacacctcagccaaaaaaagctgccaagagtccagctaaggccaaagcccctaagcccaaggcggccaagcctaagtcggggaagccgaaggttacaaaggcaaagaaggcagctccgaagaaaaagtga

SEQ ID NO: 140914 - DNA, 754 bp, Homo sapiens
  Payload ID: 7646
  Gene Symbol: HIST1H1E
  Gene Name: histone cluster 1, H1e
  Uniprot ID: P10412
  ENST ID: ENST00000304218
  CDS Start-End: 38-697
ccggctcgaattgctctcgctcacgcttgccttcaacatgtccgagactgcgcctgccgcgcccgctgctccggcccctgccgagaagactcccgtgaagaagaaggcccgcaagtctgcaggtgcggccaagcgcaaagcgtctgggcccccggtgtccgagctcattactaaagctgttgccgcctccaaggagcgcagcggcgtatctttggccgctctcaagaaagcgctggcagccgctggctatgacgtggagaagaacaacagccgcatcaagctgggtctcaagagcctggtgagcaagggcaccctggtgcagaccaagggcaccggcgcgtcgggttccttcaaactcaacaagaaggcggcctctggggaagccaagcctaaggctaaaaaggcaggcgcggccaaggccaagaagccagcaggagcggcgaagaagcccaagaaggcgacgggggcggccacccccaagaagagcgccaagaagaccccaaagaaggcgaagaagccggctgcagctgctggagccaaaaaagcgaaaagcccgaaaaaggcgaaagcagccaagccaaaaaaggcgcccaagagcccagcgaaggccaaagcagttaaacccaaggcggctaaaccaaagaccgccaagcccaaggcagccaagccaaagaaggcggcagccaagaaaaagtagaaagttcctttggccaactgcttagaagcccaacacaacccaaaggctcttttcaga

SEQ ID NO: 140915 - DNA, 718 bp, Homo sapiens
  Payload ID: 7647
  Gene Symbol: HIST1H1T
  Gene Name: histone cluster 1, H1t
  Uniprot ID: P22492
  ENST ID: ENST00000338379
  CDS Start-End: 44-667
catgcttttcgctggttattacatcttgcgtttctctgttgttatgtctgaaaccgtgcctgcagcttctgccagtgctggtgtagccgctatggagaaacttccaaccaagaagcgagggaggaagccggctggcttgataagtgcaagtcgcaaagtgccgaacctctctgtgtccaagttgatcaccgaggccctttcagtgtcacaggaacgagtaggtatgtctttggttgcgctcaagaaggcattggccgctgctggctacgacgtagagaagaataacagccgcatcaaactgtccctcaagagcttagtgaacaagggaatcctggtgcaaaccaggggtactggtgcttccggttcctttaagcttagtaagaaggtgattcctaaatctaccagaagcaaggctaaaaagtcagtttctgccaagaccaagaagctggttttatccagggactccaagtcaccaaagactgctaaaaccaataagagagccaagaagccgagagcgacaactcctaaaactgttaggagcgggagaaaggctaaaggagccaagggtaagcaacagcagaagagcccagtgaaggcaagggcttcgaagtcaaaattgacccaacatcatgaagttaatgttagaaaggccacatctaagaagtaaagagctttccgggaggccaatttggaaagaacccaaaggctcttttaagag

SEQ ID NO: 140916 - DNA, 396 bp, Homo sapiens
  Payload ID: 7648
  Gene Symbol: HIST1H2AA
  Gene Name: histone cluster 1, H2aa
  Uniprot ID: Q96QV6
  ENST ID: ENST00000297012
  CDS Start-End: 1-396
atgtctggacgagggaagcagggaggaaaagcacgcgccaagtctaagtctcgctcttctagagcgggtttgcagtttcccgtaggccggatccatcgtctgcttcgtaagggaaactatgcagagcggataggggcaggcgcaccagtgtatttggcggcagtgttagagtatctcacagcagaaatccttgagctggcaggcaatgcgtctcgcgataacaaaaaaactcgcattattccccgccacctgcagctagcgatccgcaatgatgaggaactcaataagcttttgggcggcgtgaccattgcccagggcggagtcctgcctaacattcaggcagtgctgctgcccaagaagactgagagtcaccaccataaagcccaaagcaagtaa

SEQ ID NO: 140917 - DNA, 393 bp, Homo sapiens
  Payload ID: 7649
  Gene Symbol: HIST1H2AB
  Gene Name: histone cluster 1, H2ab
  Uniprot ID: P04908
  ENST ID: ENST00000615868
  CDS Start-End: 1-393
atgtctggtcgcggcaaacaaggcggtaaagctcgcgccaaggctaagactcggtcttctcgtgcaggtttgcagtttcctgtgggccgagtgcaccgcctgctccgcaaaggcaactactccgagcgcgtcggggctggcgcgccggtgtatctcgcggcggtgcttgagtacctgaccgccgagatcctggagctggcgggcaatgcggcccgcgacaacaagaagacccgcatcatcccgcgccacctgcaattggccatccgcaatgacgaggagcttaataaactcttggggcgtgtgaccatcgcgcagggtggcgttttgcctaatattcaggcggtgctgctgcctaagaaaactgagagccatcataaggccaagggaaagtga

SEQ ID NO: 140918 - DNA, 1668 bp, Homo sapiens
  Payload ID: 7650
  Gene Symbol: HIST1H2AC
  Gene Name: histone cluster 1, H2ac
  Uniprot ID: Q93077
  ENST ID: ENST00000314088
  CDS Start-End: 89-481
aaagcggccatgttttacatatttcttgattttgtttgttttctcgtgagcttaggccgctggttttggtgatttttgtctgattgcaatgtctggacgtggtaagcaaggaggcaaagctcgcgccaaagcgaaatcccgctcttctcgcgctggtctccagttcccggtgggccgagtgcaccgcctgctccgtaaaggcaactacgcagagcgggttggggcaggcgcgccggtgtacctggcggcggtgttagagtacctgaccgccgagatcctggagctggccggcaacgcggctcgcgacaacaagaagactcgcatcatcccgcgccacttgcagctggccatccgcaacgacgaggagctcaacaaactgctaggccgggtgaccattgctcagggcggcgtccttcctaacatccaggccgtgcttctgcctaagaagaccgagagtcaccacaaggccaagggcaagtgatttgacaggtatctgagctcccggaaacgctatcaaacccaaaggctcttttcagagcccccctaccgtttcaaaggaagagctaacctcactgcttgtaggtagaaggaaaaaaggcactaaggttgcaaaagcttctcatttcagagagatgccaggatcctaagtgcctgccaaacttaccaattctaaggaataagtggatggatggcattactgattcctacattactgattgattctgcatccgcaaattgttttattaaaaacattctacatcatgtgtggggagataaggaggataaaatgaagagaaagaatattattgaggggaagttcttctgaatacaaaatgtgtttaattttttaaataagtattacattcacagggttcaaactatttgaagtaaagagattatatataaagaatccatccctcaacttacccaggtggtcacttttctttttcttgtgtatctgcccagtattcattcctgctgatatcagtcaataatgaatgatacgtgttttcttcacttttttcattcttgtcaggtagcagactgtgtagacttttctgcacttgcccttttcataacaatctatcttggagaactttccctatgagaacatacagagcttcctgtacacagttgcatgtactgcattatgcaaatgcattatattttatgtaacctgtccactgttggtaggcacttgagttgttttagtcttttgctatcaaacagttctgggatgattaaccctgatttactgcaaaattgaaattgctctgctattctgctggaatggtggtaagtgaactgaaaattccagtcactcttgggctagactcaacgttcttaaaaactatgtggccatcaccaaattagttattttgaaccttaatttcttcacctctaaaatggaggtaatacttaccttaagtggctatgagaatgaagatcatgtgtatgaattgttggtgctctaaagaacagcacaaataaaattattttcaaatttaattttaattgaactatgtgtaatttcttaattttgaaataattttatttgtaatgtgcataatcttatttaatgtataatgtatacattgtaatagaaacagatttcccaaattccagcctggcatgaggtaataaaaggtaatgcaaagggagaggaaa

SEQ ID NO: 140919 - DNA, 1654 bp, Homo sapiens
  Payload ID: 7650
  Gene Symbol: HIST1H2AC
  Gene Name: histone cluster 1, H2ac
  Uniprot ID: Q93077
  ENST ID: ENST00000377791
  CDS Start-End: 89-481
aaagcggccatgttttacatatttcttgattttgtttgttttctcgtgagcttaggccgctggttttggtgatttttgtctgattgcaatgtctggacgtggtaagcaaggaggcaaagctcgcgccaaagcgaaatcccgctcttctcgcgctggtctccagttcccggtgggccgagtgcaccgcctgctccgtaaaggcaactacgcagagcgggttggggcaggcgcgccggtgtacctggcggcggtgttagagtacctgaccgccgagatcctggagctggccggcaacgcggctcgcgacaacaagaagactcgcatcatcccgcgccacttgcagctggccatccgcaacgacgaggagctcaacaaactgctaggccgggtgaccattgctcagggcggcgtccttcctaacatccaggccgtgcttctgcctaagaagaccgagagtcaccacaaggccaagggcaagtgatttgacaggtatctgagctcccggaaacgctatcaaacccaaaggctcttttcagagcccccctaccgtttcaaaggaagagctaacctcactgcttgtaggtagaaggaaaaaaggcactaaggttgcaaaagcttctcatttcagagagatgccaggatcctaagtgcctgccaaacttaccaattctaaggaataagtggatggatggcattactgattcctacattactgattgattctgcatccgcaaattgttttattaaaaacattctacatcatgtgtggggagataaggaggataaaatgaagagaaagaatattattgaggggaagttcttctgaatacaaaatgtgtttaattttttaaataagtattacattcacagggttcaaactatttgaagtaaagagattatatataaagaatccatccctcaacttacccaggtggtcacttttctttttcttgtgtatctgcccagtattcattcctgctgatatcagtcaataatgaatgatacgtgttttcttcacttttttcattcttgtcaggtagcagactgtgtagacttttctgcacttgcccttttcataacaatctatcttggagaactttccctatgagaacatacagagcttcctgtacacagttgcatgtactgcattatgcaaatgcattatattttatgtaacctgtccactgttggtaggcacttgagttgttttagtcttttgctatcaaacagttctgggatgattaaccctgatttactgcaaaattgaaattgctctgctattctgctggaatggtggtaagtgaactgaaaattccagtcactcttgggctagactcaacgttcttaaaaactatgtggccatcaccaaattagttattttgaaccttaatttcttcacctctaaaatggaggtaatacttaccttaagtggctatgagaatgaagatcatgtgtatgaattgttggtgctctaaagaacagcacaaataaaattattttcaaatttaattttaattgaactatgtgtaatttcttaattttgaaataattttatttgtaatgtgcataatcttatttaatgtataatgtatacattgtaatagaaacagatttcccaaattccagcctggcatgaggtaataaaaggtaatgc

SEQ ID NO: 140920 - DNA, 1462 bp, Homo sapiens
  Payload ID: 7650
  Gene Symbol: HIST1H2AC
  Gene Name: histone cluster 1, H2ac
  Uniprot ID: Q93077
  ENST ID: ENST00000602637
  CDS Start-End: 31-423
gctggttttggtgatttttgtctgattgcaatgtctggacgtggtaagcaaggaggcaaagctcgcgccaaagcgaaatcccgctcttctcgcgctggtctccagttcccggtgggccgagtgcaccgcctgctccgtaaaggcaactacgcagagcgggttggggcaggcgcgccggtgtacctggcggcggtgttagagtacctgaccgccgagatcctggagctggccggcaacgcggctcgcgacaacaagaagactcgcatcatcccgcgccacttgcagctggccatccgcaacgacgaggagctcaacaaactgctaggccgggtgaccattgctcagggcggcgtccttcctaacatccaggccgtgcttctgcctaagaagaccgagagtcaccacaaggccaagggcaagtgatttgacaggttgcaaaagcttctcatttcagagagatgccaggatcctaagtgcctgccaaacttaccaattctaaggaataagtggatggatggcattactgattcctacattactgattgattctgcatccgcaaattgttttattaaaaacattctacatcatgtgtggggagataaggaggataaaatgaagagaaagaatattattgaggggaagttcttctgaatacaaaatgtgtttaattttttaaataagtattacattcacagggttcaaactatttgaagtaaagagattatatataaagaatccatccctcaacttacccaggtggtcacttttctttttcttgtgtatctgcccagtattcattcctgctgatatcagtcaataatgaatgatacgtgttttcttcacttttttcattcttgtcaggtagcagactgtgtagacttttctgcacttgcccttttcataacaatctatcttggagaactttccctatgagaacatacagagcttcctgtacacagttgcatgtactgcattatgcaaatgcattatattttatgtaacctgtccactgttggtaggcacttgagttgttttagtcttttgctatcaaacagttctgggatgattaaccctgatttactgcaaaattgaaattgctctgctattctgctggaatggtggtaagtgaactgaaaattccagtcactcttgggctagactcaacgttcttaaaaactatgtggccatcaccaaattagttattttgaaccttaatttcttcacctctaaaatggaggtaatacttaccttaagtggctatgagaatgaagatcatgtgtatgaattgttggtgctctaaagaacagcacaaataaaattattttcaaatttaattttaattgaactatgtgtaatttcttaattttgaaataattttatttgtaatgtgcataatcttatttaatgtataatgtatacattgtaatagaaacagatttcccaaattccagcctggcatga

SEQ ID NO: 140921 - DNA, 393 bp, Homo sapiens
  Payload ID: 7651
  Gene Symbol: HIST1H2AD
  Gene Name: histone cluster 1, H2ad
  Uniprot ID: P20671
  ENST ID: ENST00000341023
  CDS Start-End: 1-393
atgtccggacgcggcaagcaaggcggaaaggcccgagctaaggctaagacccgctcttcgcgggccggactccagttccctgtgggccgcgtacaccgcttgctccgcaagggcaactactccgagcgagtcggggccggcgcgccagtgtatctggcggcggtgttggagtacctgaccgccgagatcctggagctggcgggcaacgccgcccgcgacaacaagaagacccgcatcatcccccgacacctgcagctggccatccgcaacgacgaggagctaaacaagttgctgggtaaagtcacaattgctcagggcggtgttctgcccaacatccaggctgtactgctccccaagaagactgagagtcaccacaaggccaagggcaagtaa

SEQ ID NO: 140922 - DNA, 509 bp, Homo sapiens
  Payload ID: 7652
  Gene Symbol: HIST1H2AE
  Gene Name: histone cluster 1, H2ae
  Uniprot ID: P04908
  ENST ID: ENST00000303910
  CDS Start-End: 1-393
atgtctggacgtggaaagcaaggcggcaaagctcgggcaaaagctaaaacgcgttcttccagggccggtcttcagtttccagttggccgtgtgcaccgcctcctccgcaaaggcaactactccgaacgagtcggggccggcgctccagtgtacctggcagcggtgctggaatatctgacggccgagatcttagagctagctggcaacgcggctcgcgacaataagaagacccgcatcatcccgcgccacctgcagctagccatccgcaacgacgaggagctaaataagcttctaggtcgcgtgaccatcgcgcagggcggtgtcctgcccaacatccaggccgtattgctgcctaagaagacggagagccaccataaggccaagggcaagtgaaatgattactagtcaaatccgtcagtgatcccgagtcccagaaaccaaaggctcttttcagagccacccaccttttctgtaaagtgctggaatacacatacgatgcctgaaatctc

SEQ ID NO: 140923 - DNA, 2250 bp, Homo sapiens
  Payload ID: 7653
  Gene Symbol: HIST1H2AG
  Gene Name: histone cluster 1, H2ag
  Uniprot ID: P0C0S8
  ENST ID: ENST00000359193
  CDS Start-End: 31-423
tgtggttgctcgtagtgagttgcgctcgctatgtctggacgtggcaagcagggaggcaaagcccgcgctaaggccaagactcgctcttctagggccggtctccagttccccgtgggccgagtgcaccgcctgctccgcaaaggcaactatgccgagcgggtcggggccggcgcgccggtgtatctggcagcggtgctggagtacctgaccgccgagatcctggaactggcgggcaacgcggcccgcgacaacaagaagacccgcatcatcccgcgtcatctccaactggccatccgcaacgacgaggagctcaacaagctgctgggcaaagtcaccatcgcacagggcggtgtcctgcccaacattcaggccgtgctactgcccaaaaagactgagagccaccacaaggcgaagggcaagtaactatctgtactagtttgtggcagctcaagtaaaatcgagtccaaaccaacggctcttttcagggccacccacgtcttctctaaaagaacttaacatttattccatgtgaaagaaagtgagacatggacaagactctagtcataaattacccatctttttgaaaacagtgtagcgaacaccgcagatttaaaagaaaaactagagggaaggtggtccagattttaccacgcttaaaagttaagatgtgaacaaatctcttaggccattacttaattttaaacttaatcagtgtgtgtccacagagcaccagtggcttcgtgagttcttgaagcactttggcccaaaagagttatcgcccgggctagaatttagcagacagctgttccacgcgggccagggcggcatgaagaagtcccgccgctacgtgcccggcacagtggccctgcgcgacgttcggcgctaccagaactccgagctgctgatcagcaagctgccgctcctgcgagagctcggcggtgacgccgctgcacgagagcgaggctgaagaactttgtgacacaatagtccacctccctgcaaaggctctgtcagagactcacatctttcctgatggatagctgtgaagcattctcttacccaccctactgcatgttgcaaagtattcctttaaaatgaagtgagtaaaatactgggatgacgttatctggagcccaagaaagatggctcatttggaaaggcctaatatcccaagttgcttacctagaagaacttgacaggatagttaataataaaccttaaaacccatgaagaaatctgaggtaaagtgttagcacacagactgttaaaatgtctgcctcacagataggagggaaaatatatagaggattataatatggttcaacaaatgttgatgagtattagaaatgtacattagaaatattagaaatgtttatgactattagaaaagtacagggtattgggcgttcctgacacaaactgaggcctcctagcaagactggcagttttctgtaaaggagggttatttactacggtagtgcaaataacttttggtgttgtagctaaataaggaatactcatgccaagattgcacaattgtgcctcctccctctgttcactgaactctgatgtaattttttttttttttttgagacggagtctcgctctgtcgcccaggctggagtgcagtggcgctatctcggctcactgcaagctccgcctcccgggttcacgccattctcctgcctcagcctcctgagtagctggggctacaggcgtctgccaccatgcccagctacttttttgtatttttagtagatacggggtttcaccgtgttagccaggatggtcttgatgtcctgacctcgtgatccaccggcctcggcctcccaaagtgctgggattaccggcgtaagccaccacgcccggcccactctgaagtaatcttaagaagacgttaactcatttttcttgtgtattgtagacacttttggctgtctggtaacatggaaaatctcagaatgatgttttaagtatataaaatgccaaacaaagttaaattacagttatcaaagtatttttaaaacttcatagtgataaatgagactatatagttatattgttaatatagttaacacattacatgatttggtgagcctaattgctgttactaattagaggagtaaaaatgtttcacgataactcagcaattgtaatgagaaatgaaacatctaatgtcttttgggttacaaagtaacaggtactgagatttgtggcctaaattcataataaagtgaaatgttcaagttc

SEQ ID NO: 140924 - DNA, 387 bp, Homo sapiens
  Payload ID: 7654
  Gene Symbol: HIST1H2AH
  Gene Name: histone cluster 1, H2ah
  Uniprot ID: Q96KK5
  ENST ID: ENST00000377459
  CDS Start-End: 1-387
atgtctggacgtggcaagcaaggcggtaaagctcgcgccaaggccaagacccgctcttctcgggctgggcttcagttccccgtgggccgagtgcaccgcctgctccgcaagggtaattatgccgagcgggttggagccggcgcgccagtgtacctggctgcggtgctggagtacctgaccgctgagatcctggagctggctggcaatgcggcccgcgacaacaagaagacccgtatcatcccgcgtcacctccaactggccatccgcaacgacgaggagctcaacaagctgctgggcaaagtcaccatcgcgcagggtggtgtcttgcccaatatccaggccgtgctgctgcctaagaagactgagagccaccataaggccaaataa

SEQ ID NO: 140925 - DNA, 503 bp, Homo sapiens
  Payload ID: 7655
  Gene Symbol: HIST1H2AI
  Gene Name: histone cluster 1, H2ai
  Uniprot ID: P0C0S8
  ENST ID: ENST00000358739
  CDS Start-End: 12-404
ggccttttgccatgtctgggcgtggcaagcagggaggcaaagctcgcgccaaggccaagacccgctcttctcgggccgggcttcagtttcccgtaggccgagtgcatcgcctgctccgcaaaggcaactatgcggagcgggtcggtgctggagcgccggtgtacctggcggcggtgctggagtacctgaccgccgagatcctggagctggctggcaacgcggcccgcgacaacaagaagactcgcatcatcccgcgtcacctccagctggccatccgcaacgatgaggagctcaacaagcttctgggcaaagtcaccatcgcacagggtggcgtcctgcccaacatccaggccgtgctactgcccaagaagaccgagagccaccacaaggcgaagggcaagtagaagcctggattagtttgcagcaactcaatcccaaaggaaccaaaggctcttttcagagccacctacaattttgtggaagaactgagcactatgtttaat

SEQ ID NO: 140926 - DNA, 387 bp, Homo sapiens
  Payload ID: 7656
  Gene Symbol: HIST1H2AJ
  Gene Name: histone cluster 1, H2aj
  Uniprot ID: Q99878
  ENST ID: ENST00000333151
  CDS Start-End: 1-387
atgtctgggcgtggtaagcagggaggcaaagctcgcgccaaggccaagacccgctcttctcgggccgggcttcagtttcccgtaggccgagtgcatcgcctgctccgcaaaggcaactatgcggagcgggtcggtgctggagcgccggtgtacctggcggcggtgctggagtacctgaccgccgagatcctggagctggctggcaacgcggcccgcgacaacaagaagactcgcatcatcccgcgtcacctccagctggccatccgcaacgatgaggagctcaacaagcttctgggcaaagtcaccatcgcacagggtggcgtcctgcccaacatccaggccgtgctgctgccaaagaaaactgagagccaccacaagactaagtaa

SEQ ID NO: 140927 - DNA, 393 bp, Homo sapiens
  Payload ID: 7657
  Gene Symbol: HIST1H2AK
  Gene Name: histone cluster 1, H2ak
  Uniprot ID: P0C0S8
  ENST ID: ENST00000618958
  CDS Start-End: 1-393
atgtcgggacgtggcaagcagggcggcaaagctcgcgccaaggctaagacccgttcttcaagggcgggtcttcagttcccagtgggccgagtgcaccgactgctccgcaagggcaactacgctgagcgggtcggtgccggagcgccggtgtacctggcggcggtgttggagtacctaaccgccgagatcctggaactggctggcaacgcggcccgcgacaacaagaagacccgcatcatcccgcgccacttgcagctggccatccgcaacgacgaggagctcaacaagctgcttggtaaagtgaccatcgcccagggtggtgtcctgcccaatatccaggccgtgctgctgcctaagaaaactgagagccaccacaaggccaagggcaagtag

SEQ ID NO: 140928 - DNA, 393 bp, Homo sapiens
  Payload ID: 7658
  Gene Symbol: HIST1H2AL
  Gene Name: histone cluster 1, H2al
  Uniprot ID: P0C0S8
  ENST ID: ENST00000613174
  CDS Start-End: 1-393
atgtcgggacgcggcaagcagggaggcaaagctcgcgccaaagccaagacccgctcttctcgtgccggtctccagttccccgtgggccgagtgcaccgactgctccgcaagggcaactatgctgagcgggtcggggccggcgcgccggtgtacctggcggcggtgctggagtacctgactgccgagatcctggagctggcgggcaacgccgcccgcgacaacaagaagacccgcattatcccgcgccacttgcagctggccatccgcaacgacgaggagctcaacaagctgctgggcaaagtaaccatcgctcagggtggtgtcctgcccaacatccaggctgtgctactgcccaagaagaccgagagtcaccacaaggccaaaggcaaataa

SEQ ID NO: 140929 - DNA, 393 bp, Homo sapiens
  Payload ID: 7659
  Gene Symbol: HIST1H2AM
  Gene Name: histone cluster 1, H2am
  Uniprot ID: P0C0S8
  ENST ID: ENST00000359611
  CDS Start-End: 1-393
atgtctggacgtggcaagcagggcggcaaggctcgcgccaaggccaaaacccgctcctctagagctgggctccaatttcctgtaggacgagtgcaccgcctgctccgcaagggcaactacgctgagcgggtcggggccggcgcgccggtttacctggcggcggtgctggagtacctaactgccgagatcctggagctggcgggcaacgcagcccgcgacaacaaaaagacccgcatcatcccgcgccacttgcagctggccatccgcaacgacgaggagctcaacaagctgcttggtaaagttaccatcgctcagggcggtgttctgcctaacatccaggccgtactgctccccaagaagactgagagccaccacaaagctaagggcaagtaa

SEQ ID NO: 140930 - DNA, 384 bp, Homo sapiens
  Payload ID: 7660
  Gene Symbol: HIST1H2BA
  Gene Name: histone cluster 1, H2ba
  Uniprot ID: Q96A08
  ENST ID: ENST00000274764
  CDS Start-End: 1-384
atgccggaggtgtcatctaaaggtgctaccatttccaagaagggctttaagaaagctgtcgttaagacccagaaaaaggaaggcaaaaagcgcaagaggacccgtaaggagagttattctatttacatctacaaagtgctaaagcaggtccatccggacactggcatctcttcgaaagctatgagcattatgaattccttcgtcactgatatctttgagcgtatagcgagcgaggcatcacgtttggctcactacagcaagcgctccaccatttcttccagagagattcagacagcagtgcgcttgctactgccgggagagctggctaaacatgctgtgtctgagggcaccaaggctgtcactaagtacaccagctccaagtaa

SEQ ID NO: 140931 - DNA, 381 bp, Homo sapiens
  Payload ID: 7661
  Gene Symbol: HIST1H2BB
  Gene Name: histone cluster 1, H2bb
  Uniprot ID: P33778
  ENST ID: ENST00000615966
  CDS Start-End: 1-381
atgcctgaaccctctaagtctgctccagcccctaaaaagggttctaagaaggctatcactaaggcgcagaagaaggatggtaagaagcgtaagcgcagccgcaaggagagctattctatctatgtgtacaaggttctgaagcaggtccaccccgacaccggcatctcatccaaggccatggggatcatgaattccttcgtcaacgacatcttcgagcgcatcgcgggcgaggcttctcgcctggctcactacaataagcgctcgaccatcacctccagggagattcagacggctgtgcgcctgctgctgcctggggagctggctaagcatgctgtgtccgagggcactaaggcagttaccaagtacactagctctaaataa

SEQ ID NO: 140932 - DNA, 431 bp, Homo sapiens
  Payload ID: 7661
  Gene Symbol: HIST1H2BB
  Gene Name: histone cluster 1, H2bb
  ENST ID: ENST00000629531
  CDS Start-End: 1-381
atgcctgagccagccaagtctgctcccgccccgaagaagggctccaagaaggcagtgaccaaagcgcagaagaaagatggcaagaagcgcaagcgcagccgcaaggagagttactctgtgtacgtgtacaaggttctgaagcaggtccaccccgacaccggcatctcatccaaggccatggggatcatgaattccttcgtcaacgacatcttcgagcgcatcgcgggcgaggcttctcgcctggctcactacaataagcgctcgaccatcacctccagggagattcagacggctgtgcgcctgctgctgcctggggagctggctaagcatgctgtgtccgagggcactaaggcagttaccaagtacactagctctaaataagtgcttatgtaagcacttccaaacccaaaggctcttttcagagccaccta

SEQ ID NO: 140933 - DNA, 659 bp, Homo sapiens
  Payload ID: 7662
  Gene Symbol: HIST1H2BC
  Gene Name: histone cluster 1, H2bc
  Uniprot ID: P62807
  ENST ID: ENST00000314332
  CDS Start-End: 7-387
tttaagatgcctgagccagccaagtctgctcccgccccgaagaagggctccaagaaggcagtgaccaaagcgcagaagaaagatggcaagaagcgcaagcgcagccgcaaggagagttactctgtgtacgtgtacaaggtgctgaaacaggtccatcccgacactggcatctcttccaaggccatgggcatcatgaattctttcgttaacgacatatttgagcgcatcgcgggcgaggcttcccgcctggcgcattacaacaagcgctcgaccatcacctccagggagatccagacggccgtgcgcctgctgcttcccggagagctggccaagcacgccgtgtcggagggcaccaaggccgtcaccaagtacaccagctccaagtaaacattccaaggggagacaacagcttttagacatatcttttccaacagtcgtcactgctggacactgtttcatcttgcaaataaaccaatgaaaatgagtgatcctagaagaagataaatggaggtattttgaacaatcaaagaaggacaaatgaacacctggctgagaaaaattagctcttttttctatgcataaaactattaaaatattcttcatagaaatttatgacacaggaaacataaagacaaaattaaaataactcctagtatctc

SEQ ID NO: 140934 - DNA, 571 bp, Homo sapiens
  Payload ID: 7662
  Gene Symbol: HIST1H2BC
  Gene Name: histone cluster 1, H2bc
  Uniprot ID: P62807
  ENST ID: ENST00000396984
  CDS Start-End: 23-403
gacacatttctggtgttttaagatgcctgagccagccaagtctgctcccgccccgaagaagggctccaagaaggcagtgaccaaagcgcagaagaaagatggcaagaagcgcaagcgcagccgcaaggagagttactctgtgtacgtgtacaaggtgctgaaacaggtccatcccgacactggcatctcttccaaggccatgggcatcatgaattctttcgttaacgacatatttgagcgcatcgcgggcgaggcttcccgcctggcgcattacaacaagcgctcgaccatcacctccagggagatccagacggccgtgcgcctgctgcttcccggagagctggccaagcacgccgtgtcggagggcaccaaggccgtcaccaagtacaccagctccaagtaaacattccaagtaagcgtcttaacacctaaccccaaaggctcttttaagagccacccagatacccactaaaagagctgtggccagacgccaaattttatttggcggcggaggggtattagaatataggaactggagaggggtggggacaagtgttgcagcttagagagg

SEQ ID NO: 140935 - DNA, 789 bp, Homo sapiens
  Payload ID: 7663
  Gene Symbol: HIST1H2BD
  Gene Name: histone cluster 1, H2bd
  Uniprot ID: P58876
  ENST ID: ENST00000289316
  CDS Start-End: 25-405
agtgttctaactattaacgctacgatgcctgaacctaccaagtctgctcctgccccaaagaagggctccaagaaggcggtgactaaggctcagaagaaggacgggaagaagcgcaagcgcagccgcaaggagagctattcagtgtatgtgtacaaggtgctgaagcaggtccatcccgacaccggcatctcttccaaggcaatggggatcatgaattccttcgtcaacgacatcttcgagcgcatcgcaggcgaggcttcccgcctggcgcattacaacaagcgctcgaccatcacctccagggagatccagacggccgtgcgcctgctgcttccgggggagctggccaagcacgccgtgtcggagggcaccaaggccgtcaccaagtacaccagttccaagtaactttgccaagggagagacatgaagacagaggagaaatgaatgcataaaataactgataatatgaatctatacatagaacttaggaagtctcatctgcctgaaaatgactgtgtggatcccacccaaatccaactcatcctggtttgctgcacactggttcatcaaaagaaggttaccgaggggaaggaactaaaggtgtttgcacttcatgttactttttgagtttataaacataaaaacagaatttacttctgttacagacctagttactgggaattcattacttgccatggactacctttgctaagaaaagtctgaatgagaagatggcaggacgtctgaaaaaaaaagttataattaataaaatctgcggagaattgtaaa

SEQ ID NO: 140936 - DNA, 496 bp, Homo sapiens
  Payload ID: 7663
  Gene Symbol: HIST1H2BD
  Gene Name: histone cluster 1, H2bd
  Uniprot ID: P58876
  ENST ID: ENST00000377777
  CDS Start-End: 25-405
agtgttctaactattaacgctacgatgcctgaacctaccaagtctgctcctgccccaaagaagggctccaagaaggcggtgactaaggctcagaagaaggacgggaagaagcgcaagcgcagccgcaaggagagctattcagtgtatgtgtacaaggtgctgaagcaggtccatcccgacaccggcatctcttccaaggcaatggggatcatgaattccttcgtcaacgacatcttcgagcgcatcgcaggcgaggcttcccgcctggcgcattacaacaagcgctcgaccatcacctccagggagatccagacggccgtgcgcctgctgcttccgggggagctggccaagcacgccgtgtcggagggcaccaaggccgtcaccaagtacaccagttccaagtaactttgccaagtaagcatctttacacctaatcccaaaggctcttttaagagccacgcatgttttcaataaatgagttgtaatcatttcattc

SEQ ID NO: 140937 - DNA, 497 bp, Homo sapiens
  Payload ID: 7664
  Gene Symbol: HIST1H2BE
  Gene Name: histone cluster 1, H2be
  Uniprot ID: P62807
  ENST ID: ENST00000614097
  CDS Start-End: 67-447
caaattccgaggatcaggagatgtagatttcattttctttcctaactgcagaacagcaaagatagcatgcctgagccagcgaaatccgctcccgccccgaagaagggctccaagaaggccgtgaccaaggcgcagaagaaggacggcaagaagcgcaagcgcagccgcaaggagagctactccgtatacgtgtacaaggtgctgaaacaggtccaccccgacaccggcatctcctctaaagccatggggatcatgaattcctttgtcaacgacatcttcgagcgcatcgccggcgaggcttcccgcctggcgcattacaacaagcgctcgaccatcacctccagggagatccagacggccgtgcgcctgctgcttcccggggagctggccaagcacgctgtgtcagagggcaccaaggccgttaccaagtacaccagctccaagtaaacttgtccctgcaactgccttagtaaacccaaaggctcttttcagagcca

SEQ ID NO: 140938 - DNA, 2585 bp, Homo sapiens
  Payload ID: 7664
  Gene Symbol: HIST1H2BE
  Gene Name: histone cluster 1, H2be
  ENST ID: ENST00000634910
  CDS Start-End: 1726-2106
gtccgggaggttgcccgtaggccgctaactggtggttcccagtccccgccgactcggcctctttcttctgcggccaccagatcgcgggatatcggagacttcgaacaatccgctggagtcctttacagtttaaaaacagaggaccggccgggcgcggtggctcacgcctgtaatcccagcactttgggaggccgaggcgggcggatcacgagttcaggagatagagaccatcctggctaacaccgtgagaccccgtccctatcaaaagtacaaaaaaattagccgggtgtggtggcacgcgcctgtagtcccagctactcaggaggctgaggcagaagaatcgctagaaccagggaggcggaggttgcagtgaccgagatcgcgccgctgcactccagcctaggcgacagagcgagactgcgtctcaaaacaaaaaaaacggaggatcgaaaattttgaagactgagagcaaggcaacaatcttcccttgacctttttgctcctctcacaagggtttttcagacggctgaaaccaacgaaaagagtgaggaagcaggcagaaaatttcagctttagtctctcagcatcctcctgctttcttctcggggagctggcacttcccccttctctagtagctgtaaatacgcctcccaactccaaggagacctttcttgcatctcccttactgttctcacgcctgtagggctcttcgtgtgaggattcagtgtattttttattttgagatggaatctcactctgtctcccaggctggagtgcagtgccctgatctaagctcattacaacctctacctcccaggttcaagcgattcttctgcctcactttcccaagtaacagggactacagttgcagattgtatcactggactcctctccctctggttttctttgtgtatgttcattttgtgtctctccaacgtattagttcatcctctttaggtgaatttctttctttttatcctactcttcacgtctgtctctctttccattgtgtctgtttcttttttctctccctctgccacttttcccttaatacggtttaaattttctctcatttgtctttctcctttttctctactgactagatataccatcagaggttttttttttcatttctaacaacctcttatagtcattaaagaaatgcttcattttccattcttttaacataagaagaacaagaagcatttttctctttttgcaacacagcccaccaagtgggaaacactgttctccggattgtgtgggtgatcgccggtcgcctagcttgccgttcttcaggtatctcctgctgctccagaatctacatctgaatgtcaaggcatagcttttccaggagcttttaaaccgacctttcaattcgaagacgtaactgcgccaggagctttgtctccctggcatataaaagcatagaagagagcaacttctggtttttaaaataagtaaactaatctgaattgtttgcaatggtaggaacttgttatataaaatgttaattaggtggcccgtgctcgaaaactgctctcaggatatgaccaatgggagagtagacctaagctccttcatttgcatgcagacttcacgacaaaataacgaatcagagttggagaaactaaatcttcatttacataacattgtctacaaattccgaggatcaggagatgtagatttcattttctttcctaactgcagaacagcaaagatagcatgcctgagccagcgaaatccgctcccgccccgaagaagggctccaagaaggccgtgaccaaggcgcagaagaaggacggcaagaagcgcaagcgcagccgcaaggagagctactccgtatacgtgtacaaggtgctgaaacaggtccaccccgacaccggcatctcctctaaagccatggggatcatgaattcctttgtcaacgacatcttcgagcgcatcgccggcgaggcttcccgcctggcgcattacaacaagcgctcgaccatcacctccagggagatccagacggccgtgcgcctgctgcttcccggggagctggccaagcacgctgtgtcagagggcaccaaggccgttaccaagtacaccagctccaagtaaacttgtccctgcaactgccttagtaaacccaaaggctcttttcagagccactcaccttttcacaattggagctatatactgacatgtgaagatactagaaactcctgcagctgaaataggcatgtttttaaaacttaaaatggcactcactgtctgggctggtggctttatgaaactctggtttccgtgttttatgaggtatcactcgatagtacctaagaggcaatagtaatttcatagttttgctctacgaagagaaacttcgtttctcaagagtccttaaaaatacgggttttaccaaagaagcccatattatggggggctggagcgggggtggggaaggaggagaggagactgctgctttcaagtagttcttaatgttgaatttgcttttttcctttcctcaattacttcaaaaaggtcttaatttggatttttattttaggttctaaaggaaaaaataaaaccctcttccctct

SEQ ID NO: 140939 - DNA, 1196 bp, Homo sapiens
  Payload ID: 7665
  Gene Symbol: HIST1H2BF
  Gene Name: histone cluster 1, H2bf
  Uniprot ID: P62807
  ENST ID: ENST00000356530
  CDS Start-End: 40-420
gcatttctctttaggttgtggacgaagtgtttatttatcatgcctgaacctgctaagtccgctcctgctccaaaaaagggctccaaaaaggcggtgaccaaggcgcagaagaaggatggtaagaagcgcaagcgtagccgcaaggagagctattccgtgtacgtgtacaaggtgctaaagcaggtccaccccgacaccggcatctcatccaaggccatgggcatcatgaactccttcgtcaacgatatcttcgagcgcatcgctggcgaggcttcccgcctggcgcattacaacaagcgctccaccatcacctccagggagatccagacggccgtacgcctgctgctgcccggggagctggctaagcacgccgtgtcagagggcaccaaggccgtcaccaagtacaccagctctaagtaattctaacgtcttcatacccaatcccaaaggctcttttaagagccacccactttttcagctatagagttgtaattacctgcatattttccgtgtttaccaccaacaggtttggttttatcctcatttgagggggttgctgctgtgtaggtctagaccacagttcttttgactggttgaaggaaaatgctatacttaaccgtagcatgtttgttttaccccaagtgctggttagaaggctagcccattgtgctgataagcacatttttcttatgttgtgctgtgatgtgtcccttgtcaaattggtttcataagaaaagaacttttgaaatatctcttttgctactgacatagtgtgagggaaaggaatgtcttccttaattccggtttagtcatcgcagcattggcgaatttagctggttaaaataatgtaatcaaattctttaaaatataaggaaagcaagacaagtaatgtgcatgaaaactgaaaaaatgtgaacacccgagcctggatgcagcactaataatcaacattgttcttggtttagttaaagaaaatttggccactggcaaaataccatttgggagtaatgagacacacccctaatcctaaaatattttcttgtcacttcctcaaagttgtttttgactttttttccttcagggttgacttcatatgtgttcattttattctaataagcaaaagttgtaatttttaagtgaaaaaataatttatgtcattctacttacaaatacaatttttctattctatatactca

SEQ ID NO: 140940 - DNA, 1534 bp, Homo sapiens
  Payload ID: 7666
  Gene Symbol: HIST1H2BG
  Gene Name: histone cluster 1, H2bg
  Uniprot ID: P62807
  ENST ID: ENST00000541790
  CDS Start-End: 50-430
ttttatttaagtgcgttcattctcactgctgttattgttttctgacagcatgcctgaaccagctaagtcagctcctgctccgaagaagggttccaagaaggctgtgaccaaggcgcagaagaaggatggcaagaagcgcaagcgcagtcgtaaggagagctactccgtgtatgtgtacaaggtgctaaaacaggttcaccccgatactggcatctcatccaaggccatgggcatcatgaattccttcgttaacgacatcttcgaacgcatcgcaggcgaggcttcccgtctggcccactacaacaagcgctcgaccattacctccagggagatccagaccgccgtgcgtctgctgcttcccggagagctggccaagcacgcagtgtccgaaggtaccaaggctgtcaccaagtatacaagctccaagtaaatgtgtgcttaggtgctttaaaactcaaaggctcttttcagagccactcaagtctcacataaagagctttaatattgaatttcaccgttttctagggaataatttttccgattttgtaatcccagcactttgggaggccgaggcgtgcggatcgagaccagtttggctaacgtggttaaatctcgtttctactaaaaatacaaatattagccgggcgtggggcagtcgcgtgtcatcccagagactcgggaggctgccgcaggagaatcacttaaacccagcaagcaaaggttgcagtgaaaagacatggcgcttttgcattctagcctgggcgacaaaggcgaggcttcgtctcaaaaaaaattgatcaggagatactcctgttctgtgttggcaagatcctgtaatcctagcactttgggaggtcgatgcatgaggctttcttcagctcaggagttaacagatttgcctgggcaacatagaactcgtctctgcaaaaaaatgaagctaaccaggtgtgacggcttgcgtctgtactatcatttactcggtaggctgaggtggtaggatagcttaaactctcgggctagagactgcaggaacatgtgaatacgctagtgcaattccagcctgggcaacactggaaagggtaggaagagtagtctttgggtccctaaagatcacctgataacaagtttgacttttctgagcactcttgtggagtttgttgtggagggaataccatgggcattggcaatgtaaagttgatctaaaaaatctcgttttccgccgtgcgcggtggctcacgcctctaatcccatcactttgggaggccgagacgggcggatcacgaggtcaggaggtcgagaccatcctggctaacactgtgaaaccctgtctctactaaaaaaatacaaacaaaattagccgggcgtggtggcactcacctgtagtttcagctactctggaagctgaggctggagagtcacttgaacccgggaggcggaggttgcagtgatcagagatcgcgccactgcactccatcctgggcgaaagagctagattccatctcataaaaaaaaaaaaaaaaaaaaaaaaaaaaaa

SEQ ID NO: 140941 - DNA, 2060 bp, Homo sapiens
  Payload ID: 7667
  Gene Symbol: HIST1H2BH
  Gene Name: histone cluster 1, H2bh
  Uniprot ID: Q93079
  ENST ID: ENST00000619466
  CDS Start-End: 1-381
atgcctgatccagctaagtccgctcccgccccgaagaagggctccaagaaggcggtgaccaaggcgcagaagaaggatggcaagaagcgtaaacgcagccgcaaggagagctactccgtatacgtttacaaggtgctgaagcaagtccaccccgacaccggcatctcctccaaagccatggggatcatgaattcctttgtcaacgatatcttcgagcgcatcgccggcgaggcttcccgcctggctcattacaacaagcgttcgaccatcacctccagggagatccagacagccgtgcgcctgctgctgcctggggaactggccaagcacgccgtgtccgagggcactaaggccgtcaccaagtacaccagctccaaataaatggacgcatgttcaaacccaaaggctcttttcagagccacttaatgatttcaattaagagttttaatgctgggtgctgctgtattctatgggagaagtgtcgccaatacaggtaaaattttcctacatcacctgtttattctgtgcgtttgacaaacactaagcttttagagtttatttgtctttataaaggtggggtacaactacattgttcaggctggtcttaaactcaagcgctggtcttaaactcaagcaagttttcccacctcggccttgccttgtattactgagcagataatttgacacagcaggaaaagtgggcattcttgtttaggaaccaaaaactaagtttgcaacttaaaatgcaatcaatttggagcaacacgtccaccagtctagagctggtaagtttgagtattcaaaatgagttgaaagtacatttagtgcctataataacccactctagatagcataatgtggtctttgtaggagtctcgtggaagttaatgttaactgggatattgtagtttaccaagtacctgagaaaaatttaaatttcttaatagataaggattaggagacaaactttatggaaatgaaaacaaaatgccatgcaataaacctttagttatttggcaagtagtatgagggcttctagctgtctttgaaaaacttaagatttgtaagacaaggaagagcagagaatataaatagtaaagggcctggcaacaatgtgtctttgtttttaggtaacgttggttggcagtcagcaaaaaggccaggctcaggcagtcttaacttgaaaacgctaacaggaatcaccaaaactatgtatacaactcctgctgtgggttttttaaatatcaagattaccgattttaatggtagggtaatatagactgaaatccccacattcctccaccctcatgggcatttctcttggctcataaaatatgggggtagcaggaggaaagggaagagtatattaagagcctatatctgagaggtacgttcagtttttcctcaaaagtatctggtggttggactagtaatttattcatttattgagaacctattaaattacagaaaatacttagtaaagagcagtgagaaagatagaaactatccctgtcctttacctggattgaaatctaaagtggatatttgtacaataaactcacaaactaaagaaagaaacgtaagtctgaaggtcacgtttttcttttaaccggcttttgatgggactgaatttaaattgccaaaaggtgaattaacataatcttgaaaacttgcaagttcctggaggcagttctggagggagggtggagcaaaagagatggcagaagaagaggagccagcagcactggaattcaaaagtagacattcttgcctcctccctagtggacagggaggaggggtggggagagcacaagagagccgtgacagaggaagggagagagcacagagtttaagtctatattgatggaactatggttacaaataggggctacccatttatattctcatctggccatgtctcatcagtgatttacaaggatttcatagaagtgctttaataaaatgtacaacctcactgaaatatagaaagtaatactataagacagcaaatattgtatatttatgcaaataattttttaataaaaggtttttttaatgtc

SEQ ID NO: 140942 - DNA, 381 bp, Homo sapiens
  Payload ID: 7668
  Gene Symbol: HIST1H2BI
  Gene Name: histone cluster 1, H2bi
  Uniprot ID: P62807
  ENST ID: ENST00000377733
  CDS Start-End: 1-381
atgcctgaaccagctaagtcagctcccgccccgaagaagggctccaagaaggcggtgaccaaggcacagaagaaggatggcaagaagcgcaagcgcagccgcaaggagagctattccgtgtacgtgtacaaggtgctgaagcaggtccaccccgacaccggcatctcgtccaaggctatggggattatgaactccttcgtcaacgacattttcgagcgcattgcaggcgaggcttcccgcctggcgcattataacaagcgctcgaccatcacttccagggagatccaaacggctgtgcgcctgctgctacccggggagctggccaaacacgcggtgtcggagggcaccaaggcggtcaccaagtacaccagctccaagtaa

SEQ ID NO: 140943 - DNA, 381 bp, Homo sapiens
  Payload ID: 7669
  Gene Symbol: HIST1H2BJ
  Gene Name: histone cluster 1, H2bj
  Uniprot ID: P06899
  ENST ID: ENST00000339812
  CDS Start-End: 1-381
atgccagagccagcgaagtctgctcccgccccgaaaaagggctccaagaaggcggtgactaaggcgcagaagaaagacggcaagaagcgcaagcgcagccgcaaggagagctattccatctatgtgtacaaggttctgaagcaggtccaccctgacaccggcatttcgtccaaggccatgggcatcatgaattcgtttgtgaacgacattttcgagcgcatcgcaggtgaggcttcccgcctggcgcattacaacaagcgctcgaccatcacctccagggagatccagacggccgtgcgcctgctgctgcctggggagttggccaagcacgccgtgtccgagggtactaaggccgtcaccaagtacaccagcgctaagtaa

SEQ ID NO: 140944 - DNA, 408 bp, Homo sapiens
  Payload ID: 7669
  Gene Symbol: HIST1H2BJ
  Gene Name: histone cluster 1, H2bj
  ENST ID: ENST00000606923
  CDS Start-End: 1-65
acgacattttcgagcgcatcgcaggtggagtggctgaaacttctcagcaggcgcatctacactagtgacctgaggagagaaaccctaaccccacaatggctgcatcttctctgaagacgagactgatgctcatctttgaaatgaagggcagtgtgtgcatttctccatgaaggtatccagaaacagccatgccagagctgctgtggggtggctgaactgctattccttttctagggtgggatccccactctttgtaaggaaggatattggggtcctgacactgggaactcatcttgtcagtgaggccttctttaactgctgtcttgtaattgagccaccccatctgtgtttcctgttccaatttaggacttttttttttttatcataatataaagatctgaaatgcta

SEQ ID NO: 140945 - DNA, 950 bp, Homo sapiens
  Payload ID: 7669
  Gene Symbol: HIST1H2BJ
  Gene Name: histone cluster 1, H2bj
  Uniprot ID: P06899
  ENST ID: ENST00000607124
  CDS Start-End: 1-381
atgccagagccagcgaagtctgctcccgccccgaaaaagggctccaagaaggcggtgactaaggcgcagaagaaagacggcaagaagcgcaagcgcagccgcaaggagagctattccatctatgtgtacaaggttctgaagcaggtccaccctgacaccggcatttcgtccaaggccatgggcatcatgaattcgtttgtgaacgacattttcgagcgcatcgcaggtgaggcttcccgcctggcgcattacaacaagcgctcgaccatcacctccagggagatccagacggccgtgcgcctgctgctgcctggggagttggccaagcacgccgtgtccgagggtactaaggccgtcaccaagtacaccagcgctaagtaaacagtggagtggctgaaacttctcagcaggcgcatctacactagtgacctgaggagagaaaccctaaccccacaatggctgcatcttctctgaagacgagactgatgctcatctttgaaatgaagggcagtgtgtgcatttctccatgaaggtatccagaaacagccatgccagagctgctgtggggtggctgaactgctattccttttctagggtgggatccccactctttgtaaggaaggatattggggtcctgacactgggaactcatcttgtcagtgaggccttctttaactgctgtcttgtaattgagccaccccatctgtgtttcctgttccaatttaggacttttttttttttatcataatataaagatctgaaatgctatgttttccttattcattggcttattatctttactatcccatcctccacactaaaagttttttcgagctggatttgggagttgtggggtaggttatattttgatcacttgtatttcccagcttctagaacagtgcccagcaaagtacttctctgaataaatgaataaagtaatattcctctgc

SEQ ID NO: 140946 - DNA, 381 bp, Homo sapiens
  Payload ID: 7670
  Gene Symbol: HIST1H2BK
  Gene Name: histone cluster 1, H2bk
  Uniprot ID: O60814
  ENST ID: ENST00000356950
  CDS Start-End: 1-381
atgccggaaccagcgaagtccgctcccgcgcccaagaagggctcgaagaaagccgtgactaaggcgcagaagaaggacggcaagaagcgcaagcgcagccgcaaggagagctactccgtatacgtgtacaaggtgctgaagcaggtccaccccgacaccggcatctcctctaaggccatgggaatcatgaactccttcgtcaacgacatcttcgaacgcatcgcgggtgaggcttcccgcctggcgcattacaacaagcgctcgaccatcacctccagggagatccagacggccgtgcgcctgctgctgcccggggagttggccaagcacgccgtgtccgagggcaccaaggccgtcaccaagtacaccagcgctaagtaa

SEQ ID NO: 140947 - DNA, 488 bp, Homo sapiens
  Payload ID: 7671
  Gene Symbol: HIST1H2BL
  Gene Name: histone cluster 1, H2bl
  Uniprot ID: Q99880
  ENST ID: ENST00000377401
  CDS Start-End: 26-406
ttggttttgccactattgtttcattatgcccgagctggccaagtctgctcccgccccgaagaagggctccaagaaggcggtgaccaaggcccagaagaaggatggcaagaagcgcaagcgcagccgcaaggagagctactccgtgtacgtgtacaaggtgctgaagcaggtccaccccgacaccggcatctcttctaaggccatgggaatcatgaactccttcgtcaacgacatcttcgagcgcatcgcaagcgaggcttcccgcctggcgcactacaacaagcgctcgaccatcacctccagggagatccagaccgccgtgcgcctgctgcttccgggggagctggccaagcacgcggtgtcggagggcaccaaggccgtcaccaagtacaccagctccaagtaaattctcaagctcttgtccaacccaaaggctcttttcagagccactcactattatctaaagaagagctggttcgctcttccta

SEQ ID NO: 140948 - DNA, 381 bp, Homo sapiens
  Payload ID: 7672
  Gene Symbol: HIST1H2BM
  Gene Name: histone cluster 1, H2bm
  Uniprot ID: Q99879
  ENST ID: ENST00000621112
  CDS Start-End: 1-381
atgcctgaaccagtcaaatctgctccagtccctaaaaaaggctccaagaaggccattaacaaggctcagaagaaggatggaaagaagcgcaaacgcagccgcaaggagagctactctgtgtatgtgtacaaggtgctgaagcaggtccaccccgacaccggcatctcttccaaggctatgggaatcatgaactccttcgtcaacgacatctttgagcgtatcgccggagaagcgtcacgcctggcgcattacaacaagcgctcgaccatcacttcgagggagatccagacggccgtgcgcctactgctacccggggaattggccaagcacgccgtgtccgagggcaccaaggccgtcaccaagtataccagctccaagtga

SEQ ID NO: 140949 - DNA, 432 bp, Homo sapiens
  Payload ID: 7673
  Gene Symbol: HIST1H2BN
  Gene Name: histone cluster 1, H2bn
  Uniprot ID: Q99877
  ENST ID: ENST00000396980
  CDS Start-End: 1-381
atgcccgagccctcaaagtccgctcctgccccgaagaaaggctccaagaaggcagtgacaaaggcccagaagaaggacggcaagaagcgcaagcgcagccgcaaggagagctactccgtgtacgtgtacaaggtgctgaagcaggtccaccccgacaccggtatctcgtccaaggccatgggcatcatgaactccttcgtcaatgacatcttcgagcgcatcgccggcgaggcttcccgcctggcgcattacaacaagcgctcgaccatcacctccagggagatccagacggccgtgcgcctgctgctgccaggggagctggccaagcacgcggtgtcggagggcaccaaggccgtcaccaagtacaccagttccaaataatgtctccatagaatcactttccaatacaacggctcttttcagagccaccta

SEQ ID NO: 140950 - DNA, 715 bp, Homo sapiens
  Payload ID: 7673
  Gene Symbol: HIST1H2BN
  Gene Name: histone cluster 1, H2bn
  Uniprot ID: Q99877
  ENST ID: ENST00000449538
  CDS Start-End: 118-498
acgcacaacttcattctctaccccacttgcgttaagaagcagtgaataagcggtaggttgacagagctaccgtcttcctgtttttttcctccaattttccggcagttactcccagtcatgcccgagccctcaaagtccgctcctgccccgaagaaaggctccaagaaggcagtgacaaaggcccagaagaaggacggcaagaagcgcaagcgcagccgcaaggagagctactccgtgtacgtgtacaaggtgctgaagcaggtccaccccgacaccggtatctcgtccaaggccatgggcatcatgaactccttcgtcaatgacatcttcgagcgcatcgccggcgaggcttcccgcctggcgcattacaacaagcgctcgaccatcacctccagggagatccagacggccgtgcgcctgctgctgccaggggagctggccaagcacgcggtgtcggagggcaccaaggccgtcaccaagtacaccagttccaagtgagcccgcccaccgcggaacgttcggaagagaaaaagaagattcacagagagcattaagaaggcccatggattcagaaagctcaagatttggctaaaattaagagtcagcaaccaatctccagatgacatttatattgcaagagattgaatgcagaaagaagaattcagctttcttttattaaacaaggcattagagagatttgcaaaattgtaaaaca

SEQ ID NO: 140951 - DNA, 4137 bp, Homo sapiens
  Payload ID: 7673
  Gene Symbol: HIST1H2BN
  Gene Name: histone cluster 1, H2bn
  ENST ID: ENST00000606613
  CDS Start-End: 62-562
gttgacagagctaccgtcttcctgtttttttcctccaattttccggcagttactcccagtcatgcccgagccctcaaagtccgctcctgccccgaagaaaggctccaagaaggcagtgacaaaggcccagaagaaggacggcaagaagcgcaagcgcagccgcaaggagagctactccgtgtacgtgtacaaggtgctgaagcaggtccaccccgacaccggtatctcgtccaaggccatgggcatcatgaactccttcgtcaatgacatcttcgagcgcatcgccggcgaggcttcccgcctggcgcattacaacaagcgctcgaccatcacctccagggagatccagacggccgtgcgcctgctgctgccaggggagctggccaagcacgcggtgtcggagggcaccaaggccgtcaccaagtacaccagttccaagaagagaaaaagaagattcacagagagcattaagaaggcccatggattcagaaagctcaagatttggctaaaattaagagtcagcaaccaatctccagatgacatttatattgcaagagattgaatgcagaaagaagaattcagctttcttttattaaacaaggcattagagagatttgcaaaattgtaaaacagtgtcactctttttattttaaaaaatagctatttttcataaaatatgtatgctaacataaaatgggtttattactgttatttttaaatgaattaaccaaatttttttgttttactatataatacggtaaatgtcaatagttataacctacagaaacacaaattctttggattgcaaagctccaccacctaatatgctatagatcaaggttcaaaagagagctccctggaaaactccttggtgttttgttcactgaaatattatttaaggagaacatattttattttaatgactgtcattgctggcatccgaactctaattcccaaggcatcctcaaattatcatctgcatcacttcattactttttaagagtgtaagtgggtcatgagaccagaaggttcaagaactgctgccttagggtatataccacactagtaatgttcatttgtgttcaaatgactatttttcaaagtatttggagtatcccttcctgcacacttatgttatgatctagatatacagatccatttactttgttttgctgttgatgtctaggattggactttttaatgtttggttctatcattacataaaatatttttacatagtcccaaggtcaaatcaaattatatccaaagaaatctttctccttcatgctaatagcctctcttgccttagagtaataattttaaaggttatgatatatccttctgttgtttattataagcatatatgtatgtattcttagggaatattaacttcattttgctgttgatgtctagggattggactttttaatatttgtttctaccgttacataaaatatttttacatagtcccaaggtcaaatcaaattatatccaaagaaatctttctccttcatcctaatagcctctcttaccttagagtaataattttaaatgttatgatatatccttctgttgtttattataagcatatatatatgtattctagggaagattaactcgtatcacaggagaggagactggaagttgatactatgcaagataaactttgtcacagacagtcacctgttctttggagggcccattcatctttcccaaaaataatttcctctcccctacattgcctacatcccccttcctgtcttccctatgaagacagtatataagcttctagatctcactgggcttggggggcattcacttatttttcatgtgatacctccatgcacaaaataaaatttttttttttcgagacggagtcttgccgcgtctcccaggctggagtgcagtggcgcgatctcggctcactgcaagctccgcctccggggtttaggccattctcctgccccagcctcctgagtagctgggactacaggcgcccgccaccatgcccggctaatttttttgtgttttcagtaccgatggggtttcactgtgttagctaggatggtctcgatctcctgacctcgtgatccgcccgccttggcctcccaaagtgctgggattacaggcgtgagccaccacgcccggccacaaaataaatttttatatctttctcttattaatctgcctgctgtcaatttatttcatacacttaattatcaaaccctcagagggcagagggagtcttccctcccctacagttccaatcagattgttttctagttagcatgagggttgatctaagatgtctggtctaccattactgaaaataattactaaaaatagaatcaatggtatagtatttgttaacatgttttaaaaatatcaataactaaattatcatagggcttccaattcttaaaatcttcaaaatgcagttgtataaaatgatatagatcagtgccgtcatactctctggtccagggatgggtttcccatataaataattcaaattctcactaacgatgtttaagttaggaaattagttgccatgttggttcagttgtgtatcaccaccaaagaagtgagttgctaaattaaatataaataaatacttagccatagaactagaggaaaagattaaacaatgtattgttggatcaagaaatcatgtttcaaaatttaaatcaatgacttttatagttcaagtgtctgtgaagtctaaaataaaaatacagacattaattgcactaccttattggtagaagaaatagcaagtaccttaaaaagtgcatgtcatattggaatcaaatctcttgaaggctaggctagtggtaaaagaaatagtaggtaccttagaaactacatgtcatatttgaatcaaatctcttgaaggctaggcaattcatcttgactatatttttgtcaccaaagagcttaatattgaaccatcaaaatatattcactttaccatctgggacattttaatcaaacctctcatctgttcaatcacatctttcacttcagaaagaactttcacttctgccttgtttttcagaactatctatagccaccacttttcacattaagatgatccttctcaagccatcagagaactaagtgacatctgcaatgaaatggcttcaccacttctgtcctcgggtaattctgcaatctatttttgctggatccaatccctgaagaccatcctgcctttctaagggatgcttctccctttcagctaccttcatgtcttttaatgcaattgttgcttctttctgtcctggtgttgtactttggcagtggtcacacccatggagcacagacttctacaaggcacaaggcatgactttgatttttctgttgtaatttgatggaattggccaggcgtggtagctcatgcctgtaatcccagcactttgggaagccaaggcaggcggatcacctgaggtcaggagttggagactagactggccaacatggcaaaaccctgtctctactaaaaatacaaaaattagccgggcatggtggcgggcgcctgtaatcccagctattcgggaggctgaggcaggagaatcgcttgaaccagggggtggaggttgcaatgagccgagatcgtgccattgcactccagcctgggtggcagaatgagactctgtctcaaaaataataataataataataataattgatggaattaagaaatattgaaaaatatataccattcactgtgagaaaaaagttcaactcctcaaactgggaatctcagtccattttatgtatgaaggtgatggcctgcactaaccttttgaggctgctatcatcctatgcctattttatgggtgaaaaaattgatggacagagaaagggagcattttcagtatatcacctagagaatcagtgacagagtcagtctatgaatcttgtggtggtgggtggccttcactgtagaaaggatagattccatgatcttttgtaccatcaaataaaatacttacaaacaaatgagaattagccatttgtatttgttttgttttaatagtgcaaataagatgtcattctagacctaaaaaaatgtttttctcccttttgtttccaaattttaggataaaaggcaaataaaaatctgttcttaga

SEQ ID NO: 140952 - DNA, 1723 bp, Homo sapiens
  Payload ID: 7673
  Gene Symbol: HIST1H2BN
  Gene Name: histone cluster 1, H2bn
  Uniprot ID: Q99877
  ENST ID: ENST00000612898
  CDS Start-End: 903-1283
caaaacaatgtggtgtaaaagccgtttagttttgcttcatctccatacagcattccagtgccattgcaaaatgactcgactatcagataaaactgaacacagctctacttggtgaaaaagtaggtggctctgaaaagaacctttttggtttggaccgaggtatgagtaatgaactgctccagccccgctacttgcccttggccttgtggtggctctcagttttcttaggcagcagcacggcctggatattgggcaggacaccaccctgggcgatggtcactttaccaagcagcttgttgagctcctcgtcgttgcggatggccagctgcaagtggcgcgggatgatgcgggtcttcttgttgtcgcgggccgcgttgccagccagttccaggatctcggcggttaggtactccaacaccgccgccaggtacaccggcgctccggcaccgacccgctcagcgtagttgcccttgcggagcagtcggtgcactcggcccactgggaactgaagacccgcccttgaagaacgggtcttagccttggcgcgagctttgccgccctgcttgccacgtcccgacatgacgtaaaaaattcaatcagtaacgttcctgagactgacgtaacgctaaagctccgctacttatagtcaacagaggcacgaaaactaagctgtgctattggctaacattacagtttcgctttaaccaatgggattgcggttttgaaaaacacttattttgattggacaaagttaatatacgtttccaggactcaccactggttaaacgcacaacttcattctctaccccacttgcgttaagaagcagtgaataagcggtaggttgacagagctaccgtcttcctgtttttttcctccaattttccggcagttactcccagtcatgcccgagccctcaaagtccgctcctgccccgaagaaaggctccaagaaggcagtgacaaaggcccagaagaaggacggcaagaagcgcaagcgcagccgcaaggagagctactccgtgtacgtgtacaaggtgctgaagcaggtccaccccgacaccggtatctcgtccaaggccatgggcatcatgaactccttcgtcaatgacatcttcgagcgcatcgccggcgaggcttcccgcctggcgcattacaacaagcgctcgaccatcacctccagggagatccagacggccgtgcgcctgctgctgccaggggagctggccaagcacgcggtgtcggagggcaccaaggccgtcaccaagtacaccagttccaagtgagcccgcccaccgcggaacgttcggtcagtctcggcccacaccccaaaggctcttttcagagccactcagtcttcccaaagagaactggcactcactgttcttacagcaggtatttcttacttgctacaaagacgatttccaagattcctttagccttgttagaaactaattttggctcaagcctctaatcccggttcgggaaaccgaagcgggtggctcacctgaggttagaagttcgagacgagcctagccaacatggtgaaacccgtctctactaaaagtacaaaaaaatagctgggcgtggtggcggacgcctgtaatcccagctacccgggaagctgaggcaggagaatcgcttgaacccggcagatggaggttgcagtgagccgagatcgggccattgcaccccagcctgggcagtaagagcgaaactctgtctc

SEQ ID NO: 140953 - DNA, 381 bp, Homo sapiens
  Payload ID: 7674
  Gene Symbol: HIST1H2BO
  Gene Name: histone cluster 1, H2bo
  Uniprot ID: P23527
  ENST ID: ENST00000616182
  CDS Start-End: 1-381
atgcccgacccggctaaatctgctcctgcccccaaaaagggctccaagaaagccgtaaccaaggcccagaaaaaggacggcaagaagcgcaagcgcagccgcaaagagagttactctatctacgtgtacaaggtgctgaagcaagtccaccccgacaccggcatctcatcgaaggccatgggcatcatgaactccttcgtcaatgacatctttgagcgcatcgctggcgaggcttcccgcctggcgcattacaacaagcgctcgaccatcacctccagggagatccagacggccgtgcgcctgctgctgcccggggagctggccaagcacgccgtgtccgagggcacaaaggccgtcaccaagtacaccagctccaagtga

SEQ ID NO: 140954 - DNA, 411 bp, Homo sapiens
  Payload ID: 7675
  Gene Symbol: HIST1H3A
  Gene Name: histone cluster 1, H3a
  Uniprot ID: P68431
  ENST ID: ENST00000613854
  CDS Start-End: 1-411
atggctcgcactaagcaaactgctcggaagtctactggtggcaaggcgccacgcaaacagttggccactaaggcagcccgcaaaagcgctccggccaccggcggcgtgaaaaagccccaccgctaccggccgggcaccgtggctctgcgcgagatccgccgttatcagaagtccactgaactgcttattcgtaaactacctttccagcgcctggtgcgcgagattgcgcaggactttaaaacagacctgcgtttccagagctccgctgtgatggctctgcaggaggcgtgcgaggcctacttggtagggctatttgaggacactaacctgtgcgccatccacgccaagcgcgtcactatcatgcccaaggacatccagctcgcccgccgcatccgcggagagagggcgtga

SEQ ID NO: 140955 - DNA, 411 bp, Homo sapiens
  Payload ID: 7676
  Gene Symbol: HIST1H3B
  Gene Name: histone cluster 1, H3b
  Uniprot ID: P68431
  ENST ID: ENST00000621411
  CDS Start-End: 1-411
atggctcgtactaaacagacagctcggaaatccaccggcggtaaagcgccacgcaagcagctggctaccaaggctgctcgcaagagcgcgccggctaccggcggcgtgaaaaagcctcaccgttaccgcccgggcactgtggctctgcgcgagatccgccgctaccaaaagtcgaccgagttgctgattcggaagctgccgttccagcgcctggtgcgagaaatcgcccaagacttcaagaccgatcttcgcttccagagctctgcggtgatggcgctgcaggaggcttgtgaggcctacttggtagggctctttgaggacacaaacctttgcgccatccatgctaagcgagtgactattatgcccaaagacatccagctcgctcgccgcattcgcggagaaagagcgtaa

SEQ ID NO: 140956 - DNA, 411 bp, Homo sapiens
  Payload ID: 7677
  Gene Symbol: HIST1H3C
  Gene Name: histone cluster 1, H3c
  Uniprot ID: P68431
  ENST ID: ENST00000612966
  CDS Start-End: 1-411
atggctcgtacgaagcaaacagctcgcaagtctaccggcggcaaagctccgcgcaagcagcttgctactaaagcagcccgtaagagcgctccggccaccggtggcgtgaagaaacctcatcgctaccgcccgggcaccgtggccttgcgcgaaatccgtcgctaccagaagtccaccgagctgctgatccggaagctgccgttccagcgcctggtgcgagaaatcgcccaggacttcaaaaccgacctgcgtttccagagctctgcggtgatggcgctgcaggaggcttgtgaggcctacctggtgggactcttcgaagacaccaatctgtgcgctattcacgctaaacgcgtcaccatcatgcccaaagatatccagctggcacgtcgcatccgtggggaaagggcataa

SEQ ID NO: 140957 - DNA, 411 bp, Homo sapiens
  Payload ID: 7678
  Gene Symbol: HIST1H3D
  Gene Name: histone cluster 1, H3d
  Uniprot ID: P68431
  ENST ID: ENST00000356476
  CDS Start-End: 1-411
atggctcgtaccaagcagactgctcgcaagtccacgggtgggaaagcgccacgcaagcagctggccaccaaggctgctcgaaagagcgctccagccaccggcggcgtgaagaagccccaccgttaccggcccggcacggtggctctgcgcgagatccgccgctaccagaagtcgaccgagctgctgattcgcaaactgccattccagcgtctagtccgtgagatcgcgcaggacttcaagactgatctgcgttttcagagctcggcggtgatggcgctgcaggaggcctgcgaggcctacctggtggggctgtttgaggacaccaacctatgcgccattcacgccaagcgagtgactatcatgcccaaggacatccagcttgctcgccgcattcgtggggagagggcgtaa

SEQ ID NO: 140958 - DNA, 462 bp, Homo sapiens
  Payload ID: 7679
  Gene Symbol: HIST1H3E
  Gene Name: histone cluster 1, H3e
  Uniprot ID: P68431
  ENST ID: ENST00000614911
  CDS Start-End: 1-411
atggcgcgtactaagcagacggctcgtaaatccacaggcggtaaagcaccgcgcaaacagctggccactaaggcagctcgcaagagcgctccggccacgggcggcgtgaagaagccccatcgctaccgccctggcaccgtggctctgcgcgagatccgtcgctaccagaagtctaccgagcttctaatccggaagctgccgtttcagcgcctggtgcgagaaatagctcaggacttcaagaccgacctgcgcttccagagttccgcggtgatggcgctgcaggaggcctgcgaggcctacttggtggggcttttcgaggacaccaacctgtgcgctattcatgccaaacgcgtgaccatcatgcctaaagacatccagcttgcccgccgcattcgtggggagagggcgtgaattgttttgagtacaaaccttaaatccaaaggctcttctcagagccaacca

SEQ ID NO: 140959 - DNA, 2679 bp, Homo sapiens
  Payload ID: 7679
  Gene Symbol: HIST1H3E
  Gene Name: histone cluster 1, H3e
  ENST ID: ENST00000634733
  CDS Start-End: 361-771
gtcattctttaagaatcttttccagtaaacatttgttactttttcaaagtaattgggagctgttgagtgtggaagcgaaaaccaagttaagaagtcctgttatttgggtcatggtctacgtgaaacatcaaagaaacctgtaacggaaaacgacttgtttgaaagagccagttctctatccaaatttaccaatcagaatcttgcactgaaaaaataaaccaatcgtgaatctctacggccacttccggaatttagcaaccgatcactaacagggatcgtccacaatccaatcagagtgattctgttcctatatagaggggcaaaccaatcttcctaactcatttactttgcagatgaactatggcgcgtactaagcagacggctcgtaaatccacaggcggtaaagcaccgcgcaaacagctggccactaaggcagctcgcaagagcgctccggccacgggcggcgtgaagaagccccatcgctaccgccctggcaccgtggctctgcgcgagatccgtcgctaccagaagtctaccgagcttctaatccggaagctgccgtttcagcgcctggtgcgagaaatagctcaggacttcaagaccgacctgcgcttccagagttccgcggtgatggcgctgcaggaggcctgcgaggcctacttggtggggcttttcgaggacaccaacctgtgcgctattcatgccaaacgcgtgaccatcatgcctaaagacatccagcttgcccgccgcattcgtggggagagggcgtgaattgttttgagtacaaaccttaaatccaaaggctcttctcagagccaaccactttgtccgtgaaaagggctgtaatcctttgagacgcattagaccactaaactgcactgatccaaatagacatttgaaatagtggcattcagttccctcgatgcttcatttaaatttccaaatttaagcgctccctcaggttttcgcctagggctgggcctccctacgctgttctccattggtttagctggctttgttttgctgttcaggccctctgctgctttcttgtacattgttctcgttttctaaactcctggccacttaattgtaccctgcttaacccatcctcttgttttctggctcaacgctctttcatgtggtggcctgcattttaggtcttaactgcataggctttcaacgccttggttttgcctttccttgatgtttatttgaccttgcccgaggggccagcgcttttgatctgcatcaggctgccttactccactagtgttttgagacccagctacttgccggcgacggtcggtgccttgggtgcggtcaacgttactctctgtgcgcctgatactggtctaaggctaaggttattagctggaacacctagacccgtggcactaacacacagctcttgcagacttgacagccttgcataggttctaaactgcaggagtcaaagcaacgaaggtgcagatgggtgtgtctcaaacctgagtgcgaaaggaaaatgcagaaatcatgagccttttcaactttccagttgatatcttttgtttgcttttttcttttcttatttatttatttatttatttatttatttatttatttatttattttgagacggagtttcgcccttgttgcccaggctggagtgcattggcgcgatctcggctcaccgcaacctccgcctcccgggttcaagcgattctcctgcctcagccttccgagtagctgggattacaggcatgagccacctcgcccggccttccggctgatatcttaaaagaacttttcaactttagtaaataccctgtcttaatcaaatctcattaaaagtaccccatatttatcaacaaaacatgaaaatccttggacggcttcaaagttcttacagaaaatattctgcctttcctttccatacaaaggcacagcttcgaaactggtaggtgaagggaaggaaaataaggaattctgttacgaaatcatacaggctgttatttggaaatacagaagggtgtatgtactatatgggatactgcatgctatttggaagaattttgtttatttaaacatttcagcaaattcctcagttttgatatggggtgcagtatttttaactcattgagaaatttctactaacttttttgaatgtgctcttttcccactagttgcactaaggaaagaggttagtcatgtggtaaaattaatagtgacaaagctgtaaatagctctgcaggccaaggtagccatagtaagaagtcctggagatttatggaagaaatttttgttcatggaagcctgtcagacatgaagatgtgggtcttgtgaattggagattcagtgcgtgaggaaaacagcctaactatccataattaaggtaactactgtcagatatttgtaacatagtgaacatcctattatgctagatagaagcattctctatttgaatgttgtttcctgtatcctgtactttctttaagattctagctcaacaagttttaacctgtatttctcttacagctactggaattcagtacgtgaggacttggacttggtgggcacagaatgcatctttttatatcattaaatccaccagaacatctagcatggtcatttgcctaaaacaaagcctctggaaatttagtcaagttgagatgtaaaataaaagattactgaacagaa

SEQ ID NO: 140960 - DNA, 411 bp, Homo sapiens
  Payload ID: 7680
  Gene Symbol: HIST1H3F
  Gene Name: histone cluster 1, H3f
  Uniprot ID: P68431
  ENST ID: ENST00000618052
  CDS Start-End: 1-411
atggcacgcacgaagcaaacagctcgtaagtccactggcggcaaagccccgcgcaagcagctggccactaaggcggctcgcaaaagcgcgccagccaccggtggcgtgaagaagccccaccgctacaggcctggtactgtcgccctccgtgaaatccgccgctatcagaaatcgactgagctactgattcgcaagctaccattccagcgtctggtacgtgagatcgcgcaggacttcaagaccgacctgcgcttccagagctcggctgtgatggcgctgcaggaggcctgcgaggcttacctggtggggctctttgaggacaccaacctgtgtgctatccacgccaagcgagtgactatcatgcccaaggacatccagctcgctcgccgcattcgcggagagagggcataa

SEQ ID NO: 140961 - DNA, 2411 bp, Homo sapiens
  Payload ID: 7681
  Gene Symbol: HIST1H3G
  Gene Name: histone cluster 1, H3g
  Uniprot ID: P68431
  ENST ID: ENST00000614378
  CDS Start-End: 432-842
gccttataatggtcaaaggtttccagctagcagcagtccaggtgactcaagaaaacggcacaagataaacttctcaaaacgtggtcctccgaatctggccccacaacacatctactgaatgagaattagcgtcttccaagtcttaaagtagtcgtttacggactacagcttgagaagcgcagaattagaactttaagaagttaacgttcttggatcgcagactaaccgagaagagaggattcaaaaatgaagtgattcatccaatcagattttccagtaattcaccaatcacatcgttggactcttcagccaatggttttgttgcgcgggtcttttgaaaatcaacaaggccaattagaatgtttctgagtatatataagggcagtttccactctgccaagtggctgagtttttctttcaggtagtctgagatggcccgcaccaagcagactgcacgcaagtccaccggtggcaaagcgccgcgcaagcagctggccactaaggcggctcggaaaagcgcgccggccaccggcggcgtgaagaaacctcatcgctaccgtcccggcaccgtggctctgcgcgagattcgccgctatcagaagtcgactgagctgctgatccgcaagttgcctttccaacgcctggtgcgagaaatcgctcaggacttcaagacagatctgcgctttcagagttccgcggtgatggccctgcaggaggcctgcgaggcctacttggtggggctctttgaggataccaacctgtgtgccatccatgctaagcgagtgactatcatgcccaaggacattcagctcgctcgccgcattcgtggggagagagcgtagaggtttccgggcagtaattctatccaacttaaaaaggctcttttaagagccgcctactttcacccgaaaatagctgtgattaactaatcaaatctttgaaactaaacattggttttagtacttaagtcctcatttgattggctaaagttaatggtaagcttgctatatttgttcccgtgctttttcccgaaagtgccagattgtcagcgtccttttctaaactggcttttaggggtttggagcttcgatttggtagtggaaggggccacctgggggcgtttatatacattgtctcaagcgttagtcgcgttgtctacttacacccattatagatgggattttttttcgttgtgtatttctggttaatcccttttaaaactttacaggtatgagcattggcagttgagagtaggtagggatatccttggttgctgctttttcgtgtctgaagcagctatttccacaattccccctttttttaaacagttcttggtttttctgtgaaatgatccattttttaattcaatattagaaattggcggcagaaacgaaagccagattggcctctacattactggcagcatgggcattacgtgggaacttgttagaagctcccagggcattacatgggagcttgtttcaatccccatctagggctggagtcaatctgcatatacctcagatgattctcatgaacactgatttaggaagcctaggttgttggttttggtctcatcagtaaaggcatcctgcctgtgaactcttacaaggagtgagcttttgcaaaatgcatgtttatttatgttacagaatgaaatattctatgaaatgttctctaaagcaagtgcacagaacaatcccctaaaatagtttgatttctttacagatcagttttctcaatgtaacattacagtcacatgggaaggctttagaaaaatctttacctggggttcaatgagactaatagcaatctagagtgggcccagggaatggtaattattaaaattcaggtgcttctaacagctggggctgagactccttgctacataaattttaatactcttattagctctggtttgactctaggcttagcagttttctaattgaatcagtttccttgtagtttgccttcagagagaatatactggtctctaaagactttctggcttgcttgactatctttcaacacctggcttttataagaatttcttagggcaacactaatgtaagttttttcttttttgttttgttttgttttttgtttttttgaaccaccgaggtccttttagtgattggaagtatcaggtttttagggatgttacaaggaggaacacataccatcctgggctgcttggcatacaaccaagatatgttttcatatagaacccttcctttacagattagcacaaggccctgtttgggtattcagcagatccttctttatgatctttattaatttagcaacttgtcattttttttcacatattgcttttattttaaaaacttatttgacattccagaatatatgggaaaggagataatagtttaataaaacctatgttcctctca

SEQ ID NO: 140962 - DNA, 1237 bp, Homo sapiens
  Payload ID: 7682
  Gene Symbol: HIST1H3H
  Gene Name: histone cluster 1, H3h
  Uniprot ID: P68431
  ENST ID: ENST00000369163
  CDS Start-End: 11-421
ctctgaaggcatggcgcgtacgaagcagactgctcgcaagtccaccggcggcaaggctccgcgcaagcagctggccaccaaggcggctcggaagagcgctccggccaccggcggtgtcaagaagccccatcgctatcggcctggtacagtggctctccgcgagattcgccgctaccagaagtccaccgagctgctgatcagaaagctgccttttcagcgtctggtgcgtgagatcgcgcaggacttcaagaccgacttgcgcttccagagctccgcggtgatggcgctgcaagaggcatgcgaggcctacctggtggggctctttgaggacaccaacctgtgcgccatccacgccaagcgggtgactatcatgcccaaggacatccagctcgcacgtcgtatccgcggcgagagggcttgagtctcaaggactcactgattacatacccaaaggctcttttcagagccacccacatgcgcgctgaaaagatctgtttctctcaggaattcttcctggtacttgttttgcctgtagtagatagggcccatttccagacgttatacaatctgtttcgtaagactcagcctatccctttttgaatgctaattttgggagtcttaacatctaataatgtccggcatttttccgtaagcattgagtgtagccaaaagttccttcgtgtattgctctcccatctccgcagcccggttttgaccggatggtgcttctaattttctgctaacctgtactgtggtgtgtgtatatttcttgccaacacgccagaaataaaactaaggttgtactgaagttggaaaaattcaggttaatgtagctcatgctggctaaagtgaaacgttctctccccgccccccgttcctaagcagtgttaagttttctttgaattttttcaagccggattttgggcctgcttaaaccacttaaatgtagttaatgacagatggtttgaggtttaaaagtcttctggagaaagcccgccagagaacattccctttgaagccccatgtaaaaatacgtgtgggagagaaagtgttttctctgacttctgctgacagtggctaaaactctgaactgtcaggagtattcaaaataagactgccttgtaggtaagcctgtggtagtttttttgagcacaggataaaatacttgagtctttgcttaaatgttactttctcaatgaggctttgtatgactaaataaaatctgtataatccccac

SEQ ID NO: 140963 - DNA, 411 bp, Homo sapiens
  Payload ID: 7683
  Gene Symbol: HIST1H3I
  Gene Name: histone cluster 1, H3i
  Uniprot ID: P68431
  ENST ID: ENST00000616365
  CDS Start-End: 1-411
atggcacgaacaaagcaaacagctcgcaagtccaccggcggcaaagcgccgcgcaagcagctggccaccaaggcggctcgcaagagcgctccggccaccggtggcgtcaagaagccccaccgctaccgccccggcaccgtggccctgcgcgagatccgccgctaccagaagtcgaccgagctgctaatccggaagctaccttttcagcgcttggtacgggagatcgcacaggactttaagaccgatctgcgcttccagagctcggcggtgatggcgctgcaggaggcttgcgaggcctacctggtggggctatttgaggataccaacctgtgcgccattcacgccaaacgcgtcactattatgcctaaagacatccagcttgcgcgccgcatccgaggggagagggcataa

SEQ ID NO: 140964 - DNA, 411 bp, Homo sapiens
  Payload ID: 7684
  Gene Symbol: HIST1H3J
  Gene Name: histone cluster 1, H3j
  Uniprot ID: P68431
  ENST ID: ENST00000359303
  CDS Start-End: 1-411
atggcccggacgaagcagacagctcgcaagtctaccggcggcaaggcaccgcggaagcagctggccaccaaggcagcgcgcaaaagcgctccagcgactggcggtgtgaagaagccccaccgctacaggccaggcaccgtggccttgcgtgagatccgccgttatcagaagtcgactgagctgctcatccgcaaactgccatttcagcgcctggtgcgagaaatcgcgcaggatttcaaaaccgaccttcgtttccagagctcggcggtgatggcgctgcaagaggcgtgcgaggcctatctggtgggtctctttgaagacaccaacctctgtgctattcacgccaagcgtgtcactattatgcctaaggacatccagcttgcgcgtcgtatccgtggcgagcgagcataa

SEQ ID NO: 140965 - DNA, 312 bp, Homo sapiens
  Payload ID: 7685
  Gene Symbol: HIST1H4A
  Gene Name: histone cluster 1, H4a
  Uniprot ID: P62805
  ENST ID: ENST00000617569
  CDS Start-End: 1-312
atgtctggacgtggtaagggcgggaagggtttgggtaaggggggtgccaagcgccaccgcaaggtgttgcgtgacaacatccagggcatcaccaagccggccatccggcgtctggcccggcgtggcggtgtgaagcggatctctggtctgatctacgaggagactcgcggggtgctcaaggtgtttttggagaacgtgatccgtgacgctgtcacctatacggagcacgccaagcgcaagacagtcactgccatggacgtggtctacgcgcttaagcgccagggacgcaccctttatggctttggcggttaa

SEQ ID NO: 140966 - DNA, 438 bp, Homo sapiens
  Payload ID: 7686
  Gene Symbol: HIST1H4B
  Gene Name: histone cluster 1, H4b
  Uniprot ID: P62805
  ENST ID: ENST00000377745
  CDS Start-End: 1-312
atgtctggtcgcggcaaaggcggtaaaggtttgggtaagggaggtgccaagcgtcaccgaaaagtgctgcgggataacatccaaggcatcaccaaaccggccattcggcgccttgctaggcgtggtggggttaagcgaatttccggtttgatttatgaggagactcgtggcgttctcaaggtgtttctggagaacgtgatccgggacgccgtgacctacacggagcacgccaagcgcaagactgtcactgccatggatgtggtttacgcgctcaagcgtcaaggacgcactctgtacggcttcggcggttaatcttttcgtcagttttcttccaatggcccttttcagggccgcccactccctctcagaaagagctgtgattgtattctttcggatggtaacatctcaatggctttactcggctattctgcctagtat

SEQ ID NO: 140967 - DNA, 435 bp, Homo sapiens
  Payload ID: 7687
  Gene Symbol: HIST1H4C
  Gene Name: histone cluster 1, H4c
  Uniprot ID: P62805
  ENST ID: ENST00000377803
  CDS Start-End: 73-384
ttttcaatcaggtccgccaagtttgtatttaaggaactgtttcagttcataccttccactgcgataggaatcatgtctggtcgcggcaaaggcggaaaaggcttggggaagggtggtgctaagcgccatcgtaaggtgctccgggataacatccagggcattacaaaaccggctattcgccgtttggctcggcgcggtggcgtcaagcgcatttccggtcttatctatgaggagactcgaggtgtgcttaaggttttcttagagaacgttattcgagacgccgtcacctatacggagcacgccaagcgcaaaactgtcacagccatggatgtagtatatgccctaaaacgtcaggggcgcactctgtatggcttcggcggctgaatctaagaatacgcggtctcctgagaacttcaaaaaacaaaaacaaaaaaa

SEQ ID NO: 140968 - DNA, 312 bp, Homo sapiens
  Payload ID: 7688
  Gene Symbol: HIST1H4D
  Gene Name: histone cluster 1, H4d
  Uniprot ID: P62805
  ENST ID: ENST00000614247
  CDS Start-End: 1-312
atgtctggccgcggtaagggcggaaagggtctaggtaagggtggcgccaagcgtcaccgtaaggtattgcgtgacaatatccaaggaatcaccaagcccgctatccgccgcctggctcgccgcggcggcgtcaagcgtatttctggcctcatttatgaggaaactcgcggagtgctgaaagttttcctggaaaatgtaatccgcgatgctgtcacctacacggaacacgccaaacgcaagacagtcacagccatggacgtggtgtacgcgctcaagcgccagggacgcactctttatggcttcggcggctga

SEQ ID NO: 140969 - DNA, 1487 bp, Homo sapiens
  Payload ID: 7689
  Gene Symbol: HIST1H4E
  Gene Name: histone cluster 1, H4e
  Uniprot ID: P62805
  ENST ID: ENST00000615164
  CDS Start-End: 94-405
agtcttcatttaggtccgaattcccggcatataagaatactaccgtcgcttgtttttcagatttttgcggctattttcgttggtgtgttggtcatgtctggtcgcggcaaaggcggaaagggactgggtaaaggaggcgctaagcgtcaccgtaaggtcctgcgagataacatccagggcattaccaagcctgccatccggcgccttgctcgtcgcgggggtgtcaagcgcatttctggtctcatctacgaggagactcgcggggttctgaaggtgtttctggaaaacgtgattcgtgatgctgtgacttacacggagcacgccaaacgcaagacagtgacagcgatggatgtggtctacgcgctgaagagacagggacgcactctttacggcttcggcggctaatgctaccgcttaaacgactcagcatctcgacttcccaaatcaaaggcccttttcagggccgcccacagttttccgcaaaagagctcatgacttgttagacgattggttggtctctttataagttaattgttcctgtcaacaggtacgtatatttttcagccgttttttttttttcgttccaaattacatttggggtttcggcatacgattttttaggctacgatccttttatgtttattgtagtagggccttagattgcactgaaaaggctagggtaatagtgtctgtttaccttaccacttttattttgagtacctaaaaatgcatggttttcgacataagtgggaaaaccgcaagacactgcgtaaccgctcaaaatggcggagagcgaagaacaaagccggtgcctggcaatgggccggacccgcgaattagcgcaaccaatcatcttcctggaaaggagtgtgggccttaaattctagcggcctgttttctattacttaacctaacgaccgagtttaggtgtgtagaagttcctggggtagataagctcacgcaaggagaggttgcaagcattcatttcggaattctattaagccaacccagttgtcccttagaagttatgatatttgctgttttttgaataaaagaatttgactctctttaaaccctaaagcttgaaatttagcatttatctcacatgagacaaatgtttaggaactcatgtttaggaactcatgttcctgcctgaggcaggaactgaaacaccagatcacttgcatcgagaccgtgagactccctatgtttcatccatcatgattgcgtccttatccctccctgatttcctgttttctcgcccttctcgctacataagccccccaattttggtcggggagacggatttgtgatttcatctcctccctcatgaatactcatagaatttttccaaacctactgaatctgtatgtaaggttgactctgtaaggcatatatatattccagctccccttcactgccacagagcgctcattccatcctgggattacttctccctctgaaaataaagtctttgttacttcctg

SEQ ID NO: 140970 - DNA, 312 bp, Homo sapiens
  Payload ID: 7690
  Gene Symbol: HIST1H4F
  Gene Name: histone cluster 1, H4f
  Uniprot ID: P62805
  ENST ID: ENST00000244537
  CDS Start-End: 1-312
atgtctggtagaggcaaaggtggtaaaggtttaggaaagggaggcgccaagcgccatcgcaaagtgctgcgtgacaacatacagggcatcacgaagcccgccatccgtcgcttggcccgacgcggcggcgtgaaacgcatttcgggcctcatttatgaggagacccgcggtgttcttaaggtgttcctggagaatgtgatacgggacgccgtaacctacacggagcacgccaagcgtaagacagtcactgcaatggatgttgtctacgcgctcaagcgccagggacgcactctgtacggctttggtggctga

SEQ ID NO: 140971 - DNA, 297 bp, Homo sapiens
  Payload ID: 7691
  Gene Symbol: HIST1H4G
  Gene Name: histone cluster 1, H4g
  Uniprot ID: Q99525
  ENST ID: ENST00000611444
  CDS Start-End: 1-297
atgtctgttcggggcaaggccggaaaaggccttgggaaaggcggtgccaagtgccatcgcaaggtactgagcgataatattcagggcattaccaagtgcactatccggcgcttggcccggcatggcggtgtcaagcgcatcttgggcctcatttatgaggagacccgccgggtgttcaaggtgttcctggaaaatgtgatctggtacgccgtgaccaacacggagcacgccaagcgcaagacggtcaccgccatggccgtggtctacgtgctcaaacgccagggaagaaccctgtaa

SEQ ID NO: 140972 - DNA, 397 bp, Homo sapiens
  Payload ID: 7692
  Gene Symbol: HIST1H4H
  Gene Name: histone cluster 1, H4h
  Uniprot ID: P62805
  ENST ID: ENST00000377727
  CDS Start-End: 11-322
ttgcttagtcatgtctggccgtggtaaaggtggaaaaggtttgggtaagggaggagctaagcgtcatcgcaaggttttgcgcgataacatccagggcatcactaagccagctatccggcgccttgctcgtcgcggcggtgtcaagcgaatttctggccttatctatgaggagactcgtggtgttctgaaggtgttcctggagaacgtgattcgtgacgctgtcacttacacagagcacgccaaacgcaagaccgtgacagcaatggatgtggtctacgcgctgaagcgacagggacgcactctttacggcttcggtggctaaggctcctgcttgctgcactcttattttcattttcaaccaaaggcccttttcagggccgcccacttttttcataaa

SEQ ID NO: 140973 - DNA, 1034 bp, Homo sapiens
  Payload ID: 7692
  Gene Symbol: HIST1H4H
  Gene Name: histone cluster 1, H4h
  ENST ID: ENST00000635491
  CDS Start-End: 36-347
aggtttcttaagttggttttagaagttgcttagtcatgtctggccgtggtaaaggtggaaaaggtttgggtaagggaggagctaagcgtcatcgcaaggttttgcgcgataacatccagggcatcactaagccagctatccggcgccttgctcgtcgcggcggtgtcaagcgaatttctggccttatctatgaggagactcgtggtgttctgaaggtgttcctggagaacgtgattcgtgacgctgtcacttacacagagcacgccaaacgcaagaccgtgacagcaatggatgtggtctacgcgctgaagcgacagggacgcactctttacggcttcggtggctaaggctcctgcttgctgcactcttattttcattttcaaccaaaggcccttttcagggccgcccacttttttcataaaagagcagacatcttgttatcctgctttgttccagatttttgctgagaagtagttactgtgcacatgtgtagatttgcagttctgtggctcctgatggatctgagaagatggacgtggaggatgaaaatctgtctgattattttgaactgatgtttgttgctatggagatgctgcctatatgttgatgttgcagacgttaagtcactagcccacagccttgtattccatactcagagaccctgctacttacttgacatctcaacttgaaagtccaattaatatgcacttcaaactttaataggcttcaaacagaatttctttcattatctctgcaaaacagcttctctcatcatcttgaaattagtgaatggcattttactgttttagttggagtcatttctgtggttttctttcacatcctacataacaatccatcagtaagttctatgagctcttctttgaaaacaaacagaatccaactgtttcattcccacttctgctctggtcaagccactgccaacactcacctttattattgtagcaccctcattgcctagttctgtcccacagatttccaataaaaggtgaataaaatcaggtcactcttctgct

SEQ ID NO: 140974 - DNA, 1034 bp, Homo sapiens; identical to SEQ ID NO: 140973
  Payload ID: 7692
  Gene Symbol: HIST1H4H
  Gene Name: histone cluster 1, H4h
  ENST ID: ENST00000634560
  CDS Start-End: 36-347

SEQ ID NO: 140975 - DNA, 2163 bp, Homo sapiens
  Payload ID: 7692
  Gene Symbol: HIST1H4H
  Gene Name: histone cluster 1, H4h
  ENST ID: ENST00000634956
  CDS Start-End: 140-451
gggtggggccaagaagcaggaccaaagttccggtatgcgcgctttcagtcttcaattaggtccgaattcccggcatataagggcgttgctttgccttggcgtttaggtttcttaagttggttttagaagttgcttagtcatgtctggccgtggtaaaggtggaaaaggtttgggtaagggaggagctaagcgtcatcgcaaggttttgcgcgataacatccagggcatcactaagccagctatccggcgccttgctcgtcgcggcggtgtcaagcgaatttctggccttatctatgaggagactcgtggtgttctgaaggtgttcctggagaacgtgattcgtgacgctgtcacttacacagagcacgccaaacgcaagaccgtgacagcaatggatgtggtctacgcgctgaagcgacagggacgcactctttacggcttcggtggctaaggctcctgcttgctgcactcttattttcattttcaaccaaaggcccttttcagggccgcccacttttttcataaaagagcagacatcttgttatcctgctttgttccagatttttgctgagaagtagttactgtgcacatgtgtagatttgcagttctgtggctcctgatggatctgagaagatggacgtggaggatgaaaatctgtctgattattttgaactgatgtttgttgctatggagatgctgcctatatgttgatgttgcagacgttaagtcactagcccacagccttgtattccatactcagagaccctgctacttacttgacatctcaacttgaaagtccaattaatatgcacttcaaactttaataggcttcaaacagaatttctttcattatctctgcaaaacagcttctctcatcatcttgaaattagtgaatggcattttactgttttagttggagtcatttctgtggttttctttcacatcctacataacaatccatcagtaagttctatgagctcttctttgaaaacaaacagaatccaactgtttcattcccacttctgctctggtcaagccactgccaacactcacctttattattgtagcaccctcattgcctagttctgtcccacagatttccaataaaaggtgaataaaatcaggtcactcttctgctgaaaaccctccaatggctctcatttcgctaaaaagaaaacccaaagtcctttcagtaccttgcaaggccccacactctggctcttgttatctctttggcctcaaatcccactactcctttccttcctcgcgcagctccgctagcctcaaacttgcttgtctctctctgttgctcaggctggagtgccgtaacgggatcatggctcactgcaacctctgcctccctggctaaagtgatcctcctgtctcagtctcttgagtagctgggactacaggtgcacaccaccacaccggagtaatttttgtattttctgtagagatggggtttaaccatgttacccaggctgtcttaaactcttgggctcaagtgatctgcctaccacggcctcccaaagtgctgggattataggcatgagctactgtgccgggcctgataaaacctatttttagtgaaactcttgctcttctacatatttccaatttttagccacaataaacaaaaatatgttaaaatagaatcaatagaataggattttgtatattattaaatatatgatgaaaatgaatggtggtaatctaggatgaggaccaaatttcaaacttggataagcagagctatgaggataatgaggccagtcttggtcctgctgggtttgagccacctgtggaatacttagttcatatagtatttggaagactaattactgcacttcttgttatagactgatttaccctcctccctgctgcatatgttgaagtccttgaaaatatgactgcatttagagttagggtcgttaaagatataaaatgaagttattgaggtgggtctgaatccaatctgactggtgtccttataagtaaagaagactggacacacacacagagaaaagataatgtgaagacacagggagaagacagttatcgacacaccatggagagagacctcagaagaaatcaaccttgcccacagggttaatcttaagagtcgtagcctccagaattgtgaaaaaataaatgtttaagcca

SEQ ID NO: 140976 - DNA, 1294 bp, Homo sapiens
  Payload ID: 7693
  Gene Symbol: HIST1H4I
  Gene Name: histone cluster 1, H4i
  Uniprot ID: P62805
  ENST ID: ENST00000615353
  CDS Start-End: 722-1033
ctgcagtagataatgaggtaaccgaaggcaattgtgcttcttttgataagaagctttcttggtcatatcaggaaattccagagaaagtccctccctgtatttggggaagagaaacaggacaaagttagagggaccttgattcttagacttgtttctgagaaccctcaattttcaaaaacacccaccattaccaagctcgatatttggggggataattctccaccccaaacactagaaatgaaaataagtagaaaagaacttagcaatatacctgaacgatctttaaattctatgagtctatcttgttctattgctaggaatttagcatatggagtatatttccattgtatattaaggagaaaaatgccacaaaatagcatagttccatacaaataatgttaaaggaaaacatgcatatatgcagagataacattctttttgctttatgtatcttctataatgttaacatttttgttatgaggcaggaatcatgttaaatgaaaaaaggaaaaacagcctaggtcttgaggattaaaaaggactgaaggagaacaagagggagtagagcacagcaggcctgtttcccttttaggtcccctcccccaatgcagagggacttcccgccaaagctcttccggttttcagtctggtccgcagaggttacccataaaagaaagctgccatcacaggcagcagacctttgttctctgaccacttgataatgtcaggacgcggcaaaggaggtaagggcctggggaaagggggtgccaagcgccaccgcaaggtgctgcgcgacaacatccagggtatcaccaagccagccattcggcgccttgctcgccgcggcggcgtgaagcgcatttctggcctcatctatgaggagacccgcggagtgttgaaggtgttcctggagaacgtgatccgggacgccgtgacctacacggagcacgccaagcgcaagacggtcaccgccatggacgtggtctacgcgctcaagcgccagggccgcaccctctatggcttcggcggctaaatggcattttgaagcccagtcattctctaaaaaggccctttttagggcccctaagctttcaacaaaagagttgaaatgactgcaaactgagtctcttaatagggccattgtcagtgagttctgtcatcctattttacaagattaactcgacgccgaaaatgggctgatgactacaggtgaccttgggccgagatttttccaaggccagaagagcctctgctggccagtaacttctggcggctgcctggaaattgcctgcag

SEQ ID NO: 140977 - DNA, 373 bp, Homo sapiens
  Payload ID: 7694
  Gene Symbol: HIST1H4J
  Gene Name: histone cluster 1, H4j
  Uniprot ID: P62805
  ENST ID: ENST00000355057
  CDS Start-End: 18-329
gactcctcttgctcgtcatgtctggccgcggcaaaggcgggaagggtcttggcaaaggcggcgctaagcgccaccgtaaagtactgcgcgacaatatccagggcatcaccaagccggccatccggcgccttgctcgccgcggcggcgtgaagcgcatctccggcctcatctacgaggagactcgcggggtgctgaaggtgttcctggagaacgtgatccgggacgccgtgacctatacagagcacgccaagcgcaagacggtcaccgccatggatgtggtctacgcgctcaagcgccagggccgcaccctctacggtttcggtggttgagcgtccctttctatcaataaaaggcccttttcagggccacccta

SEQ ID NO: 140978 - DNA, 312 bp, Homo sapiens
  Payload ID: 7695
  Gene Symbol: HIST1H4K
  Gene Name: histone cluster 1, H4k
  Uniprot ID: P62805
  ENST ID: ENST00000611927
  CDS Start-End: 1-312
atgtctggccgcggcaaaggcgggaagggtcttggcaaaggcggcgctaagcgccaccgtaaagtactgcgcgacaatatccagggcatcaccaagccggccatccggcgccttgctcgccgcggcggcgtgaagcgcatctccggcctcatctacgaggagactcgcggggtgctgaaggtgttcctggagaacgtgatccgggacgccgtgacctatacagagcacgccaagcgcaagacggtcaccgccatggatgtggtctacgcgctcaagcgccagggccgcaccctctacggtttcggtggttga

SEQ ID NO: 140979 - DNA, 312 bp, Homo sapiens
  Payload ID: 7696
  Gene Symbol: HIST1H4L
  Gene Name: histone cluster 1, H4l
  Uniprot ID: P62805
  ENST ID: ENST00000618305
  CDS Start-End: 1-312
atgtctgggcgcggcaaaggcgggaagggtctgggcaaaggaggcgctaagcgccaccgcaaagttctgcgcgacaacattcagggcatcaccaagcccgccatccgacgcctggcacggcgtggaggcgttaagcgcatctcaggccttatatacgaggagacacgcggagttcttaaagtgtttttggagaatgtaatccgcgatgcagttacctacacggagcacgccaaacgcaagacagtcacagccatggacgtggtttacgcgctcaagcgccagggccgcaccctgtatggctttggcggctga

SEQ ID NO: 140980 - DNA, 549 bp, Homo sapiens
  Payload ID: 7697
  Gene Symbol: HIST2H2AA3
  Gene Name: histone cluster 2, H2aa3
  Uniprot ID: Q6FI13
  ENST ID: ENST00000369159
  CDS Start-End: 39-431
ccaggcaggagtttctctcggtgactactatcgctgtcatgtctggtcgtggcaagcaaggaggcaaggcccgcgccaaggccaagtcgcgctcgtcccgcgctggccttcagttcccggtagggcgagtgcatcgcttgctgcgcaaaggcaactacgcggagcgagtgggggccggcgcgcccgtctacatggctgcggtcctcgagtatctgaccgccgagatcctggagctggcgggcaacgcggctcgggacaacaagaagacgcgcatcatccctcgtcacctccagctggccatccgcaacgacgaggaactgaacaagctgctgggcaaagtcaccatcgcccagggcggcgtcttgcctaacatccaggccgtactgctccctaagaagacggagagtcaccacaaggcaaagggcaagtgaggctgacgtccggcccaagtgggcccagcccggcccgcgtctcgaaggggcacctgtgaactcaaaaggctcttttcagagccacccacgttttcaaataaaagagttgttaatgctg

SEQ ID NO: 140981 - DNA, 564 bp, Homo sapiens
  Payload ID: 7698
  Gene Symbol: HIST2H2AA4
  Gene Name: histone cluster 2, H2aa4
  Uniprot ID: Q6FI13
  ENST ID: ENST00000607355
  CDS Start-End: 54-446
cgactttcccgatcgccaggcaggagtttctctcggtgactactatcgctgtcatgtctggtcgtggcaagcaaggaggcaaggcccgcgccaaggccaagtcgcgctcgtcccgcgctggccttcagttcccggtagggcgagtgcatcgcttgctgcgcaaaggcaactacgcggagcgagtgggggccggcgcgcccgtctacatggctgcggtcctcgagtatctgaccgccgagatcctggagctggcgggcaacgcggctcgggacaacaagaagacgcgcatcatccctcgtcacctccagctggccatccgcaacgacgaggaactgaacaagctgctgggcaaagtcaccatcgcccagggcggcgtcttgcctaacatccaggccgtactgctccctaagaagacggagagtcaccacaaggcaaagggcaagtgaggctgacgtccggcccaagtgggcccagcccggcccgcgtctcgaaggggcacctgtgaactcaaaaggctcttttcagagccacccacgttttcaaataaaagagttgttaatgctg

SEQ ID NO: 140982 - DNA, 393 bp, Homo sapiens
  Payload ID: 7699
  Gene Symbol: HIST2H2AB
  Gene Name: histone cluster 2, H2ab
  Uniprot ID: Q8IUE6
  ENST ID: ENST00000331128
  CDS Start-End: 1-393
atgtcaggacgcggaaagcagggaggcaaggcccgcgctaaggccaagtcgcgctcgtcccgcgctggtctccagttcccggtggggcgagtgcaccgcttgctgcgcaaaggcaactacgcggagcgggtcggggcaggcgccccggtgtacctggcggcggtcctcgagtacctgaccgcggaaattctggagctggcgggcaacgcggctcgggacaacaagaagacgcgcatcatccctcgccatctgcaactagccgtgaggaatgacgaagagctcaacaagttactcgggggtgtcaccattgcccagggcggcgtcttgcccaatatccaggctgtcctgttgcccaagaaaacggagagtcacaagcctggcaagaacaagtaa

SEQ ID NO: 140983 - DNA, 390 bp, Homo sapiens
  Payload ID: 7700
  Gene Symbol: HIST2H2AC
  Gene Name: histone cluster 2, H2ac
  Uniprot ID: Q16777
  ENST ID: ENST00000331380
  CDS Start-End: 1-390
atgtctggtcgtggcaaacaaggaggcaaggcccgcgccaaggccaagtcgcgctcgtcccgcgctggcctccagttcccggtagggcgagtgcaccgcttgctgcgcaaaggcaactacgcggagcgggtgggggccggcgcgcccgtctacatggcggcggtcctcgagtacctgaccgccgagatcctggagctggcgggcaacgcggctcgggacaacaagaagacgcgcatcatccctcgtcacctccagctggccatccgcaacgacgaggaactgaacaagctgctgggcaaagtcaccatcgcccagggcggcgttttgcctaacatccaggccgttctgttaccaaagaaaaccgaaagccacaaagccaaaagcaaataa

SEQ ID NO: 140984 - DNA, 2194 bp, Homo sapiens
  Payload ID: 7701
  Gene Symbol: HIST2H2BE
  Gene Name: histone cluster 2, H2be
  Uniprot ID: Q16778
  ENST ID: ENST00000369155
  CDS Start-End: 13-393
ctgtgtcttaccatgcctgaaccggcaaaatccgctccggcccctaaaaagggctccaagaaagccgtcaccaaagcccagaagaaagacggcaagaagcgcaagcgcagccgcaaagagagctactccatctacgtgtacaaggtgctgaagcaggtccaccccgacaccggcatctcgtccaaggccatgggcatcatgaactccttcgtcaacgacatcttcgagcgcatcgcgggagaggcttcccgcctggcgcactacaacaagcgctccaccatcacatcccgcgagatccagacggccgtgcgcctgctgctgcccggcgagctggccaagcacgccgtgtccgagggcaccaaggcggtcaccaagtacaccagctccaagtgagtccctgccgggacctggcgctcgctcgctcgagtcgccggctgcttgactccaaaggctcttttcagagccacccacctaatcactagaaaagagcttgttcacttattcccttagtttcttttcataaagtaagttattttagtgtgaaggtcatgggaaatggcatacgtagctttttaactatttggaactcgaggtccccagtgcgtcattggatttgcttttgaatctagagcgtgtctttactcattgtgctgcttagccttcccaggagtcggttctcaattaggctgttgggaatccgcctctttacccgcccccactcccgccccacacgcgccctggtggctccttgggtctgtttcattctaaaacgaagtggctgagttcggctgtcatttaagagaactccaggacacaattcagcccgggttccgcaaacactgcgtgacagctctgtatgactgacgcttggcagcagcttttgtgtccggtcaccagttctgccgtgcgatggggcctcctgtggataccagccgttctgtgtattttggacgaaggccgcgcagccgggtcccagccttgtcctgattgggcgacaagaatattcaaaattctgcgcctttttctaatttgtagatttcagtttccgtcgttcactttgagactttgaaattcctatttctcattttgttgataatttctgcatttaatggtctgtgctttaaatggtaacgctacggccccaggtcactgcgaggcacttaccatgtagatacgggctcaaaagtcacctctcagagacctacgtcatccactcaggaattcgcgcctctcatacttgcctgtctcattttatcttccttctagcagctgtctgaaattggttcgtctgttttcttgtttatggtattctcaagcccttgacagaccggctagtgtggttttcccgtgcatcttcagcctggcacattatggacacttaaatactacgtattgatctaatattgttgggttaatttttccatcccacccttttcttaatcgcttccgtggatggatgaagggtgctgttcatttccattagatgtatgtgaaggcacagtgaaaatggaaatgttcttggagctacttcctcaaaatgtatccttagtcacctcagtgcaacagctgggagggggccgtgttaagattttttttgctacaaagaggaggtggcaatggtagatccacccttatgcttctcagtttagcataacctcttatggattttcatcaaattcagcgtgttggtcactggaaagagccttttccttctccttttcttactctcccctcatggtgttcccctcttaaaggagaggagcttttaatttacacttaccacctcatttgcttttctggaggccatgcaatataggcgggactacagagttaatctcctttttacaaatgaggccaagagaagcctcattggttcacagtcatgcagctcatactgtccacccttgtattctcagatgcaggacaattgcattttagttttattttgtggaggtgcagaatatttactctttctgtccaacccttgattctgccgaggaagacactgatggtttgatgagtgattcagctgtttttggctaagggcttttggagctgatggcaggggtttgatgaatccaaatgagctctagacattatcacagactgaatagatcttaactgtctcctacatgtgtgttttcaaatgtgtatagatgctattgttattaataaagttaccaattaatttaaa

SEQ ID NO: 140985 - DNA, 444 bp, Homo sapiens
  Payload ID: 7701
  Gene Symbol: HIST2H2BE
  Gene Name: histone cluster 2, H2be
  Uniprot ID: Q16778
  ENST ID: ENST00000369160
  CDS Start-End: 2-379
catgcctgaaccggcaaaatccgctccggcccctaaaaagggctccaagaaagccgtcaccaaagcccagaagaaagacggcaagaagcgcaagcgcagccgcaaagagagctactccatctacgtgtacaaggtgctgaagcaggtccaccccgacaccggcatctcgtccaaggccatgggcatcatgaactccttcgtcaacgacatcttcgagcgcatcgcgggagaggcttcccgcctggcgcactacaacaagcgctccaccatcacatcccgcgagatccagacggccgtgcgcctgctgctgcccggcgagctggccaagcacgccgtgtccgagggcaccaaggcggtcaccaagtacaccagctccaagcgtctcgaaggggcacctgtgaactcaaaaggctcttttcagagccacccacgttttcaaataaa

SEQ ID NO: 140986 - DNA, 1954 bp, Homo sapiens
  Payload ID: 7702
  Gene Symbol: HIST2H2BF
  Gene Name: histone cluster 2, H2bf
  Uniprot ID: Q5QNW6
  ENST ID: ENST00000369167
  CDS Start-End: 37-417
cttctttaagtctcttttctcttttttcgcgcaaaaatgccggatccagcgaaatccgctcctgctcccaagaagggctccaaaaaggctgttacgaaagtgcagaagaaggacggcaagaagcgcaagcgcagccgcaaggagagctactccgtttacgtgtacaaggtgctgaagcaggtccaccccgacaccggcatctcgtccaaggccatgggcatcatgaactccttcgtcaacgacatcttcgagcgcatcgcgggagaggcgtcccgcctggcgcactacaacaagcgctccaccatcacatcccgcgagatccagacggccgtgcgcctgctgctgcccggcgagctggccaagcacgccgtgtccgagggcaccaaggcggtcaccaagtacaccagctcgaagtaagagtgtgcaagggacgcaatagatcaaccacctaaccccaaaggctcttttcagagccacttcagtaatcgagaaagcagctgtaaacacttgtcagagcgtttgatagcttttggtcaggtagggagtgttaccatggtcacggatgcattcgggtttaggactaaggagtttcctgtagtcctgtaatgagttggccctcagtcatccccgtccagtcttactgagttgcttgttatctgtgctacgagattcgaaaggtttgactcgttctgggatatttgggagggatggagggaaggaggcggggggtggttctacaccccttcggcctttaacctgtatctttaaagtcgttttcctttttgtttctgaaagtaatgaacgagatgagatttcccatacagatgagaaaccctcggtccgacctcttactatttcttagtgttttaatctgttttccttaccatatacctacaggcgtctgtcacaaactttgtctaatatagccatgtgctttcgtcccttagcctttttgcaagtcctgacttagccatcctcccctaacttccattccagtgacttcaaacagggagatatattgccaccaccccaccccctgtggagtatttggcaatatctgtagatgttttgggttgtcaggtgtgtgtgtgttgcgggggaggtgctagaagtatccaatgggcagaggccaggagtgctaagcataaggcacaggacagtcctctggggggacaaagagctacctggcctgtaatgtcgatctttggtgattgagagaccccagcgcccaaagacatccctaaccttcaggatttaatcctcttcagtcaaacgtttccttaaccctatcagcccatgtttttcttttcttggtgaaagctgagcacttcataggctgtttacaggtccttctccacaggaaaatacttcctccaggacaagaaccctgtcttggttccaaactttcccaattataagagtcacctttgcgcttgttaaacctgcttccaggtgcttctcctgaggtttcctgattcagctagactggaggtgggacctgacgaggtggttggtttttagtgttctcaggagtgtggatgttttaataggtgttgggtcctcatgttaatcgacctgtgggtgtgtcacagtctttgtgtcacagatgtcctgagaaaggaaacaatttgaggatgagtggaggggaatttgtggtgtagagaaggccacagttaatatgtggggtgaatttctgaagacctctcagttcaaaacttgaataactcaagactcatcctgacaaaagccagtggatgtttcttttgccaaataaaatatacccttggtgcaactggaaaatcttagcttataattaacttgacagcctttgaaattaagccattcttgataaatcttgggggaattaacaactttgtgcttaaaatgaattttactaatttttatgatgttgaaattcaaatttacacccaattaaaagatataaaatgcggta

SEQ ID NO: 140987 - DNA, 999 bp, Homo sapiens
  Payload ID: 7702
  Gene Symbol: HIST2H2BF
  Gene Name: histone cluster 2, H2bf
  Uniprot ID: Q5QNW6
  ENST ID: ENST00000545683
  CDS Start-End: 51-455
ggtagttcggattacttctttaagtctcttttctcttttttcgcgcaaaaatgccggatccagcgaaatccgctcctgctcccaagaagggctccaaaaaggctgttacgaaagtgcagaagaaggacggcaagaagcgcaagcgcagccgcaaggagagctactccgtttacgtgtacaaggtgctgaagcaggtccaccccgacaccggcatctcgtccaaggccatgggcatcatgaactccttcgtcaacgacatcttcgagcgcatcgcgggagaggcgtcccgcctggcgcactacaacaagcgctccaccatcacatcccgcgagatccagacggccgtgcgcctgctgctgcccggcgagctggccaagcacgccgtgtccgagggcaccaaggcggtcaccaagtacaccagctcgaagttaataggacccatcctttggaagtaggaaagtggcatagaaggagaagctgagttagagatcactcacccacttgcccatcaactggaactgcaagagatcagagaataaagatatcagttggtccaaggaaaataatgaggaagagagaattggggagacagaattaatgtagactctgagggatcaactcagatctcttgagtttctatttctctttctcaaaatccagtactaacagaactgaacaagctacaggtggttatcaaggaaacttcactgcggtgcgtccaggcttaatgctacctcagggttgcccttcccatccttttcataaaataagctctaataaaccatggaagcacagatacaagttgcttcatactcatgagttctacccagagttaccacaggaagacaaaactcttgactcacaacagccacagcctgtacccttctaactgtcccctctgagtccaacttaccccaaaggagcagagttgtcaagaaccacatgttgtctccaagctggtgggagcagtgaaatctgtaacatgcaagatattgaaga

SEQ ID NO: 140988 - DNA, 411 bp, Homo sapiens
  Payload ID: 7703
  Gene Symbol: HIST2H3PS2
  Gene Name: histone cluster 2, H3, pseudogene 2
  ENST ID: ENST00000392948
  CDS Start-End: 1-411
atggcccgtactaagcagactgcccgcaagtcgaccggcggcaaggccccgaggaagcagctggctaccaaagcggcccgcaagagcgcgccggccacgggcggggtgaagaagccgcaccgctaccggcccggcaccgtggctctgcgggagatccggcgctatcagaagtctacggagctgctgatccgcaagctgcccttccagcggctggtacgcgagatcgcgcaggagtttaagacggacctgcgcttccagagctcggccgtgatggcgctgcaggaggccagagaggcctacctggtggggctgttcgaagacacgaacctgtgcgccatccatgccaagcgcgtgaccatcatgcccaaggacatccagttggtcagccgcatccgcggggagcgggcctaa

SEQ ID NO: 140989 - DNA, 1656 bp, Homo sapiens
  Payload ID: 7704
  Gene Symbol: HIST2H3A
  Gene Name: histone cluster 2, H3a
  Uniprot ID: Q71DI3
  ENST ID: ENST00000403683
  CDS Start-End: 37-447
cgccgctgcgctggtaagcctgtgttttggttcgctatggcccgtactaagcagactgctcgcaagtcgaccggcggcaaggccccgaggaagcagctggccaccaaggcggcccgcaagagcgcgccggccacgggcggggtgaagaagccgcaccgctaccggcccggcaccgtagccctgcgggagatccggcgctaccagaagtccacggagctgctgatccgcaagctgcccttccagcggctggtacgcgagatcgcgcaggactttaagacggacctgcgcttccagagctcggccgtgatggcgctgcaggaggccagcgaggcctacctggtggggctgttcgaagacacgaacctgtgcgccatccacgccaagcgcgtgaccattatgcccaaggacatccagctggcccgccgcatccgtggagagcgggcttaagaagtggcggttcggccggaggttccatcgtatccaaaaggctcttttcagagccacccacatcagcacttggaagaagctgtaccgcttgccctccgtgctcctccggcattagagcggggaaggcacttccgcttaggctcccaacaaaacggggtcgggtccccctgctgcggtgccgtcttgagctttgccgacttcggccaattggcctatccgcactggccgggctgcggacgctttcctgggcgccggctcgcgggctttggcggtccggctccccccgcgcgtgaccggggccctgcgtggcgggggggccggggcaggagagacggggcgtcgggcacgaggccaggggtcactagggggacgctcagggctcgcggtcctgagcgcggctggcctttgcggaagtggagcgccacacgcccgtgcttcgcgcccaaaccggcctcacccggcgcggccatccggctagggagggaaatgaccacctcggcctcgccggggttctgcggacaaacgtggggagaactgcgctggggctgccgttcagtccccgcgccacctccactagcacagtggtaacccccatatcctgcccctaagccaaaattcccgggggcacggggtgtgggcggaattttgtgaatctgggctttatcgagccgttccctgtccatgtccacagaaggagattcactattccagtgaaggcactcggtcctcttagaagctgcatggtatgtctggattttctgtccagactcagtagttcctttacgttgttttcgtcggacatgtgggcagacgctggtgcccgagttcagatccttgggaagacagtagatcagacaggaagaacgtgggcctccgttgggcaaatgaagctcttcgccttaggaaatcgtgacaggaggccacagaggtgatctctacagtctctgggagctgggaagtccaaggcctcttagtgggaaagtgaggcagggtcttgcagagcccactctacacacggccagatacaaatggctgtagaggtcttagataacaccttctcggtcatttatttgcacctcagaagaagccagggcttcggttttctgtttgtttcatcacagttgacaggttaaaagcattcactgcagcgatctatgagaattaagaggggagaaggggaaatggaataaaacttcgttttgtaaagct

SEQ ID NO: 140990 - DNA, 1656 bp, Homo sapiens; identical to SEQ ID NO: 140989
  Payload ID: 7705
  Gene Symbol: HIST2H3C
  Gene Name: histone cluster 2, H3c
  Uniprot ID: Q71DI3
  ENST ID: ENST00000369158
  CDS Start-End: 37-447

SEQ ID NO: 140991 - DNA, 411 bp, Homo sapiens
  Payload ID: 7706
  Gene Symbol: HIST2H3D
  Gene Name: histone cluster 2, H3d
  Uniprot ID: Q71DI3
  ENST ID: ENST00000331491
  CDS Start-End: 1-411
atggcccgtactaagcagactgcccgcaagtcgaccggcggcaaggccccgaggaagcagctggctaccaaagcggcccgcaagagcgcgccggccacgggcggggtgaagaagccgcaccgctaccggcccggcaccgtggctctgcgggagatccggcgctaccagaagtctacggagctgctgatccgcaagctgcccttccagcggctggtacgcgagatcgcgcaggactttaagacggacctgcgcttccagagctcggccgtgatggcgctgcaggaggccagcgaggcctacctggtggggctgttcgaagacacgaacctgtgcgccatccatgccaagcgcgtgaccatcatgcccaaggacatccagttggcccgccgcatccgcggggagcgggcctaa

SEQ ID NO: 140992 - DNA, 583 bp, Homo sapiens
  Payload ID: 7707
  Gene Symbol: HIST2H4A
  Gene Name: histone cluster 2, H4a
  Uniprot ID: P62805
  ENST ID: ENST00000578186
  CDS Start-End: 27-338
aagctgtctatcgggctccagcggtcatgtccggcagaggaaagggcggaaaaggcttaggcaaagggggcgctaagcgccaccgcaaggtcttgagagacaacattcagggcatcaccaagcctgccattcggcgtctagctcggcgtggcggcgttaagcggatctctggcctcatttacgaggagacccgcggtgtgctgaaggtgttcctggagaatgtgattcgggacgcagtcacctacaccgagcacgccaagcgcaagaccgtcacagccatggatgtggtgtacgcgctcaagcgccaggggcgcaccctgtacggcttcggaggctaggccgccgctccagctttgcacgtttcgatcccaaaggccctttttagggccgaccacttgctcatctgaggagttggacacttgactgcgtaaagtgcaacagtaacgatgttggaaggtaactttggcagtggggcgacaatcggatctgaagttaacggaaagctaccgcggcccatagcgctcacagccgtaaagacttaagtcgttgaccgaaagcggctttttcacttacctgggctttt

SEQ ID NO: 140993 - DNA, 942 bp, Homo sapiens
  Payload ID: 7707
  Gene Symbol: HIST2H4A
  Gene Name: histone cluster 2, H4a
  Uniprot ID: P62805
  ENST ID: ENST00000614272
  CDS Start-End: 16-327
cgggctccagcggtcatgtccggcagaggaaagggcggaaaaggcttaggcaaagggggcgctaagcgccaccgcaaggtcttgagagacaacattcagggcatcaccaagcctgccattcggcgtctagctcggcgtggcggcgttaagcggatctctggcctcatttacgaggagacccgcggtgtgctgaaggtgttcctggagaatgtgattcgggacgcagtcacctacaccgagcacgccaagcgcaagaccgtcacagccatggatgtggtgtacgcgctcaagcgccaggggcgcaccctgtacggcttcggaggctaggccgccgctccagctttgcacgtttcgatcccaaaggccctttttagggccgaccacttgctcatctgaggagttggacacttgactgcgtaaagtgcaacagtaacgatgttggaaggcttatgattttactgtgtatgtatttgggagaagaaattctgtcagctcccaaaggataaaccagcagttgctttattggtcttcagatgtggctgcaaacacttgagactgaactaagcttaaaacacggtacttagcaatcgggttgccagcaaagcactggatgcaagccttgccttccagaagcttaccagtcgggttgccagcaaagcagtggatgcaagacttgccctccaggagcttaccatcacaacgaagaagacaaataaatgcataatatatagacgacataaatccatactgtacacatttaagaataaacagtccagtagtaagaggcagtacatattcaatctgctgagaaatgtagacaataactactataagaatcctaatgctacagaagtcactggctgctgggaaaccggggaaaacttggctatggacgtgggggcttgtgtcggactctgaataaagagcagaatgattggcgtc

SEQ ID NO: 140994 - DNA, 1547 bp, Homo sapiens
  Payload ID: 7707
  Gene Symbol: HIST2H4A
  Gene Name: histone cluster 2, H4a
  Uniprot ID: P62805
  ENST ID: ENST00000618193
  CDS Start-End: 18-329
atcgggctccagcggtcatgtccggcagaggaaagggcggaaaaggcttaggcaaagggggcgctaagcgccaccgcaaggtcttgagagacaacattcagggcatcaccaagcctgccattcggcgtctagctcggcgtggcggcgttaagcggatctctggcctcatttacgaggagacccgcggtgtgctgaaggtgttcctggagaatgtgattcgggacgcagtcacctacaccgagcacgccaagcgcaagaccgtcacagccatggatgtggtgtacgcgctcaagcgccaggggcgcaccctgtacggcttcggaggctaggccgccgctccagctttgcacgtttcgatcccaaaggccctttttagggccgaccacttgctcatctgaggagttggacacttgactgcgtaaagtgcaacagtaacgatgttggaaggtaactttggcagtggggcgacaatcggatctgaagttaacggaaagctaccgcggcccatagcgctcacagccgtaaagacttaagtcgttgaccgaaagcggctttttcacttacctgggctttttttttttttttttttttttttaaagcctttatcggtatgaaaggttgaatgctctaggtttgagcactgctttctcggcttgctcttctggtgcagtataggcacacctagagggccacgtcagtctttgcgatcaccaaatctggttctgagaaataggcactggcaatttacacatgccttgctgtgtaatctcactatatttgctcaggcaaagtgggagaagcagccttaggttttcattctagagatgccggctttcccacctgatcggcttagagttcacgattgactgttttgggcttcatttcaccctctacataacaagcgggtggactagatgccttagcaagggtccgtgttgtgtggtgtctccagccacgcactcagctcaatcttagcacagttaaaaaatgcctttctagcaagttatctgcccagtgcctgaaaagtatcatttcttgtgttcaataaaaagcctcctaatttaatcaaggacctatgagataactgtcttttagttgtggcattgcaaggatacaaatgcagagatattttaaagtgatccttctgtaagagtgaaccaacgatatgatctgaaagcaacttcacaggtaattcaggcttatgattttactgtgtatgtatttgggagaagaaattctgtcagctcccaaaggataaaccagcagttgctttattggtcttcagatgtggctgcaaacacttgagactgaactaagcttaaaacacggtacttagcaatcgggttgccagcaaagcactggatgcaagccttgccttccagaagcttaccagtcgggttgccagcaaagcagtggatgcaagacttgccctccaggagcttaccatcacaacgaagaagacaaataaatgcataatatatagacgacataaatccatactgtacacatttaagaataaacagtccagtagtaagaggcagtacata

SEQ ID NO: 140995 - DNA, 610 bp, Homo sapiens
  Payload ID: 7707
  Gene Symbol: HIST2H4A
  Gene Name: histone cluster 2, H4a
  Uniprot ID: P62805
  ENST ID: ENST00000613412
  CDS Start-End: 8-319
agcggtcatgtccggcagaggaaagggcggaaaaggcttaggcaaagggggcgctaagcgccaccgcaaggtcttgagagacaacattcagggcatcaccaagcctgccattcggcgtctagctcggcgtggcggcgttaagcggatctctggcctcatttacgaggagacccgcggtgtgctgaaggtgttcctggagaatgtgattcgggacgcagtcacctacaccgagcacgccaagcgcaagaccgtcacagccatggatgtggtgtacgcgctcaagcgccaggggcgcaccctgtacggcttcggaggctaggccgccgctccagctttgcacgtttcgatcccaaaggccctttttagggccgaccacttgctcatctgaggagttggacacttgactgcgtaaagtgcaacagtaacgatgttggaagatcgctgcagtgaatgcttttaacctgtcaactgtgatgaaacaaacagaaaaccgaagccctggcttcttctgaggtgcaaataaatgaccgagaaggtgttatctaagacctctacagccatttgtatctggccgtgtgtagagtgggctctgcaagaccctgcctcactt

SEQ ID NO: 140996 - DNA, 1132 bp, Homo sapiens
  Payload ID: 7708
  Gene Symbol: HIST2H4B
  Gene Name: histone cluster 2, H4b
  Uniprot ID: P62805
  ENST ID: ENST00000579512
  CDS Start-End: 80-391
aatctggtccgatactcttgtatatcaggggaagacggtgctcgccttgacagaagctgtctatcgggctccagcggtcatgtccggcagaggaaagggcggaaaaggcttaggcaaagggggcgctaagcgccaccgcaaggtcttgagagacaacattcagggcatcaccaagcctgccattcggcgtctagctcggcgtggcggcgttaagcggatctctggcctcatttacgaggagacccgcggtgtgctgaaggtgttcctggagaatgtgattcgggacgcagtcacctacaccgagcacgccaagcgcaagaccgtcacagccatggatgtggtgtacgcgctcaagcgccaggggcgcaccctgtacggcttcggaggctaggccgccgctccagctttgcacgtttcgatcccaaaggccctttttagggccgaccacttgctcatctgaggagttggacacttgactgcgtaaagtgcaacagtaacgatgttggaaggtaactttggcagtggggcgacaatcggatctgaagttaacggaaagctaccgcggcccatagcgctcacagccgtaaagacttaagtcgttgaccgaaagcggctttttcacttacctgggctttttttttttttttttttttttttaaagcctttatcggtatgaaaggttgaatgctctaggtttgagcactgctttctcggcttgctcttctggtgcagtataggcacacctagagggccacgtcagtctttgcgatcaccaaatctggttctgagaaataggcactggcaatttacacatgccttgctgtgtaatctcactatatttgctcaggcaaagtgggagaagcagccttaggttttcattctagagatgccggctttcccacctgatcggcttagagttcacgattgactgttttgggcttcatttcaccctctacataacaagcgggtggactagatgccttagcaagggtccgtgttgtgtggtgtctccagccacgcactcagctcaatcttagcacagttaaaaaatgcctttctagcaagttatctgcccagtgcctgaaaagtatcatttcttgtgttcaataaaaagcctcctaatttaatcaag

SEQ ID NO: 140997 - DNA, 610 bp, Homo sapiens; identical to SEQ ID NO: 140995
  Payload ID: 7708
  Gene Symbol: HIST2H4B
  Gene Name: histone cluster 2, H4b
  Uniprot ID: P62805
  ENST ID: ENST00000621520
  CDS Start-End: 8-319

SEQ ID NO: 140998 - DNA, 1694 bp, Homo sapiens
  Payload ID: 7708
  Gene Symbol: HIST2H4B
  Gene Name: histone cluster 2, H4b
  Uniprot ID: P62805
  ENST ID: ENST00000612061
  CDS Start-End: 18-329
atcgggctccagcggtcatgtccggcagaggaaagggcggaaaaggcttaggcaaagggggcgctaagcgccaccgcaaggtcttgagagacaacattcagggcatcaccaagcctgccattcggcgtctagctcggcgtggcggcgttaagcggatctctggcctcatttacgaggagacccgcggtgtgctgaaggtgttcctggagaatgtgattcgggacgcagtcacctacaccgagcacgccaagcgcaagaccgtcacagccatggatgtggtgtacgcgctcaagcgccaggggcgcaccctgtacggcttcggaggctaggccgccgctccagctttgcacgtttcgatcccaaaggccctttttagggccgaccacttgctcatctgaggagttggacacttgactgcgtaaagtgcaacagtaacgatgttggaaggtaactttggcagtggggcgacaatcggatctgaagttaacggaaagctaccgcggcccatagcgctcacagccgtaaagacttaagtcgttgaccgaaagcggctttttcacttacctgggctttttttttttttttttttttttttaaagcctttatcggtatgaaaggttgaatgctctaggtttgagcactgctttctcggcttgctcttctggtgcagtataggcacacctagagggccacgtcagtctttgcgatcaccaaatctggttctgagaaataggcactggcaatttacacatgccttgctgtgtaatctcactatatttgctcaggcaaagtgggagaagcagccttaggttttcattctagagatgccggctttcccacctgatcggcttagagttcacgattgactgttttgggcttcatttcaccctctacataacaagcgggtggactagatgccttagcaagggtccgtgttgtgtggtgtctccagccacgcactcagctcaatcttagcacagttaaaaaatgcctttctagcaagttatctgcccagtgcctgaaaagtatcatttcttgtgttcaataaaaagcctcctaatttaatcaaggacctatgagataactgtcttttagttgtggcattgcaaggatacaaatgcagagatattttaaagtgatccttctgtaagagtgaaccaacgatatgatctgaaagcaacttcacaggtaattcaggcttatgattttactgtgtatgtatttgggagaagaaattctgtcagctcccaaaggataaaccagcagttgctttattggtcttcagatgtggctgcaaacacttgagactgaactaagcttaaaacacggtacttagcaatcgggttgccagcaaagcactggatgcaagccttgccttccagaagcttaccagtcgggttgccagcaaagcagtggatgcaagacttgccctccaggagcttaccatcacaacgaagaagacaaataaatgcataatatatagacgacataaatccatactgtacacatttaagaataaacagtccagtagtaagaggcagtacatattcaatctgctgagaaatgtagacaataactactataagaatcctaatgctacagaagtcactggctgctgggaaaccggggaaaacttggctatggacgtgggggcttgtgtcggactctgaataaagagcagaatgattggcgtc

SEQ ID NO: 140999 - DNA, 895 bp, Homo sapiens
  Payload ID: 7709
  Gene Symbol: HIST3H2A
  Gene Name: histone cluster 3, H2a
  Uniprot ID: Q7L7L0
  ENST ID: ENST00000366695
  CDS Start-End: 57-449
ctcttgtttttagtctcgcttttcggttgccgttgtcttttttccttgactcggaaatgtccggtcgtggtaagcagggtggcaaggcgcgcgccaaggctaagtcgcgctcgtcgcgcgcggggctgcagttccccgtgggccgcgtgcaccggttgctccgcaagggcaactattcggagcgcgtgggcgccggcgccccggtctatctggccgcggtgctcgagtacttgactgccgagatcctggagcttgccggcaacgcggcgcgcgacaacaagaagacgcgcatcatcccgcgccacctgcagctggccatccgcaacgacgaggagctcaacaagctgctgggccgcgtgaccatcgcgcagggtggcgtcctgcccaacatccaggccgtactgctgcccaagaagacggagagccaccacaaggccaagggcaagtgaggccgcccgccgcccccggggcccctttgatggacataaaggctcttttcagagccacctactatctcgagaaaagagccgcactgatcctgcagttctttataggccggaggcctgatcaccctaggctcatgaatgagcgcagtggccatggggaagggcgcaacgggaaccgagaccctggggactgattgggctgcatacttgcgaggtgggcaacgtgttctgttaacaacagggaaccctcgtccacaggtggccaccccttgctcttgagtcccacccaaaacctctagtagggttttaataacgctcaccgtaaaggtgtcttcataattactagtgacaagttctcttgactctagcaaggttcccgtgtggtcatcaagtacagaatgcaatttcttaatgatttatctgatattaaaagtatttatgatctctaa

SEQ ID NO: 141000 - DNA, 2364 bp, Homo sapiens
  Payload ID: 7710
  Gene Symbol: HIST3H2BB
  Gene Name: histone cluster 3, H2bb
  Uniprot ID: Q8N257
  ENST ID: ENST00000620438
  CDS Start-End: 24-404
ctgtttggagagactcagccatcatgccagacccgtccaaatcggctcctgcgcccaagaagggttctaaaaaggctgtcaccaaggcacagaagaaggacggcaagaagcgcaagcgcggccgcaaggagagctattctatctacgtgtacaaggtgctgaagcaggtgcaccccgacaccggcatctcgtccaaggccatgggcatcatgaactccttcgtcaatgacatcttcgagcgcatcgccagcgaggcctcccgcctggcacactacaacaagcgctccaccatcacgtcccgcgaagtgcagacggccgttcgcctgctgctgcccggcgagctggccaagcacgccgtgtccgagggcaccaaggctgtcaccaagtacaccagctccaagtgaggcgttcctcggcgtcctgaacccaaaggctcttttcagagccacccacacgatcaagaaagggtttcgaacacggtgaagggttatgtaacctaatgtgtctccatgcaccctagcggttgccgggtgcggccgaatctgagccgtgtgtgtgtgtgtgtgtgtgtgtgtgtgcgcgcgcgcgccggcacagaacgagaaaaactgctcgttacagaaatcggggtagaaactgctcaggtgatgtagctcagtaatgttgggaggcgatcaaggaccccctctccatcccctccctccgcgcagagctattaactcacgacgagatttcttttttttttctttctttctttttttttttttttttttctagaagaagtctcgctctgtctctaggctggcgtgcagtggcgcaatctgggctcactgcaacctccgcctcctgggttcaagcgattctcctgcctcagccttacgagtagctgggattacaggcacgccccaccacgcctggctaattttttgtatttttagtagagacggggtttcaccatgttggccaggatagtctcgatcttctgacctggtgatccatccgcctctgcctcccaaagtgctgggattacaggcgtgaaccaccgcacctggccccaaatgtcttttataagcaagtggtgcattcctggatgttgagcgcttgcgcccggttcaggaccgggtccaaatgaggttggcgtgcgccgtgcaggtgaggagtgcgggtcacctccccccaaaagaccctgtgccaacctccccaaccctacccgccccccatgggcgaggccagacgtggcgcaagaccacgggctctgaggccatgggtgttgtcactttcccctggcggtggtgcctggctctgcatttgcttaagacttttccatccctgcctggaccagacagacatgtttagatttaagcaatgaacattccgggaggatattttcctggcaggataccgcgatggcaggatgtttgataccgaatcgaagcacggcgtcaaagcagcgtcctgcgcgggggagccggatgtaataagcgaccccagctgccggtaactttaacccttatgggagtgggggtgggggaaggggttaatttaggaggaaaagaattccctttttctgagcaaatgtagctgcctccctctttagccacattattttctgcgaggcgttagcaacgcagaattcctttcctaccccctccaaattcacggcatttatttggggagtgccattttggcgcaggaaagctctttggcacgaagagttttcactttggaaagggcatcgtttacgttttcatgacttggcttttcttctttagaaaaagaagatttccagtaattgcttcctcaaaccgttgtgaaaattcgaagtactgagcgtttgtgtcaccatttccagcagggaataaaaattcaataaagttaaatgagaaataattttttttttttttgagacggagtcttgctctgtcgcccaggctggagtgcaatggcgcgatctctgctcactgcaacatcggcctcccgggttcaagcgattctcctgcctcagcctcccgagtagctgggactacaggcgtgcgccacccacgcccagctaatttttttaatttttagtagagacggggtttcaccatgttggccaggatggtctcgatctcttgacctcgtgatccaccctcctcggcctcccaaagtgctgggattacaggcgtgagccacttctcctggccgagaaataatttttaaataaaattcaatgaaaaatatttttcccccaagtcatttctccaaagggaacccgtcgcgtgcctgggatggggaaagaaaggtcaccgtgaacatcctcgaccaaaacggctttgtcccctattccccaccttttttttcctgcgtgattcctctacaaga

SEQ ID NO: 141001 - DNA, 481 bp, Homo sapiens
  Payload ID: 7711
  Gene Symbol: HIST3H3
  Gene Name: histone cluster 3, H3
  Uniprot ID: Q16695
  ENST ID: ENST00000366696
  CDS Start-End: 1-411
atggcccgaaccaagcagactgcgcgcaagtcaacgggtggcaaggcgccgcgcaagcagctggccaccaaggtggctcgcaagagcgcacctgccactggcggcgtgaagaagccgcaccgctaccggcccggcacggtggcgcttcgcgagatccgccgctaccagaagtccactgagctgctaatccgcaagttgcccttccagcggctgatgcgcgagatcgctcaggactttaagaccgacctgcgcttccagagctcggccgtgatggcgctgcaggaggcgtgcgagtcttacctggtggggctgtttgaggacaccaacctgtgtgtcatccatgccaaacgggtcaccatcatgcctaaggacatccagctggcacgccgtatccgcggggagcgggcctaggagggctatctcgccacctgagaggttgcgcaacgttcaccccaaaggctcttttaagagccacccacct

SEQ ID NO: 141002 - DNA, 1918 bp, Homo sapiens
  Payload ID: 7712
  Gene Symbol: HIST4H4
  Gene Name: histone cluster 4, H4
  Uniprot ID: P62805
  ENST ID: ENST00000358064
  CDS Start-End: 48-359
acagtgggcagcccgattttctgctgagtaggcgctgtgatttcagaatgtctgggcgaggtaaaggtggcaaggggctgggtaagggaggcgccaagcgccaccggaaggtgctgcgggacaatatccaaggcattacaaagccggcgattcgccgtctcgcccgacgtgggggcgtcaagcgcatttctggtctcatctacgaggagacccggggagtcctcaaagtcttcctggagaacgtgatccgtgacgcggtgacttacacggagcacgccaagcgcaagaccgtcacggccatggatgtggtgtacgcgctgaaacgccagggtcgcaccctttatggtttcggcggttgagctgtccccacagcttctctacagactccaaaaggcccttttcagggcccccaaactgtcacagaaagagctgttaacacttcctagataacggaccaagtctagctctgccaccgaggctggagtgcagtggcacgatctcgcctccgcctcccgggttcaagcgattcacctgcctcagcttccggagtagctgggattacaggcctgcgccaccacgcctggctaatttttgtattttttttttttttggtagatacggggtttcaccatgttggccaggctggtcttgaactcctggcctcaagtgattcacccgcctccgcctcccaaagtgctggcatttcaggcgtgagccaccacgcttggtcttgctctagctattctaaacatgaagaagtcatatagcttccttggtgcggtgggctgaagtcactctaagggagtttcccagccccaggggttaaagaactggagtcaagattggaacccagctggcgaaggattccgcaccgctagatcttgacatttgcctcttcttctgccaggaaggctcccctgttcctttttgctgacgtgtcatttctaagtactttctcctactccataaagacttcaagtgagtacacaatactggtgttagtttaatttctaagacagtgagacactcggagaagttcaattttctttaatgcaagtgaaaaattgagttacttaaaagaaatagagtctggcatactttcgtgccctcgatatttgttgcatgaccaaatgagtgattttgggtttcacataaattaaggatgaaagttagggccccgatggaggatagaaatactgtagatatttgtatgacaattaaaactcttccttaagtatttaacttatatggaattgtttaaatatttcatggttttggggtttttttttatttttgtagtggtctcaattctttgattagaatagaacttatattttcccttgtagcatagttatttttttgtttgtgttttgttctttataaaatataacctaattatctaaacccaagaaatatttatttttgtctgtgactctgagtcctatggtatagtaagtacccagtcctgacagtaatcatatcttccaaaccaaaactgggtcacacggttcaataactgaacagaatatctcaaactgaaaacgatcaagattttctgaagtttactattaatagtaaaattgcttactaaaaatgttaaagaacttgatttaaaactctgtaatgcctcacttaaaatgtgaatgaggggggcggggtgggggtggctataatgccagcactttgggaaggctgaggcagtaggattgctggaggccaggagtttgagaccagcatggccaacatagtgagaccccatctctacataaaataagaattataaaatgtaaagtgaatggaatgcattgaaatttgatcctgtagcaaagtcatcccttttgaattttgaacatttgtttaatgcctcttttccaagcatattttgaatattcagagataaatgagcaagttactgcca

SEQ ID NO: 141003 - DNA, 577 bp, Homo sapiens
  Payload ID: 7712
  Gene Symbol: HIST4H4
  Gene Name: histone cluster 4, H4
  Uniprot ID: P62805
  ENST ID: ENST00000539745
  CDS Start-End: 48-359
acagtgggcagcccgattttctgctgagtaggcgctgtgatttcagaatgtctgggcgaggtaaaggtggcaaggggctgggtaagggaggcgccaagcgccaccggaaggtgctgcgggacaatatccaaggcattacaaagccggcgattcgccgtctcgcccgacgtgggggcgtcaagcgcatttctggtctcatctacgaggagacccggggagtcctcaaagtcttcctggagaacgtgatccgtgacgcggtgacttacacggagcacgccaagcgcaagaccgtcacggccatggatgtggtgtacgcgctgaaacgccagggtcgcaccctttatggtttcggcggttgagctgtccccacagcttctctacagactccaaaaggcccttttcagggcccccaaactgtcacagaaagagctgttaacacttcctagataacgggtaaatatcaaccctttgatgtcgccttccggataccggaaatgggatattcgcggcccgagcatctgctcgggattagacttggcgggcacggggagaactagacctcaaggagggggttccg

SEQ ID NO: 141004 - DNA, 2124 bp, Homo sapiens
  Payload ID: 7713
  Gene Symbol: HDAC1
  Gene Name: histone deacetylase 1
  Uniprot ID: Q13547
  ENST ID: ENST00000373548
  CDS Start-End: 85-1533
ctcccccctgggtcggacgctgagcggagccgcgggcgggagggcggacggaccgactgacggtagggacgggaggcgagcaagatggcgcagacgcagggcacccggaggaaagtctgttactactacgacggggatgttggaaattactattatggacaaggccacccaatgaagcctcaccgaatccgcatgactcataatttgctgctcaactatggtctctaccgaaaaatggaaatctatcgccctcacaaagccaatgctgaggagatgaccaagtaccacagcgatgactacattaaattcttgcgctccatccgtccagataacatgtcggagtacagcaagcagatgcagagattcaacgttggtgaggactgtccagtattcgatggcctgtttgagttctgtcagttgtctactggtggttctgtggcaagtgctgtgaaacttaataagcagcagacggacatcgctgtgaattgggctgggggcctgcaccatgcaaagaagtccgaggcatctggcttctgttacgtcaatgatatcgtcttggccatcctggaactgctaaagtatcaccagagggtgctgtacattgacattgatattcaccatggtgacggcgtggaagaggccttctacaccacggaccgggtcatgactgtgtcctttcataagtatggagagtacttcccaggaactggggacctacgggatatcggggctggcaaaggcaagtattatgctgttaactacccgctccgagacgggattgatgacgagtcctatgaggccattttcaagccggtcatgtccaaagtaatggagatgttccagcctagtgcggtggtcttacagtgtggctcagactccctatctggggatcggttaggttgcttcaatctaactatcaaaggacacgccaagtgtgtggaatttgtcaagagctttaacctgcctatgctgatgctgggaggcggtggttacaccattcgtaacgttgcccggtgctggacatatgagacagctgtggccctggatacggagatccctaatgagcttccatacaatgactactttgaatactttggaccagatttcaagctccacatcagtccttccaatatgactaaccagaacacgaatgagtacctggagaagatcaaacagcgactgtttgagaaccttagaatgctgccgcacgcacctggggtccaaatgcaggcgattcctgaggacgccatccctgaggagagtggcgatgaggacgaagacgaccctgacaagcgcatctcgatctgctcctctgacaaacgaattgcctgtgaggaagagttctccgattctgaagaggagggagaggggggccgcaagaactcttccaacttcaaaaaagccaagagagtcaaaacagaggatgaaaaagagaaagacccagaggagaagaaagaagtcaccgaagaggagaaaaccaaggaggagaagccagaagccaaaggggtcaaggaggaggtcaagttggcctgaatggacctctccagctctggcttcctgctgagtccctcacgtttcttccccaacccctcagattttatattttctatttctctgtgtatttatataaaaatttattaaatataaatatccccagggacagaaaccaaggccccgagctcagggcagctgtgctgggtgagctcttccaggagccaccttgccacccattcttcccgttcttaactttgaaccataaagggtgccaggtctgggtgaaagggatacttttatgcaaccataagacaaactcctgaaatgccaagtgcctgcttagtagctttggaaaggtgcccttattgaacattctagaaggggtggctgggtcttcaaggatctcctgtttttttcaggctcctaaagtaacatcagccatttttagattggttctgttttcgtaccttcccactggcctcaagtgagccaagaaacactgcctgccctctgtctgtcttctcctaattctgcaggtggaggttgctagtctagtttcctttttgagatactattttcatttttgtgagcctctttgtaataaaatggtacatttctatatcctcctga

SEQ ID NO: 141005 - DNA, 664 bp, Homo sapiens
  Payload ID: 7713
  Gene Symbol: HDAC1
  Gene Name: histone deacetylase 1
  ENST ID: ENST00000428704
  CDS Start-End: 31-664
gactgacggtagggacgggaggcgagcaagatggcgcagacgcagggcacccggaggaaagtctgttactactacgacggggatgttggaaattactattatggacaaggccacccaatgaagcctcaccgaatccgcatgactcataatttgctgctcaactatggtctctaccgaaaaatggaaatctatcgccctcacaaagccaatgctgaggagatgaccaagtaccacagcgatgactacattaaattcttgcgctccatccgtccagataacatgtcggagtacagcaagcagatgcagagatcaagtgctgtgaaacttaataagcagcagacggacatcgctgtgaattgggctgggggcctgcaccatgcaaagaagtccgaggcatctggcttctgttacgtcaatgatatcgtcttggccatcctggaactgctaaagtatcaccagagggtgctgtacattgacattgatattcaccatggtgacggcgtggaagaggccttctacaccacggaccgggtcatgactgtgtcctttcataagtatggagagtacttcccaggaactggggacctacgggatatcggggctggcaaaggcaagtattatgctgttaactacccgctccgagacgggattgatgacgagtcct

SEQ ID NO: 141006 - DNA, 2687 bp, Homo sapiens
  Payload ID: 7714
  Gene Symbol: HDAC10
  Gene Name: histone deacetylase 10
  Uniprot ID: Q969S8
  ENST ID: ENST00000216271
  CDS Start-End: 354-2363
ggctcggggcgccgaggcttccgcgcccgctggttcctcgctccggggcggagctcgcgatagcgaccgggagcagggcgcggggcgggacccaggtccgaggcgaggaagccggaagccaggcgcggggagcctcccccttcgactgcagcctcgctccgtgccttctgcgcgcctgggatcccggagcctgcctaggttctgtgcgctcccgcccaggccggtgcccgccgcccgcctgcgccccaggcaggtcccaggcctccggctgctcccggccgaaggtggggacaggcagtggcaggcaccactagcgagggcgtttgggaacccagggtgaccacggcgcagccatggggaccgcgcttgtgtaccatgaggacatgacggccacccggctgctctgggacgaccccgagtgcgagatcgagcgtcctgagcgcctgaccgcagccctggatcgcctgcggcagcgcggcctggaacagaggtgtctgcggttgtcagcccgcgaggcctcggaagaggagctgggcctggtgcacagcccagagtatgtatccctggtcagggagacccaggtcctaggcaaggaggagctgcaggcgctgtccggacagttcgacgccatctacttccacccgagtacctttcactgcgcgcggctggccgcaggggctggactgcagctggtggacgctgtgctcactggagctgtgcaaaatgggcttgccctggtgaggcctcccgggcaccatggccagagggcggctgccaacgggttctgtgtgttcaacaacgtggccatagcagctgcacatgccaagcagaaacacgggctacacaggatcctcgtcgtggactgggatgtgcaccatggccaggggatccagtatctctttgaggatgaccccagcgtcctttacttctcctggcaccgctatgagcatgggcgcttctggcctttcctgcgagagtcagatgcagacgcagtggggcggggacagggcctcggcttcactgtcaacctgccctggaaccaggttgggatgggaaacgctgactacgtggctgccttcctgcacctgctgctcccactggcctttgagtttgaccctgagctggtgctggtctcggcaggatttgactcagccatcggggaccctgaggggcaaatgcaggccacgccagagtgcttcgcccacctcacacagctgctgcaggtgctggccggcggccgggtctgtgccgtgctggagggcggctaccacctggagtcactggcggagtcagtgtgcatgacagtacagacgctgctgggtgacccggccccacccctgtcagggccaatggcgccatgtcagagtgccctagagtccatccagagtgcccgtgctgcccaggccccgcactggaagagcctccagcagcaagatgtgaccgctgtgccgatgagccccagcagccactccccagaggggaggcctccacctctgctgcctgggggtccagtgtgtaaggcagctgcatctgcaccgagctccctcctggaccagccgtgcctctgccccgcaccctctgtccgcaccgctgttgccctgacaacgccggatatcacattggttctgccccctgacgtcatccaacaggaagcgtcagccctgagggaggagacagaagcctgggccaggccacacgagtccctggcccgggaggaggccctcactgcacttgggaagctcctgtacctcttagatgggatgctggatgggcaggtgaacagtggtatagcagccactccagcctctgctgcagcagccaccctggatgtggctgttcggagaggcctgtcccacggagcccagaggctgctgtgcgtggccctgggacagctggaccggcctccagacctcgcccatgacgggaggagtctgtggctgaacatcaggggcaaggaggcggctgccctatccatgttccatgtctccacgccactgccagtgatgaccggtggtttcctgagctgcatcttgggcttggtgctgcccctggcctatggcttccagcctgacctggtgctggtggcgctggggcctggccatggcctgcagggcccccacgctgcactcctggctgcaatgcttcgggggctggcagggggccgagtcctggccctcctggaggagaactccacaccccagctagcagggatcctggcccgggtgctgaatggagaggcacctcctagcctaggcccttcctctgtggcctccccagaggacgtccaggccctgatgtacctgagagggcagctggagcctcagtggaagatgttgcagtgccatcctcacctggtggcttgaaatcggccaaggtgggagcatttacaccgcagaaatgacaccgcacgccagcgccccgcggccgcgatccggaccccaagcccacggctccctcgactctggggcacggaaccccgcccactcccaatccccgcgccccgccctctcccacccgtgcttcccccgctccacccctcacctcacctcgcccccgccccacccatcgcgccccggcccgtcccatcgaggcccatgcaacccacgctcggtcccgttccggcccctgcgccccgctgcgcttcgctccccgcccttgcgccgttagtaaacatcgctcaaacgaaa

SEQ ID NO: 141007 - DNA, 1950 bp, Homo sapiens
  Payload ID: 7714
  Gene Symbol: HDAC10
  Gene Name: histone deacetylase 10
  Uniprot ID: Q969S8
  ENST ID: ENST00000349505
  CDS Start-End: 1-1950
atggggaccgcgcttgtgtaccatgaggacatgacggccacccggctgctctgggacgaccccgagtgcgagatcgagcgtcctgagcgcctgaccgcagccctggatcgcctgcggcagcgcggcctggaacagaggtgtctgcggttgtcagcccgcgaggcctcggaagaggagctgggcctggtgcacagcccagagtatgtatccctggtcagggagacccaggtcctaggcaaggaggagctgcaggcgctgtccggacagttcgacgccatctacttccacccgagtacctttcactgcgcgcggctggccgcaggggctggactgcagctggtggacgctgtgctcactggagctgtgcaaaatgggcttgccctggtgaggcctcccgggcaccatggccagagggcggctgccaacgggttctgtgtgttcaacaacgtggccatagcagctgcacatgccaagcagaaacacgggctacacaggatcctcgtcgtggactgggatgtgcaccatggccaggggatccagtatctctttgaggatgaccccagcgtcctttacttctcctggcaccgctatgagcatgggcgcttctggcctttcctgcgagagtcagatgcagacgcagtggggcggggacagggcctcggcttcactgtcaacctgccctggaaccaggttgggatgggaaacgctgactacgtggctgccttcctgcacctgctgctcccactggcctttgaggggcaaatgcaggccacgccagagtgcttcgcccacctcacacagctgctgcaggtgctggccggcggccgggtctgtgccgtgctggagggcggctaccacctggagtcactggcggagtcagtgtgcatgacagtacagacgctgctgggtgacccggccccacccctgtcagggccaatggcgccatgtcagagtgccctagagtccatccagagtgcccgtgctgcccaggccccgcactggaagagcctccagcagcaagatgtgaccgctgtgccgatgagccccagcagccactccccagaggggaggcctccacctctgctgcctgggggtccagtgtgtaaggcagctgcatctgcaccgagctccctcctggaccagccgtgcctctgccccgcaccctctgtccgcaccgctgttgccctgacaacgccggatatcacattggttctgccccctgacgtcatccaacaggaagcgtcagccctgagggaggagacagaagcctgggccaggccacacgagtccctggcccgggaggaggccctcactgcacttgggaagctcctgtacctcttagatgggatgctggatgggcaggtgaacagtggtatagcagccactccagcctctgctgcagcagccaccctggatgtggctgttcggagaggcctgtcccacggagcccagaggctgctgtgcgtggccctgggacagctggaccggcctccagacctcgcccatgacgggaggagtctgtggctgaacatcaggggcaaggaggcggctgccctatccatgttccatgtctccacgccactgccagtgatgaccggtggtttcctgagctgcatcttgggcttggtgctgcccctggcctatggcttccagcctgacctggtgctggtggcgctggggcctggccatggcctgcagggcccccacgctgcactcctggctgcaatgcttcgggggctggcagggggccgagtcctggccctcctggaggagaactccacaccccagctagcagggatcctggcccgggtgctgaatggagaggcacctcctagcctaggcccttcctctgtggcctccccagaggacgtccaggccctgatgtacctgagagggcagctggagcctcagtggaagatgttgcagtgccatcctcacctggtggcttga

SEQ ID NO: 141008 - DNA, 2375 bp, Homo sapiens
  Payload ID: 7714
  Gene Symbol: HDAC10
  Gene Name: histone deacetylase 10
  ENST ID: ENST00000415993
  CDS Start-End: 230-520
gcggggagcctcccccttcgactgcagcctcgctccgtgccttctgcgcgcctgggatcccggagcctgcctaggttctgtgcgctcccgcccaggccggtgcccgccgcccgcctgcgccccaggcaggtcccaggcctccggctgctcccggccgaaggtggggacaggcagtggcaggcaccactagcgagggcgtttgggaacccagggtgaccacggcgcagccatggggaccgcgcttgtgtaccatgaggacatgacggccacccggctgctctgggacgaccccgagtgcgagatcgagcgtcctgagcgcctgaccgcagccctggatcgcctgcggcagcgcggcctggaacagaggtgtctgcggttgtcagcccgcgaggcctcggaagaggagctgggcctggtgcacagagtacctttcactgcgcgcggctggccgcaggggctggactgcagctggtggacgctgtgctcactggagctgtgcaaaatgggcttgccctggtgaggcctcccgggcaccatggccagagggcggctgccaacgggttctgtgtgttcaacaacgtggccatagcagctgcacatgccaagcagaaacacgggctacacagcgctgtctgtacccaggatcctcgtcgtggactgggatgtgcaccatggccaggggatccagtatctctttgaggatgaccccagcgtcctttacttctcctggcaccgctatgagcatgggcgcttctggcctttcctgcgagagtcagatgcagacgcagtggggcggggacagggcctcggcttcactgtcaacctgccctggaaccaggttgggatgggaaacgctgactacgtggctgccttcctgcacctgctgctcccactggcctttgagtttgaccctgagctggtgctggtctcggcaggatttgactcagccatcggggaccctgaggggcaaatgcaggccacgccagagtgcttcgcccacctcacacagctgctgcaggtgctggccggcggccgggtctgtgccgtgctggagtgccctagagtccatccagagtgcccgtgctgcccaggccccgcactggaagagcctccagcagcaagatgtgaccgctgtgccgatgagccccagcagccactccccagaggggaggcctccacctctgctgcctgggggtccagtgtgtaaggcagctgcatctgcaccgagctccctcctggaccagccgtgcctctgccccgcaccctctgtccgcaccgctgttgccctgacaacgccggatatcacattggttctgccccctgacgtcatccaacaggaagcgtcagccctgagggaggagacagaagcctgggccaggccacacgagtccctggcccgggaggaggccctcactgcacttgggaagctcctgtacctcttagatgggatgctggatgggcaggtgaacagtggtatagcagccactccagcctctgctgcagcagccaccctggatgtggctgttcggagaggcctgtcccacggagcccagaggctgctgtgcgtggccctgggacagctggaccggcctccagacctcgcccatgacgggaggagtctgtggctgaacatcaggggcaaggaggcggctgccctatccatgttccatgtctccacgccactgccagtgatgaccggtggtttcctgagctgcatcttgggcttggtgctgcccctggcctatggcttccagcctgacctggtgctggtggcgctggggcctggccatggcctgcagggcccccacgctgcactcctggctgcaatgcttcgggggctggcagggggccgagtcctggccctcctggaggagaactccacaccccagctagcagggatcctggcccgggtgctgaatggagaggcacctcctagcctaggcccttcctctgtggcctccccagaggacgtccaggccctgatgtacctgagagggcagctggagcctcagtggaagatgttgcagtgccatcctcacctggtggcttgaaatcggccaaggtgggagcatttacaccgcagaaatgacaccgcacgccagcgccccgcggccgcgatccggaccccaagcccacggctccctcgactctggggcacggaaccccgcccactcccaatccccgcgccccgccctctcccacccgtgcttcccccgctccacccctcacctcacctcgcccccgccccacccatcgcgccccggcccgtcccatcgaggcccatgcaacccacgctcggtcccgttccggcccctgcgccccgctgcgcttcgctccccgcccttgcgccgttagtaaacatcgctcaaacgaaa

SEQ ID NO: 141009 - DNA, 2133 bp, Homo sapiens
  Payload ID: 7714
  Gene Symbol: HDAC10
  Gene Name: histone deacetylase 10
  ENST ID: ENST00000448072
  CDS Start-End: 209-2068
ctgcagcctcgctccgtgccttctgcgcgcctgggatcccggagcctgcctaggttctgtgcgctcccgcccaggccggtgcccgccgcccgcctgcgccccaggcaggtcccaggcctccggctgctcccggccgaaggtggggacaggcagtggcaggcaccactagcgagggcgtttgggaacccagggtgaccacggcgcagccatggggaccgcgcttgtgtaccatgaggacatgacggccacccggctgctctgggacgaccccgagtgcgagatcgagcgtcctgagcgcctgaccgcagccctggatcgcctgcggcagcgcggcctggaacagaggtgtctgcggttgtcagcccgcgaggcctcggaagaggagctgggcctggtgcacagcccagagtatgtatccctggtcagggagacccaggtcctaggcaaggaggagctgcaggcgctgtccggacagttcgacgccatctacttccacccgagtacctttcactgcgcgcggctggccgcaggggctggactgcagctggtggacgctgtgctcactggagctgtgcaaaatgggcttgccctggtgaggcctcccgggcaccatggccagagggcggctgccaacgggttctgtgtgttcaacaacgtggccatagcagctgcacatgccaagcagaaacacgggctacacaggatcctcgtcgtggactgggatgtgcaccatggccaggggatccagtatctctttgaggatgaccccagcgtcctttacttctcctggcaccgctatgagcatgggcgcttctggcctttcctgcgagagtcagatgcagacgcagtggggcggggacagggcctcggcttcactgtcaacctgccctggaaccaggttgggatgggaaacgctgactacgtggctgccttcctgcacctgctgctcccactggcctttgagggcggctaccacctggagtcactggcggagtcagtgtgcatgacagtacagacgctgctgggtgacccggccccacccctgtcagggccaatggcgccatgtcagagtgccctagagtccatccagagtgcccgtgctgcccaggccccgcactggaagagcctccagcagcaagatgtgaccgctgtgccgatgagccccagcagccactccccagaggggaggcctccacctctgctgcctgggggtccagtgtgtaaggcagctgcatctgcaccgagctccctcctggaccagccgtgcctctgccccgcaccctctgtccgcaccgctgttgccctgacaacgccggatatcacattggttctgccccctgacgtcatccaacaggaagcgtcagccctgagggaggagacagaagcctgggccaggccacacgagtccctggcccgggaggaggccctcactgcacttgggaagctcctgtacctcttagatgggatgctggatgggcaggtgaacagtggtatagcagccactccagcctctgctgcagcagccaccctggatgtggctgttcggagaggcctgtcccacggagcccagaggctgctgtgcgtggccctgggacagctggaccggcctccagacctcgcccatgacgggaggagtctgtggctgaacatcaggggcaaggaggcggctgccctatccatgttccatgtctccacgccactgccagtgatgaccggtggtttcctgagctgcatcttgggcttggtgctgcccctggcctatggcttccagcctgacctggtgctggtggcgctggggcctggccatggcctgcagggcccccacgctgcactcctggctgcaatgcttcgggggctggcagggggccgagtcctggccctcctggaggagaactccacaccccagctagcagggatcctggcccgggtgctgaatggagaggcacctcctagcctaggcccttcctctgtggcctccccagaggacgtccaggccctgatgtacctgagagggcagctggagcctcagtggaagatgttgcagtgccatcctcacctggtggcttgaaatcggccaaggtgggagcatttacaccgcagaaatgacaccgcacgccagcgccccgcggccgc

SEQ ID NO: 141010 - DNA, 1922 bp, Homo sapiens
  Payload ID: 7714
  Gene Symbol: HDAC10
  Gene Name: histone deacetylase 10
  Uniprot ID: Q969S8
  ENST ID: ENST00000454936
  CDS Start-End: 1-1191
atggggaccgcgcttgtgtaccatgaggacatgacggccacccggctgctctgggacgaccccgagtgcgagatcgagcgtcctgagcgcctgaccgcagccctggatcgcctgcggcagcgcggcctggaacagaggtgtctgcggttgtcagcccgcgaggcctcggaagaggagctgggcctggtgcacagcccagagtatgtatccctggtcagggagacccaggtcctaggcaaggaggagctgcaggcgctgtccggacagttcgacgccatctacttccacccgagtacctttcactgcgcgcggctggccgcaggggctggactgcagctggtggacgctgtgctcactggagctgtgcaaaatgggcttgccctggtgaggcctcccgggcaccatggccagagggcggctgccaacgggttctgtgtgttcaacaacgtggccatagcagctgcacatgccaagcagaaacacgggctacacaggatcctcgtcgtggactgggatgtgcaccatggccaggggatccagtatctctttgaggatgaccccagcgtcctttacttctcctggcaccgctatgagcatgggcgcttctggcctttcctgcgagagtcagatgcagacgcagtggggcggggacagggcctcggcttcactgtcaacctgccctggaaccaggttgggatgggaaacgctgactacgtggctgccttcctgcacctgctgctcccactggcctttgagggcggctaccacctggagtcactggcggagtcagtgtgcatgacagtacagacgctgctgggtgacccggccccacccctgtcagggccaatggcgccatgtcagagtgccctagagtccatccagagtgcccgtgctgcccaggccccgcactggaagagcctccagcagcaagatgtgaccgctgtgccgatgagccccagcagccactccccagaggggaggcctccacctctgctgcctgggggtccagtgtgtaaggcagctgcatctgcaccgagctccctcctggaccagccgtgcctctgccccgcaccctctgtccgcaccgctgttgccctgacaacgccggatatcacattggttctgccccctgacgtcatccaacaggaagcgtcagccctgagggaggagacagaagcctgggccaggtgaacagtggtatagcagccactccagcctctgctgcagcagccaccctggatgtggctgttcggagaggcctgtcccacggagcccagaggctgctgtgcgtggccctgggacagctggaccggcctccagacctcgcccatgacgggaggagtctgtggctgaacatcaggggcaaggaggcggctgccctatccatgttccatgtctccacgccactgccagtgatgaccggtggtttcctgagctgcatcttgggcttggtgctgcccctggcctatggcttccagcctgacctggtgctggtggcgctggggcctggccatggcctgcagggcccccacgctgcactcctggctgcaatgcttcgggggctggcagggggccgagtcctggccctcctggaggaggtaagctgggcagggtggaggtgctgcggggtgggacgagggaaaggaccagtgactgcttccgtcttcgcccctggtccagaactccacaccccagctagcagggatcctggcccgggtgctgaatggagaggcacctcctagcctaggcccttcctctgtggcctccccagaggacgtccaggccctgatgtacctgagagggcagctggagcctcagtggaagatgttgcagtgccatcctcacctggtggcttgaaatcggccaaggtgggagcatttacaccgcagaaatgacaccgcacgccagcgccccgcggccgc

SEQ ID NO: 141011 - DNA, 1634 bp, Homo sapiens
  Payload ID: 7714
  Gene Symbol: HDAC10
  Gene Name: histone deacetylase 10
  ENST ID: ENST00000429374
  CDS Start-End: 48-338
accactagcgagggcgtttgggaacccagggtgaccacggcgcagccatggggaccgcgcttgtgtaccatgaggacatgacggccacccggctgctctgggacgaccccgagtgcgagatcgagcgtcctgagcgcctgaccgcagccctggatcgcctgcggcagcgcggcctggaacagaggtgtctgcggttgtcagcccgcgaggcctcggaagaggagctgggcctggtgcacagagtacctttcactgcgcgcggctggccgcaggggctggactgcagctggtggacgctgtgctcactggagctgtgcaaaatgggcttgccctggtgaggcctcccgggcaccatggccagagggcggctgccaacgggttctgtgtgttcaacaacgtggccatagcagctgcacatgccaagcagaaacacgggctacacaggatcctcgtcgtggactgggatgtgcaccatggccaggggatccagtatctctttgaggatgaccccagggcggctaccacctggagtcactggcggagtcagtgtgcatgacagtacagacgctgctgggtgacccggccccacccctgtcagggccaatggcgccatgtcagagtgccctagagtccatccagagtgcccgtgctgcccaggccccgcactggaagagcctccagcagcaagatgtgaccgctgtgccgatgagccccagcagccactccccagaggggaggcctccacctctgctgcctgggggtccagtgtgtaaggcagctgcatctgcaccgagctccctcctggaccagccgtgcctctgccccgcaccctctgtccgcaccgctgttgccctgacaacgccggatatcacattggttctgccccctgacgtcatccaacaggaagcgtcagccctgagggaggagacagaagcctgggccaggtgaacagtggtatagcagccactccagcctctgctgcagcagccaccctggatgtggctgttcggagaggcctgtcccacggagcccagaggctgctgtgcgtggccctgggacagctggaccggcctccagacctcgcccatgacgggaggagtctgtggctgaacatcaggggcaaggaggcggctgccctatccatgttccatgtctccacgccactgccagtgatgaccggtggtttcctgagctgcatcttgggcttggtgctgcccctggcctatggcttccagcctgacctggtgctggtggcgctggggcctggccatggcctgcagggcccccacgctgcactcctggctgcaatgcttcgggggctggcagggggccgagtcctggccctcctggaggagaactccacaccccagctagcagggatcctggcccgggtgctgaatggagaggcacctcctagcctaggcccttcctctgtggcctccccagaggacgtccaggccctgatgtacctgagagggcagctggagcctcagtggaagatgttgcagtgccatcctcacctggtggcttgaaatcggccaaggtgggagcatttacaccgcagaaatgacaccgcacgccagcgccccgcggccgcgatccggaccccaagcccacggctccctcgactctgg

SEQ ID NO: 141012 - DNA, 2607 bp, Homo sapiens
  Payload ID: 7714
  Gene Symbol: HDAC10
  Gene Name: histone deacetylase 10
  ENST ID: ENST00000626012
  CDS Start-End: 374-664
gcgcagctccgagggctggcggctcggggcgccgaggcttccgcgcccgctggttcctcgctccggggcggagctcgcgatagcgaccgggagcagggcgcggggcgggacccaggtccgaggcgaggaagccggaagccaggcgcggggagcctcccccttcgactgcagcctcgctccgtgccttctgcgcgcctgggatcccggagcctgcctaggttctgtgcgctcccgcccaggccggtgcccgccgcccgcctgcgccccaggcaggtcccaggcctccggctgctcccggccgaaggtggggacaggcagtggcaggcaccactagcgagggcgtttgggaacccagggtgaccacggcgcagccatggggaccgcgcttgtgtaccatgaggacatgacggccacccggctgctctgggacgaccccgagtgcgagatcgagcgtcctgagcgcctgaccgcagccctggatcgcctgcggcagcgcggcctggaacagaggtgtctgcggttgtcagcccgcgaggcctcggaagaggagctgggcctggtgcacagagtacctttcactgcgcgcggctggccgcaggggctggactgcagctggtggacgctgtgctcactggagctgtgcaaaatgggcttgccctggtgaggcctcccgggcaccatggccagagggcggctgccaacgggttctgtgtgttcaacaacgtggccatagcagctgcacatgccaagcagaaacacgggctacacaggatcctcgtcgtggactgggatgtgcaccatggccaggggatccagtatctctttgaggatgaccccagcgtcctttacttctcctggcaccgctatgagcatgggcgcttctggcctttcctgcgagagtcagatgcagacgcagtggggcggggacagggcctcggcttcactgtcaacctgccctggaaccaggttgggatgggaaacgctgactacgtggctgccttcctgcacctgctgctcccactggcctttgagtttgaccctgagctggtgctggtctcggcaggatttgactcagccatcggggaccctgaggggcaaatgcaggccacgccagagtgcttcgcccacctcacacagctgctgcaggtgctggccggcggccgggtctgtgccgtgctggagggcggctaccacctggagtcactggcggagtcagtgtgcatgacagtacagacgctgctgggtgacccggccccacccctgtcagggccaatggcgccatgtcagagtgccctagagtccatccagagtgcccgtgctgcccaggccccgcactggaagagcctccagcagcaagatgtgaccgctgtgccgatgagccccagcagccactccccagaggggaggcctccacctctgctgcctgggggtccagtgtgtaaggcagctgcatctgcaccgagctccctcctggaccagccgtgcctctgccccgcaccctctgtccgcaccgctgttgccctgacaacgccggatatcacattggttctgccccctgacgtcatccaacaggaagcgtcagccctgagggaggagacagaagcctgggccaggccacacgagtccctggcccgggaggaggccctcactgcacttgggaagctcctgtacctcttagatgggatgctggatgggcaggtgaacagtggtatagcagccactccagcctctgctgcagcagccaccctggatgtggctgttcggagaggcctgtcccacggagcccagaggctgctgtgcgtggccctgggacagctggaccggcctccagacctcgcccatgacgggaggagtctgtggctgaacatcaggggcaaggaggcggctgccctatccatgttccatgtctccacgccactgccagtgatgaccggtggtttcctgagctgcatcttgggcttggtgctgcccctggcctatggcttccagcctgacctggtgctggtggcgctggggcctggccatggcctgcagggcccccacgctgcactcctggctgcaatgcttcgggggctggcagggggccgagtcctggccctcctggaggagaactccacaccccagctagcagggatcctggcccgggtgctgaatggagaggcacctcctagcctaggcccttcctctgtggcctccccagaggacgtccaggccctgatgtacctgagagggcagctggagcctcagtggaagatgttgcagtgccatcctcacctggtggcttgaaatcggccaaggtgggagcatttacaccgcagaaatgacaccgcacgccagcgccccgcggccgcgatccggaccccaagcccacggctccctcgactctggggcacggaaccccgcccactcccaatccccgcgccccgccctctcccacccgtgcttcccccgctccacccctcacctcacctcgcccccgccccacccatcgcgccccggcccgtcccatcgaggcccatgcaacccacgctcggtcccgttccggcccctgcgccccgctgcgcttcgctccccgcccttgcgccgttagtaaacatcgctcaaacg

SEQ ID NO: 141013 - DNA, 2960 bp, Homo sapiens
  Payload ID: 7715
  Gene Symbol: HDAC11
  Gene Name: histone deacetylase 11
  Uniprot ID: Q96DB2
  ENST ID: ENST00000295757
  CDS Start-End: 184-1227
ggccttcctgcgggcaggctctctgtgtcgcaacactggcggggcgggccaaatcggccagagctctgcccccagaggacgcggctaagcccgggggcgtgtcctgggctggccccacccgcgccccgccccgccccgcccggtcgcggagctgcggccagctttgggagggccggccccgggatgctacacacaacccagctgtaccagcatgtgccagagacacgctggccaatcgtgtactcgccgcgctacaacatcaccttcatgggcctggagaagctgcatccctttgatgccggaaaatggggcaaagtgatcaatttcctaaaagaagagaagcttctgtctgacagcatgctggtggaggcgcgggaggcctcggaggaggacctgctggtggtgcacacgaggcgctatcttaatgagctcaagtggtcctttgctgttgctaccatcacagaaatcccccccgttatcttcctccccaacttccttgtgcagaggaaggtgctgaggccccttcggacccagacaggaggaaccataatggcggggaagctggctgtggagcgaggctgggccatcaacgtggggggtggcttccaccactgctccagcgaccgtggcgggggcttctgtgcctatgcggacatcacgctcgccatcaagtttctgtttgagcgtgtggagggcatctccagggctaccatcattgatcttgatgcccatcagggcaatgggcatgagcgagacttcatggacgacaagcgtgtgtacatcatggatgtctacaaccgccacatctacccaggggaccgctttgccaagcaggccatcaggcggaaggtggagctggagtggggcacagaggatgatgagtacctggataaggtggagaggaacatcaagaaatccctccaggagcacctgcccgacgtggtggtatacaatgcaggcaccgacatcctcgagggggaccgccttggggggctgtccatcagcccagcgggcatcgtgaagcgggatgagctggtgttccggatggtccgtggccgccgggtgcccatccttatggtgacctcaggcgggtaccagaagcgcacagcccgcatcattgctgactccatacttaatctgtttggcctggggctcattgggcctgagtcacccagcgtctccgcacagaactcagacacaccgctgcttccccctgcagtgccctgacccttgctgccctgcctgtcacgtggccctgcctatccgccccttagtgctttttgttttctaacctcatggggtggtggaggcagccttcagtgagcatggaggggcagggccatccctggctggggcctggagctggcccttcctctacttttccctgctggaagccagaagggcttgaggcctctatgggtgggggcagaaggcagagcctgtgtcccagggggacccacacgaagtcaccagcccataggtccagggaggcaggcagttaactgagaattggagaggacaggctaggtcccaggcacagcgagggccctgggcttggggtgttctggttttgagaacggcagacccaggtcggagtgaggaagcttccacctccatcctgactaggcctgcatcctaactgggcctccctccctccccttggtcatgggatttgctgccctctttgccccagagctgaagagctataggcactggtgtggatggcccaggaggtgctggagctaggtctccaggtgggcctggttcccaggcagcaggtgggaaccctgggcctggatgtgaggggcggtcaggaaggggtacaggtgggttccctcatctggagttccccctcaataaagcaaggtctggacctgccttcccaggcccttctgtgggggtgaaggtggggaaggcctgcggcgcccagatcactgccttagcagtagtcttgcctgttcagtgcaaggggcaggttttggggggaggaattcttagcgcaaggacgggcctcagccctgtcgcctccagggggccgctgacccaggtggggagagggcagaagaagggtgggggacgtgggcaggccaggctcacaggtggaaatcagggatgcagggtggtgcccaagccaggtcctgcaggaacccaggcccagggagggacccagacactggtgaggcggggcaggggttcctggagagagggcagcgaggatctctatcctggcctggggattatgaacataggtagccggggcagggccctgggtgggactgtggcctccactggcctcaccaaagtgcctgggccccaatccttctccatgcccaggggccccaggtgggccagacctctggcctgttcctcagccctactcatggggacattcagggacctccaggaagtgggcgggggagcatccacccctgctagccggcagctgtggccctgatcaaatcaggggctggggagggaaagtgggtccattgaggtggccctgctccatcagccccctacgggacttgtgttcattacagtgagggggtgctcccactgtctcccggcctccctaatgctccctctgctgcagggagaagggttccaagatcacaaaatgtcaacaatgctggcctcctggaccagaccccgaggctctaacaatgcactctgagatccctacccttgccgttggtctctgtcgctgactcgaggcacctaacatccattcacacccaacacaggccagcgacttctggggctcagccacagacatggtttgtcactgttgagcttctgttcctagagaatcctagaggcttgattggcccaggctgctgtgtgtgctggaggcaaagaatccctacctcctaggggtgaaaggaaatgaaaatggaaagttcttgtagcgcaaggcctgacatgggtagctgctcaataaatgctagtgtgttatttca

SEQ ID NO: 141014 - DNA, 576 bp, Homo sapiens
  Payload ID: 7715
  Gene Symbol: HDAC11
  Gene Name: histone deacetylase 11
  ENST ID: ENST00000405025
  CDS Start-End: 154-510
gtgggctcccaggggtcccggtgggcgggcgcgctagggcgagggcggggacggccgggcgggcgcgccaggctacacacaacccagctgtaccagcatgtgccagagacacgctggccaatcgtgtactcgccgcgctacaacatcaccttcatgggcctggagaagctgcatccctttgatgccggaaaatggggcaaagtgatcaatttcctaaaagaagagaagcttctgtctgacagcatgctggtggaggcgcgggaggcctcggaggaggacctgctggtggtgcacacgaggcgctatcttaatgagctcaagaggccatcaggcggaaggtggagctggagtggggcacagaggatgatgagtacctggataaggtggagaggaacatcaagaaatccctccaggagcacctgcccgacgtggtggtatacaatgcaggcaccgacatcctcgagggggaccgccttggggggctgtccatcagcccagcgggcatcgtgaagcgggatgagctggtgttccggatggtccgtggccgccgggtgcccatccttatggtgacctcag

SEQ ID NO: 141015 - DNA, 1018 bp, Homo sapiens
  Payload ID: 7715
  Gene Symbol: HDAC11
  Gene Name: histone deacetylase 11
  ENST ID: ENST00000402271
  CDS Start-End: 46-852
cccggtcgcggagctgcggccagctttgggagggccggccccgggatgctacacacaacccagctgtaccagcatgtgccagagacacgctggccaatcgtgtactcgccgcgctacaacatcaccttcatgggcctggagaagctgcatccctttgatgccggaaaatggggcaaagtgatcaatttcctaaaagaagagaagcttctgtctgacagcatgctggtggaggcgcgggaggcctcggaggaggacctgctggtggtgcacacgaggcgctatcttaatgagctcaagtttctgtttgagcgtgtggagggcatctccagggctaccatcattgatcttgatgcccatcagggcaatgggcatgagcgagacttcatggacgacaagcgtgtgtacatcatggatgtctacaaccgccacatctacccaggggaccgctttgccaagcaggccatcaggcggaaggtggagctggagtggggcacagaggatgatgagtacctggataaggtggagaggaacatcaagaaatccctccaggagcacctgcccgacgtggtggtatacaatgcaggcaccgacatcctcgagggggaccgccttggggggctgtccatcagcccagcgggcatcgtgaagcgggatgagctggtgttccggatggtccgtggccgccgggtgcccatccttatggtgacctcaggcgggtaccagaagcgcacagcccgcatcattgctgactccatacttaatctgtttggcctggggctcattgggcctgagtcacccagcgtctccgcacagaactcagacacaccgctgcttccccctgcagtgccctgacccttgctgccctgcctgtcacgtggccctgcctatccgccccttagtgctttttgttttctaacctcatggggtggtggaggcagccttcagtgagcatggaggggcagggccatccctggctggggcctggagctggcccttcctctacttttccctgctggaa

SEQ ID NO: 141016 - DNA, 1000 bp, Homo sapiens
  Payload ID: 7715
  Gene Symbol: HDAC11
  Gene Name: histone deacetylase 11
  ENST ID: ENST00000402259
  CDS Start-End: 67-612
cccgcgccccgccccgccccgcccggtcgcggagctgcggccagctttgggagggccggccccgggatgctacacacaacccagctgtaccagcatgtgccagagacacgctggccaatcgtgtactcgccgcgctacaacatcaccttcatgggcctggagaagctgcatccctttgatgccggaaaatggggcaaagtgatcaatttcctaaaagaggccatcaggcggaaggtggagctggagtggggcacagaggatgatgagtacctggataaggtggagaggaacatcaagaaatccctccaggagcacctgcccgacgtggtggtatacaatgcaggcaccgacatcctcgagggggaccgccttggggggctgtccatcagcccagcgggcatcgtgaagcgggatgagctggtgttccggatggtccgtggccgccgggtgcccatccttatggtgacctcaggcgggtaccagaagcgcacagcccgcatcattgctgactccatacttaatctgtttggcctggggctcattgggcctgagtcacccagcgtctccgcacagaactcagacacaccgctgcttccccctgcagtgccctgacccttgctgccctgcctgtcacgtggccctgcctatccgccccttagtgctttttgttttctaacctcatggggtggtggaggcagccttcagtgagcatggaggggcagggccatccctggctggggcctggagctggcccttcctctacttttccctgctggaagccagaagggcttgaggcctctatgggtgggggcagaaggcagagcctgtgtcccagggggacccacacgaagtcaccagcccataggtccagggaggcaggcagttaactgagaattggagaggacaggctaggtcccaggcacagcgagggccctgggcttggggtgttctggttttgagaacggcagacccaggtcggagtgaggaagcttccacctcc

SEQ ID NO: 141017 - DNA, 799 bp, Homo sapiens
  Payload ID: 7715
  Gene Symbol: HDAC11
  Gene Name: histone deacetylase 11
  ENST ID: ENST00000405478
  CDS Start-End: 186-799
cgggatgtgagtgccgcggggcgagggcgggggtgggctcccaggggtcccggtgggcgggcgcgctagggcgagggcggggacggccgggcgggcgcgccaggctacacacaacccagctgtaccagcatgtgccagagacacgctggccaatcgtgtactcgccgcgctacaacatcaccttcatgggcctggagaagctgcatccctttgatgccggaaaatggggcaaagtgatcaatttcctaaaagaagagaagcttctgtctgacagcatgctggtggaggcgcgggaggcctcggaggaggacctgctggtggtgcacacgaggcgctatcttaatgagctcaagtggtcctttgctgttgctaccatcacagaaatcccccccgttatcttcctccccaacttccttgtgcagaggaaggtgctgaggccccttcggacccagacaggaggaaccataatggcggggaagctggctgtggagcgaggctgggccatcaacgtggggggtggcttccaccactgctccagcgaccgtggcgggggcttctgtgcctatgcggacatcacgctcgccatcaagtttctgtttgagcgtgtggagggcatctccagggctaccatcattgatcttgatgcccatcagggcaatgggcatgagcgagacttcatggacgacaagcgtgtgtacatcatggatgtctacaaccgccacatctacccaggggaccgctttgccaagcaggccatcaggcggaaggtggagctggagtggggcacagaggatgatga

SEQ ID NO: 141018 - DNA, 967 bp, Homo sapiens
  Payload ID: 7715
  Gene Symbol: HDAC11
  Gene Name: histone deacetylase 11
  ENST ID: ENST00000404040
  CDS Start-End: 25-768
agctttgggagggccggccccgggatgctacacacaacccagctgtaccagcatgtgccagagacacgctggccaatcgtgtactcgccgcgctacaacatcaccttcatgggcctggagaagctgcatccctttgatgccggaaaatggggcaaagtgatcaatttcctaaaagaagagaagcttctgtctgacagcatgctggtggaggcgcgggaggcctcggaggaggacctgctggtggtgcacacgaggcgctatcttaatgagctcaagggcaatgggcatgagcgagacttcatggacgacaagcgtgtgtacatcatggatgtctacaaccgccacatctacccaggggaccgctttgccaagcaggccatcaggcggaaggtggagctggagtggggcacagaggatgatgagtacctggataaggtggagaggaacatcaagaaatccctccaggagcacctgcccgacgtggtggtatacaatgcaggcaccgacatcctcgagggggaccgccttggggggctgtccatcagcccagcgggcatcgtgaagcgggatgagctggtgttccggatggtccgtggccgccgggtgcccatccttatggtgacctcaggcgggtaccagaagcgcacagcccgcatcattgctgactccatacttaatctgtttggcctggggctcattgggcctgagtcacccagcgtctccgcacagaactcagacacaccgctgcttccccctgcagtgccctgacccttgctgccctgcctgtcacgtggccctgcctatccgccccttagtgctttttgttttctaacctcatggggtggtggaggcagccttcagtgagcatggaggggcagggccatccctggctggggcctggagctggcccttcctctacttttccctgctggaagccagaagggcttgaggcctctatgggtggggg

SEQ ID NO: 141019 - DNA, 577 bp, Homo sapiens
  Payload ID: 7715
  Gene Symbol: HDAC11
  Gene Name: histone deacetylase 11
  ENST ID: ENST00000404548
  CDS Start-End: 25-465
agctttgggagggccggccccgggatgctacacacaacccagctgtaccagcatgtgccagagacacgctggccaatcgtgtactcgccgcgctacaacatcaccttcatgggcctggagaagctgcatccctttgatgccggaaaatggggcaaagtgatcaatttcctaaaagaagagaagcttctgtctgacagcatgctggtggaggcgcgggaggcctcggaggaggacctgctggtggtgcacacgaggcgctatcttaatgagctcaagaggccatcaggcggaaggtggagctggagtggggcacagaggatgatgagtacctggataaggtggagaggaacatcaagaaatccctccaggagcacctgcccgacgtggtggtatacaatgcaggcaccgacatcctcgagggggaccgccttggggggctgtccatcagcccagcgggcatcgtgaagcgggatgagctggtgttccggatggtccgtggccgccgggtgcccatccttatggtgacctcaggcgggtaccagaagcgcacagcccgcatcattgctgactccatact

SEQ ID NO: 141020 - DNA, 2766 bp, Homo sapiens
  Payload ID: 7715
  Gene Symbol: HDAC11
  Gene Name: histone deacetylase 11
  ENST ID: ENST00000437379
  CDS Start-End: 83-1042
gctacacacaacccagctgtaccagcatgtgccagagacacgctggccaatcgtgtactcgccgcgctacaacatcaccttcatgggcctggagaagctgcatccctttgatgccggaaaatggggcaaagtgatcaatttcctaaaagaagagaagcttctgtctgacagcatgctggtggaggcgcgggaggcctcggaggaggacctgctggtggtgcacacgaggcgctatcttaatgagctcaagtggtcctttgctgttgctaccatcacagaaatcccccccgttatcttcctccccaacttccttgtgcagaggaaggtgctgaggccccttcggacccagacaggaggaaccataatggcggggaagctggctgtggagcgaggctgggccatcaacgtggggggtggcttccaccactgctccagcgaccgtggcgggggcttctgtgcctatgcggacatcacgctcgccatcaagtttctgtttgagcgtgtggagggcatctccagggctaccatcattgatcttgatgcccatcagggcaatgggcatgagcgagacttcatggacgacaagcgtgtgtacatcatggatgtctacaaccgccacatctacccaggggaccgctttgccaagcaggccatcaggcggaaggtggagctggagtggggcacagaggatgatgagtacctggataaggtggagaggaacatcaagaaatccctccaggagcacctgcccgacgtggtggtatacaatgcaggcaccgacatcctcgagggggaccgccttggggggctgtccatcagcccagcgggcatcgtgaagcgggatgagctggtgttccggatggtccgtggccgccgggtgcccatccttatggtgacctcaggcgggtaccagaagcgcacagcccgcatcattgctgactccatacttaatctgtttggcctggggctcattgggcctgagtcacccagcgtctccgcacagaactcagacacaccgctgcttccccctgcagtgccctgacccttgctgccctgcctgtcacgtggccctgcctatccgccccttagtgctttttgttttctaacctcatggggtggtggaggcagccttcagtgagcatggaggggcagggccatccctggctggggcctggagctggcccttcctctacttttccctgctggaagccagaagggcttgaggcctctatgggtgggggcagaaggcagagcctgtgtcccagggggacccacacgaagtcaccagcccataggtccagggaggcaggcagttaactgagaattggagaggacaggctaggtcccaggcacagcgagggccctgggcttggggtgttctggttttgagaacggcagacccaggtcggagtgaggaagcttccacctccatcctgactaggcctgcatcctaactgggcctccctccctccccttggtcatgggatttgctgccctctttgccccagagctgaagagctataggcactggtgtggatggcccaggaggtgctggagctaggtctccaggtgggcctggttcccaggcagcaggtgggaaccctgggcctggatgtgaggggcggtcaggaaggggtacaggtgggttccctcatctggagttccccctcaataaagcaaggtctggacctgccttcccaggcccttctgtgggggtgaaggtggggaaggcctgcggcgcccagatcactgccttagcagtagtcttgcctgttcagtgcaaggggcaggttttggggggaggaattcttagcgcaaggacgggcctcagccctgtcgcctccagggggccgctgacccaggtggggagagggcagaagaagggtgggggacgtgggcaggccaggctcacaggtggaaatcagggatgcagggtggtgcccaagccaggtcctgcaggaacccaggcccagggagggacccagacactggtgaggcggggcaggggttcctggagagagggcagcgaggatctctatcctggcctggggattatgaacataggtagccggggcagggccctgggtgggactgtggcctccactggcctcaccaaagtgcctgggccccaatccttctccatgcccaggggccccaggtgggccagacctctggcctgttcctcagccctactcatggggacattcagggacctccaggaagtgggcgggggagcatccacccctgctagccggcagctgtggccctgatcaaatcaggggctggggagggaaagtgggtccattgaggtggccctgctccatcagccccctacgggacttgtgttcattacagtgagggggtgctcccactgtctcccggcctccctaatgctccctctgctgcagggagaagggttccaagatcacaaaatgtcaacaatgctggcctcctggaccagaccccgaggctctaacaatgcactctgagatccctacccttgccgttggtctctgtcgctgactcgaggcacctaacatccattcacacccaacacaggccagcgacttctggggctcagccacagacatggtttgtcactgttgagcttctgttcctagagaatcctagaggcttgattggcccaggctgctgtgtgtgctggaggcaaagaatccctacctcctaggggtgaaaggaaatgaaaatggaaagttcttgtagcgcaaggcctgacatgggtagctgctcaataaatgctagtgt

SEQ ID NO: 141021 - DNA, 731 bp, Homo sapiens
  Payload ID: 7715
  Gene Symbol: HDAC11
  Gene Name: histone deacetylase 11
  ENST ID: ENST00000455904
  CDS Start-End: 234-731
ttaagcagctgttgttgaggggcccttgtctgcggctgaggggctagtggtgctgggcaatggctggtgggtcagtccaggcgggctcgggagggagctgctttctgccgaggctgccccagctgtgcgtctgtctttttccacacggtaggctacacacaacccagctgtaccagcatgtgccagagacacgctggccaatcgtgtactcgccgcgctacaacatcaccttcatgggcctggagaagctgcatccctttgatgccggaaaatggggcaaagtgatcaatttcctaaaagaagagaagcttctgtctgacagcatgctggtggaggcgcgggaggcctcggaggaggacctgctggtggtgcacacgaggcgctatcttaatgagctcaagtggtcctttgctgttgctaccatcacagaaatcccccccgttatcttcctccccaacttccttgtgcagaggaaggtgctgaggccccttcggacccagacaggaggaaccataatggcggggaagctggctgtggagcgaggctgggccatcaacgtggggggtggcttccaccactgctccagcgaccgtggcgggggcttctgtgcctatgcggacatcacgctcgccatcaagtttctgtttgagcgtgtggagggcatctccagggctaccatcattgatcttgatgcccatcagggcaatgggcatgagcgagacttcatggac

SEQ ID NO: 141022 - DNA, 520 bp, Homo sapiens
  Payload ID: 7715
  Gene Symbol: HDAC11
  Gene Name: histone deacetylase 11
  ENST ID: ENST00000434848
  CDS Start-End: 16-520
gactgccagggtgtgatgggaagggttagcagcgcagcggggtcaggggatccccgccccccgccctggctcaggctacacacaacccagctgtaccagcatgtgccagagacacgctggccaatcgtgtactcgccgcgctacaacatcaccttcatgggcctggagaagctgcatccctttgatgccggaaaatggggcaaagtgatcaatttcctaaaagaagagaagcttctgtctgacagcatgctggtggaggcgcgggaggcctcggaggaggacctgctggtggtgcacacgaggcgctatcttaatgagctcaagggggtggcttccaccactgctccagcgaccgtggcgggggcttctgtgcctatgcggacatcacgctcgccatcaagtttctgtttgagcgtgtggagggcatctccagggctaccatcattgatcttgatgcccatcagggcaatgggcatgagcgagacttcatggacgacaagcgtgtgtacatcatggatgt

SEQ ID NO: 141023 - DNA, 1021 bp, Homo sapiens
  Payload ID: 7715
  Gene Symbol: HDAC11
  Gene Name: histone deacetylase 11
  ENST ID: ENST00000425430
  CDS Start-End: 43-204
ggtcgcggagctgcggccagctttgggagggccggccccgggatgctacacacaacccagctgtaccagcatgtgccagagacacgctggccaatcgtgtactcgccgcgctacaacatcaccttcatgggcctggagaagctgcatccctttgatgccggaaaatggggcaaagtgatcaatttcctaaaagtttctgtttgagcgtgtggagggcatctccagggctaccatcattgatcttgatgcccatcagggcaatgggcatgagcgagacttcatggacgacaagcgtgtgtacatcatggatgtctacaaccgccacatctacccaggggaccgctttgccaagcaggccatcaggcggaaggtggagctggagtggggcacagaggatgatgagtacctggataaggtggagaggaacatcaagaaatccctccaggagcacctgcccgacgtggtggtatacaatgcaggcaccgacatcctcgagggggaccgccttggggggctgtccatcagcccagcgggcatcgtgaagcgggatgagctggtgttccggatggtccgtggccgccgggtgcccatccttatggtgacctcaggcgggtaccagaagcgcacagcccgcatcattgctgactccatacttaatctgtttggcctggggctcattgggcctgagtcacccagcgtctccgcacagaactcagacacaccgctgcttccccctgcagtgccctgacccttgctgccctgcctgtcacgtggccctgcctatccgccccttagtgctttttgttttctaacctcatggggtggtggaggcagccttcagtgagcatggaggggcagggccatccctggctggggcctggagctggcccttcctctacttttccctgctggaagccagaagggcttgaggcctctatgggtgggggcagaaggcagagcctgtgtcccagggggacccacacgaagtcaccagcccataggtccagggaggcaggcagtt

SEQ ID NO: 141024 - DNA, 2875 bp, Homo sapiens
  Payload ID: 7715
  Gene Symbol: HDAC11
  Gene Name: histone deacetylase 11
  ENST ID: ENST00000446613
  CDS Start-End: 218-928
aaatcggccagagctctgcccccagaggacgcggctaagcccgggggcgtgtcctgggctggccccacccgcgccccgccccgccccgcccggtcgcggagctgcggccagctttgggagggccggccccgggatgctacacacaacccagctgtaccagcatgtgccagagacacgctggccaatcgtgtactcgccgcgctacaacatcaccttcatgggcctggagaagctgcatccctttgatgccggaaaatggggcaaagtgatcaatttcctaaaagaagagaagcttctgtctgacagcatgctggtggaggcgcgggaggcctcggaggaggacctgctggtggtgcacacgaggcgctatcttaatgagctcaagtggtcctttgctgttgctaccatcacagaaatcccccccgttatcttcctccccaacttccttgtgcagaggaaggtgctgaggccccttcggacccagacaggaggaaccataatgggggtggcttccaccactgctccagcgaccgtggcgggggcttctgtgcctatgcggacatcacgctcgccatcaagtttctgtttgagcgtgtggagggcatctccagggctaccatcattgatcttgatgcccatcagggcaatgggcatgagcgagacttcatggacgacaagcgtgtgtacatcatggatgtctacaaccgccacatctacccaggggaccgctttgccaagcaggccatcaggcggaaggtggagctggagtggggcacagaggatgatgagtacctggataaggtggagaggaacatcaagaaatccctccaggagcacctgcccgacgtggtggtatacaatgcaggcaccgacatcctcgagggggaccgccttggggggctgtccatcagcccagcgggcatcgtgaagcgggatgagctggtgttccggatggtccgtggccgccgggtgcccatccttatggtgacctcaggcgggtaccagaagcgcacagcccgcatcattgctgactccatacttaatctgtttggcctggggctcattgggcctgagtcacccagcgtctccgcacagaactcagacacaccgctgcttccccctgcagtgccctgacccttgctgccctgcctgtcacgtggccctgcctatccgccccttagtgctttttgttttctaacctcatggggtggtggaggcagccttcagtgagcatggaggggcagggccatccctggctggggcctggagctggcccttcctctacttttccctgctggaagccagaagggcttgaggcctctatgggtgggggcagaaggcagagcctgtgtcccagggggacccacacgaagtcaccagcccataggtccagggaggcaggcagttaactgagaattggagaggacaggctaggtcccaggcacagcgagggccctgggcttggggtgttctggttttgagaacggcagacccaggtcggagtgaggaagcttccacctccatcctgactaggcctgcatcctaactgggcctccctccctccccttggtcatgggatttgctgccctctttgccccagagctgaagagctataggcactggtgtggatggcccaggaggtgctggagctaggtctccaggtgggcctggttcccaggcagcaggtgggaaccctgggcctggatgtgaggggcggtcaggaaggggtacaggtgggttccctcatctggagttccccctcaataaagcaaggtctggacctgccttcccaggcccttctgtgggggtgaaggtggggaaggcctgcggcgcccagatcactgccttagcagtagtcttgcctgttcagtgcaaggggcaggttttggggggaggaattcttagcgcaaggacgggcctcagccctgtcgcctccagggggccgctgacccaggtggggagagggcagaagaagggtgggggacgtgggcaggccaggctcacaggtggaaatcagggatgcagggtggtgcccaagccaggtcctgcaggaacccaggcccagggagggacccagacactggtgaggcggggcaggggttcctggagagagggcagcgaggatctctatcctggcctggggattatgaacataggtagccggggcagggccctgggtgggactgtggcctccactggcctcaccaaagtgcctgggccccaatccttctccatgcccaggggccccaggtgggccagacctctggcctgttcctcagccctactcatggggacattcagggacctccaggaagtgggcgggggagcatccacccctgctagccggcagctgtggccctgatcaaatcaggggctggggagggaaagtgggtccattgaggtggccctgctccatcagccccctacgggacttgtgttcattacagtgagggggtgctcccactgtctcccggcctccctaatgctccctctgctgcagggagaagggttccaagatcacaaaatgtcaacaatgctggcctcctggaccagaccccgaggctctaacaatgcactctgagatccctacccttgccgttggtctctgtcgctgactcgaggcacctaacatccattcacacccaacacaggccagcgacttctggggctcagccacagacatggtttgtcactgttgagcttctgttcctagagaatcctagaggcttgattggcccaggctgctgtgtgtgctggaggcaaagaatccctacctcctaggggtgaaaggaaatgaaaatggaaagttcttgtagcgcaaggcctgacatgggtagctgctcaataaatgctagtgtgttatttcatcttctga

SEQ ID NO: 141025 - DNA, 580 bp, Homo sapiens
  Payload ID: 7715
  Gene Symbol: HDAC11
  Gene Name: histone deacetylase 11
  ENST ID: ENST00000416248
  CDS Start-End: 306-580
gagtgcttactgtgctcagctcctcagttgcattctctgagtcctcacaacagccacacattttgcagccgaagccttgtgccacacagctgtgggggcatttattacggtgcagaggtgatgcgcggaggccttgcagccagacacacctgagtgcacgcctgcttctccacagacctgcactgtgaccttgggcacacctggtctgctctctgagcctctggctacacacaacccagctgtaccagcatgtgccagagacacgctggccaatcgtgtactcgccgcgctacaacatcaccttcatgggcctggagaagctgcatccctttgatgccggaaaatggggcaaagtgatcaatttcctaaaagaagagaagcttctgtctgacagcatgctggtggaggcgcgggaggcctcggaggaggacctgctggtggtgcacacgaggcgctatcttaatgagctcaagtggtcctttgctgttgctaccatcacagaaatcccccccgttatcttcctccccaacttccttgtgcagaggaaggtgctgaggccccttcggacccagacaggagg

SEQ ID NO: 141026 - DNA, 580 bp, Homo sapiens
  Payload ID: 7715
  Gene Symbol: HDAC11
  Gene Name: histone deacetylase 11
  ENST ID: ENST00000418189
  CDS Start-End: 259-580
agatttgctggtgaggggtgagggacgctcgggacgggtgtttccaggccctcccggcgcgccaggccagccccgcgcccctgctcggtggcccgagggacgcgcgccggccgcgggcctgggcccggacccggagcggtcgggcgatgtgcgcgggtctgacgtctgcgctgcccagccccctggctacgcggacgcccccacggaggcagccactggggcggatttctgtctctgggtgacgactgccagggtgtgatgggaagggttagcagcgcagcggggtcaggggatccccgccccccgccctggctcaggctacacacaacccagctgtaccagcatgtgccagagacacgctggccaatcgtgtactcgccgcgctacaacatcaccttcatgggcctggagaagctgcatccctttgatgccggaaaatggggcaaagtgatcaatttcctaaaagaagagaagcttctgtctgacagcatgctggtggaggcgcgggaggcctcggaggaggacctgctggtggtgcacacgaggcgctatcttaatgagctcaagtggtcctttgctg

SEQ ID NO: 141027 - DNA, 2043 bp, Homo sapiens
  Payload ID: 7715
  Gene Symbol: HDAC11
  Gene Name: histone deacetylase 11
  ENST ID: ENST00000433119
  CDS Start-End: 476-1186
gcaggctctgagagcctacatgtcttcgccgggagtgcttgtcccggagctgctcgcagactgggccgggggtgggctcgggtcggagaggtcacggggctccttaggtcacaggcggcagggccagagaaactcccccgcccctacgtttaactcgcggaaacaagggcccagagagcccagacgccagcccaaggtcacacagcgaagccccggcacagcccgccgggaacctgtcgtttctaacccccagcctctcgccgtttctacccagcttgggaagcgcaggaacaggacatacggtggtcgcgccccttccgcgaggccggggtgaaacccgcttggccctcccgccagggggcggagcttccgaaccaggcgggattccaccgggctacacacaacccagctgtaccagcatgtgccagagacacgctggccaatcgtgtactcgccgcgctacaacatcaccttcatgggcctggagaagctgcatccctttgatgccggaaaatggggcaaagtgatcaatttcctaaaagaagagaagcttctgtctgacagcatgctggtggaggcgcgggaggcctcggaggaggacctgctggtggtgcacacgaggcgctatcttaatgagctcaagtggtcctttgctgttgctaccatcacagaaatcccccccgttatcttcctccccaacttccttgtgcagaggaaggtgctgaggccccttcggacccagacaggaggaaccataatgggggtggcttccaccactgctccagcgaccgtggcgggggcttctgtgcctatgcggacatcacgctcgccatcaagtttctgtttgagcgtgtggagggcatctccagggctaccatcattgatcttgatgcccatcagggcaatgggcatgagcgagacttcatggacgacaagcgtgtgtacatcatggatgtctacaaccgccacatctacccaggggaccgctttgccaagcaggccatcaggcggaaggtggagctggagtggggcacagaggatgatgagtacctggataaggtggagaggaacatcaagaaatccctccaggagcacctgcccgacgtggtggtatacaatgcaggcaccgacatcctcgagggggaccgccttggggggctgtccatcagcccagcgggcatcgtgaagcgggatgagctggtgttccggatggtccgtggccgccgggtgcccatccttatggtgacctcaggcgggtaccagaagcgcacagcccgcatcattgctgactccatacttaatctgtttggcctggggctcattgggcctgagtcacccagcgtctccgcacagaactcagacacaccgctgcttccccctgcagtgccctgacccttgctgccctgcctgtcacgtggccctgcctatccgccccttagtgctttttgttttctaacctcatggggtggtggaggcagccttcagtgagcatggaggggcagggccatccctggctggggcctggagctggcccttcctctacttttccctgctggaagccagaagggcttgaggcctctatgggtgggggcagaaggcagagcctgtgtcccagggggacccacacgaagtcaccagcccataggtccagggaggcaggcagttaactgagaattggagaggacaggctaggtcccaggcacagcgagggccctgggcttggggtgttctggttttgagaacggcagacccaggtcggagtgaggaagcttccacctccatcctgactaggcctgcatcctaactgggcctccctccctccccttggtcatgggatttgctgccctctttgccccagagctgaagagctataggcactggtgtggatggcccaggaggtgctggagctaggtctccaggtgggcctggttcccaggcagcaggtgggaaccctgggcctggatgtgaggggcggtcaggaaggggtacaggtgggttccctcatctggagttccccctcaataaagcaaggtctggacctgc

SEQ ID NO: 141028 - DNA, 1559 bp, Homo sapiens
  Payload ID: 7715
  Gene Symbol: HDAC11
  Gene Name: histone deacetylase 11
  Uniprot ID: Q96DB2
  ENST ID: ENST00000522202
  CDS Start-End: 119-1009
agggcgagggcggggacggccgggcgggcgcgccaggctacacacaacccagctgtaccagcatgtgccagagacacgctggccaatcgtgtactcgccgcgctacaacatcaccttcatgggcctggagaagctgcatccctttgatgccggaaaatggggcaaagtgatcaatttcctaaaagaagagaagcttctgtctgacagcatgctggtggaggcgcgggaggcctcggaggaggacctgctggtggtgcacacgaggcgctatcttaatgagctcaagaggaaggtgctgaggccccttcggacccagacaggaggaaccataatggcggggaagctggctgtggagcgaggctgggccatcaacgtggggggtggcttccaccactgctccagcgaccgtggcgggggcttctgtgcctatgcggacatcacgctcgccatcaagtttctgtttgagcgtgtggagggcatctccagggctaccatcattgatcttgatgcccatcagggcaatgggcatgagcgagacttcatggacgacaagcgtgtgtacatcatggatgtctacaaccgccacatctacccaggggaccgctttgccaagcaggccatcaggcggaaggtggagctggagtggggcacagaggatgatgagtacctggataaggtggagaggaacatcaagaaatccctccaggagcacctgcccgacgtggtggtatacaatgcaggcaccgacatcctcgagggggaccgccttggggggctgtccatcagcccagcgggcatcgtgaagcgggatgagctggtgttccggatggtccgtggccgccgggtgcccatccttatggtgacctcaggcgggtaccagaagcgcacagcccgcatcattgctgactccatacttaatctgtttggcctggggctcattgggcctgagtcacccagcgtctccgcacagaactcagacacaccgctgcttccccctgcagtgccctgacccttgctgccctgcctgtcacgtggccctgcctatccgccccttagtgctttttgttttctaacctcatggggtggtggaggcagccttcagtgagcatggaggggcagggccatccctggctggggcctggagctggcccttcctctacttttccctgctggaagccagaagggcttgaggcctctatgggtgggggcagaaggcagagcctgtgtcccagggggacccacacgaagtcaccagcccataggtccagggaggcaggcagttaactgagaattggagaggacaggctaggtcccaggcacagcgagggccctgggcttggggtgttctggttttgagaacggcagacccaggtcggagtgaggaagcttccacctccatcctgactaggcctgcatcctaactgggcctccctccctccccttggtcatgggatttgctgccctctttgccccagagctgaagagctataggcactggtgtggatggcccaggaggtgctggagctaggtctccaggtgggcctggttcccaggcagca

SEQ ID NO: 141029 - DNA, 2084 bp, Homo sapiens
  Payload ID: 7716
  Gene Symbol: HDAC2
  Gene Name: histone deacetylase 2
  Uniprot ID: Q92769
  ENST ID: ENST00000368632
  CDS Start-End: 368-1744
tttggtggccccctcctcgcgagttggtgccgctgccacctccgattccgagctttcggcacctctgccgggtggtaccgagccttcccggcgccccctcctctcctcccaccggcctgcccttccccgcgggactatcgcccccacgtttccctcagcccttttctctcccggccgagccgcggcggcagcagcagcagcagcagcagcaggaggaggagcccggtggcggcggtggccggggagcccatggcgtacagtcaaggaggcggcaaaaaaaaagtctgctactactacgacgccttcaccctgccatttctagtgaatctgtgatattggaaattattattatggacagggtcatcccatgaagcctcatagaatccgcatgacccataacttgctgttaaattatggcttatacagaaaaatggaaatatataggccccataaagccactgccgaagaaatgacaaaatatcacagtgatgagtatatcaaatttctacggtcaataagaccagataacatgtctgagtatagtaagcagatgcagagatttaatgttggagaagattgtccagtgtttgatggactctttgagttttgtcagctctcaactggcggttcagttgctggagctgtgaagttaaaccgacaacagactgatatggctgttaattgggctggaggattacatcatgctaagaaatcagaagcatcaggattctgttacgttaatgatattgtgcttgccatccttgaattactaaagtatcatcagagagtcttatatattgatatagatattcatcatggtgatggtgttgaagaagctttttatacaacagatcgtgtaatgacggtatcattccataaatatggggaatactttcctggcacaggagacttgagggatattggtgctggaaaaggcaaatactatgctgtcaattttccaatgagagatggtatagatgatgagtcatatgggcagatatttaagcctattatctcaaaggtgatggagatgtatcaacctagtgctgtggtattacagtgtggtgcagactcattatctggtgatagactgggttgtttcaatctaacagtcaaaggtcatgctaaatgtgtagaagttgtaaaaacttttaacttaccattactgatgcttggaggaggtggctacacaatccgtaatgttgctcgatgttggacatatgagactgcagttgcccttgattgtgagattcccaatgagttgccatataatgattactttgagtattttggaccagacttcaaactgcatattagtccttcaaacatgacaaaccagaacactccagaatatatggaaaagataaaacagcgtttgtttgaaaatttgcgcatgttacctcatgcacctggtgtccagatgcaagctattccagaagatgctgttcatgaagacagtggagatgaagatggagaagatccagacaagagaatttctattcgagcatcagacaagcggatagcttgtgatgaagaattctcagattctgaggatgaaggagaaggaggtcgaagaaatgtggctgatcataagaaaggagcaaagaaagctagaattgaagaagataagaaagaaacagaggacaaaaaaacagacgttaaggaagaagataaatccaaggacaacagtggtgaaaaaacagataccaaaggaaccaaatcagaacagctcagcaacccctgaatttgacagtctcaccaatttcagaaaatcattaaaaagaaaatattgaaaggaaaatgttttctttttgaagacttctggcttcattttatactactttggcatggactgtatttattttcaaatggctttttcgtttttgtttttcttggcaagttttattgtgagtttttctaattatgaagcaaaatttcttttctccaccatgctttatgtgatagtatttaaaattgatgtgagttattatgtcaaaaaaactgatctattaaagaagtaattggcctttctgagctgatttttccatcttttgtaattatctttattaaaaaattgtacttgg

SEQ ID NO: 141030 - DNA, 553 bp, Homo sapiens
  Payload ID: 7716
  Gene Symbol: HDAC2
  Gene Name: histone deacetylase 2
  ENST ID: ENST00000425835
  CDS Start-End: 1-486
aaagtctgctactactacgacggtgatattggaaattattattatggacagggtcatcccatgaagcctcatagaatccgcatgacccataacttgctgttaaattatggcttatacagaaaaatggaaatatataggccccataaagccactgccgaagaaatgacaaaatatcacagtgatgagtatatcaaatttctacggtcaataagaccagataacatgtctgagtatagtaagcagatgcagagatttaatgttggagaagattgtccagtgtttgatggactctttgagttttgtcagctctcaactggcggttcagttgctggagctgtgaagttaaaccgacaacagactgatatggctgttaattgggctggaggattacatcatgctaagaaatcagaagcatcaggattctgttacgttaatgatattgtgcttgccatccttgaattactaaagtatgttaatttatattgatactcttttcagtgataaagtgttttcattaaaacacaataaataaagtctatggctttaaaaaata

SEQ ID NO: 141031 - DNA, 549 bp, Homo sapiens
  Payload ID: 7716
  Gene Symbol: HDAC2
  Gene Name: histone deacetylase 2
  ENST ID: ENST00000523628
  CDS Start-End: 240-549
attttgcagagattattaatgtttatattatgctaattattaatatgtgatagtgtgctgacctcatccaaaaacttatatttttattaccagagaacattgttttgtcagcttacaaaagtagcaatactaattctttttttattgtgagaagagaatgcaaggaaaggagcttctgtatcaaagaatcgtgactttaaggtgatattggaaattattattatggacagggtcatcccatgaagcctcatagaatccgcatgacccataacttgctgttaaattatggcttatacagaaaaatggaaatatataggccccataaagccactgccgaagaaatgacaaaatatcacagtgatgagtatatcaaatttctacggtcaataagaccagataacatgtctgagtatagtaagcagatgcagagatttaatgttggagaagattgtccagtgtttgatggactctttgagttttgtcagctctcaactggcggttcagttgctggagctgtgaagttaaaccgacaacagactgatatggctg

SEQ ID NO: 141032 - DNA, 557 bp, Homo sapiens
  Payload ID: 7716
  Gene Symbol: HDAC2
  Gene Name: histone deacetylase 2
  ENST ID: ENST00000521163
  CDS Start-End: 230-557
gagttggtgccgctgccacctccgattccgagctttcggcacctctgccgggtggtaccgagccttcccggcgccccctcctctcctcccaccggcctgcccttccccgcgggactatcgcccccacgtttccctcagcccttttctctcccggccgagccgcggcggcagcagcagcagcagcagcagcaggaggaggagcccggtggcggcggtggccggggagcccatggcgtacagtcaaggaggcggcaaaaaaaaagtctgctactactacgacgtttgtgtcttttctattttaggtgatattggaaattattattatggacagggtcatcccatgaagcctcatagaatccgcatgacccataacttgctgttaaattatggcttatacagaaaaatggaaatatataggccccataaagccactgccgaagaaatgacaaaatatcacagtgatgagtatatcaaatttctacggtcaataagaccagataacatgtctgagtatagtaagcagatgcagagatttaatgttggagaagattgtccag

SEQ ID NO: 141033 - DNA, 502 bp, Homo sapiens
  Payload ID: 7716
  Gene Symbol: HDAC2
  Gene Name: histone deacetylase 2
  ENST ID: ENST00000522371
  CDS Start-End: 245-502
accctatgctcaggcccgctcccacactgtggagtgtaccttcattttcaataaatctcttcattccctccttgctttgtgcatttcgtccaattctttgttcaagatgccaagaacctggacaccctccactggtaacgtattttgatgagccagtcaggagaaattccaggagaagccttcaccctgccatttctagtgaatctgtgatattggaaattattattatggacagggtcatcccatgaagcctcatagaatccgcatgacccataacttgctgttaaattatggcttatacagaaaaatggaaatatataggccccataaagccactgccgaagaaatgacaaaatatcacagtgatgagtatatcaaatttctacggtcaataagaccagataacatgtctgagtatagtaagcagatgcagagatttaatgttggagaagattgtccagtgtttgatggactctttgagttttgtcagctctcaactggc

SEQ ID NO: 141034 - DNA, 564 bp, Homo sapiens
  Payload ID: 7716
  Gene Symbol: HDAC2
  Gene Name: histone deacetylase 2
  ENST ID: ENST00000518690
  CDS Start-End: 352-564
aacccgttcccggcccggcacagttagaacgagaccctcttcctggcgcagcccccgcggttcctgcgggcgggaatcagggggcccgcccgtcttgtctcctgcctctcccccttcggccgtgcagtccgcagcctcgaaggtggccgccgctggggacggcgccggcctaccccgccttggtggtggcggcggcgaagggggcggcccattctctcccttctcccgcccaccattcgtggcaacgcagcccattcacctgcttacgtgatggccagcaacaagtgaatagctgatagtttggaaatctctggtgatattggaaattattattatggacagggtcatcccatgaagcctcatagaatccgcatgacccataacttgctgttaaattatggcttatacagaaaaatggaaatatataggccccataaagccactgccgaagaaatgacaaaatatcacagtgatgagtatatcaaatttctacggtcaataagaccagataacatgtctgagtatagtaagcagatgcagagatttaatgttggagaagattgt

SEQ ID NO: 141035 - DNA, 551 bp, Homo sapiens
  Payload ID: 7716
  Gene Symbol: HDAC2
  Gene Name: histone deacetylase 2
  ENST ID: ENST00000520895
  CDS Start-End: 372-551
gctgccacctccgattccgagctttcggcacctctgccgggtggtaccgagccttcccggcgccccctcctctcctcccaccggcctgcccttccccgcgggactatcgcccccacgtttccctcagcccttttctctcccggccgagccgcggcggcagcagcagcagcagcagcagcaggaggaggagcccggtggcggcggtggccggggagcccatggcgtacagtcaaggaggcggcaaaaaaaaagtctgctactactacgacgcccattcacctgcttacgtgatggccagcaacaagtgaatagctgatagtttggaaatctctggtgatattggaaattattattatggacagggtcatcccatgaagcctcatagaatccgcatgacccataacttgctgttaaattatggcttatacagaaaaatggaaatatataggccccataaagccactgccgaagaaatgacaaaatatcacagtgatgagtatatcaaatttctacggtcaataagaccagataacatgtctgagtatagtaag

SEQ ID NO: 141036 - DNA, 570 bp, Homo sapiens
  Payload ID: 7716
  Gene Symbol: HDAC2
  Gene Name: histone deacetylase 2
  ENST ID: ENST00000524334
  CDS Start-End: 413-570
gcgagttggtgccgctgccacctccgattccgagctttcggcacctctgccgggtggtaccgagccttcccggcgccccctcctctcctcccaccggcctgcccttccccgcgggactatcgcccccacgtttccctcagcccttttctctcccggccgagccgcggcggcagcagcagcagcagcagcagcaggaggaggagcccggtggcggcggtggccggggagcccatggcgtacagtcaaggaggcggcaaaaaaaaagtctgctactactacgacgcccattcacctgcttacgtgatggccagcaacaagtgaatagctgatagtttggaaatctctgccttcaccctgccatttctagtgaatctgtgatattggaaattattattatggacagggtcatcccatgaagcctcatagaatccgcatgacccataacttgctgttaaattatggcttatacagaaaaatggaaatatataggccccataaagccactgccgaagaaatgacaaaatatcacagtgatgagtatatcaaatttctacggtcaataagaccaga

SEQ ID NO: 141037 - DNA, 557 bp, Homo sapiens
  Payload ID: 7716
  Gene Symbol: HDAC2
  Gene Name: histone deacetylase 2
  ENST ID: ENST00000523240
  CDS Start-End: 361-557
acagttagaacgagaccctcttcctggcgcagcccccgcggttcctgcgggcgggaatcagggggcccgcccgtcttgtctcctgcctctcccccttcggccgtgcagtccgcagcctcgaaggtggccgccgctggggacggcgccggcctaccccgccttggtggtggcggcggcgaagggggcggcccattctctcccttctcccgcccaccattcgtggcaacgcagcccattcacctgcttacgtgatggccagcaacaagtgaatagctgatagtttggaaatctctgccttcaccctgccatttctagtgaatctgtgatattggaaattattattatggacagggtcatcccatgaagcctcatagaatccgcatgacccataacttgctgttaaattatggcttatacagaaaaatggaaatatataggccccataaagccactgccgaagaaatgacaaaatatcacagtgatgagtatatcaaatttctacggtcaataagaccagataacatgtctgagtatagtaagcagatgcagagatttaa

SEQ ID NO: 141038 - DNA, 580 bp, Homo sapiens
  Payload ID: 7716
  Gene Symbol: HDAC2
  Gene Name: histone deacetylase 2
  ENST ID: ENST00000521610
  CDS Start-End: 280-580
attcgtggcaacgcaggtttggggtgccccgcgtcggcctcctaccccctcgacccgtcccccgcgaggcaaaatttctatcccggccttgactctacacaaagccccgcggccgcgagagctccgcccctcccgtccccttccctcctcctcgcctgctcgcctcccctaccctgcgttcggtctggccggagcgtcttctccttcctcggcttaccctttccccggacccctcctcccggtgatattggaaattattattatggacagggtcatcccatgaagcctcatagaatccgcatgacccataacttgctgttaaattatggcttatacagaaaaatggaaatatataggccccataaagccactgccgaagaaatgacaaaatatcacagtgatgagtatatcaaatttctacggtcaataagaccagataacatgtctgagtatagtaagcagatgcagagatttaatgttggagaagattgtccagtgtttgatggactctttgagttttgtcagctctcaactggcggttcagttgctggagctgtgaagttaaaccgacaacagactg

SEQ ID NO: 141039 - DNA, 2000 bp, Homo sapiens
  Payload ID: 7716
  Gene Symbol: HDAC2
  Gene Name: histone deacetylase 2
  Uniprot ID: Q92769
  ENST ID: ENST00000519108
  CDS Start-End: 284-1660
gttcccggcccggcacagttagaacgagaccctcttcctggcgcagcccccgcggttcctgcgggcgggaatcagggggcccgcccgtcttgtctcctgcctctcccccttcggccgtgcagtccgcagcctcgaaggtggccgccgctggggacggcgccggcctaccccgccttggtggtggcggcggcgaagggggcggcccattctctcccttctcccgcccaccattcgtggcaacgcaggtgatattggaaattattattatggacagggtcatcccatgaagcctcatagaatccgcatgacccataacttgctgttaaattatggcttatacagaaaaatggaaatatataggccccataaagccactgccgaagaaatgacaaaatatcacagtgatgagtatatcaaatttctacggtcaataagaccagataacatgtctgagtatagtaagcagatgcagagatttaatgttggagaagattgtccagtgtttgatggactctttgagttttgtcagctctcaactggcggttcagttgctggagctgtgaagttaaaccgacaacagactgatatggctgttaattgggctggaggattacatcatgctaagaaatcagaagcatcaggattctgttacgttaatgatattgtgcttgccatccttgaattactaaagtatcatcagagagtcttatatattgatatagatattcatcatggtgatggtgttgaagaagctttttatacaacagatcgtgtaatgacggtatcattccataaatatggggaatactttcctggcacaggagacttgagggatattggtgctggaaaaggcaaatactatgctgtcaattttccaatgagagatggtatagatgatgagtcatatgggcagatatttaagcctattatctcaaaggtgatggagatgtatcaacctagtgctgtggtattacagtgtggtgcagactcattatctggtgatagactgggttgtttcaatctaacagtcaaaggtcatgctaaatgtgtagaagttgtaaaaacttttaacttaccattactgatgcttggaggaggtggctacacaatccgtaatgttgctcgatgttggacatatgagactgcagttgcccttgattgtgagattcccaatgagttgccatataatgattactttgagtattttggaccagacttcaaactgcatattagtccttcaaacatgacaaaccagaacactccagaatatatggaaaagataaaacagcgtttgtttgaaaatttgcgcatgttacctcatgcacctggtgtccagatgcaagctattccagaagatgctgttcatgaagacagtggagatgaagatggagaagatccagacaagagaatttctattcgagcatcagacaagcggatagcttgtgatgaagaattctcagattctgaggatgaaggagaaggaggtcgaagaaatgtggctgatcataagaaaggagcaaagaaagctagaattgaagaagataagaaagaaacagaggacaaaaaaacagacgttaaggaagaagataaatccaaggacaacagtggtgaaaaaacagataccaaaggaaccaaatcagaacagctcagcaacccctgaatttgacagtctcaccaatttcagaaaatcattaaaaagaaaatattgaaaggaaaatgttttctttttgaagacttctggcttcattttatactactttggcatggactgtatttattttcaaatggctttttcgtttttgtttttcttggcaagttttattgtgagtttttctaattatgaagcaaaatttcttttctccaccatgctttatgtgatagtatttaaaattgatgtgagttattatgtcaaaaaaactgatctattaaagaagtaattggcctttctgagctgatttttccatcttttgtaattatctttattaaaaaattgtacttgg

SEQ ID NO: 141040 - DNA, 9874 bp, Homo sapiens
  Payload ID: 7716
  Gene Symbol: HDAC2
  Gene Name: histone deacetylase 2
  Uniprot ID: Q92769
  ENST ID: ENST00000519065
  CDS Start-End: 378-1844
gcaggttgttcaccctaacagggcctctaacctcgagcccgaaacggcctccttctccagccgtgccccttcctcccccgtggaggccgcagtggatgcgctcacctccctgcggcctcctgaggtggtttggtggccccctcctcgcgagttggtgccgctgccacctccgattccgagctttcggcacctctgccgggtggtaccgagccttcccggcgccccctcctctcctcccaccggcctgcccttccccgcgggactatcgcccccacgtttccctcagcccttttctctcccggccgagccgcggcggcagcagcagcagcagcagcagcaggaggaggagcccggtggcggcggtggccggggagcccatggcgtacagtcaaggaggcggcaaaaaaaaagtctgctactactacgacggtgatattggaaattattattatggacagggtcatcccatgaagcctcatagaatccgcatgacccataacttgctgttaaattatggcttatacagaaaaatggaaatatataggccccataaagccactgccgaagaaatgacaaaatatcacagtgatgagtatatcaaatttctacggtcaataagaccagataacatgtctgagtatagtaagcagatgcagagatttaatgttggagaagattgtccagtgtttgatggactctttgagttttgtcagctctcaactggcggttcagttgctggagctgtgaagttaaaccgacaacagactgatatggctgttaattgggctggaggattacatcatgctaagaaatcagaagcatcaggattctgttacgttaatgatattgtgcttgccatccttgaattactaaagtatcatcagagagtcttatatattgatatagatattcatcatggtgatggtgttgaagaagctttttatacaacagatcgtgtaatgacggtatcattccataaatatggggaatactttcctggcacaggagacttgagggatattggtgctggaaaaggcaaatactatgctgtcaattttccaatgagagatggtatagatgatgagtcatatgggcagatatttaagcctattatctcaaaggtgatggagatgtatcaacctagtgctgtggtattacagtgtggtgcagactcattatctggtgatagactgggttgtttcaatctaacagtcaaaggtcatgctaaatgtgtagaagttgtaaaaacttttaacttaccattactgatgcttggaggaggtggctacacaatccgtaatgttgctcgatgttggacatatgagactgcagttgcccttgattgtgagattcccaatgagttgccatataatgattactttgagtattttggaccagacttcaaactgcatattagtccttcaaacatgacaaaccagaacactccagaatatatggaaaagataaaacagcgtttgtttgaaaatttgcgcatgttacctcatgcacctggtgtccagatgcaagctattccagaagatgctgttcatgaagacagtggagatgaagatggagaagatccagacaagagaatttctattcgagcatcagacaagcggatagcttgtgatgaagaattctcagattctgaggatgaaggagaaggaggtcgaagaaatgtggctgatcataagaaaggagcaaagaaagctagaattgaagaagataagaaagaaacagaggacaaaaaaacagacgttaaggaagaagataaatccaaggacaacagtggtgaaaaaacagataccaaaggaaccaaatcagaacagctcagcaacccctgaatttgacagtctcaccaatttcagaaaatcattaaaaagaaaatattgaaaggaaaatgttttctttttgaagacttctggcttcattttatactactttggcatggactgtatttattttcaaatggctttttcgtttttgtttttcttggcaagttttattgtgagtttttctaattatgaagcaaaatttcttttctccaccatgctttatgtgatagtatttaaaattgatgtgagttattatgtcaaaaaaactgatctattaaagaagtaattggcctttctgagctgatttttccatcttttgtaattatctttattaaaaaattgtacttggattatcttttgtctgtttattactacaatatgaagtcttgtttcagtggctaatgacatcatttctgtagacttacaatacactctaggtgaaagataatgattacagcttgaaagataactatttgctgtttctttgggaagagtatttatagtaattattacttatctttgcaatagaaattctaccaccttgccctctatagcttagccagttagtatcagtgaagattaacatcccattacaatttatgaaataatacagactctgcaattgagatgtaggagttctttgagttgacccaaagattctcaaaattgaaatggaaattctgaattgaaagaagaaactgaccagaacttgtattgaccagacttgcctatagtatattgctggtttaaaatggaacctgcagacaaaacctgtttcttttactgcatttacatggcatccaggttccattattatttacgtgacatccaggtttctaactcaaggaaataaacacaactgatttatcattcagcaactacttattgtgtgtctgcccattttaagactgtaggagtgtaactgaatataatggaaaaatgctttcactcagagcttacactcagagcttacattctagtagcaggaagcagacaaatgggggtaactcctgctactaagatgtgcaaagaagacaaaacattttaggaacttgccaaaatcagtgaaatctccctttttgtcaggcccacattgattcttttgagattaaaaattacagaatgccagaagataattcagtcaaaagtatttctcttcagtgcagtaaaatattaaaagaaaaaatatttctctacaagcctcttaaatgtttcagacattcacaatagcacctagacttttgtaatgaacagctgtgcacccaccccgacttaacaaatattttacttttgctatatttgcttcggtgtttttttcttaaaatacaccgaaattgaagctctctttgtgtactttgtcgtttgtaatcctccctccctcccagccttaagaagtaatcaccattgtgattattttatccatgtttttgtgaatattttacccatgtttttgtacttttgctacatatttgttatcaatctgtaaacctttatgacattaggaactaagaaacttagtcccttcgttagggggataatgaaatgtatttagtgtttgtgaaacatagatggtatgtatttggacaattctgtaactttgctttttttatttttatttttccatagcttattggggaacaggtggtgtttggttacatgattaagttctttagtggtgatttgtgggattttggtggacccatcacccaagcagtgtacactgcaccctatttgtaatcttttatccctcgcccccctcccaccatgcctcccgtctaccatgatgatcctgttttaaataagaaaataccatttcgcaggctccagatgttctggcatcctccctgtggatttcccagtgcctgcagctcacaggacaacaggggctgtggtagagtcacctatgagatcctggagtagtggatggaggagatggaacagtgaagacggaaactgagctcagtatccgggtgccaggagacaaaggccctttgctttttttcatttaatattctgatctacccctgttgacacatgttaagtatagttcattttgactgctatgtattatgttccattgtgtgaacatactgaaattgtacacttcaatactatactggatctccttgggtgtatttaagaggttttgtttttctaagtagttggttatatacaactaaaacctcaagagaactatctaaagcaatttcagcaaggtgatttggtacagcattaataaacagaaatcagtaacacttagtgaccaagtctgttggaagaacaaagacccccatttgtaataacaaaatttttagaaataatatgtaaagaagctatggttcttgtgtctagtaaggtcaatgtaacatagtaagatgtcagaataccctaatactttaaaaaattcatataggataaaaatgatatttgaaattggcaaggaaagacattattttgtaagtggaattgggacaacaactggtaaccaaatggaaaacccagttttctgccctccactagaagatttaaataggaaaagataaaactaccaaaaacctaaactcttaaagcaaatggattgaagaaggcctaagtgtgacaccaaactcaactataaaagatatatttgataacaaaaaaaaaattagttcagtggaccaacaaaaacttagaagacaagtcaagaaaaatgacaaaagacagagtgggaggcagatttgtaactcatccaggtcaaaaggctcatatctaaagatagtagaggaacaaaatgtataaggatgtgaactgggaaacaaatacatataaatagtttgtaaatatgaaaagatctttaacctcagtaaataaaaagctatagagagacttattttttaacttagttttttaaacctattatgtttatttattttttctttttttgagacggagtctcgctgttgcccaggctggtgtgcaatggcgcaatctcggctcactgcaacctccgcctcccaggttgaagccattctcctgcctcagcctcctgagtagctgggattacaggcgcctgtcaccacgcccagctaattgttcgcatttttagtagagacggggtttcactatgttggccaggctggcctcgaactcctgacctcatgatccacccaccttggccttccaaagtgctgggattacaggtgtgagctgccgcacctggctgtttatctcttttttttagagaaaggatctcggtcacccaggatggagtgtggtagcctgatcatatctcactacatcttagaacttctaggcttagggtattctcccacctcagcctcccaagtagctgggactacaagtgtgcaccatcacacctagctgatttttacatttttattttggagagatggtgtctccctgtgttgcccaggctggtcacaaactcctaggctcaagcgattctcctgactcaggcatgagccaccgtacccggcctaaacctatcatgttacagacttagaaagcaactattgtcaagtgtttgaggaaactcaggtcaggtttggtaaactaagatattaactcaagtaaagctctttaattcatttaatgaaggtgccacattgtctcagttctctatggcatgggtgaatgctgttctaagtcagcattggtactctaagctagttacatcatatctaagctttgcccttctaccagagctgctagcattctgtcaatgggcaattatttgaagttcttacattgaagttagtcacctacatcttctgttttttatggttttgatgtagtaatactgctgaagtttttttgataactgcgattcataatatttgttattcatattgtgatataaatgataagggcttttgaaaacaagtagtaatcatttcaatagcttaggatctccaccataatcttaggaaaattactaacctctgtgcctcagttgcttcatcatttaaaatgaggaaaataatagtccctacttaataggtttgttgtgaggattgagttaataacatagttaatgctcagtaagggttagctgctatttttttttcttttttttttgaaagagtctcactctgttgcccaggttggagtgcagtggcatgatcttggctcactgcatcctctgcttcctaggttcaggtgattctcatgcttcagcctcccaagcagctgggagtacaggtgtgcaccaccacacctggctaatttttgtatatttagtagagacgggttctcaccatattgtccaggctggtcttgaactccttacctcaaatgatccacccgcctgggcctcccaaagtgctgggattacaagcatgagccaccgcgcctggcttgctattgttatgaggtaaaggtagatagatgggtgagagtggtgccaggggaagtgttaaatttttgagtgttcctttagatgccagatgggttgtatctgagccttttattgcagtttgatgcctactagtgtgaagactactaggtcatagtggatagagaagcaatcttttggagacctgattttagcaaggatacgaataatatttgacaactttggggggatcttgatgcctctgtaatttactcaaggataatctcaagaaaaatggcattaagtagattacagaaaaaatagaactatcatattgttattattggctatttacatgagcaatgcggagaaatgtttaggattacagcatttagaagcttctcaattgctgcatttcctcactgtaccacaagatggcagatactgcatttaaaatttttttttctgtgtgttttctcttatagtcacttggtggccatgtaacaagcagagcaacatgtattaacagattctttttgaatgcaatattggattaaaaactttgaattaaactacaattaagtttactgatttaggttttcctataagaattataacactaatttctaagttttacatctgcaaaacacagtagagtgtatctggtagtcattgactaattgtgactttgctagtcagacaaaatggaactgaatattagagccagaataattttctgttttgactggtggtaagaatcagttagtatacagaatgggaaagaattgaaatttatttctaggaattatagttatagtgaagttaatattcaggggcattgggtgcttgttccacgacttttgtttactgaactaagtacctaacccctttggtctttgaacactgcagagttatgattaggattattaatgaaaaattcttttttagtagaacaaacagttaaggacagaagacaccttgattagattctgttatttgctctttttattaagattgtttttactctaaatgttaaagaaatgtataattatttctaaggtaaaatgagtagcaggattctgaataggagattttttttggccagacccattttgcagccagtggtttgtatttaggagtgagttgaacaaagaagactctaatctgtttttgtgttgtggattttttattctattgataaatcagtagcttccagcttctcttgtatcctctactagtcatcttttttgtttcttcagaaataaacatccagggtcacttccctgcccttgccatatacttactaggatgatgtacaggtaaaacttttaaaggaaagtacggacaggcaattcctaaagtaaaagagagcacattatcaaaactggctgtacttaacaaataccaacaaaaagtcattacacttctggcaacaaataatgtttgatttaaaaagacaagaatttccccttttgctcttattttttaaatatgctatgtccttaagtgagaaatgcacttcaaaaattttcttattctgaagtctagccggaaagtttgaacttgtgttgcctttggctagactaggtgaaattaaggggcttaagagggcactgttgtgtggccctgtggtagataatagccctccaagcatgaggatgggagatctaccattcaccagtatttccaaagttatattcttaaaaaggctagatttctaatttccgtagaatctaggtatgttcttttcaactcagcatctgataagaaagtttgggcaagtaggtgcgaaaaatttactctagataccattttccaggaaaaaatataattcaagtccaacgtattactagctgtcaccttccccaacaatcaaataagcattgttattgtcaaacacatttacttgtatagttcagtgttatatgtaatggacttaggtataattcctgtgctattcccttttgatgccaaacacccttttgtaagctgttttgtttgaaatccaaatttatatgtcttaaagtaaatggcagcattgggctttcttaatgtaatgactcttctgccatcctatttctagagttaggcagaaaattctgtaaatctatcttatttccagtctgtttgtgactatggtgggcaataaatctgatttcccagaaaaacacatctggacccctataggtaaggtaaacaagcctcatcttaaattgtttgtacttccgacctgacctcaaaacaccatcatcatctagagcagcaacaagtaaagaacaatgcactggaaatcacatatatgggtctagcaccagcctttacattacacaactttgctttgggcaagtcatttaaatttctgtgcttcagtttactaaatctatgaaactgactaggtaacagctgacatgcttttccagcactccgtcttttacctgtctgatgtcacaaattgatcattcctttctggccttgagatgcgtatcaacccagatagtcattaacccagatagttggcattcaggataaaatgtttttgcctttcctgtcctgcaagctctttaaagtccaaaatatgcctttatatctttatgtgtaataggtatgaaatctatttcttggttgttgaataggataggcttattagacattctaaagtcaacttttttctcatatttaaacatttacccgtagaaattcagttttttaaagttttaagtcagttgattgtaccaaacattactattaaaaaaaaatcaaagtcagagaccagagtttccctgcatcagcgttcagtcaggagacaggaactatactaatttgaacatgtaaagttaaatataatccttaataataacaggattggaataagggataaaagaaagagaattccttctatatatatgtatacacacacatatatatatatacatgtgtatatatgtgtgtgtatgtatattatataatatacatacacacacacaaagaatgtcagacaaggagcagccaccattctgcttactttcactggattaagagtttcataagggcaagggttttgtttgtcttacactccactggggattaatctccagtgtctagaacagtgcctaacacataaataaagcctcaattattatttgtggaatggaatggaatttgagtgaaatggaatgggaatagaatggactggaatggaaatagaagtgggaaggggaatggaaggggatagaagaggattgaagaggacagaaggagatgggataagatgggatgggataggatcgaatctcaggtccaggagtcagaataactgaatcctattccagttctgccatcaacaagtcctgtgaaatttggaaagtcacttaaccctctggccttgtagaatatctcagtgggcatgtctgatgtttcttcatggttagatataggttgcatgttttgggcaagaatatcacaggaatgatgctgtgttctcagtgcacccagtcaggtaatgcatgatttcaatttctctcattactgatgatgttaactttaatcacttagtgaatgagaacatgagcatcattttgaaagcaaactgcaaagttttgatgtcaacattttagcaattacgtataatttcccccaaggatactggctttgagataatgtaaatatacatgggaaagacaaagctcaaataaaggaaaaagaccca

SEQ ID NO: 141041 - DNA, 1959 bp, Homo sapiens
  Payload ID: 7717
  Gene Symbol: HDAC3
  Gene Name: histone deacetylase 3
  Uniprot ID: O15379
  ENST ID: ENST00000305264
  CDS Start-End: 81-1367
agcacgcacggccggggaggggctggcggcggccgcgggcggcgggcggcggaggtgcggggcctgctcccgccggcaccatggccaagaccgtggcctatttctacgaccccgacgtgggcaacttccactacggagctggacaccctatgaagccccatcgcctggcattgacccatagcctggtcctgcattacggtctctataagaagatgatcgtcttcaagccataccaggcctcccaacatgacatgtgccgcttccactccgaggactacattgacttcctgcagagagtcagccccaccaatatgcaaggcttcaccaagagtcttaatgccttcaacgtaggcgatgactgcccagtgtttcccgggctctttgagttctgctcgcgttacacaggcgcatctctgcaaggagcaacccagctgaacaacaagatctgtgatattgccattaactgggctggtggtctgcaccatgccaagaagtttgaggcctctggcttctgctatgtcaacgacattgtgattggcatcctggagctgctcaagtaccaccctcgggtgctctacattgacattgacatccaccatggtgacggggttcaagaagctttctacctcactgaccgggtcatgacggtgtccttccacaaatacggaaattacttcttccctggcacaggtgacatgtatgaagtcggggcagagagtggccgctactactgtctgaacgtgcccctgcgggatggcattgatgaccagagttacaagcaccttttccagccggttatcaaccaggtagtggacttctaccaacccacgtgcattgtgctccagtgtggagctgactctctgggctgtgatcgattgggctgctttaacctcagcatccgagggcatggggaatgcgttgaatatgtcaagagcttcaatatccctctactcgtgctgggtggtggtggttatactgtccgaaatgttgcccgctgctggacatatgagacatcgctgctggtagaagaggccattagtgaggagcttccctatagtgaatacttcgagtactttgccccagacttcacacttcatccagatgtcagcacccgcatcgagaatcagaactcacgccagtatctggaccagatccgccagacaatctttgaaaacctgaagatgctgaaccatgcacctagtgtccagattcatgacgtgcctgcagacctcctgacctatgacaggactgatgaggctgatgcagaggagaggggtcctgaggagaactatagcaggccagaggcacccaatgagttctatgatggagaccatgacaatgacaaggaaagcgatgtggagatttaagagtggcttgggatgctgtgtcccaaggaatttcttttcacctcttggttgggctggagggaaaaggagtggctcctagagtcctgggggtcaccccagggcttttgctgactctgggaaagagtctggagaccacatttggttctcgaaccatctacctgcttttcctctctctcccaaggcctgacaatggtacctattagggatgagatacagacaaggatagctatctgggacattattggcagtgggccctggaggccagtccctagccccccttgccccttatttcttccctgcttccctcgaacccagagatttttgagggatgaacgggtagacaaggactgagattgcctctgacttcctcctcccctgggttctgacttcttcctccccttgcttccagggaagatgaagagagagagatttggaaggggctctggctccctaacacctgaatcccagatgatgggaagtatgttttcaagtgtggggaggatatgaaaatgttctgttctcacttttggctttatgtccattttaccactgtttttatccaataaactaagtcggtattttttgtaccttt

SEQ ID NO: 141042 - DNA, 699 bp, Homo sapiens
  Payload ID: 7717
  Gene Symbol: HDAC3
  Gene Name: histone deacetylase 3
  ENST ID: ENST00000523088
  CDS Start-End: 44-699
ggcggcgggcggcggaggtgcggggcctgctcccgccggcaccatggccaagaccgtggcctatttctacgaccccgacgtgggcaacttccactacggagctggacaccctatgaagccccatcgcctggcattgacccatagcctggtcctgcattacggtctctataagaagatgatcatctgtgatattgccattaactgggctggtggtctgcaccatgccaagaagtttgaggcctctggcttctgctatgtcaacgacattgtgattggcatcctggagctgctcaagtaccaccctcgggtgctctacattgacattgacatccaccatggtgacggggttcaagaagctttctacctcactgaccgggtcatgacggtgtccttccacaaatacggaaattacttcttccctggcacaggtgacatgtatgaagtcggggcagagagtggccgctactactgtctgaacgtgcccctgcgggatggcattgatgaccagagttacaagcaccttttccagccggttatcaaccaggtagtggacttctaccaacccacgtgcattgtgctccagtgtggagctgactctctgggctgtgatcgattgggctgctttaacctcagcatccgagggcatggggaatgcgttgaatatgtcaagagcttcaatatccctctactcgtgctggg

SEQ ID NO: 141043 - DNA, 736 bp, Homo sapiens
  Payload ID: 7717
  Gene Symbol: HDAC3
  Gene Name: histone deacetylase 3
  ENST ID: ENST00000519474
  CDS Start-End: 49-210
ccgcgggcggcgggcggcggaggtgcggggcctgctcccgccggcaccatggccaagaccgtggcctatttctacgaccccgacgtgggcaacttccactacggagctggacaccctatgaagccccatcgcctggcattgacccatagcctggtcctgcattacggtctctataagaagatgatccccagtgtttcccgggctctttgagttctgctcgcgttacacaggcgcatctctgcaaggagcaacccagctgaacaacaagatctgtgatattgccattaactgggctggtggtctgcaccatgccaagaagtttgaggcctctggcttctgctatgtcaacgacattgtgattggcatcctggagctgctcaagtaccaccctcgggtgctctacattgacattgacatccaccatggtgacggggttcaagaagctttctacctcactgaccgggtcatgacggtgtccttccacaaatacggaaattacttcttccctggcacaggtgacatgtatgaagtcggggcagagagtggccgctactactgtctgaacgtgcccctgcgggatggcattgatgaccagagttacaagcaccttttccagccggttatcaaccaggtagtggacttctaccaacccacgtgcattgtgctccagtgtggagctgactctctgggctgtgatcgattgggctgctttaacctcagcatccgagggcatggg

SEQ ID NO: 141044 - DNA, 8976 bp, Homo sapiens
  Payload ID: 7718
  Gene Symbol: HDAC4
  Gene Name: histone deacetylase 4
  Uniprot ID: P56524
  ENST ID: ENST00000345617
  CDS Start-End: 793-4047
ggaggttgtggggccgccgccgcggagcaccgtccccgccgccgcccgagcccgagcccgagcccgcgcacccgcccgcgccgccgccgccgccgcccgaacagcctcccagcctgggcccccggcggcgccgtggccgcgtcccggctgtcgccgcccgagcccgagcccgcgcgccggcgggtggcggcgcaggctgaggagatgcggcgcggagcgccggagcagggctagagccggccgccgccgcccgccgcggtaagcgcagccccggcccggcgcccgcgggccattgtccgccgcccgccccgcgccccgcgcagcctgcaggccttggagcccgcggcaggtggacgccgccggtccacacccgccccgcgcgcggccgtgggaggcgggggccagcgctggccgcgcgccgtgggacccgccggtccccagggccgcccggccccttctggacctttccacccgcgccgcgaggcggcttcgcccgccggggcgggggcgcgggggtgggcacggcaggcagcggcgccgtctcccggtgcggggcccgcgccccccgagcaggttcatctgcagaagccagcggacgcctctgttcaacttgtgggttacctggctcatgagaccttgccggcgaggctcggcgcttgaacgtctgtgacccagccctcaccgtcccggtacttgtatgtgttggtgggagtttggagctcgttggagctatcgtttccgtggaaattttgagccatttcgaatcacttaaaggagtggacattgctagcaatgagctcccaaagccatccagatggactttctggccgagaccagccagtggagctgctgaatcctgcccgcgtgaaccacatgcccagcacggtggatgtggccacggcgctgcctctgcaagtggccccctcggcagtgcccatggacctgcgcctggaccaccagttctcactgcctgtggcagagccggccctgcgggagcagcagctgcagcaggagctcctggcgctcaagcagaagcagcagatccagaggcagatcctcatcgctgagttccagaggcagcacgagcagctctcccggcagcacgaggcgcagctccacgagcacatcaagcaacaacaggagatgctggccatgaagcaccagcaggagctgctggaacaccagcggaagctggagaggcaccgccaggagcaggagctggagaagcagcaccgggagcagaagctgcagcagctcaagaacaaggagaagggcaaagagagtgccgtggccagcacagaagtgaagatgaagttacaagaatttgtcctcaataaaaagaaggcgctggcccaccggaatctgaaccactgcatttccagcgaccctcgctactggtacgggaaaacgcagcacagttcccttgaccagagttctccaccccagagcggagtgtcgacctcctataaccacccggtcctgggaatgtacgacgccaaagatgacttccctcttaggaaaacagcttctgaaccgaatctgaaattacggtccaggctaaagcagaaagtggccgaaagacggagcagccccctgttacgcaggaaagacgggccagtggtcactgctctaaaaaagcgtccgttggatgtcacagactccgcgtgcagcagcgccccaggctccggacccagctcacccaacaacagctccgggagcgtcagcgcggagaacggtatcgcgcccgccgtccccagcatcccggcggagacgagtttggcgcacagacttgtggcacgagaaggctcggccgctccacttcccctctacacatcgccatccttgcccaacatcacgctgggcctgcctgccaccggcccctctgcgggcacggcgggccagcaggacgccgagagactcacccttcccgccctccagcagaggctctcccttttccccggcacccacctcactccctacctgagcacctcgcccttggagcgggacggaggggcagcgcacagccctcttctgcagcacatggtcttactggagcagccgccggcacaagcacccctcgtcacaggcctgggagcactgcccctccacgcacagtccttggttggtgcagaccgggtgtccccctccatccacaagctgcggcagcaccgcccactggggcggacccagtcggccccgctgccccagaacgcccaggctctgcagcacctggtcatccagcagcagcatcagcagtttctggagaaacacaagcagcagttccagcagcagcaactgcagatgaacaagatcatccccaagccaagcgagccagcccggcagccggagagccacccggaggagacggaggaggagctccgtgagcaccaggctctgctggacgagccctacctggaccggctgccggggcagaaggaggcgcacgcacaggccggcgtgcaggtgaagcaggagcccattgagagcgatgaggaagaggcagagcccccacgggaggtggagccgggccagcgccagcccagtgagcaggagctgctcttcagacagcaagccctcctgctggagcagcagcggatccaccagctgaggaactaccaggcgtccatggaggccgccggcatccccgtgtccttcggcggccacaggcctctgtcccgggcgcagtcctcacccgcgtctgccaccttccccgtgtctgtgcaggagccccccaccaagccgaggttcacgacaggcctcgtgtatgacacgctgatgctgaagcaccagtgcacctgcgggagtagcagcagccaccccgagcacgccgggaggatccagagcatctggtcccgcctgcaggagacgggcctccggggcaaatgcgagtgcatccgcggacgcaaggccaccctggaggagctacagacggtgcactcggaagcccacaccctcctgtatggcacgaaccccctcaaccggcagaaactggacagtaagaaacttctaggctcgctcgcctccgtgttcgtccggctcccttgcggtggtgttggggtggacagtgacaccatatggaacgaggtgcactcggcgggggcagcccgcctggctgtgggctgcgtggtagagctggtcttcaaggtggccacaggggagctgaagaatggctttgctgtggtccgcccccctggacaccatgcggaggagagcacgcccatgggcttttgctacttcaactccgtggccgtggcagccaagcttctgcagcagaggttgagcgtgagcaagatcctcatcgtggactgggacgtgcaccatggaaacgggacccagcaggctttctacagcgaccccagcgtcctgtacatgtccctccaccgctacgacgatgggaacttcttcccaggcagcggggctcctgatgaggtgggcacagggcccggcgtgggtttcaacgtcaacatggctttcaccggcggcctggacccccccatgggagacgctgagtacttggcggccttcagaacggtggtcatgccgatcgccagcgagtttgccccggatgtggtgctggtgtcatcaggcttcgatgccgtggagggccaccccacccctcttgggggctacaacctctccgccagatgcttcgggtacctgacgaagcagctgatgggcctggctggcggccggattgtcctggccctcgagggaggccacgacctgaccgccatttgcgacgcctcggaagcatgtgtttctgccttgctgggaaacgagcttgatcctctcccagaaaaggttttacagcaaagacccaatgcaaacgctgtccgttccatggagaaagtcatggagatccacagcaagtactggcgctgcctgcagcgcacaacctccacagcggggcgttctctgatcgaggctcagacttgcgagaacgaagaagccgagacggtcaccgccatggcctcgctgtccgtgggcgtgaagcccgccgaaaagagaccagatgaggagcccatggaagaggagccgcccctgtagcactccctcgaagctgctgttctcttgtctgtctgtctctgtcttgaagctcagccaagaaactttcccgtgtcacgcctgcgtcccaccgtggggctctcttggagcacccagggacacccagcgtgcaacagccacgggaagcctttctgccgcccaggcccacaggtctcgagacgcacatgcacgcctgggcgtggcagcctcacagggaacacgggacagacgccggcgacgcgcagacacacggacacgcggaagccaagcacactctggcgggtcccgcaagggacgccgtggaagaaaggagcctgtggcaacaggcggccgagctgccgaattcagttgacacgaggcacagaaaacaaatatcaaagatctaataatacaaaacaaacttgattaaaactggtgcttaaagtttattacccacaactccacagtctctgtgtaaaccactcgactcatcttgtagcttatttttttttaaagaggacgttttctacggctgtggcccgcctctgtgaaccatagcggtgtgcggcggggggtctgcacccgggtgggggacagagggacctttaaagaaaacaaaactggacagaaacaggaatgtgagctgggggagctggcttgagtttctcaaaagccatcggaagatgcgagtttgtgcctttttttttattgctctggtggatttttgtggctgggttttctgaagtctgaggaacaatgccttaagaaaaaacaaacagcaggaatcggtgggacagtttcctgtggccagccgagcctggcagtgctggcaccgcgagctggcctgacgcctcaagcacgggcaccagccgtcatctccggggccaggggctgcagcccggcggtccctgttttgctttattgctgtttaagaaaaatggaggtagttccaaaaaagtggcaaatcccgttggaggttttgaagtccaacaaattttaaacgaatccaaagtgttctcacacgtcacatacgattgagcatctccatctggtcgtgaagcatgtggtaggcacacttgcagtgttacgatcggaatgctttttattaaaagcaagtagcatgaagtattgcttaaattttaggtataaataaatatatatatgtataatatatattccaatgtattccaagctaagaaacttacttgattcttatgaaatcttgataaaatatttataatgcatttatagaaaaagtatatatatatatataaaatgaatgcagattgcgaaggtccctgcaaatggatggcttgtgaatttgctctcaaggtgcttatggaaagggatcctgattgattgaaattcatgttttctcaagctccagattggctagatttcagatcgccaacacattcgccactgggcaactaccctacaagtttgtactttcattttaattattttctaacagaaccgctcccgtctccaagccttcatgcacatatgtacctaatgagtttttatagcaaagaatataaatttgctgttgatttttgtatgaattttttcacaaaaagatcctgaataagcattgttttatgaattttacatttttcctcaccatttagcaattttctgaatggtaataatgtctaaatctttttcctttctgaattcttgcttgtacatttttttttacctttcaaaggtttttaattatttttgtttttatttttgtacgatgagttttctgcagcgtacagaattgttgctgtcagattctattttcagaaagtgagaggagggaccgtaggtcttttcggagtgacaccaacgattgtgtctttcctggtctgtcctaggagctgtataaagaagcccaggggctctttttaactttcaacactagtagtattacgaggggtggtgtgtttttcccctccgtggcaagggcagggagggttgcttaggatgcccggccaccctgggaggcttgccagatgccgggggcagtcagcattaatgaaactcatgtttaaacttctctgaccacatcgtcaggatagaattctaacttgagttttccaaagaccttttgagcatgtcagcaatgcatggggcacacgtggggctctttacccacttgggtttttccactgcagccacgtggccagccctggattttggagcctgtggctgcaaggaacccagggacccttgttgcctggtgaacctgcagggagggtatgattgcctgaccaggacagccagtctttactctttttctcttcaacagtaactgacagtcacgttttactggtaacttattttccagcacatgaagccaccagtttcattccaaagtgtatattgggttcagacttgggggcagaagttcagacacaccgtgctcaggagggacccagagccgagtttcggagtttggtaaagtttacagggtagcttctgaaattaactcaaacttttgaccaaatgagtgcagattcttggattcacttggtcactgggctgctgatggtcagctctgagacagtggtttgagagcaggcagaacggtcttgggacttgtttgactttcccctccctggtggccactctttgctctgaagcccagattggcaagaggagctggtccattccccattcatggcacagagcagtggcagggcccagctagcaggctcttctggcctccttggcctcattctctgcatagccctctggggatcctgccacctgccctcttaccccgccgtggcttatggggaggaatgcatcatctcactttttttttttaagcagatgatgggataacatggactgctcagtggccaggttatcagtggggggacttaattctaatctcattcaaatggagacgccctctgcaaaggcctggcagggggaggcacgtttcatctgtcagctcactccagcttcacaaatgtgctgagagcattactgtgtagccttttctttgaagacacactcggctcttctccacagcaagcgtccagggcagatggcagaggatctgcctcggcgtctgcaggcgggaccacgtcagggagggttccttcatgtgttctccctgtgggtccttggacctttagcctttttcttcctttgcaaaggccttgggggcactggctgggagtcagcaagcgagcactttatatccctttgagggaaaccctgatgacgccactgggcctcttggcgtctgccctgccctcgcggcttcccgccgtgccgcagcgtgcccacgtgcccacgccccaccagcaggcggctgtcccggaggccgtggcccgctgggactggccgcccctccccagcgtcccagggctctggttctggagggccactttgtcaaggtgtttcagtttttctttacttcttttgaaaatctgtttgcaaggggaaggaccatttcgtaatggtctgacacaaaagcaagtttgatttttgcagcactagcaatggactttgttgtttttctttttgatcagaacattccttctttactggtcacagccacgtgctcattccattcttctttttgtagactttgggcccacgtgttttatgggcattgatacatatataaatatatagatataaatatatatgaatatatttttttaagtttcctacacctggaggttgcatggactgtacgaccggcatgactttatattgtatacagattttgcacgccaaactcggcagctttggggaagaagaaaaatgcctttctgttcccctctcatgacatttgcagatacaaaagatggaaatttttctgtaaaacaaaaccttgaaggagaggagggcggggaagtttgcgtcttattgaacttattcttaagaaattgtactttttattgtaagaaaaataaaaaggactacttaaacatttgtcatattaagaaaaaaagtttatctagcacttgtgacataccaataatagagtttattgtatttatgtggaaacagtgttttagggaaactactcagaattcacagtgaactgcctgtctctctcgagttgatttggaggaattttgttttgttttgttttgtttgtttccttttatctccttccacgggccaggcgagcgccgcccgccctcactggccttgtgacggtttattctgattgagaactgggcggactcgaaagagtccccttttccgcacagctgtgttgactttttaattacttttaggtgatgtatggctaagatttcactttaagcagtcgtgaactgtgcgagcactgtggtttacaattatactttgcatcgaaaggaaaccatttcttcattgtaacgaagctgagcgtgttcttagctcggcctcactttgtctctggcattgattaaaagtctgctattgaaagaaaaagaaagcgaacagtttttgtttgttttttttgccgtgtgtgctccatagtggaggcgctattttccaattgatgagaatgacaaacatatataatctatctatctatctatctatctatctatctatacagggggcttgaaccttactcacccaagagcttcttacggaatgtggtagaaaaccaagttgtaacgacactgtaacctacctgatgcctgttcgcgcccgccgtgagctgcgcactggccgtggccaccattcacctctgtaatttaatccgtttctcttggattgtctggacgtgcccgatggttctttcttttgctcagtggagttggaggttttgtgtttggttttctcattcttgtcttgttttgtgtgggtggattttcaccgaccaatgatatcctcttctgacggtcaccttctttccacttcactggagtccagtattctgtaccacatcacgcaacgtgttatcttgtggtgtaaataaagactgcgttacttgccctccca

SEQ ID NO: 141045 - DNA, 445 bp, Homo sapiens
  Payload ID: 7718
  Gene Symbol: HDAC4
  Gene Name: histone deacetylase 4
  ENST ID: ENST00000445704
  CDS Start-End: 1-445
ggtggctttacctgttcccccaccctcctcatcctcctcactgtggctcggggctatatttgcagagtcaccacctccagcaggcgtggataccacactccgcgtgcagcagcgccccaggctccggacccagctcacccaacaacagctccgggagcgtcagcgcggagaacggtatcgcgcccgccgtccccagcatcccggcggagacgagtttggcgcacagacttgtggcacgagaaggctcggccgctccacttcccctctacacatcgccatccttgcccaacatcacgctgggcctgcctgccaccggcccctctgcgggcacggcgggccagcaggacgccgagagactcacccttcccgccctccagcagaggctctcccttttccccggcacccacctcactccctacctgagcacctcgcccttggagcggga

SEQ ID NO: 141046 - DNA, 554 bp, Homo sapiens
  Payload ID: 7718
  Gene Symbol: HDAC4
  Gene Name: histone deacetylase 4
  ENST ID: ENST00000446876
  CDS Start-End: 186-554
gaattcttccccagcgaggccgccgggagagcaggacttgggtttctcctgagttacggcgccgaacgccctgagaaaaacgcctttggagcagtttccgggattaagcgaaagtctgggctgaagatggactttctggccgagaccagccagtggagctgctgaatcctgcccgcgtgaaccacatgcccagcacggtggatgtggccacggcgctgcctctgcaagtggccccctcggcagtgcccatggacctgcgcctggaccaccagttctcactgcctgtggcagagccggccctgcgggagcagcagctgcagcaggagctcctggcgctcaagcagaagcagcagatccagaggcagatcctcatcgctgagttccagaggcagcacgagcagctctcccggcagcacgaggcgcagctccacgagcacatcaagcaacaacaggagatgctggccatgaagcaccagcaggagctgctggaacaccagcggaagctggagaggcaccgccaggagcaggagctggagaagcagcaccgggagcag

SEQ ID NO: 141047 - DNA, 565 bp, Homo sapiens
  Payload ID: 7718
  Gene Symbol: HDAC4
  Gene Name: histone deacetylase 4
  ENST ID: ENST00000454542
  CDS Start-End: 78-565
agttttcggcagagtcgcgtgtctgagaagtgacgctgggatgtccctgggctgtgccaggagcagtgctggctcagatggatgtggccacggcgctgcctctgcaagtggccccctcggcagtgcccatggacctgcgcctggaccaccagttctcactgcctgtggcagagccggccctgcgggagcagcagctgcagcaggagctcctggcgctcaagcagaagcagcagatccagaggcagatcctcatcgctgagttccagaggcagcacgagcagctctcccggcagcacgaggcgcagctccacgagcacatcaagcaacaacaggagatgctggccatgaagcaccagcaggagctgctggaacaccagcggaagctggagaggcaccgccaggagcaggagctggagaagcagcaccgggagcagaagctgcagcagctcaagaacaaggagaagggcaaagagagtgccgtggccagcacagaagtgaagatgaagttacaagaatttgtcctcaataaaaagaaggcgctggcccaccggaatctgaaccactg

SEQ ID NO: 141048 - DNA, 578 bp, Homo sapiens
  Payload ID: 7718
  Gene Symbol: HDAC4
  Gene Name: histone deacetylase 4
  ENST ID: ENST00000430200
  CDS Start-End: 1-527
cggcctggccatgtgtctcgacaccccagcccccagtcttcttacgatgccatgagacgcgtttctgggctgtgctggctgcggtcctcccccgttcacactgcagtctcccgtttcccgttgcaggcttcgggtacctgacgaagcagctgatgggcctggctggcggccggattgtcctggccctcgagggaggccacgacctgaccgccatttgcgacgcctcggaagcatgtgtttctgccttgctgggaaacgagcttgatcctctcccagaaaaggttttacagcaaagacccaatgcaaacgctgtccgttccatggagaaagtcatggagatccacagcaagtactggcgctgcctgcagcgcacaacctccacagcggggcgttctctgatcgaggctcagacttgcgagaacgaagaagccgagacggtcaccgccatggcctcgctgtccgtgggcgtgaagcccgccgaaaagagaccagatgaggagcccatggaagaggagccgcccctgtagcactccctcgaagctgctgttctcttgtctgtctgtctctgtcttgaagct

SEQ ID NO: 141049 - DNA, 342 bp, Homo sapiens
  Payload ID: 7718
  Gene Symbol: HDAC4
  Gene Name: histone deacetylase 4
  ENST ID: ENST00000544989
  CDS Start-End: 254-342
gacgctggagtggggagaagcatcatggttcaacgttcatctgcagaagccagcggacgcctctgttcaacttgtgggttacctggctcatgagaccttgccggcgaggctcggcgcttgaacgtctgtgacccagccctcaccgtcccggtacttgtatgtgttggtgggagtttggagctcgttggagctatcgtttccgtggaaattttgagccatttcgaatcacttaaaggagtggacattgctagcaatgagctcccaaagccatccagatggactttctggccgagaccagccagtggagctgctgaatcctgcccgcgtgaaccacatgcccag

SEQ ID NO: 141050 - DNA, 8990 bp, Homo sapiens
  Payload ID: 7718
  Gene Symbol: HDAC4
  Gene Name: histone deacetylase 4
  Uniprot ID: P56524
  ENST ID: ENST00000543185
  CDS Start-End: 1144-4062
ggaggttgtggggccgccgccgcggagcaccgtccccgccgccgcccgagcccgagcccgagcccgcgcacccgcccgcgccgccgccgccgccgcccgaacagcctcccagcctgggcccccggcggcgccgtggccgcgtcccggctgtcgccgcccgagcccgagcccgcgcgccggcgggtggcggcgcaggctgaggagatgcggcgcggagcgccggagcagggctagagccggccgccgccgcccgccgcggtaagcgcagccccggcccggcgcccgcgggccattgtccgccgcccgccccgcgccccgcgcagcctgcaggccttggagcccgcggcaggtggacgccgccggtccacacccgccccgcgcgcggccgtgggaggcgggggccagcgctggccgcgcgccgtgggacccgccggtccccagggccgcccggccccttctggacctttccacccgcgccgcgaggcggcttcgcccgccggggcgggggcgcgggggtgggcacggcaggcagcggcgccgtctcccggtgcggggcccgcgccccccgagcaggttcatctgcagaagccagcggacgcctctgttcaacttgtgggttacctggctcatgagaccttgccggcgaggctcggcgcttgaacgtctgtgacccagccctcaccgtcccggtacttgtatgtgttggtgggagtttggagctcgttggagctatcgtttccgtggaaattttgagccatttcgaatcacttaaaggagtggacattgctagcaatgagctcccaaagccatccagatggactttctggccgagaccagccagtggagctgctgaatcctgcccgcgtgaaccacatgcccagcacggtggatgtggccacggcgctgcctctgcaagtggccccctcggcagtgcccatggacctgcgcctggaccaccagttctcactgcctgtggcagagccggccctgcgggagcagcagctgcagcaggagctcctggcgctcaagcagaagcagcagatccagaggcagatcctcatcgctgagttccagaggcagcacgagcagctctcccggcagcacgaggcgcagctccacgagcacatcaagcaacaacaggagatgctggccatgaagcaccagcaggagctgctggaacaccagcggaagctggagaggcaccgccaggagcaggagctggagaagcagcaccgggagcagaagctgcagcagctcaagaacaaggagaagggcaaagagagtgccgtggccagcacagaagtgaagatgaagttacaagaatttgtcctcaataaaaagaaggcgctggcccaccggaatctgaaccactgcatttccagcgaccctcgctactggtacgggaaaacgcagcacagttcccttgaccagagttctccaccccagagcggagtgtcgacctcctataaccacccggtcctgggaatgtacgacgccaaagatgacttccctcttaggaaaacagcttctgaaccgaatctgaaattacggtccaggctaaagcagaaagtggccgaaagacggagcagccccctgttacgcaggaaagacgggccagtggtcactgctctaaaaaagcgtccgttggatgtcacagactccgcgtgcagcagcgccccaggctccggacccagctcacccaacaacagctccgggagcgtcagcgcggagaacggtatcgcgcccgccgtccccagcatcccggcggagacgagtttggcgcacagacttgtggcacgagaaggctcggccgctccacttcccctctacacatcgccatccttgcccaacatcacgctgggcctgcctgccaccggcccctctgcgggcacggcgggccagcaggacgccgagagactcacccttcccgccctccagcagaggctctcccttttccccggcacccacctcactccctacctgagcacctcgcccttggagcgggacggaggggcagcgcacagccctcttctgcagcacatggtcttactggagcagccgccggcacaagcacccctcgtcacagactggtatctttcaggcctgggagcactgcccctccacgcacagtccttggttggtgcagaccgggtgtccccctccatccacaagctgcggcagcaccgcccactggggcggacccagtcggccccgctgccccagaacgcccaggctctgcagcacctggtcatccagcagcagcatcagcagtttctggagaaacacaagcagcagttccagcagcagcaactgcagatgaacaagatcatccccaagccaagcgagccagcccggcagccggagagccacccggaggagacggaggaggagctccgtgagcaccaggctctgctggacgagccctacctggaccggctgccggggcagaaggaggcgcacgcacaggccggcgtgcaggtgaagcaggagcccattgagagcgatgaggaagaggcagagcccccacgggaggtggagccgggccagcgccagcccagtgagcaggagctgctcttcagacagcaagccctcctgctggagcagcagcggatccaccagctgaggaactaccaggcgtccatggaggccgccggcatccccgtgtccttcggcggccacaggcctctgtcccgggcgcagtcctcacccgcgtctgccaccttccccgtgtctgtgcaggagccccccaccaagccgaggttcacgacaggcctcgtgtatgacacgctgatgctgaagcaccagtgcacctgcgggagtagcagcagccaccccgagcacgccgggaggatccagagcatctggtcccgcctgcaggagacgggcctccggggcaaatgcgagtgcatccgcggacgcaaggccaccctggaggagctacagacggtgcactcggaagcccacaccctcctgtatggcacgaaccccctcaaccggcagaaactggacagtaagaaacttctaggctcgctcgcctccgtgttcgtccggctcccttgcggtggtgttggggtggacagtgacaccatatggaacgaggtgcactcggcgggggcagcccgcctggctgtgggctgcgtggtagagctggtcttcaaggtggccacaggggagctgaagaatggctttgctgtggtccgcccccctggacaccatgcggaggagagcacgcccatgggcttttgctacttcaactccgtggccgtggcagccaagcttctgcagcagaggttgagcgtgagcaagatcctcatcgtggactgggacgtgcaccatggaaacgggacccagcaggctttctacagcgaccccagcgtcctgtacatgtccctccaccgctacgacgatgggaacttcttcccaggcagcggggctcctgatgaggtgggcacagggcccggcgtgggtttcaacgtcaacatggctttcaccggcggcctggacccccccatgggagacgctgagtacttggcggccttcagaacggtggtcatgccgatcgccagcgagtttgccccggatgtggtgctggtgtcatcaggcttcgatgccgtggagggccaccccacccctcttgggggctacaacctctccgccagatgcttcgggtacctgacgaagcagctgatgggcctggctggcggccggattgtcctggccctcgagggaggccacgacctgaccgccatttgcgacgcctcggaagcatgtgtttctgccttgctgggaaacgagcttgatcctctcccagaaaaggttttacagcaaagacccaatgcaaacgctgtccgttccatggagaaagtcatggagatccacagcaagtactggcgctgcctgcagcgcacaacctccacagcggggcgttctctgatcgaggctcagacttgcgagaacgaagaagccgagacggtcaccgccatggcctcgctgtccgtgggcgtgaagcccgccgaaaagagaccagatgaggagcccatggaagaggagccgcccctgtagcactccctcgaagctgctgttctcttgtctgtctgtctctgtcttgaagctcagccaagaaactttcccgtgtcacgcctgcgtcccaccgtggggctctcttggagcacccagggacacccagcgtgcaacagccacgggaagcctttctgccgcccaggcccacaggtctcgagacgcacatgcacgcctgggcgtggcagcctcacagggaacacgggacagacgccggcgacgcgcagacacacggacacgcggaagccaagcacactctggcgggtcccgcaagggacgccgtggaagaaaggagcctgtggcaacaggcggccgagctgccgaattcagttgacacgaggcacagaaaacaaatatcaaagatctaataatacaaaacaaacttgattaaaactggtgcttaaagtttattacccacaactccacagtctctgtgtaaaccactcgactcatcttgtagcttatttttttttaaagaggacgttttctacggctgtggcccgcctctgtgaaccatagcggtgtgcggcggggggtctgcacccgggtgggggacagagggacctttaaagaaaacaaaactggacagaaacaggaatgtgagctgggggagctggcttgagtttctcaaaagccatcggaagatgcgagtttgtgcctttttttttattgctctggtggatttttgtggctgggttttctgaagtctgaggaacaatgccttaagaaaaaacaaacagcaggaatcggtgggacagtttcctgtggccagccgagcctggcagtgctggcaccgcgagctggcctgacgcctcaagcacgggcaccagccgtcatctccggggccaggggctgcagcccggcggtccctgttttgctttattgctgtttaagaaaaatggaggtagttccaaaaaagtggcaaatcccgttggaggttttgaagtccaacaaattttaaacgaatccaaagtgttctcacacgtcacatacgattgagcatctccatctggtcgtgaagcatgtggtaggcacacttgcagtgttacgatcggaatgctttttattaaaagcaagtagcatgaagtattgcttaaattttaggtataaataaatatatatatgtataatatatattccaatgtattccaagctaagaaacttacttgattcttatgaaatcttgataaaatatttataatgcatttatagaaaaagtatatatatatatataaaatgaatgcagattgcgaaggtccctgcaaatggatggcttgtgaatttgctctcaaggtgcttatggaaagggatcctgattgattgaaattcatgttttctcaagctccagattggctagatttcagatcgccaacacattcgccactgggcaactaccctacaagtttgtactttcattttaattattttctaacagaaccgctcccgtctccaagccttcatgcacatatgtacctaatgagtttttatagcaaagaatataaatttgctgttgatttttgtatgaattttttcacaaaaagatcctgaataagcattgttttatgaattttacatttttcctcaccatttagcaattttctgaatggtaataatgtctaaatctttttcctttctgaattcttgcttgtacatttttttttacctttcaaaggtttttaattatttttgtttttatttttgtacgatgagttttctgcagcgtacagaattgttgctgtcagattctattttcagaaagtgagaggagggaccgtaggtcttttcggagtgacaccaacgattgtgtctttcctggtctgtcctaggagctgtataaagaagcccaggggctctttttaactttcaacactagtagtattacgaggggtggtgtgtttttcccctccgtggcaagggcagggagggttgcttaggatgcccggccaccctgggaggcttgccagatgccgggggcagtcagcattaatgaaactcatgtttaaacttctctgaccacatcgtcaggatagaattctaacttgagttttccaaagaccttttgagcatgtcagcaatgcatggggcacacgtggggctctttacccacttgggtttttccactgcagccacgtggccagccctggattttggagcctgtggctgcaaggaacccagggacccttgttgcctggtgaacctgcagggagggtatgattgcctgaccaggacagccagtctttactctttttctcttcaacagtaactgacagtcacgttttactggtaacttattttccagcacatgaagccaccagtttcattccaaagtgtatattgggttcagacttgggggcagaagttcagacacaccgtgctcaggagggacccagagccgagtttcggagtttggtaaagtttacagggtagcttctgaaattaactcaaacttttgaccaaatgagtgcagattcttggattcacttggtcactgggctgctgatggtcagctctgagacagtggtttgagagcaggcagaacggtcttgggacttgtttgactttcccctccctggtggccactctttgctctgaagcccagattggcaagaggagctggtccattccccattcatggcacagagcagtggcagggcccagctagcaggctcttctggcctccttggcctcattctctgcatagccctctggggatcctgccacctgccctcttaccccgccgtggcttatggggaggaatgcatcatctcactttttttttttaagcagatgatgggataacatggactgctcagtggccaggttatcagtggggggacttaattctaatctcattcaaatggagacgccctctgcaaaggcctggcagggggaggcacgtttcatctgtcagctcactccagcttcacaaatgtgctgagagcattactgtgtagccttttctttgaagacacactcggctcttctccacagcaagcgtccagggcagatggcagaggatctgcctcggcgtctgcaggcgggaccacgtcagggagggttccttcatgtgttctccctgtgggtccttggacctttagcctttttcttcctttgcaaaggccttgggggcactggctgggagtcagcaagcgagcactttatatccctttgagggaaaccctgatgacgccactgggcctcttggcgtctgccctgccctcgcggcttcccgccgtgccgcagcgtgcccacgtgcccacgccccaccagcaggcggctgtcccggaggccgtggcccgctgggactggccgcccctccccagcgtcccagggctctggttctggagggccactttgtcaaggtgtttcagtttttctttacttcttttgaaaatctgtttgcaaggggaaggaccatttcgtaatggtctgacacaaaagcaagtttgatttttgcagcactagcaatggactttgttgtttttctttttgatcagaacattccttctttactggtcacagccacgtgctcattccattcttctttttgtagactttgggcccacgtgttttatgggcattgatacatatataaatatatagatataaatatatatgaatatatttttttaagtttcctacacctggaggttgcatggactgtacgaccggcatgactttatattgtatacagattttgcacgccaaactcggcagctttggggaagaagaaaaatgcctttctgttcccctctcatgacatttgcagatacaaaagatggaaatttttctgtaaaacaaaaccttgaaggagaggagggcggggaagtttgcgtcttattgaacttattcttaagaaattgtactttttattgtaagaaaaataaaaaggactacttaaacatttgtcatattaagaaaaaaagtttatctagcacttgtgacataccaataatagagtttattgtatttatgtggaaacagtgttttagggaaactactcagaattcacagtgaactgcctgtctctctcgagttgatttggaggaattttgttttgttttgttttgtttgtttccttttatctccttccacgggccaggcgagcgccgcccgccctcactggccttgtgacggtttattctgattgagaactgggcggactcgaaagagtccccttttccgcacagctgtgttgactttttaattacttttaggtgatgtatggctaagatttcactttaagcagtcgtgaactgtgcgagcactgtggtttacaattatactttgcatcgaaaggaaaccatttcttcattgtaacgaagctgagcgtgttcttagctcggcctcactttgtctctggcattgattaaaagtctgctattgaaagaaaaagaaagcgaacagtttttgtttgttttttttgccgtgtgtgctccatagtggaggcgctattttccaattgatgagaatgacaaacatatataatctatctatctatctatctatctatctatctatacagggggcttgaaccttactcacccaagagcttcttacggaatgtggtagaaaaccaagttgtaacgacactgtaacctacctgatgcctgttcgcgcccgccgtgagctgcgcactggccgtggccaccattcacctctgtaatttaatccgtttctcttggattgtctggacgtgcccgatggttctttcttttgctcagtggagttggaggttttgtgtttggttttctcattcttgtcttgttttgtgtgggtggattttcaccgaccaatgatatcctcttctgacggtcaccttctttccacttcactggagtccagtattctgtaccacatcacgcaacgtgttatcttgtggtgtaaataaagactgcgttacttgccctccc
